United States Patent Application Publication US 2018/0126003 A1 - sequence listing, part 69

SEQ ID NO: 125668 - DNA, 531 bp, Artificial Sequence
  derived and/or modified sequence
ccccgctgccccccaggcccccgggtgcccctggatgagcgggaggagatccggcaggagacccagcccatccgccacgtgtccttcagcggccgcctgcggcgcagcggcggcgtgggcagccctgcagatggcctgggccggcggctggtggccgccggccaggccgcccacggcctgcaccagcacgccgccgccggcaccggggagttccacttcaacaagtacctgtgccggcccaggagagtggagattgctgccctgctggacctgacagagcggcaggtgaaggtgtggttccagaacagaaggatgaagcacaagaggcagacccagcaccgggagcccccagatggagagcccgcctgccctggggccctggaggacatctgtgaccctgctgaggagcctgctgccagccctgggggccccctggccggcggcgtgggcagcctgctgagccctgctgggggcggggccggcggcctgaagaggggccccccagccttcagccgcagcctgcggggctag

SEQ ID NO: 125669 - DNA, 1071 bp, Artificial Sequence
  derived and/or modified sequence
atgaactttgaatttgagcgggagatcggcttcatcaacagccagcccagcctggccgagtgcctgaccagcttccctgctgtgctggagaccttccagaccagcagcatcaaggagagcaccctcatccccccacctcctccatttgagcagaccttccccagcctgcagcccggggccagcaccctgcagaggcccaggagccagaagagagcagaagatggccctgccctgcccccacctcctcctccacccctgcctgctgcccccccagcccctgagttcccctggatgaaggagaagaagagcgccaagaagcccagccagagcgccaccagccccagccctgctgccagcgctgtgcctgccagcggcgtgggcagccctgcagatggcctgggcctgcctgaggccggcggcggcggggcccggcggctgaggacagcctacaccaacacccagctgctggagctggagaaggagttccacttcaacaagtacctgtgccggccccggcgggtggagattgctgccctgctggacctgacagagcggcaggtgaaggtgtggttccagaacagaaggatgaagcacaagaggcagacccagcaccgggagcccccagatggagagcccgcctgccctggggccctggaggacatctgtgaccctgctgaggagcctgctgccagccctgggggccccagcgccagccgggccgcctgggaggcctgctgccaccccccagaggtggtgcctggggccctgtctgctgacccccggcccctggccgtgcggctggagggcgctggggccagcagccctggctgtgccctgcggggggccggcggcctggagcccggccccctgcctgaagatgtgttcagcggccggcaggacagccccttcctgcctgacctgaacttctttgctgctgacagctgcctgcagctgagcggcggcctgagccccagcctgcagggcagcctggacagccctgtgcccttcagcgaggaggagctggacttcttcaccagcaccctgtgtgccatcgacctgcagttcccctag

SEQ ID NO: 125670 - DNA, 531 bp, Artificial Sequence
  derived and/or modified sequence
ccccggtgcccccccggcccccgggtgcccctggacgagcgggaggagattcggcaggagactcagcccattcggcacgtttccttctctggcagactgcggaggtctggcggagtgggatcacccgcagacggacttggccgcaggctggtggccgcgggacaggcagcccatggtctgcatcaacacgctgctgccggcactggcgagtttcatttcaacaaatacctgtgtcgtcctcggcgcgtggaaattgccgcgctgctcgacctgactgagcgacaagtgaaagtttggtttcagaataggaggatgaagcacaagcggcagactcaacatcgtgagcctccggacggggagccagcctgccccggggcactggaggatatctgtgacccagccgaagagcccgcagctagtcctgggggccctcttgcagggggcgtgggtagcttgctctcccctgcgggcggaggggcaggtggcctcaaaagagggcctcccgcatttagccggagcttaaggggttag

SEQ ID NO: 125671 - DNA, 1071 bp, Artificial Sequence
  derived and/or modified sequence
atgaacttcgagttcgagcgggagatcggcttcatcaacagccagccaagccttgctgagtgcctgacatcatttccagcagtgctggagacattccagacctcgagtattaaggagagcacattgataccaccccccccgccatttgagcagacctttccaagcctgcagcccggtgccagtaccctgcagcggcccagatcgcagaaaagggccgaagacggacccgcactgccgccccctccaccgccacctctgccagcagcccctccagccccagaatttccttggatgaaagaaaagaaatccgctaagaagccctcccagtccgccacctcaccctctcccgctgcaagcgctgtgcctgctagcggagtgggcagtcccgccgatggcctgggtctgcctgaggccgggggaggaggtgctcgccgactgaggacagcgtacaccaatacccagctgctggagctggagaaggaattccactttaacaaatatttgtgccggccgcgacgcgtggagatcgccgcactactagacctcaccgaaagacaagtgaaagtgtggtttcaaaacagacgcatgaagcataaacgacagacccagcatcgggagccaccagacggggagcccgcatgtcctggtgccttggaggacatttgtgatccagccgaggaacccgccgcttcccctggaggtccctcggccagtagagctgcatgggaggcgtgttgccatccacccgaagtggttcctggcgctcttagcgcagatcctcgccccctagcagtccgattggaaggagctggggcatcttcgcctggatgcgcactccgcggagccgggggcctcgaacccgggccactgccagaagatgtcttcagtgggagacaagattctcccttcctgcccgacttgaacttttttgccgccgattcttgcctccagttatcaggcggtttgtctccttctctgcaaggatccctggactctcccgtgcccttttctgaggaggaattggacttcttcacgtcaactctctgcgcgattgaccttcagttcccctag

SEQ ID NO: 125672 - DNA, 531 bp, Artificial Sequence
  derived and/or modified sequence
ccgagatgcccacctggccctcgtgtgccactcgacgagagggaggagatcagacaagagacgcagccaatcagacacgtgtcattttcaggacgactgaggcgttcgggaggagtcgggagccccgctgacggccttggcagacgtttggtagccgctggacaggcggctcacgggctgcaccaacacgcagccgctggcactggtgagttccattttaacaagtatctgtgtaggccaaggcgcgtggagatcgcagcccttctggatctcaccgaacgccaggtcaaagtctggtttcaaaatagaaggatgaaacacaagaggcaaacacagcatcgtgaacccccagacggcgaacctgcgtgtcccggagctctcgaggatatttgcgatcccgcagaggagcctgctgcatctcccggaggacctcttgccggaggcgtggggagcctgctttcgcccgctggaggtggagcgggtgggcttaaacgcggaccacccgctttctctaggtcactgagaggttag

SEQ ID NO: 125673 - DNA, 1071 bp, Artificial Sequence
  derived and/or modified sequence
atgaacttcgagttcgagagggaaatcggattcatcaacagccagccgagcctcgccgagtgtctgactagtttccctgctgtgcttgagaccttccagacctctagcattaaggaaagcaccctgattcctccacctcccccttttgagcagacatttccctccctacagccgggagcctcaaccttgcagagacccagaagccagaagcgcgctgaagatggccctgctctgccaccccctccaccaccacctctccccgcagctccaccagccccagagtttccctggatgaaggaaaagaaaagcgccaaaaagccctcacaatccgccacttccccgtccccggcagctagcgccgttcccgcaagtggcgtgggcagtcctgctgatgggctgggactgcctgaggcaggagggggtggcgctcgcaggcttaggaccgcttataccaatactcagttactggagttggagaaagaattccatttcaataagtatctatgccgaccacggagagtggaaatagccgctctactggatctcaccgagcggcaggtgaaagtgtggtttcaaaaccggagaatgaagcacaaacggcagacccaacacagggagcctcctgacggagaacccgcttgcccaggtgccctcgaagacatctgcgacccggcagaggaacccgctgcctccccaggtgggccttcagcaagccgagcggcttgggaagcttgctgccaccccccagaggtagtgcccggagccttgagtgcagacccccgtcctctggctgtgagactcgagggggctggagccagctctcctggctgcgccctgagaggagccggtggactggaacccggacccttgccagaggacgtttttagcggtcgacaggactcgccatttctccctgacctgaacttcttcgccgctgattcttgtctccagttgtccggtgggctttcaccatctttacagggctctctggacagcccagtgcccttctcagaggaagagcttgatttcttcacatctacgctgtgtgccatcgatctgcagttcccctag

SEQ ID NO: 125674 - DNA, 531 bp, Artificial Sequence
  derived and/or modified sequence
cccagatgcccccccggccccagagtgcccctggacgagagagaggagatcagacaggagacccagcccatcagacacgtgagcttcagcggcagactgagaagaagcggcggcgtgggcagccccgccgacggcctgggcagaagactggtggccgccggccaggccgcccacggcctgcaccagcacgccgccgccggcaccggcgagttccacttcaacaagtacctgtgcagacccagaagagtggagatcgccgccctgctggacctgaccgagagacaggtgaaggtgtggttccagaacagaagaatgaagcacaagagacagacccagcacagagagccccccgacggcgagcccgcctgccccggcgccctggaggacatctgcgaccccgccgaggagcccgccgccagccccggcggccccctggccggcggcgtgggcagcctgctgagccccgccggcggcggcgccggcggcctgaagagaggcccccccgccttcagcagaagcctgagaggctag

SEQ ID NO: 125675 - DNA, 1071 bp, Artificial Sequence
  derived and/or modified sequence
atgaacttcgagttcgagagagagatcggcttcatcaacagccagcccagcctggccgagtgcctgaccagcttccccgccgtgctggagaccttccagaccagcagcatcaaggagagcaccctgatccccccccccccccccttcgagcagaccttccccagcctgcagcccggcgccagcaccctgcagagacccagaagccagaagagagccgaggacggccccgccctgcccccccccccccccccccccctgcccgccgccccccccgcccccgagttcccctggatgaaggagaagaagagcgccaagaagcccagccagagcgccaccagccccagccccgccgccagcgccgtgcccgccagcggcgtgggcagccccgccgacggcctgggcctgcccgaggccggcggcggcggcgccagaagactgagaaccgcctacaccaacacccagctgctggagctggagaaggagttccacttcaacaagtacctgtgcagacccagaagagtggagatcgccgccctgctggacctgaccgagagacaggtgaaggtgtggttccagaacagaagaatgaagcacaagagacagacccagcacagagagccccccgacggcgagcccgcctgccccggcgccctggaggacatctgcgaccccgccgaggagcccgccgccagccccggcggccccagcgccagcagagccgcctgggaggcctgctgccacccccccgaggtggtgcccggcgccctgagcgccgaccccagacccctggccgtgagactggagggcgccggcgccagcagccccggctgcgccctgagaggcgccggcggcctggagcccggccccctgcccgaggacgtgttcagcggcagacaggacagccccttcctgcccgacctgaacttcttcgccgccgacagctgcctgcagctgagcggcggcctgagccccagcctgcagggcagcctggacagccccgtgcccttcagcgaggaggagctggacttcttcaccagcaccctgtgcgccatcgacctgcagttcccctag

SEQ ID NO: 125676 - protein, 269 aa, Artificial Sequence
  derived and/or modified sequence
MSSYFVNSFSGRYPNGPDYQLLNYGSGSSLSGSYRDPAAMHTGSYGYNYNGMDLSVNRSSASSSHFGAVGESSRAFPAPAQEPRFRQAASSCSLSSPESLPCTNGDSHGAKPSASSPSDQATSASSSANFTEIDEASASSEPEEAASQLSSPSLARAQPEPMATSTAAPEGQTPQIFPWMRKLHISHDMTGPDGKRARTAYTRYQTLELEKEFHFNRYLTRRRRIEIAHALCLSERQIKIWFQNRRMKWKKDNKLKSMSLATAGSAFQP

SEQ ID NO: 125677 - DNA, 810 bp, Artificial Sequence
  derived and/or modified sequence
atgtcatcgtattttgtgaattccttcagcgggagataccccaatggccccgattatcagctccttaactacggatctggttctagtctgtccggaagttatagggacccagcagcaatgcatacaggttcctacggttataactacaacgggatggacctttctgtgaatcggagcagtgcttccagctcccatttcggcgctgtaggggagtcgtcgcgggcattccctgcacctgcccaggagcctcgcttccgtcaggctgctagctcttgtagtcttagctcccctgaatcgctgccctgtaccaacggggattcgcacggggcgaaaccatcagcgtcttctccttccgaccaggcgactagtgccagttctagcgctaatttcactgaaatcgacgaggcctctgcatcatcggagcctgaagaggccgcttctcaattatctagcccttccctagcccgcgctcaacctgagcccatggccacgtccaccgctgccccggagggtcagactcctcagatattcccttggatgcgaaagctccacattagccacgatatgacaggccccgatggtaagcgggcccggacggcctacactaggtaccagacactggaactggagaaagagtttcacttcaatagatatctgacccgtaggaggaggattgagattgcacacgccctgtgcctctcggaaaggcagattaagatttggtttcaaaacaggaggatgaaatggaaaaaagataataagcttaagtccatgagtctggcgactgctggcagtgcttttcagccatag

SEQ ID NO: 125678 - DNA, 2041 bp, Artificial Sequence
  derived and/or modified sequence
cattgaatcggccctaacgattctcggatcgtcattatttgtaaccatagagcatgaattacctcttgaggtcatcagcgagaatttacgactggtcaacaaaagcacgtgattccctaacgccccccaccccccttccaaccccccccccatatttggccgcatacatagcaaaacgaagtacagtgcatcgctataattcattaatacatcataaatcgtgaagcacagggttataacgaccacgatccacaaatcaagccctccaaaatcacccaaatgagctcgtactttgtaaactccttctcggggcgttatccaaatggcccggactatcagttgctaaattatggcagtggcagctctctgagcggctcttacagggatcccgctgccatgcacaccggctcttacggctacaattacaatgggatggacctcagcgtcaaccgctcctcggcctcctccagccactttggggcggtgggcgagagctcgcgcgccttccccgcgcccgcccaggagccccgcttcaggcaagcggcttcgagctgctccctgtcctcgcccgagtccctgccctgcaccaacggcgacagccacggcgccaagccctctgcttcgtccccctccgaccaggcgacctcagccagctccagcgccaatttcaccgaaatagacgaggccagcgcgtcctcggagcctgaggaagcggcaagccagctaagcagccccagcctagctcgggcgcagccagagcccatggccacctccacagccgcgcccgaggggcagactccgcaaatattcccctggatgaggaagcttcacatcagccatgatatgaccgggccggacgggaaaagggcccggaccgcgtatacccgctaccagaccctggagctggaaaaggagttccacttcaaccgctacctgacccggcgacggcgcatcgagatcgcccacgcactctgcctgtccgagcgccagatcaagatctggttccagaaccggcgcatgaagtggaagaaggacaacaaattgaaaagtatgagcctggctacagctggcagcgccttccagccctgagcccgcccagaggagcccagcggcccaagagcccgtgccacccccagccctggcccctccaatcctccccgctctgccgccgcccgctggggaccggttcccacaagcctgcctcgccttgtgttacgatatttcgtttggtcttaggtcttcctgtggctccctctctcctggactggttatcttgttattattgttaataataattattattattattttccttccatgctcccaactcccttctgcttgtcccaaatccgccagtgtttctgaatgtttgtgtctgtggttgcagtctttcccccaggaaaaaaaaaaaaagaaattcgcatgtttaatgtgaactctcccctccccatctgtgttctaacttatttataaaaagatgatcgctgtattttgagtttcagctggaaacttctgtaaggggcagcagttgaggtggggtagtgccgcagtggggtcaagctgagctggcttcggagatggagtcccttttcattctcctcctcctccctcctcactccctaggcccaagtctcctaggggcttggtcctagggtgggaaggggctagggaggaccaaagggatggtattgagaagagagaaagaagatagtgagatttaagttcctgctgcctgggtaggccccacaaggcctggtctgggagtatacggaaacaaaaatgatcctcagtgcaaaatgtcttgtgtatttctctgtgaatccatgggtctggctagagggcccaaagcttgtaaatatggggatagtctgggtcagacccatctctcccttacccatcttgcttccaagaccatttgtagtgagcgagtggatgctgtgctacgtgtgaaatctgtctttgcggggcctgtctcagtgattcgcttttggtatttgtttgtagctttcctggaagtcaaataaatgtttcccccactcca

SEQ ID NO: 125679 - DNA, 810 bp, Artificial Sequence
  derived and/or modified sequence
atgagcagctactttgtgaacagcttcagcggccgctacccaaatggaccagactaccagctgctgaactacggcagcggcagcagcctgagcggcagctacagagatcctgctgccatgcacacaggcagctatggctacaactacaacggcatggacctgtctgtgaacagaagcagcgccagcagcagccactttggagctgtgggggagagcagccgggccttccctgccccagcccaggagccccgcttccggcaggccgccagcagctgcagcctgagcagccctgagagcctgccctgcaccaacggggacagccacggggccaagcccagcgccagcagccccagcgaccaggccaccagcgccagcagcagcgccaacttcacagaaattgatgaggccagcgccagcagcgagcctgaggaggccgccagccagctgagcagccccagcctggcccgggcccagcctgagcccatggccaccagcacagctgcccctgagggccagaccccccagatcttcccctggatgaggaagctgcacatcagccatgacatgacaggcccagatggcaagagggccaggacagcctacacccgctaccagaccctggagctggagaaggagttccacttcaaccgctacctgaccaggagaagaagaattgaaattgcccacgccctgtgcctgtctgagcggcagatcaagatctggttccagaacagaaggatgaagtggaagaaggacaacaagctgaagtccatgagcctggccacagctggcagcgccttccagccctag

SEQ ID NO: 125680 - DNA, 810 bp, Artificial Sequence
  derived and/or modified sequence
atgagcagctacttcgtgaacagcttcagcggccggtaccccaacggccctgactaccagctcctgaattacggaagcggctccagcctctcgggctcctaccgtgaccctgcagccatgcacaccggctcgtatggctacaactataatggaatggaccttagcgtaaatcgatctagcgcatccagttctcactttggcgcagtgggcgagtcaagtagagcattccccgcccccgcacaagagcctagattccggcaggccgcctcatcttgtagcctgagcagtccggaatctctgccttgcactaacggtgactcacatggcgctaaaccgtcagcgagtagcccgtctgaccaggccacatccgcttcaagttctgccaactttactgagatcgacgaggcctccgccagctcagagcccgaagaggccgcttcgcagctgagctcacctagtctggcgcgcgcccaacccgagcctatggccacctccacagctgctcccgagggccagactcctcaaatctttccctggatgcgaaaattacatattagccacgatatgacagggcctgatggaaaacgcgctaggacagcgtacacgcgttatcagacactagagctagagaaggagttccacttcaaccgctacctcactcgcaggaggcggattgaaattgcgcacgcactctgtctgtctgaacggcagataaagatctggttccaaaataggagaatgaagtggaagaaagataataaactaaaatcgatgagcctggcgactgcaggctccgcctttcagccgtag

SEQ ID NO: 125681 - DNA, 810 bp, Artificial Sequence
  derived and/or modified sequence
atgtcaagttatttcgttaacagcttttcagggcgttatcctaacggccctgattaccagcttctgaattatggctccggttcgagtctatccggcagttatcgcgatccggctgccatgcacactggcagttatggatataattataatggcatggacctgagcgtgaatagaagctcggcttcctcttctcacttcggcgcagttggagaaagctcaagggcctttcccgctcctgcccaagaacccagattccgacaggccgctagctcttgctctttaagctctccagaatccttgccatgtactaacggggacagtcacggggcaaagccctctgcttcctccccttctgaccaggcaacctccgcctcttcttcggctaacttcactgagatcgatgaagcaagtgcatcctccgagcccgaagaggccgcaagccagttgagctctccaagtttggccagagcacagcctgagcctatggcaacatctaccgcggctcctgaaggccagactccacagatctttccatggatgagaaagttgcatataagccacgatatgacaggtcccgacggcaaacgagccagaacagcctacacgcggtatcaaacactcgaactagaaaaggaatttcattttaatcggtacctgacccgacgcaggcgcattgagatcgcccacgctctttgcctttcagagcggcaaattaagatctggttccaaaatcgacggatgaaatggaagaaagacaacaagcttaagagtatgagtctcgcaactgcgggaagcgccttccagccttag

SEQ ID NO: 125682 - DNA, 810 bp, Artificial Sequence
  derived and/or modified sequence
atgagcagctacttcgtgaacagcttcagcggcagataccccaacggccccgactaccagctgctgaactacggcagcggcagcagcctgagcggcagctacagagaccccgccgccatgcacaccggcagctacggctacaactacaacggcatggacctgagcgtgaacagaagcagcgccagcagcagccacttcggcgccgtgggcgagagcagcagagccttccccgcccccgcccaggagcccagattcagacaggccgccagcagctgcagcctgagcagccccgagagcctgccctgcaccaacggcgacagccacggcgccaagcccagcgccagcagccccagcgaccaggccaccagcgccagcagcagcgccaacttcaccgagatcgacgaggccagcgccagcagcgagcccgaggaggccgccagccagctgagcagccccagcctggccagagcccagcccgagcccatggccaccagcaccgccgcccccgagggccagaccccccagatcttcccctggatgagaaagctgcacatcagccacgacatgaccggccccgacggcaagagagccagaaccgcctacaccagataccagaccctggagctggagaaggagttccacttcaacagatacctgaccagaagaagaagaatcgagatcgcccacgccctgtgcctgagcgagagacagatcaagatctggttccagaacagaagaatgaagtggaagaaggacaacaagctgaagagcatgagcctggccaccgccggcagcgccttccagccctag

SEQ ID NO: 125683 - protein, 340 aa, Artificial Sequence
  derived and/or modified sequence
MSFPNSSPAANTFLVDSLISACRSDSFYSSSASMYMPPPSADMGTYGMQTCGLLPSLAKREVNHQNMGMNVHPYIPQVDSWTDPNRSCRIEQPVTQQVPTCSFTTNIKEESNCCMYSDKRNKLISAEVPSYQRLVPESCPVENPEVPVPGYFRLSQTYATGKTQEYNNSPEGSSTVMLQLNPRGAAKPQLSAAQLQMEKKMNEPVSGQEPTKVSQVESPEAKGGLPEERSCLAEVSVSSPEVQEKESKEEIKSDTPTSNWLTAKSGRKKRCPYTKHQTLELEKEFLFNMYLTRERRLEISKSVNLTDRQVKIWFQNRRMKLKKMSRENRIRELTANLTFS

SEQ ID NO: 125684 - DNA, 1814 bp, Artificial Sequence
  derived and/or modified sequence
cggggaatgttttcctagagatgtcagcctacaaaggacacaatctctcttcttcaaattcttccccaaaatgtcctttcccaacagctctcctgctgctaatacttttttagtagattccttgatcagtgcctgcaggagtgacagtttttattccagcagcgccagcatgtacatgccaccacctagcgcagacatggggacctatggaatgcaaacctgtggactgctcccgtctctggccaaaagagaagtgaaccaccaaaatatgggtatgaatgtgcatccttatatacctcaagtagacagttggacagatccgaacagatcttgtcgaatagagcaacctgttacacagcaagtccccacttgctccttcaccaccaacattaaggaagaatccaattgctgcatgtattctgataagcgcaacaaactcatttcggccgaggtcccttcgtaccagaggctggtccctgagtcttgtcccgttgagaaccctgaggttcccgtccctggatattttagactgagtcagacctacgccaccgggaaaacccaagagtacaataatagccccgaaggcagctccactgtcatgctccagctcaaccctcgtggcgcggccaagccgcagctctccgctgcccagctgcagatggaaaagaagatgaacgagcccgtgagcggccaggagcccaccaaagtctcccaggtggagagccccgaggccaaaggcggccttcccgaagagaggagctgcctggctgaggtctccgtgtccagtcccgaagtgcaggagaaggaaagcaaagaggaaatcaagtctgatacaccaaccagcaattggctcactgcaaagagtggcagaaagaagaggtgcccttacactaagcaccaaacgctggaattagaaaaagagttcttgttcaatatgtacctcacccgcgagcgccgcctagagatcagtaagagcgttaacctcaccgacaggcaggtcaagatttggtttcaaaaccgccgaatgaaactcaagaagatgagccgagagaaccggatccgagaactgaccgccaacctcacgttttcttaggtctgaggccggtctgaggccggtcagaggccaggattggagagggggcaccgcgttccagggcccagtgctggaggactgggaaagcggaaacaaaaccttcaccgctctttgtttgttgttttgttgtattttgttttcctgctagaatgtgactttggggtcattatgttcgtgctgcaagtgatctgtaatccctatgagtatatatatatatatatatatatatatataaaaacttagcacgtgtaatttattattttttcatcgtaatgcagggtaactattattgcgcattttcatttgggtcttaacttattggaactgtagagcatccatccatccatccatccagcaatgtgactttttcatgtctttcctaacacaaaaggtctatgtgtgtggttagtccatgaactcatggcattttgaatacatccagtactttaaaaatgacatatatatttaaaaaaaaaagattaagaaaacccacaagttggagggagggggacttaaaaagcacattacaatgtatcttttcacaaatgaatttagcagttgtccttggtgagatgggatattggcgatttatgccttgtagcctttcccttgtggtgcatctgtggtttggtagaagtacaacagcaacctgtcctttctgtgcatgttctggtcgcatgtataatgcaataaactctggaaatgagttcaaaaaaaaaaa

SEQ ID NO: 125685 - DNA, 1023 bp, Artificial Sequence
  derived and/or modified sequence
atgagtttcccaaattcatcgccggcagcaaacaccttcttagtggactcactgatttccgcatgtaggtcagactctttttacagctccagtgccagcatgtatatgcccccaccctctgctgatatggggacttatgggatgcagacttgcggccttctcccttctcttgcaaaaagggaggtaaaccatcagaacatgggaatgaatgttcacccatatatccctcaggttgatagttggactgaccctaaccgctcatgtcgaatcgaacagccagtgacacaacaggtacctacatgttcctttactactaatattaaagaggagtcaaactgttgtatgtacagcgataaaagaaacaagctaatctctgctgaggtcccctcgtaccagcgtctggtccccgagtcctgtcccgtggagaaccccgaggtgcctgtgcccggctactttcgactgtcacagacctatgccactggtaaaactcaagagtataacaactctccagaggggagctccaccgtgatgctccagcttaaccctaggggcgccgccaaaccacaactgtctgcagcccaattacagatggagaagaaaatgaacgagccagtctcgggccaggagcccactaaggtgtcccaggttgagtcacctgaggcaaaagggggactacccgaggaaaggagctgcctggcagaggtatctgtgtcctcacccgaggtgcaggagaaagaaagcaaggaggaaataaagagcgacacgcccaccagcaactggctaactgctaaatccggacgcaaaaaacgttgcccctacaccaaacatcagacgctcgaactggagaaagagtttctctttaatatgtacttaactcgagagagaaggttggagatatctaaaagtgtgaacctgactgatagacaggtcaagatctggtttcagaaccgacggatgaaattgaagaagatgagccgtgagaacaggatccgggaactgacagctaacttgaccttctcctag

SEQ ID NO: 125686 - DNA, 1989 bp, Artificial Sequence
  derived and/or modified sequence
ctgggccggttgtctccagcgcgcactatcgcgggcgcgtagtagatgtcgctgttgtccgtgcttacccggccggccggccaggctctggagcacgtgacccgagaggaggctgcggctcaaggccattttcaaatctcattggcttggttgtcatgtggtcggcagaggcatccacaattacacggggaatgttttcctagagatgtcagcctacaaaggacacaatctctcttcttcaaattcttccccaaaatgtcctttcccaacagctctcctgctgctaatacttttttagtagattccttgatcagtgcctgcaggagtgacagtttttattccagcagcgccagcatgtacatgccaccacctagcgcagacatggggacctatggaatgcaaacctgtggactgctcccgtctctggccaaaagagaagtgaaccaccaaaatatgggtatgaatgtgcatccttatatacctcaagtagacagttggacagatccgaacagatcttgtcgaatagagcaacctgttacacagcaagtccccacttgctccttcaccaccaacattaaggaagaatccaattgctgcatgtattctgataagcgcaacaaactcatttcggccgaggtcccttcgtaccagaggctggtccctgagtcttgtcccgttgagaaccctgaggttcccgtccctggatattttagactgagtcagacctacgccaccgggaaaacccaagagtacaataatagccccgaaggcagctccactgtcatgctccagctcaaccctcgtggcgcggccaagccgcagctctccgctgcccagctgcagatggaaaagaagatgaacgagcccgtgagcggccaggagcccaccaaagtctcccaggtggagagccccgaggccaaaggcggccttcccgaagagaggagctgcctggctgaggtctccgtgtccagtcccgaagtgcaggagaaggaaagcaaagaggaaatcaagtctgatacaccaaccagcaattggctcactgcaaagagtggcagaaagaagaggtgcccttacactaagcaccaaacgctggaattagaaaaagagttcttgttcaatatgtacctcacccgcgagcgccgcctagagatcagtaagagcgttaacctcaccgacaggcaggtcaagatttggtttcaaaaccgccgaatgaaactcaagaagatgagccgagagaaccggatccgagaactgaccgccaacctcacgttttcttaggtctgaggccggtctgaggccggtcagaggccaggattggagagggggcaccgcgttccagggcccagtgctggaggactgggaaagcggaaacaaaaccttcaccgctctttgtttgttgttttgttgtattttgttttcctgctagaatgtgactttggggtcattatgttcgtgctgcaagtgatctgtaatccctatgagtatatatatatatatatatatatatatataaaaacttagcacgtgtaatttattattttttcatcgtaatgcagggtaactattattgcgcattttcatttgggtcttaacttattggaactgtagagcatccatccatccatccatccagcaatgtgactttttcatgtctttcctaacacaaaaggtctatgtgtgtggttagtccatgaactcatggcattttgaatacatccagtactttaaaaatgacatatatatttaaaaaaaaaagattaagaaaacccacaagttggagggagggggacttaaaaagcacattacaatgtatcttttcacaaatgaatttagcagttgtccttggtgagatgggatattggcgatttatgccttgtagcctttcccttgtggtgcatctgtggtttggtagaagtacaacagcaacctgtcctttctgtgcatgttctggtcgcatgtataatgcaataaactctggaaatgagttca

SEQ ID NO: 125687 - DNA, 1023 bp, Artificial Sequence
  derived and/or modified sequence
atgtccttccccaacagcagccctgctgccaacaccttcctggtggacagcctcatcagcgcctgccgcagtgacagcttctacagcagcagcgcctccatgtacatgcccccacccagcgctgacatgggcacctacggcatgcagacctgtggcctgctgcccagcctggccaagcgggaggtgaaccaccagaacatgggcatgaatgtgcacccctacatcccccaggtggacagctggacagaccccaacagaagctgccgcatcgagcagcctgtgacccagcaggtgcccacctgcagcttcaccaccaacatcaaggaggagagcaactgctgcatgtacagcgacaagaggaacaagctgatctctgctgaggtgcccagctaccagaggctggtgcctgagagctgccctgtggagaaccctgaggtgcctgtgcccggctacttccggctgagccagacctacgccaccgggaagacccaggagtacaacaacagccctgagggcagcagcacagtgatgctgcagctgaaccccagaggagctgccaagccccagctgtctgctgcccagctgcagatggagaagaagatgaatgaacctgtgtctggccaggagcccaccaaggtgtcccaggtggagagccctgaggccaagggcggcctgcctgaggagaggagctgcctggccgaggtgtctgtgagcagccctgaggtgcaggagaaggagagcaaggaggagatcaagagtgacacccccaccagcaactggctgacagccaagagcggcaggaagaagcgctgcccctacaccaagcaccagaccctggagctggagaaggagttcctgttcaacatgtacctgacccgggagcggcggctggagatcagcaagtctgtgaacctgacagaccggcaggtgaagatctggttccagaacagaaggatgaagctgaagaagatgagcagagaaaatcgcatccgggagctgacagccaacctgaccttctcctag

SEQ ID NO: 125688 - DNA, 1023 bp, Artificial Sequence
  derived and/or modified sequence
atgagcttccccaacagcagccccgccgccaacaccttcctggtggacagcctcattagcgcctgtagaagcgactctttctactcttcttctgccagcatgtacatgcctcctccctctgccgacatgggaacgtacggaatgcaaacttgtggactgctacctagcctagcaaaacgggaggttaaccatcagaacatgggaatgaatgtgcacccatatatcccccaggtagactcatggaccgacccaaataggtcatgtagaatcgaacagcccgtaactcagcaggtgcctacatgttcctttacaacaaatataaaggaagaatccaattgctgcatgtatagcgacaaacgcaataagctgatctcagcagaggtgcctagctaccagcgcctcgtcccagagtcttgtccggtggagaatcccgaagtgccagtgccaggttatttccgcctgtctcagacctacgcgaccgggaagactcaggagtataacaattccccagagggatcaagcaccgttatgctgcagctaaatccaaggggtgcagcgaagccccagctgtccgccgcgcagttgcagatggaaaagaaaatgaacgagcccgtgtccggtcaagaacctactaaagtgagtcaagtggaatctccagaggccaaaggaggcctccctgaggagcgatcttgtttggctgaagttagtgtttcatcccctgaggttcaagaaaaggagtccaaggaagagattaagtccgataccccgactagcaattggctcacagccaagagcggcaggaaaaaaagatgcccgtacacgaagcatcagactctagaactcgaaaaagagtttctgtttaatatgtatctgacgagagagaggcgcctcgaaatcagcaagtctgtgaaccttacagataggcaggtaaagatctggtttcagaacagacgtatgaaactgaaaaagatgtcacgagaaaacaggatccgcgaactcaccgcgaatctcacattctcgtag

SEQ ID NO: 125689 - DNA, 1023 bp, Artificial Sequence
  derived and/or modified sequence
atgtcatttcctaacagcagtcccgctgcaaacactttcctggttgattctctcatcagcgcatgcaggtccgatagcttttattcatccagcgcttctatgtatatgccacccccaagtgctgacatgggtacctatgggatgcaaacatgcggacttctaccttctttggctaagcgcgaggtgaaccatcagaatatggggatgaacgtgcacccttacatcccccaggtggactcctggaccgatcccaataggtcttgcagaattgagcaaccagtgacacagcaggtgccaacatgcagcttcacgaccaatatcaaagaagagtctaattgttgcatgtattccgacaagaggaacaaactcatcagcgccgaggtgccttcttatcagcgcctggtgcctgagtcctgccccgtggagaatccagaagtgccagttcccggatatttccggctttctcaaacgtatgcaaccggaaagacacaagaatataacaactcccccgaaggatccagcacagtgatgctgcagctaaaccctagaggcgctgctaaaccacagctctcagcggcacagctgcagatggagaagaaaatgaacgagcctgtgagtgggcaggagccgactaaagtgtctcaggtggaatcacccgaggcgaaagggggactgccagaggaacggtcttgcctagccgaagttagcgtctcatctcctgaggtgcaagagaaggaaagtaaagaagagatcaaatcagacactccaacctctaactggctcacagcaaaatcaggccgtaaaaaacgctgtccctacacaaagcaccagaccttggaattggagaaggaattcttattcaatatgtacctgacaagggagagacggttggagattagcaaatcagtgaacctgactgacagacaagttaagatctggtttcagaaccgccgtatgaaactgaagaaaatgtcgagggagaaccggattcgggaacttacagccaatcttacattcagctag

SEQ ID NO: 125690 - DNA, 1023 bp, Artificial Sequence
  derived and/or modified sequence
atgagcttccccaacagcagccccgccgccaacaccttcctggtggacagcctgatcagcgcctgcagaagcgacagcttctacagcagcagcgccagcatgtacatgcccccccccagcgccgacatgggcacctacggcatgcagacctgcggcctgctgcccagcctggccaagagagaggtgaaccaccagaacatgggcatgaacgtgcacccctacatcccccaggtggacagctggaccgaccccaacagaagctgcagaatcgagcagcccgtgacccagcaggtgcccacctgcagcttcaccaccaacatcaaggaggagagcaactgctgcatgtacagcgacaagagaaacaagctgatcagcgccgaggtgcccagctaccagagactggtgcccgagagctgccccgtggagaaccccgaggtgcccgtgcccggctacttcagactgagccagacctacgccaccggcaagacccaggagtacaacaacagccccgagggcagcagcaccgtgatgctgcagctgaaccccagaggcgccgccaagccccagctgagcgccgcccagctgcagatggagaagaagatgaacgagcccgtgagcggccaggagcccaccaaggtgagccaggtggagagccccgaggccaagggcggcctgcccgaggagagaagctgcctggccgaggtgagcgtgagcagccccgaggtgcaggagaaggagagcaaggaggagatcaagagcgacacccccaccagcaactggctgaccgccaagagcggcagaaagaagagatgcccctacaccaagcaccagaccctggagctggagaaggagttcctgttcaacatgtacctgaccagagagagaagactggagatcagcaagagcgtgaacctgaccgacagacaggtgaagatctggttccagaacagaagaatgaagctgaagaagatgagcagagagaacagaatcagagagctgaccgccaacctgaccttcagctag

SEQ ID NO: 125691 - protein, 393 aa, Artificial Sequence
  derived and/or modified sequence
MTTYSDKGAKPERGRFLHFHSVTFWVGNAKQATSFYCSKMGFEPLAYRGLETGSREVVSHVIKQGKIVFVLSSALNPWNKEMGDHLVKHGDGVKDIAFEVEDCDYIVQKARERGAKIMREPWVEQDKFGKVKFAVLQTYGDTTHTLVEKMNYIGQFLPGYEAPAFMDPLLPKLPKCSLEMIDHIVGNQPDQEMVSASEWYLKNLQFHRFWSVDDTQVHTEYSSLRSIVVANYEESIKMPINEPAPGKKKSQIQEYVDYNGGAGVQHIALKTEDIITAIRHLRERGLEFLSVPSTYYKQLREKLKTAKIKVKENIDALEELKILVDYDEKGYLLQIFTKPVQDRPTLFLEVIQRHNHQGFGAGNFNSLFKAFEEEQNLRGNLTNMETNGVVPGM

SEQ ID NO: 125692 - protein, 354 aa, Artificial Sequence
  derived and/or modified sequence
MGFEPLAYRGLETGSREVVSHVIKQGKIVFVLSSALNPWNKEMGDHLVKHGDGVKDIAFEVEDCDYIVQKARERGAKIMREPWVEQDKFGKVKFAVLQTYGDTTHTLVEKMNYIGQFLPGYEAPAFMDPLLPKLPKCSLEMIDHIVGNQPDQEMVSASEWYLKNLQFHRFWSVDDTQVHTEYSSLRSIVVANYEESIKMPINEPAPGKKKSQIQEYVDYNGGAGVQHIALKTEDIITAIRHLRERGLEFLSVPSTYYKQLREKLKTAKIKVKENIDALEELKILVDYDEKGYLLQIFTKPVQDRPTLFLEVIQRHNHQGFGAGNFNSLFKAFEEEQNLRGNLTNMETNGVVPGM

SEQ ID NO: 125693 - protein, 390 aa, Artificial Sequence
  derived and/or modified sequence
YSDKGAKPERGRFLHFHSVTFWVGNAKQATSFYCSKMGFEPLAYRGLETGSREVVSHVIKQGKIVFVLSSALNPWNKEMGDHLVKHGDGVKDIAFEVEDCDYIVQKARERGAKIMREPWVEQDKFGKVKFAVLQTYGDTTHTLVEKMNYIGQFLPGYEAPAFMDPLLPKLPKCSLEMIDHIVGNQPDQEMVSASEWYLKNLQFHRFWSVDDTQVHTEYSSLRSIVVANYEESIKMPINEPAPGKKKSQIQEYVDYNGGAGVQHIALKTEDIITAIRHLRERGLEFLSVPSTYYKQLREKLKTAKIKVKENIDALEELKILVDYDEKGYLLQIFTKPVQDRPTLFLEVIQRHNHQGFGAGNFNSLFKAFEEEQNLRGNLTNMETNGVVPGM

SEQ ID NO: 125694 - DNA, 1419 bp, Artificial Sequence
  derived and/or modified sequence
ctctagtcccagtaggaggtttgactaagatcaatcatgacgacttacagtgacaaaggggcaaagcctgagagaggccgattcctccacttccactctgtgaccttctgggttggcaacgccaagcaggccacgtcattctactgcagcaagatgggctttgaacctctagcctacaggggcctggagaccggttcccgggaggtggtcagccatgtaatcaaacaagggaagattgtgtttgtcctctcctcagcgctcaacccctggaacaaagagatgggcgatcacctggtgaaacacggtgacggagtgaaggacattgcgttcgaggtggaagattgtgactacatcgtgcagaaagcacgggaacggggcgccaaaatcatgcgggagccctgggtagagcaagacaagtttgggaaggtgaagtttgctgtgctgcagacgtatggggacaccacacacaccctggtggagaagatgaactacatcggccaattcttgcctggatatgaggccccagcgttcatggaccccctacttcctaaactgcccaaatgcagtctggagatgatcgaccacattgtgggaaaccagcctgatcaggagatggtgtccgcctccgaatggtacctgaaaaacctgcagttccaccgcttctggtccgtggatgacacgcaggtgcacacggaatatagctctctgcgatccattgtggtggccaactatgaagagtccatcaagatgcccatcaatgagccagcgcctggcaagaagaagtcccagatccaggaatatgtggactataacgggggcgctggggtccagcacatcgctctcaagaccgaagacatcatcacagcgattcgccacttgagagagagaggcctggagttcttatctgttccctccacgtactacaaacaactgcgggagaagctgaagacggccaagatcaaggtgaaggagaacattgatgccctggaggagctgaaaatcctggtggactacgacgagaaaggctacctcctgcagatcttcaccaaaccggtgcaggaccggcccacgctcttcctggaagtcatccagcgccacaaccaccagggttttggagccggcaacttcaactcactgttcaaggctttcgaggaggagcagaacctgcggggtaacctcaccaacatggagaccaatggggtggtgcccggcatgtaagccccgcccaccccacggaggccacagccacacagccacgccccctgattctggaactcgcccaacttccctactggctgctccccttgggtcccgcccaccagcggactcggcccccaaggctccgcccacactgaccacgcccctcggcggggccgccctctgctccagccctcccgattaaagcgtgccccggtccaa

SEQ ID NO: 125695 - DNA, 1709 bp, Artificial Sequence
  derived and/or modified sequence
tgagcagcatagaagaaataatgccttttgagggacagttgcatttaacagacagccttactaaggcaagagttctggagccgccactgcactccagccggccttggcttctgagctttggattctgggcagtaatggtcacattcccagcgtcctggaaaagcttgcccttggcttctggccctgactctgcctcccactgactagtggacgtcactgcccctctctgggcctggcaacaccatcctgttcaatgaggctgcggctggatcagaggtccccaggcctggaaccttccagggctgggctcagctccccaccccatcccccagacgacttacagtgacaaaggggcaaagcctgagagaggccgattcctccacttccactctgtgaccttctgggttggcaacgccaagcaggccacgtcattctactgcagcaagatgggctttgaacctctagcctacaggggcctggagaccggttcccgggaggtggtcagccatgtaatcaaacaagggaagattgtgtttgtcctctcctcagcgctcaacccctggaacaaagagatgggcgatcacctggtgaaacacggtgacggagtgaaggacattgcgttcgaggtggaagattgtgactacatcgtgcagaaagcacgggaacggggcgccaaaatcatgcgggagccctgggtagagcaagacaagtttgggaaggtgaagtttgctgtgctgcagacgtatggggacaccacacacaccctggtggagaagatgaactacatcggccaattcttgcctggatatgaggccccagcgttcatggaccccctacttcctaaactgcccaaatgcagtctggagatgatcgaccacattgtgggaaaccagcctgatcaggagatggtgtccgcctccgaatggtacctgaaaaacctgcagttccaccgcttctggtccgtggatgacacgcaggtgcacacggaatatagctctctgcgatccattgtggtggccaactatgaagagtccatcaagatgcccatcaatgagccagcgcctggcaagaagaagtcccagatccaggaatatgtggactataacgggggcgctggggtccagcacatcgctctcaagaccgaagacatcatcacagcgattcgccacttgagagagagaggcctggagttcttatctgttccctccacgtactacaaacaactgcgggagaagctgaagacggccaagatcaaggtgaaggagaacattgatgccctggaggagctgaaaatcctggtggactacgacgagaaaggctacctcctgcagatcttcaccaaaccggtgcaggaccggcccacgctcttcctggaagtcatccagcgccacaaccaccagggttttggagccggcaacttcaactcactgttcaaggctttcgaggaggagcagaacctgcggggtaacctcaccaacatggagaccaatggggtggtgcccggcatgtaagccccgcccaccccacggaggccacagccacacagccacgccccctgattctggaactcgcccaacttccctactggctgctccccttgggtcccgcccaccagcggactcggcccccaaggctccgcccacactgaccacgcccctcggcggggccgccctctgctccagccctcccgattaaagcgtgccccggtc

SEQ ID NO: 125696 - DNA, 1897 bp, Artificial Sequence
  derived and/or modified sequence
acgcaattgcacaccaacgctaggggatgatctcgccccagctgactcattttctcattcgtgcagcagacatttattgagcgcctactgtatggatggatactgtacgccagagaaccgctgcgtggcgctccaattcagttcttcacatccacacagccctggaggatttacaaaatacattaagtgagcagcatagaagaaataatgccttttgagggacagttgcatttaacagacagccttactaaggcaagagttctggagccgccactgcactccagccggccttggcttctgagctttggattctgggcagtaatggtcacattcccagcgtcctggaaaagcttgcccttggcttctggccctgactctgcctcccactgactagtggacgtcactgcccctctctgggcctggcaacaccatcctgttcaatgaggctgcggctggatcagaggtccccaggcctggaaccttccagggctgggctcagctccccaccccatcccccagacgacttacagtgacaaaggggcaaagcctgagagaggccgattcctccacttccactctgtgaccttctgggttggcaacgccaagcaggccacgtcattctactgcagcaagatgggctttgaacctctagcctacaggggcctggagaccggttcccgggaggtggtcagccatgtaatcaaacaagggaagattgtgtttgtcctctcctcagcgctcaacccctggaacaaagagatgggcgatcacctggtgaaacacggtgacggagtgaaggacattgcgttcgaggtggaagattgtgactacatcgtgcagaaagcacgggaacggggcgccaaaatcatgcgggagccctgggtagagcaagacaagtttgggaaggtgaagtttgctgtgctgcagacgtatggggacaccacacacaccctggtggagaagatgaactacatcggccaattcttgcctggatatgaggccccagcgttcatggaccccctacttcctaaactgcccaaatgcagtctggagatgatcgaccacattgtgggaaaccagcctgatcaggagatggtgtccgcctccgaatggtacctgaaaaacctgcagttccaccgcttctggtccgtggatgacacgcaggtgcacacggaatatagctctctgcgatccattgtggtggccaactatgaagagtccatcaagatgcccatcaatgagccagcgcctggcaagaagaagtcccagatccaggaatatgtggactataacgggggcgctggggtccagcacatcgctctcaagaccgaagacatcatcacagcgattcgccacttgagagagagaggcctggagttcttatctgttccctccacgtactacaaacaactgcgggagaagctgaagacggccaagatcaaggtgaaggagaacattgatgccctggaggagctgaaaatcctggtggactacgacgagaaaggctacctcctgcagatcttcaccaaaccggtgcaggaccggcccacgctcttcctggaagtcatccagcgccacaaccaccagggttttggagccggcaacttcaactcactgttcaaggctttcgaggaggagcagaacctgcggggtaacctcaccaacatggagaccaatggggtggtgcccggcatgtaagccccgcccaccccacggaggccacagccacacagccacgccccctgattctggaactcgcccaacttccctactggctgctccccttgggtcccgcccaccagcggactcggcccccaaggctccgcccacactgaccacgcccctcggcggggccgccctctgctccagccctcccgattaaagcgtgccccggtcc

SEQ ID NO: 125697 - DNA, 1182 bp, Artificial Sequence
  derived and/or modified sequence
atgaccacctacagcgacaagggcgccaagcccgagagaggcagattcctgcacttccacagcgtgaccttctgggtgggcaacgccaagcaggccaccagcttctactgcagcaagatgggcttcgagcccctggcctacagaggcctggagaccggcagcagagaggtggtgagccacgtgatcaagcagggcaagatcgtgttcgtgctgagcagcgccctgaacccctggaacaaggagatgggcgaccacctggtgaagcacggcgacggcgtgaaggacatcgccttcgaggtggaggactgcgactacatcgtgcagaaggccagagagagaggcgccaagatcatgagagagccctgggtggagcaggacaagttcggcaaggtgaagttcgccgtgctgcagacctacggcgacaccacccacaccctggtggagaagatgaactacatcggccagttcctgcccggctacgaggcccccgccttcatggaccccctgctgcccaagctgcccaagtgcagcctggagatgatcgaccacatcgtgggcaaccagcccgaccaggagatggtgagcgccagcgagtggtacctgaagaacctgcagttccacagattctggagcgtggacgacacccaggtgcacaccgagtacagcagcctgagaagcatcgtggtggccaactacgaggagagcatcaagatgcccatcaacgagcccgcccccggcaagaagaagagccagatccaggagtacgtggactacaacggcggcgccggcgtgcagcacatcgccctgaagaccgaggacatcatcaccgccatcagacacctgagagagagaggcctggagttcctgagcgtgcccagcacctactacaagcagctgagagagaagctgaagaccgccaagatcaaggtgaaggagaacatcgacgccctggaggagctgaagatcctggtggactacgacgagaagggctacctgctgcagatcttcaccaagcccgtgcaggacagacccaccctgttcctggaggtgatccagagacacaaccaccagggcttcggcgccggcaacttcaacagcctgttcaaggccttcgaggaggagcagaacctgagaggcaacctgaccaacatggagaccaacggcgtggtgcccggcatgtag

SEQ ID NO: 125698 - DNA, 1173 bp, Artificial Sequence
  derived and/or modified sequence
tacagcgacaagggcgccaagcccgagagaggcagattcctgcacttccacagcgtgaccttctgggtgggcaacgccaagcaggccaccagcttctactgcagcaagatgggcttcgagcccctggcctacagaggcctggagaccggcagcagagaggtggtgagccacgtgatcaagcagggcaagatcgtgttcgtgctgagcagcgccctgaacccctggaacaaggagatgggcgaccacctggtgaagcacggcgacggcgtgaaggacatcgccttcgaggtggaggactgcgactacatcgtgcagaaggccagagagagaggcgccaagatcatgagagagccctgggtggagcaggacaagttcggcaaggtgaagttcgccgtgctgcagacctacggcgacaccacccacaccctggtggagaagatgaactacatcggccagttcctgcccggctacgaggcccccgccttcatggaccccctgctgcccaagctgcccaagtgcagcctggagatgatcgaccacatcgtgggcaaccagcccgaccaggagatggtgagcgccagcgagtggtacctgaagaacctgcagttccacagattctggagcgtggacgacacccaggtgcacaccgagtacagcagcctgagaagcatcgtggtggccaactacgaggagagcatcaagatgcccatcaacgagcccgcccccggcaagaagaagagccagatccaggagtacgtggactacaacggcggcgccggcgtgcagcacatcgccctgaagaccgaggacatcatcaccgccatcagacacctgagagagagaggcctggagttcctgagcgtgcccagcacctactacaagcagctgagagagaagctgaagaccgccaagatcaaggtgaaggagaacatcgacgccctggaggagctgaagatcctggtggactacgacgagaagggctacctgctgcagatcttcaccaagcccgtgcaggacagacccaccctgttcctggaggtgatccagagacacaaccaccagggcttcggcgccggcaacttcaacagcctgttcaaggccttcgaggaggagcagaacctgagaggcaacctgaccaacatggagaccaacggcgtggtgcccggcatgtag

SEQ ID NO: 125699 - DNA, 1325 bp, Artificial Sequence
  derived and/or modified sequence
gggaaataagagagaaaagaagagtaagaagaaatataagagccaccatgacaacatattcagataaaggggccaagccagaacggggtagattcctccactttcactcggtcacgttctgggtagggaacgccaagcaggcggcgtcattctattgcagcaaaatgggattcgaacctttggcctaccgcggtttggagactggttcgcgcgaggtagtaagccacgtgatcaagcaggggaagatcgtgtttgtgttgtcgtcggcactgaacccgtggaacaaagaaatgggcgaccacctcgtcaagcatggggacggagtgaaagacattgcctttgaggtggaggattgtgactacatcgtccagaaagcgcgagagaggggagcgaaaatcatgagggagccctgggtcgagcaggataagtttggaaaggtgaaatttgcggtcctccagacatacggagacacgacacatacgttggtggaaaagatgaattacatcggtcagtttctgccggggtacgaggcaccggccttcatggaccctctccttcctaaactgcccaaatgctcgctcgaaatgattgaccacattgtcggaaatcagcccgaccaggagatggtgtccgcgtcagagtggtatctcaagaacttgcagttccaccgcttctggtcagtcgatgatactcaagtacatactgaatactcctccttgagatcgatcgtagtcgcgaattacgaagagtccatcaagatgcccattaatgagccagcaccggggaaaaagaagtcgcaaatccaagagtacgtggactataacggaggagccggtgtgcagcatattgcgctcaaaaccgaagatatcattacggctatccgccacttgcgggaacgagggctggaatttctcagcgtcccttccacgtattacaaacagcttagagaaaaacttaagaccgcgaagattaaggtaaaggagaacatcgatgcgcttgaggagcttaagatccttgtggactatgatgagaagggctatctgttgcaaatcttcaccaagcccgtccaagataggccgaccctgttccttgaggtgattcagagacacaaccatcaggggtttggagctggaaacttcaattcgctgtttaaagcattcgaggaagaacagaatctccggggaaatcttacaaacatggaaacgaatggtgtagtccccggcatgtgataagctgccttctgcggggcttgccttctggccatgcccttcttctctcccttgcacctgtacctcttggtctttgaataaagcctgagtaggaag

SEQ ID NO: 125700 - DNA, 1182 bp, Artificial Sequence
  derived and/or modified sequence
atgacgacctacagcgacaaaggagctaagccggagcggggcagatttctccacttccattcagtgacattttgggtgggcaatgccaaacaggcaacatccttctactgctcaaagatgggtttcgagcccttggcatacagagggctggagacagggtcgcgggaggtggtgtcccacgtcatcaagcagggcaagatcgtgttcgtgctttcatcggctttaaatccatggaacaaggagatgggtgaccacctagtcaagcatggtgacggtgtcaaggacatcgccttcgaggtggaagattgtgactacattgtccaaaaagcccgcgagagaggcgctaagattatgagagagccttgggtcgagcaggacaagttcggcaaagtgaagttcgcagtccttcagacctacggcgataccactcacaccctagtggaaaaaatgaattatattggtcagtttttgccaggatacgaagccccagctttcatggatccactcctccccaaactgcccaaatgcagcctcgagatgatcgatcacattgtgggcaaccaaccagatcaggaaatggtgagcgcctccgaatggtacctcaaaaacttgcagttccatcgtttttggtcggttgatgatacccaggttcacaccgaatattcctccctgcgatcgatcgtggtagccaactatgaagaatccattaagatgccaatcaacgagcctgctcctgggaagaaaaaaagccaaattcaggagtacgtggactacaatgggggtgcgggcgtacagcacatcgccctgaaaaccgaagacattatcacagctataaggcacctccgggaaaggggcctcgaatttctctcagtgccaagcacctactacaaacagctccgcgaaaagctcaagacagccaagattaaagtgaaagagaatatcgatgctctggaagagctgaagattctcgtggattatgatgagaaggggtatctcttgcagatttttacgaagcccgtccaggaccgacccactctgttcttggaggttattcaacggcataaccaccagggttttggcgcaggcaacttcaactccctgttcaaagccttcgaagaggaacagaatcttcgagggaatctaacgaatatggagacaaatggagttgttcctggcatgtag

SEQ ID NO: 125701 - DNA, 1173 bp, Artificial Sequence
  derived and/or modified sequence
tacagtgacaaaggcgcaaaacctgaacgtggccgcttcctgcattttcattctgttaccttctgggtcggaaacgccaagcaggcaacaagcttttattgtagtaagatggggtttgagcccttagcctaccgggggctggagacagggtctagggaggtagtgtcccatgtgatcaaacaaggaaaaatcgtcttcgtgctgagttcggcactcaacccatggaacaaggagatgggtgaccaccttgtaaaacatggcgacggagtaaaggacatcgcctttgaggtcgaggactgtgactatatagtacagaaggcccgagagagaggggctaagataatgcgagaaccctgggtcgagcaggataaattcggtaaggtgaaatttgccgtcctgcagacatatggagacactactcacaccttagttgaaaaaatgaattatattggccagttcctgcccggttacgaagcccccgcctttatggatccacttttacctaaactgcccaaatgttctctggaaatgattgatcatatcgtgggcaatcagccagaccaagaaatggtgagcgcctcagaatggtacttgaagaatttgcaattccatcgcttctggtcagtggacgacacccaagtacatacagagtatagtagtctgcggtccatagtggttgccaattacgaggaatcaatcaagatgccaatcaacgagcctgccccaggcaagaagaaatcacaaatccaggagtatgtggattacaatggtggggcaggcgtgcaacacatcgccttaaagaccgaagatatcataacagccattcgccacctgcgggagaggggcctagaatttctttctgttccatctacttactataaacagttgagggaaaagctgaaaaccgcaaaaattaaagttaaagagaatatcgacgcccttgaagaactcaagatcctcgtggactatgatgagaaggggtacttactgcagatttttacgaaacccgtccaagacaggccaactctgttccttgaggtgattcagcgccacaaccaccagggatttggcgctggtaacttcaatagtctgtttaaggctttcgaggaggagcagaatttgcgcggaaatctcaccaatatggagaccaatggagtagtgccgggaatgtag

SEQ ID NO: 125702 - DNA, 1182 bp, Artificial Sequence
  derived and/or modified sequence
atgaccacctacagcgacaagggggccaagccagagcggggccgcttcctgcacttccacagcgtgaccttctgggtgggcaatgccaagcaggccaccagcttctactgcagcaagatgggctttgagcccctggcctaccggggcctggagaccggcagccgggaggtggtgagccacgtgatcaagcagggcaagatcgtgtttgtgctgagcagcgccctgaacccctggaacaaggagatgggagaccacctggtgaagcatggagatggagtgaaggacatcgcctttgaggtggaggactgtgactacatcgtgcagaaggcccgggagcggggggccaagatcatgagggagccctgggtggagcaggacaagtttgggaaggtgaagtttgctgtgctgcagacctatggagacaccacccacaccctggtggagaagatgaactacatcggccagttcctgcccggctatgaggccccagccttcatggaccccctgctgcccaagctgcccaagtgcagcctggagatgattgaccacatcgtgggcaaccagcctgaccaggagatggtgtctgccagcgagtggtacctgaagaacctgcagttccaccgcttctggagcgtggatgacacccaggtgcacacagagtacagcagcctgcggagcatcgtggtggccaactatgaggagagcatcaagatgcccatcaatgaaccagcccctgggaagaagaagagccagatccaggagtatgtggactacaatggaggagctggggtgcagcacatcgccctgaagacagaggacatcatcacagccatccgccacctgcgggagcggggcctggagttcctgtctgtgcccagcacctactacaagcagctgcgggagaagctgaagacagccaagatcaaggtgaaggagaacattgatgccctggaggagctgaagatcctggtggactatgatgagaagggctacctgctgcagatcttcaccaagcctgtgcaggaccggcccaccctcttcctggaggtgatccagaggcacaaccaccagggctttggagctggcaacttcaacagcctcttcaaggcctttgaggaggagcagaacctgcggggcaacctgaccaacatggagaccaatggagtggtgcccggcatgtag

SEQ ID NO: 125703 - DNA, 1173 bp, Artificial Sequence
  derived and/or modified sequence
tacagcgacaagggggccaagccagagcggggccgcttcctgcacttccacagcgtgaccttctgggtgggcaatgccaagcaggccaccagcttctactgcagcaagatgggctttgagcccctggcctaccggggcctggagaccggcagccgggaggtggtgagccacgtgatcaagcagggcaagatcgtgtttgtgctgagcagcgccctgaacccctggaacaaggagatgggagaccacctggtgaagcatggagatggagtgaaggacatcgcctttgaggtggaggactgtgactacatcgtgcagaaggcccgggagcggggggccaagatcatgagggagccctgggtggagcaggacaagtttgggaaggtgaagtttgctgtgctgcagacctacggggacaccacccacaccctggtggagaagatgaactacatcggccagttcctgcccggctatgaggccccagccttcatggaccccctgctgcccaagctgcccaagtgcagcctggagatgattgaccacatcgtgggcaaccagcctgaccaggagatggtgtctgccagcgagtggtacctgaagaacctgcagttccaccgcttctggagcgtggatgacacccaggtgcacacagagtacagcagcctgcggagcatcgtggtggccaactatgaggagagcatcaagatgcccatcaatgagcccgcccctgggaagaagaagagccagatccaggagtatgtggactacaacggcggggccggcgtgcagcacatcgccctgaagacagaggacatcatcacagccatccgccacctgcgggagcggggcctggagttcctgtctgtgcccagcacctactacaagcagctgcgggagaagctgaagacagccaagatcaaggtgaaggaaaatattgatgccctggaggagctgaagatcctggtggactatgatgagaagggctacctgctgcagatcttcaccaagcctgtgcaggaccggcccaccctcttcctggaggtgatccagaggcacaaccaccagggctttggagctggcaacttcaacagcctcttcaaggcctttgaggaggagcagaacctgcggggcaacctgaccaacatggagaccaacggggtggtgcccggcatgtag

SEQ ID NO: 125704 - DNA, 1182 bp, Artificial Sequence
  derived and/or modified sequence
atgaccacctacagcgacaagggcgccaagcccgagcggggccggttcctacactttcatagtgtgacattctgggtgggaaacgcaaagcaagcaacctctttttattgtagtaagatgggcttcgagcctttggcttaccggggcttggaaaccgggagccgcgaagtggtgtctcatgtgatcaagcaggggaaaattgtgttcgtgctttcttccgcattaaacccttggaataaggagatgggcgaccatctcgtcaagcacggagatggtgtgaaggacatcgcatttgaggtggaggactgtgactacattgttcaaaaagccagggaacgaggtgcgaagatcatgagagagccatgggtagagcaggataaattcggcaaggtgaagtttgctgtgctgcaaacatacggggacacaacgcataccctggtggagaaaatgaattacattggacagtttcttcctggttacgaggcacccgcatttatggaccccctccttcctaaactgcctaaatgctctctcgagatgattgaccacatcgtgggcaaccagcctgatcaggagatggtctcagcatccgagtggtatctaaaaaatctacagtttcatcgcttctggtctgtggacgatactcaggtgcacaccgaatacagttccctccggtctatcgtggtggccaactatgaagagagtatcaaaatgcctataaatgagcccgccccaggcaagaaaaaaagccagatacaagagtatgttgactataacggtggagccggcgttcaacatattgccctgaagactgaggacattattacagccatccggcatctgagggagcggggcctggaatttctgtcagtgcctagcacatactacaaacagcttagagagaaactgaagaccgcaaagattaaagtcaaagagaatattgacgcactggaggagctgaagatcctggtggactacgacgaaaaaggatacctcctgcagatctttacaaaaccagtacaggataggccaactctgtttttggaggtgatccagcggcacaaccaccagggatttggagccggtaactttaattcgctctttaaggccttcgaagaagagcaaaatctcaggggcaacttgacaaacatggagacaaacggcgtggttccaggcatgtag

SEQ ID NO: 125705 - DNA, 1173 bp, Artificial Sequence
  derived and/or modified sequence
tacagcgacaagggcgccaagcccgagcggggccggttcctgcacttccacagtgtgacattctgggtcggtaatgccaagcaggctactagcttctactgctctaaaatgggtttcgagccactggcctataggggcctggagactgggtctagagaagttgtgtctcacgtgattaaacagggcaagatcgtcttcgtcctctcctcggccttgaacccatggaataaggagatgggcgaccaccttgtaaaacacggtgacggagttaaagacatcgcgttcgaggtggaagactgcgactacattgtgcagaaggcccgcgagcgcggtgcgaaaattatgcgcgagccctgggtggagcaggacaagttcggtaaggtgaaatttgccgtgctgcaaacctatggtgacacaacccatacacttgtggaaaagatgaattatatcggccagtttctccccgggtacgaggctcctgctttcatggacccactgctccctaaactgcctaaatgctctctagaaatgatcgaccatatagttggcaaccagcctgaccaagagatggtgtctgcaagcgaatggtacttaaagaaccttcaattccacaggttttggtctgtggatgacactcaagttcacactgagtactcttccctccgttcaatcgtcgtggctaactatgaggagtctatcaagatgcccatcaatgagcccgcccctggaaaaaagaagtcccagattcaggagtatgtcgattacaatggcggggccggggtccagcatattgctttgaagaccgaagatataattacagcaatacgccacctaagagaacgtgggctcgaattcctttcagtgccctccacatattacaagcaattgagagaaaagctgaaaacagccaagataaaggtcaaggagaacattgatgctctcgaagaactcaaaattctcgtggattacgatgagaaaggctatctgctccagatttttaccaaacccgtgcaggatagaccaactctgtttttagaggtgatacagcgccacaaccatcaggggttcggcgccgggaactttaacagcctgtttaaagcttttgaggaagaacaaaatcttcgaggcaacctcaccaatatggagaccaatggcgttgttccaggaatgtag

SEQ ID NO: 125706 - DNA, 1182 bp, Artificial Sequence
  derived and/or modified sequence
atgaccacatattctgacaaaggagccaagccagagaggggacgtttcttacacttccatagcgtcactttctgggtcggcaacgcgaagcaggcgacgtcgttctattgttctaagatgggttttgaaccactggcatacagaggcctggagacaggttcgcgtgaagtggtgtcccatgtgattaagcagggtaagattgtgtttgtgctctcaagtgccttaaatccctggaacaaggagatgggtgaccatcttgtaaagcatggggatggggttaaagatatagcgttcgaagtagaggattgcgactacatagtgcagaaggctagagagcgcggagctaaaatcatgcgcgagccatgggtggagcaggacaagttcggaaaggtgaagttcgcggtgctacaaacatacggcgatacaacacacacactggtggagaaaatgaattacattggtcagtttctgcccggatacgaggccccagcttttatggaccccctactgccaaagcttccaaaatgctccctagaaatgatcgatcacattgttggcaaccagcccgaccaggagatggtcagcgcctctgagtggtatttaaagaacctccaattccatagattttggtcggtcgatgatacgcaggtgcacactgagtacagctcactccggagcattgtcgttgctaactacgaggagtctatcaagatgccgatcaacgagccagcccctggcaagaagaagagccagatccaggaatacgtagattacaacgggggtgctggtgtgcagcacattgccctcaagactgaggacatcatcactgctataaggcacctgcgggagcgaggacttgaattcctgtccgtcccgagcacctactacaaacagctcagagaaaagctgaaaacagcaaagattaaggtaaaggagaatatcgacgccctggaagagttaaagatcttggttgactatgatgaaaaggggtatctactccagattttcactaaacctgtccaggataggcctactctgtttcttgaggtcatccagcgacataatcaccaagggttcggagctggcaacttcaactccctgttcaaggccttcgaagaggaacagaacctaagaggtaatctgaccaacatggaaaccaacggggtggtaccgggaatgtag

SEQ ID NO: 125707 - DNA, 1173 bp, Artificial Sequence
  derived and/or modified sequence
tactctgataaaggggcaaaaccagagcgcggaagattcctccactttcactctgttaccttctgggtgggtaacgccaaacaagccacctctttttactgctccaagatgggtttcgaacctctagcctaccgcggtctagaaacagggtcgcgcgaagtggtgtcacatgtcattaaacagggaaagatcgtatttgtgctgagcagcgcacttaatccctggaataaagagatgggcgaccatttggtgaagcatggagacggtgtcaaagatatcgccttcgaagtggaggactgcgattatatagttcagaaggcgagagagcgcggagctaaaatcatgagggagccctgggtggagcaggacaagtttgggaaagtgaagttcgctgtactgcagacctatggcgatacaacgcatactctggttgaaaaaatgaattacatcgggcaatttctgcctggctacgaggcccctgccttcatggacccactgctccccaaactacccaagtgctctctggagatgatcgaccatattgtcggtaaccagcccgaccaggagatggtgtctgcgtctgagtggtatttaaagaatcttcagttccacagattctggtctgtcgacgatacccaggtgcacaccgaatacagttctctgagatccatcgttgtagctaactacgaagaatccataaaaatgcccatcaacgagcctgctcctggcaaaaagaagagtcagatccaggaatatgtggactataatggaggagcgggagtgcagcacatagctctgaagacggaggatattattactgcaattcgacacctcagggaacggggactggagtttctttccgttccgtccacatactataagcagctgagggagaaattgaagaccgccaagatcaaggttaaggagaacattgacgccctagaagaattgaaaatcttggtggattatgatgaaaagggctacctgcttcagatattcaccaagcccgtgcaggatcgacctactttgttcttggaggttattcaacgacacaaccaccagggatttggcgctggcaacttcaattcactgttcaaggctttcgaagaagaacagaaccttagggggaacctgacaaacatggaaaccaacggtgtagttccaggcatgtag

SEQ ID NO: 125708 - DNA, 1179 bp, Artificial Sequence
  derived and/or modified sequence
atgaccacgtactctgataagggggcaaaacctgagcgggggcggttcctccatttccactctgtgactttttgggttggtaacgcaaagcaggccgctagcttctattgttcaaaaatgggtttcgaacccctcgcctatcggggtctggaaacgggctcccgggaggttgtctcccacgtcataaagcaggggaagattgtctttgtgttatcaagcgccttaaatccttggaacaaggagatgggtgatcacctcgtaaagcacggggatggagttaaggatattgcgttcgaggtcgaagactgcgactacatcgtgcaaaaggcacgggagagaggggccaagatcatgagagagccgtgggtcgaacaggacaagtttggcaaggtgaaattcgctgtgttgcagacgtatggtgacactacccatacccttgtcgagaagatgaactatatcgggcagtttctcccaggatacgaagcacccgccttcatggacccgctgctgccaaaactgcccaagtgcagcttggagatgatcgatcacatcgtgggcaatcaaccagaccaggagatggtgagtgccagcgagtggtacttgaagaacctgcagttccataggttctggtccgtggatgacacccaggtgcatactgaatatagttctcttaggtcaatcgtggtggccaactatgaggagtccattaagatgcccatcaatgaacctgcccccggaaaaaagaagagccaaatacaagagtacgtcgactacaatggtggcgcaggagttcagcatatagcgcttaagaccgaggatatcattaccgccatccggcacctgagagaacgcggccttgaattcttatctgttccttctacctactacaaacagttacgcgagaagctcaagaccgctaaaataaaggtgaaggagaacatcgacgccctggaagaactcaagattctcgtcgattacgacgaaaaggggtaccttctgcagattttcactaagcccgttcaggatcgtcctactctgttcctcgaagtcatacagcggcataaccatcaggggtttggagctggaaacttcaacagtttattcaaagcgttcgaagaagagcaaaacctgaggggcaatcttactaacatggaaactaatggagtggtcccaggtatg

SEQ ID NO: 125709 - DNA, 1179 bp, Artificial Sequence
  derived and/or modified sequence
atgacgacttattccgataaaggcgccaaacctgagagaggtcggttcctgcactttcacagcgtgactttctgggtcgggaatgctaagcaggccgcaagcttctattgttctaaaatggggttcgaacccttggcatataggggtctggaaacaggttctcgcgaggtggtttcccacgtcattaagcaagggaaaatcgttttcgtcctgagtagcgcccttaacccctggaataaagagatgggcgatcacctggtcaagcacggagatggcgtcaaggacattgctttcgaagtggaagactgtgattacatagtacagaaggcccgcgaacgtggcgcaaaaatcatgagagagccgtgggtggaacaggacaagtttggaaaagtgaagttcgcggttctacagacctatggcgacaccacacatactctggtggagaagatgaactacattgggcagtttttgccgggatatgaggcaccggcttttatggatccattattgcccaagctgcctaaatgctcactggaaatgattgatcacattgtggggaatcaacccgatcaggagatggtgtcagcctctgaatggtacttgaagaatctccagttccataggttttggtccgtcgacgatacacaggttcacaccgagtactcctccctccggagtattgtggtggccaactacgaagaatcaatcaagatgcctatcaacgaaccagcgcccggaaaaaagaagagccagattcaggagtacgtggattacaatggaggtgcaggagtacagcacatagccctcaaaactgaggatattataaccgccatacggcacctgcgtgaacgcggcctagaatttctgtcggtgccgtctacttactataagcaacttagggagaaactgaaaacagcaaagattaaggtgaaagagaatatcgacgctttagaggagttgaagatcctggttgactacgatgagaagggctacctcttacagatattcactaagcccgtacaggatcgccccacactctttctggaggttattcaaagacataatcatcagggctttggcgcaggcaactttaatagtctgtttaaggccttcgaagaggaacagaatcttcggggcaacctgacaaatatggagactaacggcgtcgtgcccggaatg

SEQ ID NO: 125710 - DNA, 1179 bp, Artificial Sequence
  derived and/or modified sequence
atgaccacctactccgataagggcgcaaagccagagcgaggacgcttcttgcatttccattcagttactttttgggtggggaacgctaaacaggccgcttcgttctactgcagcaaaatgggcttcgaacctctggcatatcgcggccttgaaaccgggagcagagaagtggtgtcacacgtcatcaagcaaggaaagatcgtgttcgtcctcagctctgctcttaatccctggaataaggagatgggagatcacctggtcaagcacggcgacggagtgaaagatatcgctttcgaggtggaggactgcgactacattgtgcagaaagcgagagagcgcggtgccaagattatgagggagccatgggtcgaacaggacaaattcggaaaggtcaagttcgccgtgctgcagacttacggcgatactacccataccctcgtcgaaaagatgaactacatcggacaattcctgcctggatacgaggcccctgcctttatggaccctctgctgcctaagctgccgaagtgttcacttgaaatgattgatcatatcgtagggaatcagccggatcaggaaatggtgtccgcctcagaatggtacctgaaaaacctgcagttccaccggttttggagcgtggatgatacccaggtccacactgagtactcgtcgcttagaagcatcgtcgtggcaaattacgaagaatcaatcaagatgccaatcaacgagcctgctcccggtaaaaagaagtcgcagatccaggaatatgtcgattacaacggaggagcgggagtgcagcatatcgccctgaaaaccgaggacataatcacggccatccgccacctgcgggagcgggggttggaattcctgagcgtgccatccacttactacaagcagctgcgggaaaagctcaagactgccaagatcaaggtgaaagagaacattgatgccctggaagagttgaagatactggtcgattacgacgagaagggatacctgctgcagatcttcactaagcctgtgcaggacagaccaacccttttcctcgaagtgatccagcgccataatcaccagggatttggagcgggaaatttcaactcactgttcaaggcttttgaggaagaacagaatctccggggaaacctgaccaatatggaaaccaacggagtggtgccgggcatg

SEQ ID NO: 125711 - DNA, 1179 bp, Artificial Sequence
  derived and/or modified sequence
atgaccacctacagtgacaagggtgccaaaccggagagaggcaggttcctccactttcactctgtgaccttttgggtggggaacgccaagcaggctgctagcttttattgctccaagatgggatttgagccattagcgtatcgcggcctggaaaccgggagcagagaggtggtttcacacgtcatcaagcaaggcaaaatagtcttcgtcctctccagcgcacttaacccctggaacaaggaaatgggggatcacctggtgaagcatggcgacggagtcaaggatatagcctttgaggttgaagattgtgattacattgtgcagaaagcaagggagagaggcgcaaagatcatgcgggagccttgggtcgagcaggacaagttcggcaaagttaagtttgccgtccttcaaacatatggcgacacaactcacaccctggtggagaaaatgaactatatcggacaattcctacctggatatgaggcgccagccttcatggatccgctcttacccaaactgcctaagtgcagcttagaaatgatcgaccacattgtcggaaatcagcctgaccaggaaatggtttccgctagtgaatggtacctcaaaaacctgcagtttcatcgtttctggtctgtggacgatacccaagttcatacggagtatagctcattgaggagtattgtggtggccaactatgaggaaagcatcaaaatgccaatcaacgagcccgcacctggcaaaaaaaagagccagatccaggagtacgtggattacaacggaggcgcaggagtgcagcacattgctctcaagacagaagatatcataaccgcaataagacacctgagagaaaggggcctggagttcttgtctgtgcctagcacatactataagcaactcagggagaaactgaagaccgctaagatcaaggtgaaggaaaacatcgacgctttagaggaacttaaaattctcgttgactacgatgaaaagggctatttgctgcagatctttacaaagcctgtccaggatagacctacactgttccttgaagtgatccagaggcataaccaccagggatttggcgcgggcaacttcaatagcctgtttaaagccttcgaggaggagcaaaaccttcgcggaaacctgaccaacatggaaacaaacggcgtcgtgcccggcatg

SEQ ID NO: 125712 - DNA, 1179 bp, Artificial Sequence
  derived and/or modified sequence
atgaccacttattcagataaaggagcaaagccggagagagggagattcctgcacttccactcagtgaccttctgggtgggaaatgcgaagcaagccgcgtccttctattgctcaaagatgggatttgaaccgctggcctaccgcggactggagactggttcgagggaggtcgtgtcgcacgtcatcaagcagggtaagatcgtgttcgtcctcagctcggccctgaatccgtggaacaaagagatgggggatcatcttgtgaagcacggagacggagtcaaggacatcgcattcgaggtggaggactgtgactacatcgtgcagaaagcaagggagcggggtgcaaaaatcatgcgggaaccttgggtcgagcaagacaagttcggcaaggtcaagtttgcagtgttgcaaacctacggcgatactacccacacgcttgtggagaagatgaattacatcggacagttcctcccgggatacgaagcaccggccttcatggatcccctgctgccaaagctcccgaagtgcagccttgagatgatcgaccacatcgtgggaaaccaaccagatcaggagatggtgtctgcctcagaatggtacttgaaaaacctccagttccatcgcttctggtcggttgacgacacgcaagtgcacacggagtacagctcgctgcgcagcatcgtggtcgcgaattacgaggagtcaattaagatgcccatcaacgaaccggctccaggcaaaaagaagtcacagatccaggaatacgtcgactacaacggaggcgccggtgtccagcatatcgctctgaaaaccgaagatatcatcacggctatccggcatctgcgcgaaagaggtctggaattcctttcggtcccctcaacttactacaagcagctgcgagaaaaacttaagacggcaaagattaaggttaaggaaaacatcgacgctctcgaagaactcaaaattctggtggattacgatgaaaagggataccttctgcagattttcaccaaaccagttcaagatagacctaccctgttcttggaagtcatccaacgccataatcaccagggctttggagccggcaactttaactccctcttcaaggcgtttgaagaggagcaaaacctgcgcgggaacctcactaacatggaaacgaacggagtggtgccaggcatg

SEQ ID NO: 125713 - DNA, 1179 bp, Artificial Sequence
  derived and/or modified sequence
atgactacctattcggacaagggggcaaagccagaaagggggcgctttttgcattttcactccgtgactttttgggtcggtaatgcaaagcaagccgcatccttttactgctccaagatgggttttgagccccttgcgtacaggggtcttgaaactggaagccgtgaggtggtcagccacgtgattaagcagggtaagattgtgttcgtgctgagctccgcccttaacccttggaataaggagatgggcgatcacctggtgaagcatggagatggagtcaaggatattgcatttgaagtggaagattgtgattacattgtccagaaggcgcgtgaaagaggtgcgaagatcatgagagaaccttgggtggaacaagacaagtttggaaaggtcaaatttgcggtgctgcaaacctacggtgataccactcatacccttgtggaaaagatgaattacattggacagtttctgcctggctacgaagcacccgctttcatggatcccctgctgccaaagctcccgaagtgcagccttgaaatgatagatcatattgtgggaaatcaaccagatcaggaaatggtgtcagcttcggaatggtacctgaaaaacctgcaattccataggttctggagcgtggatgatactcaagtgcataccgaatactcgtcgcttcgttccatagtggtggcgaactatgaagaatcaatcaagatgccaatcaacgagccagcacccggaaagaagaagtcacagattcaagaatacgtcgactacaacggaggtgcaggagtgcaacatattgcactcaagactgaggatatcatcaccgccataaggcacttgagagaacgcggactggagttcctgtccgtgccctcgacttactacaagcagctgagagaaaaacttaaaaccgcaaagatcaaggtgaaggagaatatagatgcacttgaggaactgaagattctggttgattacgacgaaaaggggtatcttctgcaaatcttcactaaacccgtccaagatagacccaccctgtttcttgaagtgattcagcgacataatcatcaaggcttcggtgccggaaatttcaactccctgttcaaagcattcgaggaggagcagaacctccggggaaacttgaccaacatggaaactaacggtgtcgtccctgggatg

SEQ ID NO: 125714 - DNA, 1179 bp, Artificial Sequence
  derived and/or modified sequence
atgaccacgtactccgataagggagcaaaaccagagagggggcgcttccttcactttcattcagtgaccttctgggtgggaaacgcaaagcaagcagcatcgttctattgcagcaagatgggctttgaaccactcgcgtacaggggtttggagactggttcacgggaagtcgtgtcgcatgtgataaagcagggtaaaatcgtctttgtgctttcctcagcattgaacccttggaataaagagatgggtgaccacctcgtgaagcatggtgatggtgtgaaggatattgcatttgaagtcgaggactgtgattacatcgtgcagaaggcaagagagcgcggggcgaagattatgagagaaccatgggtcgagcaggacaagtttggaaaggtgaagtttgcagtccttcaaacttacggggatactactcataccctcgtggaaaagatgaactacattggtcaatttctgcccgggtacgaagcacctgcatttatggatccactgctcccgaagctgcctaagtgctctctggaaatgatagaccatattgttggtaaccagccagatcaagagatggtgtcggcttccgagtggtacttgaagaatttgcaattccatcgattttggagcgtggatgatactcaagtccataccgaatactcatcgctgagatccattgtggtggcaaactacgaagagagcatcaagatgcctataaacgaacccgctcctggaaagaagaagtcacaaatacaggaatacgtggactacaatggaggtgcaggcgtgcaacacattgcacttaaaacggaagatatcatcacggcaatacggcatcttagggagcggggactggagtttttgagcgtgccatcgacctactacaagcagctgcgggaaaaactgaaaaccgccaagatcaaggtgaaggaaaacatcgatgctctggaggaactgaagattcttgtcgactacgatgaaaagggatatctgctgcagatattcacgaaacccgtccaggatagaccaaccctgttccttgaggtcattcagaggcacaatcatcagggattcggagcaggtaacttcaactcgcttttcaaggctttcgaagaggaacaaaatcttagagggaatcttactaatatggaaaccaacggtgtagtgccaggaatg

SEQ ID NO: 125715 - DNA, 1179 bp, Artificial Sequence
  derived and/or modified sequence
atgacaacttattctgataaaggggcaaagcctgaacgcggacgcttcctccattttcactcagtcacattttgggtggggaacgccaaacaggccgctagtttctattgttccaaaatggggttcgaaccattagcctaccgcgggctcgaaacagggtcaagggaggtcgtctcccatgtaatcaaacaggggaaaatcgtatttgtccttagttctgcacttaatccttggaacaaagagatgggggatcatctcgtcaaacatggggacggagtgaaggacatagcatttgaggttgaagattgtgattacatcgttcagaaagctcgcgaacgaggggccaaaattatgcgagaaccctgggtggaacaggacaaatttgggaaggtcaaattcgccgtcctccagacgtatggggacacaacacatacattggtggaaaagatgaattatattggacagttccttccaggatatgaggctccagctttcatggatcccctactgccaaaactccccaaatgttctcttgaaatgatcgatcatatcgtggggaaccagccagatcaggaaatggtgtcagctagtgagtggtatctcaagaatctccagttccacagattctggtctgtggatgacacacaggtccatactgaatacagttccctgcggtctatcgtagtggcaaattatgaagaatccattaaaatgcctattaacgaaccagcacccggaaaaaaaaaatcccagatccaggagtatgtcgattataacggaggggcaggagtccagcacatagcacttaaaacagaagatatcatcactgcaataagacaccttagagaacgaggacttgaattcctctctgtaccctccacttattataaacaactcagggaaaaactcaaaacagccaagatcaaggttaaagagaatatagatgccctagaagaactcaaaattctagtcgactatgatgaaaaaggatatctgttacagatatttacaaaacctgtgcaagatcggcctacactttttttggaggtaatacagcgtcataaccaccagggatttggagcagggaattttaatagtctgtttaaggcttttgaagaagaacagaacctccgcggaaacctcacaaacatggaaactaatggagtcgtcccagggatg

SEQ ID NO: 125716 - DNA, 1179 bp, Artificial Sequence
  derived and/or modified sequence
atgactacgtattctgacaagggcgccaaacctgaaaggggaaggtttttgcacttccattccgtcactttttgggtgggtaatgctaagcaggcggcctcattctattgttcaaaaatgggctttgagcctctggcatacagaggtctggaaacgggaagtcgagaagtagtctctcacgtaatcaaacaggggaaaattgtgttcgtcctcagctctgctcttaatccttggaataaggaaatgggcgatcacctggtgaaacatggtgacggggtcaaggatatcgcttttgaggttgaggattgtgactatattgtgcagaaagcacgggaaaggggcgccaaaattatgcgtgaaccgtgggtcgagcaagataagttcggcaaggtgaagtttgcagtcctgcagacctacggtgacaccacccacactcttgttgaaaaaatgaactatatagggcaattcttacccggctacgaagcccccgcctttatggatcccctgcttccaaagctgcctaaatgctctcttgagatgattgaccacatagtgggtaaccagccagaccaggagatggtcagcgcgtccgaatggtaccttaagaacctccaatttcatcgattttggtctgtggacgatacacaggtgcacacagaatatagttccctgcgctcaatcgtagtggccaattacgaggagtcaattaagatgccaattaatgaaccagcaccaggaaagaaaaagtctcagattcaggaatacgtggactataatggcggagcaggagtgcagcatattgccctgaagacagaagacatcatcaccgcgatcaggcatctacgagagagaggtctggaattcttgtcagtgccatccacctattacaagcagttaagagaaaagttaaagaccgctaagattaaggtgaaggaaaatatcgatgcactggaagagctcaaaatcctagtggattatgacgaaaagggctacctcttgcagatcttcaccaagcccgttcaggatcgaccgactttattccttgaggttatccaacgccacaatcaccagggctttggagccggaaacttcaattctctgttcaaagcatttgaggaggagcagaatctccggggcaatctgacaaacatggagactaacggggtcgttcccgggatg

SEQ ID NO: 125717 - DNA, 1179 bp, Artificial Sequence
  derived and/or modified sequence
atgaccacttactcagataaaggagccaaacctgaaaggggaagattccttcactttcactcagttactttttgggtcggaaacgcgaagcaggccgcatccttttactgctctaaaatggggtttgaacctctcgcctatcgaggtcttgagactgggagtcgggaggtcgtctcacatgttatcaagcaaggcaaaattgtcttcgttctaagcagtgctctgaacccttggaataaagagatgggggatcatttggtgaagcacggtgacggggtgaaagatatcgcttttgaagtcgaagattgtgactacattgtgcagaaggcccgggagcgcggagctaagataatgcgagaaccatgggtggagcaggacaagtttggcaaagtcaagttcgcggtgttacagacttacggggatacgacccacacactggtagagaaaatgaactatatcggtcagttccttcctgggtacgaggccccggctttcatggatccgctactgcccaagctgccaaagtgtagtctggaaatgatcgatcatattgttggaaatcagccagatcaagagatggttagcgcaagtgagtggtacctcaagaacctgcagttccatcgcttctggtccgtggacgacacccaggtgcatacagagtactcttctctgaggtccatagtcgttgctaactacgaggagtctatcaaaatgcccattaacgaaccagcccccggcaagaaaaaaagccagatccaggagtacgtcgattacaacggaggcgcaggtgtccagcatattgctctgaagacagaggatattattaccgccatcaggcacctgcgagagcgtggcctcgagttcctatccgtgccatctacctactacaagcaactgagagagaagctgaagaccgcgaaaatcaaggtcaaggagaatattgatgcccttgaagagctcaagattcttgtggactatgatgagaagggctatctcctgcagatattcacaaagccggtccaggatcgccccaccctatttcttgaagtgattcagaggcacaatcaccagggcttcggagcaggcaactttaactctctcttcaaggcattcgaggaggaacagaacttgcggggcaatctgaccaacatggaaacaaatggggtggtgcccgggatg

SEQ ID NO: 125718 - DNA, 1179 bp, Artificial Sequence
  derived and/or modified sequence
atgactacttactccgacaagggcgccaagccggagcggggccggttccttcattttcacagcgtcaccttctgggtgggcaacgcaaaacaggccgcttccttctactgctccaagatgggattcgaaccgctggcgtatagaggacttgaaaccggatccagggaggtcgtgtcccacgtgatcaagcagggtaagatcgtctttgtcctcagttcagctctcaatccttggaacaaggagatgggtgaccacctggtcaagcacggcgatggtgtcaaagacatcgcctttgaagtggaagattgcgactacattgtgcagaaagcgcgcgagcgcggtgcaaagatcatgcgcgaaccgtgggtggaacaggacaaattcggaaaggtgaaattcgcggtcctccaaacctacggcgacactacccacaccttggtggaaaagatgaactacatcggccagttccttccggggtacgaggcgccggccttcatggatcccctcctgccaaagttgccaaaatgttcgctggaaatgatcgaccacatcgtgggaaaccagcccgaccaagagatggtttcagcctcagaatggtacctgaagaacctgcaattccatcgcttctggtctgtggacgatacccaagtgcatactgagtactcgagcttgagatcgatcgtggtggcaaattacgaggagtcaatcaagatgccaattaacgaaccagcccctggaaagaagaaatcgcagatccaggagtacgtggattacaatggaggggctggagtgcaacatattgcgctgaaaaccgaagatatcatcacggccatccggcacctccgggaacgaggactggaattcctgtcggtgcctagcacttactacaagcaactgcgcgaaaagctcaaaaccgccaagatcaaggttaaagaaaacattgatgccctggaggaactgaagatcctcgtcgactatgacgagaagggatacctgctgcagatattcactaagcccgtacaggatcggccgaccctgtttctggaagtgatccagagacataaccaccaaggattcggggcaggaaatttcaatagcctctttaaggcttttgaggaggaacagaacttgaggggaaatctcacgaacatggagactaacggcgtcgtgccggggatg

SEQ ID NO: 125719 - DNA, 1179 bp, Artificial Sequence
  derived and/or modified sequence
atgaccacatacagcgacaagggggctaagccggagagggggcggttccttcactttcatagcgtcacgttctgggttgggaatgccaagcaggcggcttcgttttactgcagtaagatggggtttgaacccctcgcctaccgaggcttggagacaggatcccgggaagtggtgtcacatgtgattaagcagggcaagatcgtctttgtgctttccagcgccctgaacccatggaataaagagatgggagaccacctggtgaagcacggggacggcgttaaggacatagcctttgaggttgaggactgcgactatatcgtgcaaaaggcgagggagaggggggcaaagatcatgcgggagccctgggtggagcaggacaagtttgggaaagtgaagttcgctgtgctacagacttacggcgatacaacccataccctggtagagaaaatgaactatattggacaatttttacccggatatgaagctcccgccttcatggaccccctccttcccaaacttccaaaatgctcactagagatgattgatcatattgttggtaatcagcctgaccaagagatggtatctgcaagtgaatggtatctgaaaaatctgcagttccatcggttttggtcagtcgatgacacccaggtacacaccgaatactccagtctccggagcattgtggtggccaactacgaggaatctatcaaaatgcctataaacgagccggctcctggcaaaaagaagagccaaatacaggagtacgtggactataacgggggagcgggggtacagcacattgctttaaaaaccgaggatatcatcacagccattaggcacctgcgggagagaggccttgaatttctctctgttcccagtacctactataaacaactgcgggagaaactgaaaactgccaaaattaaggtgaaggagaacatcgacgcactggaagaacttaaaatcctggttgattatgacgaaaagggctatttgcttcagatcttcactaagcccgttcaggatcgcccaacactgtttttggaggtgatccagagacataaccatcaaggctttggagctggaaattttaacagccttttcaaggcctttgaggaggagcagaacctgaggggcaacctgacgaacatggagacaaacggggtcgtgccagggatg

SEQ ID NO: 125720 - DNA, 1179 bp, Artificial Sequence
  derived and/or modified sequence
atgacaacctatagcgacaaaggcgcgaagcccgagagggggaggttcctccatttccatagcgtgacattttgggtcggtaacgcgaagcaggcggccagcttctactgttcaaagatgggtttcgagcccctggcctaccgggggctggagacaggttcaagagaagtggttagccatgtcatcaaacagggaaaaatcgtgttcgtattgagtagcgctctcaatccatggaacaaagaaatgggcgaccacctcgtcaagcacggagatggagtgaaggatatagcttttgaggttgaagattgtgattacatcgtgcagaaggcaagagaacgaggggcaaaaattatgagggaaccttgggtggagcaggataaattcggaaaggtgaagtttgcggtgctccagacatatggagatacaacccatactctggtggagaagatgaattacatcggacagtttttgcccggctacgaggcacctgccttcatggacccactgttgccaaaactgcccaaatgcagtctggagatgatcgaccatattgtgggtaaccaacctgaccaggagatggttagcgccagcgaatggtatcttaagaatctccagttccataggttttggagcgtcgacgacacacaggtgcacaccgagtattctagtctgaggtctattgttgttgccaactatgaggagagcattaaaatgcctatcaacgagccagcgcctgggaagaagaagagccaaatccaggagtacgtagactacaatggcggggccggagtccagcacatcgccctgaagaccgaagatatcatcacagcaatacgccatctgcgggagaggggtctggagtttctctccgtccccagcacatactataagcagctccgcgagaaattgaagaccgctaagatcaaagtgaaggagaacatcgacgccctggaggaattgaaaattctggtcgattacgacgaaaaggggtacttgctgcaaatatttaccaaaccagttcaggaccgcccaaccctgttcctcgaagtgattcagcggcataaccaccaagggtttggcgccggtaacttcaactcattgttcaaggccttcgaggaggagcagaatctgcgggggaatttgacgaacatggagacaaacggcgtcgtacccggtatg

SEQ ID NO: 125721 - DNA, 1179 bp, Artificial Sequence
  derived and/or modified sequence
atgaccacctactcggataagggagcaaagccagagagaggtcgctttctgcattttcactccgtcaccttttgggtcggaaatgcaaagcaggccgcatcgttctactgctcgaaaatgggctttgaacctctggcgtacaggggactggagactggcagccgggaggtcgtgtcgcacgtcattaagcaaggaaagattgtgttcgtgctttcctcggccctcaacccctggaataaggaaatgggtgaccaccttgtgaagcacggggatggggtgaaggatattgcatttgaggtggaggattgtgactacatcgtgcagaaggcgagagaacgcggggccaagattatgagagaaccttgggtggaacaagacaagtttggcaaagtgaagtttgctgtgctgcaaacttatggcgatactactcacactcttgtggagaagatgaattacatcggtcagttcctgcctggctacgaagcacccgcctttatggatccactccttcccaagctccctaaatgttccctcgaaatgatagaccatatagtgggaaaccagccagaccaggagatggtgagcgcaagcgaatggtatctgaaaaatctgcagttccaccgcttttggtccgtggacgatacccaagtgcacaccgaatactcaagcctccgatccattgtcgtggcaaactacgaagaaagcattaagatgcctatcaacgagccggccccagggaagaagaaatctcaaattcaagaatacgtggattacaacggaggcgctggggtgcaacatattgcactcaagaccgaggatatcatcaccgccattcgccacctcagggaaagaggattggaatttctgtctgtcccctcgacctactacaaacagcttagagaaaagctgaaaacggcaaagatcaaggtcaaggagaatatcgacgcactcgaagaactcaagatcctggtcgattatgatgagaagggttacctgctgcagattttcactaagcctgtccaagatcgaccaacgctgtttcttgaagtcattcagagacataaccatcaaggcttcggtgccggaaacttcaacagcctctttaaggcattcgaggaggaacagaaccttcgtggcaatctcaccaatatggaaactaacggtgtcgtgccaggaatg

SEQ ID NO: 125722 - DNA, 1179 bp, Artificial Sequence
  derived and/or modified sequence
atgactacctactcagataagggggctaagcccgaacgaggaagatttctgcattttcactccgtgaccttctgggtgggaaatgccaagcaggcagcatcgttttactgttccaagatggggtttgaacctttggcttacaggggtcttgagacgggatcgcgcgaggtggtgtcgcatgtcatcaaacaaggtaagatcgtgtttgtgttgagcagtgcacttaatccttggaacaaggaaatgggcgaccatctcgtcaaacatggcgacggtgtgaaggacattgctttcgaggtcgaagattgcgactacattgtgcagaaagcccgagaaaggggagcaaagatcatgcgcgaaccctgggtcgagcaggataagttcggtaaggtgaagtttgctgttctgcagacttacggtgacaccactcatactcttgtcgagaagatgaactacattggtcaatttcttccaggttacgaggcccctgcattcatggatcctcttcttcctaagctccctaagtgttcgcttgagatgattgaccacattgtcggcaatcagcctgatcaagaaatggtgagcgcctcggaatggtatttgaaaaatctgcagtttcatcggttttggtccgtggatgatacccaagtgcacactgaatactcatcccttagatctatcgtcgttgccaactatgaggaatccataaagatgcccattaatgaacctgcaccagggaagaagaagtcacaaatccaagaatacgttgattacaacggcggcgcaggtgtccaacacatagcgttgaaaaccgaggatatcattactgctattagacatttgcgggagagaggcctggagttcctgtcggttcccagcacttattacaagcaactccgcgaaaagctgaaaacggcgaaaatcaaggtgaaagagaacatagatgccctggaggaactgaagattctcgtcgattacgacgaaaaaggatacctcttgcaaatctttaccaagccagtgcaggatcggcccaccctcttcctcgaggtgatccagaggcacaaccaccagggttttggagcaggcaactttaactcattgtttaaggccttcgaagaagagcaaaacttgcgggggaatcttaccaacatggaaacgaatggagtggtgccagggatg

SEQ ID NO: 125723 - DNA, 1179 bp, Artificial Sequence
  derived and/or modified sequence
atgaccacctactcagacaagggcgcaaaaccagaacgcggccggttcctccacttccattcagtcaccttttgggtgggcaacgccaagcaggcggcctcgttctactgctcgaagatgggcttcgaaccactcgcctaccggggtcttgaaactggatctcgcgaagtcgtctcccatgtcatcaagcaaggaaagattgtctttgtgttgtcgagcgccctgaatccgtggaacaaagaaatgggcgatcatctggtgaagcacggcgacggagtgaaagatattgcattcgaagtggaagattgcgactatatcgtgcaaaaggcacgggagcggggtgccaagatcatgcgcgaaccctgggtcgagcaggacaaatttggaaaggtgaagttcgctgtgctgcagacttatggtgataccacccatactctggtggaaaagatgaactacattggtcagtttttgccaggatacgaagccccggccttcatggaccctctgttgccgaagctgccgaagtgctcgctggaaatgatcgaccacatcgtgggaaaccagcctgaccaggaaatggtgagcgcgtccgaatggtacctcaagaacctgcagttccaccgcttctggtcagtcgatgacacccaagtccacaccgaatacagctcgctgcggagcatcgtggtcgctaattacgaggagtcaattaagatgccgatcaacgaaccggcgccgggaaagaagaagtcccaaatccaggagtacgtcgactacaatggcggagctggcgtgcagcacatcgccctgaaaaccgaggacattatcactgcaatcaggcacctccgggagcggggactcgagttcctttcggtgccctccacctactacaaacaactcagggagaaacttaagactgctaagatcaaggtgaaggagaatatcgatgcgctggaggagctcaaaattctggtcgattacgacgaaaaaggatacctgctgcaaatctttactaagccggtgcaagatcggccaactctgttccttgaggttatccaaaggcataaccatcagggtttcggtgccggcaatttcaactcactcttcaaggcgttcgaggaagagcaaaacctgcgaggcaatcttactaatatggaaacgaacggcgtggtgccgggcatg

SEQ ID NO: 125724 - DNA, 1179 bp, Artificial Sequence
  derived and/or modified sequence
atgactacctatagcgataagggggccaagccagaacgcggccgcttcctgcacttccactctgtgacgttctgggtgggaaatgccaagcaggctgcaagtttctactgtagcaagatgggatttgaaccgctagcatatagagggttggaaaccggttcacgggaggtggtgagccatgtgatcaagcaggggaaaattgtgttcgtgcttagtagcgcattgaacccatggaataaggaaatgggcgatcaccttgtgaaacacggtgacggcgtaaaagacatcgcctttgaggtcgaggactgcgactacatagtccaaaaagcaagagagcgcggcgcaaaaatcatgcgggagccctgggtcgaacaagataagttcgggaaggtgaagttcgcagtattacagacatacggggatactacacacactctggtggagaagatgaactatatcggtcagttcctgcctggctacgaagcccctgcgtttatggatcccttgttgcctaagctgcctaagtgtagtctggagatgatagaccacatagttggaaatcagccggaccaggaaatggtttccgcgtcagagtggtacttgaaaaacctacagttccaccgcttctggtccgtggacgatacgcaagtccacacagaatactccagtctcagatctatcgtcgttgctaattacgaagagagcatcaaaatgccaatcaatgaaccagcccccggaaagaaaaagagccagatacaagaatatgttgactacaatgggggagccggagtccagcatatagctcttaagaccgaggatattatcaccgcaatcagacacctcagggaacgcggcctcgagttcttatctgtcccaagtacctactacaagcagttgcgggagaaactgaaaacagccaaaattaaggttaaagagaatatcgacgcactagaggaacttaagatcctcgttgactacgacgagaaggggtacctcctgcagatctttactaagcctgttcaagatcggccaacactctttctggaagtcatccagcgccacaatcaccagggttttggcgcaggcaacttcaattctctttttaaggctttcgaggaagagcagaatttaaggggcaatctcaccaatatggagaccaacggcgtcgtgcccgggatg

SEQ ID NO: 125725 - DNA, 1179 bp, Artificial Sequence
  derived and/or modified sequence
atgaccacttattctgataagggcgctaagccagaacgaggtcgatttcttcacttccattctgtgacgttctgggtgggcaacgccaagcaggctgcaagcttttattgcagcaaaatgggctttgaacctctggcgtatcgcggtctggaaacagggtccagggaggttgtgtcgcatgttattaagcagggcaagatcgtgttcgtgttgagtagcgccttaaacccatggaataaagagatgggcgatcacctcgtgaagcacggggacggcgtgaaagatatagcattcgaggtcgaggactgcgactatattgtgcagaaagctcgggaacgcggcgcaaaaataatgcgagagccatgggtcgaacaggacaagtttgggaaggtgaagtttgctgtcttacagacatacggtgatactactcacactctggtcgagaagatgaattacatcggtcagttcctgcccgggtacgaggctcccgcgtttatggatccgctgctgcccaagctcccgaagtgctctcttgagatgatcgaccatatagtgggaaatcagcccgaccaagagatggttagcgcgagtgaatggtatctgaagaatcttcagtttcatagattctggagcgtggatgacacgcaagtccatactgagtattcttccctgcgatccatcgtggttgcgaattatgaagaaagtattaagatgcctatcaatgagccagcgccaggcaagaaaaaatcacaaatccaagagtatgtcgactacaatgggggagcaggggtccaacatatcgcattgaagacagaggatattattaccgcgattaggcatctgcgggaaaggggactggagttcctaagcgtgcccagcacgtattacaagcaacttcgcgagaaactcaagacagctaagatcaaagtgaaggagaatatcgacgcgctggaagagctaaagatactcgtggactacgacgagaagggttatcttctccagatctttaccaaacccgtccaagataggcctacactgtttctcgaggtgatccagcgtcataaccaccagggatttggggctggaaatttcaatagcctgtttaaggcatttgaggaggagcagaatcttcgaggaaacttgaccaatatggaaacgaacggcgttgttcccggcatg

SEQ ID NO: 125726 - DNA, 1179 bp, Artificial Sequence
  derived and/or modified sequence
atgactacttattcggataagggtgcaaagcctgagagagggcgctttctgcattttcattcggtgacgttctgggtcggaaacgcgaaacaggcagcctcgttttactgtagcaaaatgggatttgaacctctcgcttaccggggacttgagacgggctcgagagaggtcgtcagccatgtgatcaagcagggaaagatagtgttcgtgctttcgagcgcgctgaacccgtggaacaaggaaatgggggatcacctcgttaagcacggcgacggagtaaaggatatcgcatttgaagttgaggactgtgactacatcgtgcagaaggcgcgtgagagaggagcaaagattatgagagagccgtgggtggagcaagataagttcggcaaggtgaaattcgcagtgctgcaaacttacggtgacaccacgcacactctggtggaaaagatgaactacattgggcaatttctccccggatacgaagcccctgcctttatggacccactgctcccaaaactcccgaagtgttcattggaaatgattgaccacattgtcggaaatcaaccagatcaagaaatggtatccgcaagcgagtggtacctgaagaacctgcagtttcatcggttttggagcgtcgatgacactcaagtgcataccgagtacagctccctgcgctcgattgttgtggcaaactacgaagaatcaataaagatgcctataaacgaaccggcgcctggaaaaaagaagtcccaaattcaagaatacgtggactacaatggaggagcaggggtgcagcatatagcacttaagaccgaggacataatcaccgcaatccgccatcttagagaacgcggtcttgaattcctgtccgtgccttctacttactacaagcaacttcgagagaaacttaagactgcaaagattaaggtcaaggagaatattgacgcgctggaagagctgaagattcttgtggattatgatgaaaaaggataccttctccaaatcttcaccaagcccgtgcaagaccgcccaactctctttcttgaagtcattcagcgccacaaccaccagggttttggtgcaggaaacttcaatagcctctttaaagcctttgaggaagagcagaatcttagaggtaacctcactaatatggaaaccaacggcgtcgtgcccggaatg

SEQ ID NO: 125727 - DNA, 1179 bp, Artificial Sequence
  derived and/or modified sequence
atgacaacctactcagataagggcgctaaacctgaacggggacgcttcctgcacttccacagtgttaccttctgggtcgggaatgccaagcaggccgcatctttctattgcagtaagatgggcttcgaaccactggcttacagaggtctagaaaccggctcaagagaagtggtgtctcacgtgatcaagcagggaaaaattgtgtttgtgcttagcagcgccttaaacccttggaataaggaaatgggcgatcacctcgtgaagcacggcgatggtgtcaaagatatcgctttcgaagtggaggattgtgactacatcgtgcagaaggcccgcgaacgcggtgcaaaaatcatgagggaaccctgggtagagcaggacaaatttggcaaagtgaaatttgccgtcctgcaaacttatggtgacaccacacacaccctggtggaaaagatgaactacatcggccagtttctccccggctacgaagcacctgccttcatggaccctctgctacctaagctccccaagtgcagcctggagatgattgatcatatagtgggaaaccaacctgaccaggaaatggtgagcgcttctgaatggtatctgaagaatctgcaattccataggttttggtctgtggacgatacccaggtgcataccgagtactcctccctgagaagtatcgtggttgctaactatgaagagtctattaagatgccgatcaatgaacccgccccgggtaaaaaaaagagccagatccaggagtacgtggattacaatgggggggctggggtgcaacacatcgcattaaagactgaagatatcattacggccatccgacatctacgcgagcgggggttggaatttcttagcgtcccatccacttactacaaacagctaagagagaaactcaagaccgctaaaatcaaggtgaaggaaaacatcgacgcactggaggaattgaagatcctggtggactatgatgaaaagggatacctgctgcagatctttaccaagcccgtgcaggatcggccaacgctcttcctcgaggtgatccaacggcacaatcaccagggattcggcgccggaaatttcaactctctgtttaaggccttcgaggaggagcagaaccttcgcgggaatctgaccaatatggaaacaaatggagtcgtgcctggtatg

SEQ ID NO: 125728 - DNA, 1179 bp, Artificial Sequence
  derived and/or modified sequence
atgaccacttacagcgataaaggagccaagcccgagagaggccgcttcttacatttccatagtgtcactttctgggtgggtaatgctaaacaggcggccagcttttactgctcgaagatgggttttgaacctctcgcctaccgtggtctagagacgggttcgcgcgaggtcgtgtcccatgtcatcaaacagggtaaaattgtgttcgtcctgagcagtgcgctgaacccatggaacaaagagatgggtgaccacctggttaaacatggtgatggtgtgaaggacatcgcgttcgaggtcgaggactgtgactatattgtccagaaggcgagggaacgcggcgcgaaaattatgcgcgaaccctgggtggaacaagacaagtttggaaaagttaagttcgctgtgctgcagacgtatggagacactacgcatactttggtcgagaagatgaactatattggacaatttctgcctggttatgaagcaccggcatttatggacccgcttctgcctaagctgccgaagtgttccttggagatgatagaccatattgtggggaatcagccagatcaagagatggttagcgcgtccgagtggtatttgaaaaacctgcagttccataggttctggagcgttgacgatacacaggtgcacacggagtattctagcctgcgctccattgtggtagccaattacgaagaaagcatcaagatgccaattaacgagcccgcaccgggtaaaaaaaaaagccagatccaggagtatgttgattacaatggtggtgccggtgtgcaacacatcgctctcaaaaccgaagatattatcacggcaatccgccatctgcgcgaacgcgggcttgagtttctgagcgtcccaagtacctattataaacagctccgcgaaaagttgaagacggcgaagattaaggtaaaggaaaatattgatgcgcttgaagagctcaaaattttagtcgactatgacgaaaaaggttacctgctgcagatctttacaaagcctgttcaggaccgcccgaccctcttcctggaggtcattcagcgccacaaccaccaagggttcggggccggaaatttcaacagtctgttcaaggctttcgaggaagaacaaaatcttcgtggcaatctgaccaacatggagaccaacggcgtggtaccaggcatg

SEQ ID NO: 125729 - DNA, 1179 bp, Artificial Sequence
  derived and/or modified sequence
atgacgacttattcagataagggagcaaagcctgaacgcggcaggttcttgcacttccatagcgtgaccttttgggtgggtaacgcgaagcaggcagcttcgttttactgctcaaaaatggggttcgagccgctcgcttaccggggcctcgagacgggatcgagagaagtcgtgagccacgtcataaagcaaggcaagattgtgttcgtcctctcgtccgccctcaacccttggaacaaagaaatgggtgatcacttggttaaacatggcgacggcgtcaaggacatagcgttcgaggtggaagattgtgattacatcgtgcagaaggcacgggaacgcggcgctaagatcatgagagaaccttgggtcgaacaggacaaattcggaaaagtgaagttcgctgtacttcagacttacggagacaccactcatactctcgtggagaaaatgaactacatcggacaattcctgccgggatacgaagccccggcgtttatggaccccctgctgccaaagctgcccaagtgttccctcgagatgatcgatcacatcgtcggaaaccagcccgatcaggagatggtgtccgcatcagaatggtacctgaagaatctgcagttccatagattttggagcgtggacgacactcaggtacacaccgagtactcctcgctgcgatcgatcgtggtggccaattacgaagagagcatcaagatgcccatcaacgagccggccccgggcaaaaagaaatcgcagatccaagaatatgtcgactacaatggtggggcgggggtgcagcacatcgcgctcaagaccgaagatatcatcaccgccatcagacacctgagagagcggggccttgaatttctgtccgtgccatcaacttactacaagcagctccgcgaaaagctgaaaaccgccaagatcaaggtgaaagagaacattgacgcccttgaggagctcaaaatcctggtggactacgatgaaaagggatacctgcttcaaatcttcacgaagcctgtgcaggaccgcccgaccctctttttggaagtgattcaaaggcataatcaccagggattcggagcgggaaacttcaactcccttttcaaggcctttgaagaggaacaaaacttgcggggcaacctcactaacatggaaactaacggggttgtgcccggcatg

SEQ ID NO: 125730 - DNA, 1179 bp, Artificial Sequence
  derived and/or modified sequence
atgaccacctactccgataagggggcgaagcctgaacgcggacggttcctccattttcattccgtcaccttttgggtggggaacgcgaagcaggcagcgtccttttactgctccaagatgggtttcgaaccacttgcatacagaggattggaaactggatcgcgcgaggtcgtgtcacatgtgatcaaacaaggaaagatagtgtttgtcctttcatcggcgcttaatccctggaacaaagaaatgggagatcacctggtcaaacacggggatggcgtgaaagacatagcttttgaagtggaggactgcgattacattgtgcaaaaagcgcgcgaacggggtgcaaagatcatgagagaaccttgggtcgaacaggataagttcggcaaggtgaaatttgccgtgctgcagacctacggcgatacgacccatacgctcgtggaaaagatgaactatattggccagtttctgcctgggtacgaagcaccagcgttcatggatcccctgcttcctaaactgcctaaatgttccctggaaatgatagatcatattgtgggaaaccaacctgatcaagaaatggtgtcggcatcggagtggtaccttaagaacctccaattccataggttttggagcgtcgacgatactcaagtgcatactgaatacagctcgctgaggagcatcgtcgtggccaactacgaggaaagcattaagatgcctattaacgagcctgcacctggaaagaaaaagtcacagatccaggaatatgtggactacaatgggggcgcaggagtgcagcatattgcgcttaagaccgaggacatcatcactgcaattagacaccttcgcgaacggggactcgagtttctttccgtgcccagcacttactacaagcagctgcgcgaaaaacttaagaccgcaaagattaaggtgaaggagaatatcgacgcacttgaagaactcaagattcttgtggactacgatgaaaagggatacctgctgcagatctttacgaaaccggtccaggacaggcctactctgtttctcgaggtgatccagcgccataaccatcaggggtttggtgcaggtaatttcaattcgctgtttaaggcctttgaagaagaacaaaacttgcgaggtaatctgactaacatggaaaccaacggagtggtgcctggcatg

SEQ ID NO: 125731 - DNA, 1179 bp, Artificial Sequence
  derived and/or modified sequence
atgactacctactctgataagggagcgaaacccgaaagagggcgctttcttcatttccattccgtgactttttgggtggggaatgccaagcaagcagcctcattctactgctcaaagatgggttttgagccgctcgcatacagaggacttgaaaccggaagccgggaggtcgtgtcgcacgtgattaagcaaggtaaaatcgtctttgtcctttcatccgcactcaatccatggaacaaagaaatgggcgatcatttggtgaagcatggggatggcgtgaaggatattgcatttgaagtggaggattgtgattacattgtgcagaaggcccgcgagcggggagcgaagatcatgagagaaccttgggtcgagcaggacaagttcggaaaggtcaaattcgcagtgctgcaaacctacggggataccactcatactctggtcgagaagatgaactacattggtcagttccttcctggatacgaagcaccagcctttatggacccacttctcccaaagttgccgaagtgctcgcttgagatgattgaccacattgtgggtaaccagccagaccaggagatggtgtccgcatcagaatggtatttgaagaatcttcaatttcatcgcttctggagcgtggatgatactcaagtgcacacggaatactcctccctccgctcaatcgtcgtggcaaactacgaggagagcattaagatgcctatcaatgagcctgcacccggtaagaagaaatcgcaaatccaggagtacgttgactacaacggtggggcaggagtccagcatatcgcacttaagaccgaagatatcataaccgcaattcggcacctgagggaacgaggtctggaatttctttcggtgccttccacttactacaagcagcttcgcgagaagctgaaaaccgccaagatcaaggtgaaggaaaacattgatgcccttgaggagcttaagattcttgtggattacgacgaaaagggctatttgctccagatctttaccaagccagtgcaggataggccaactctctttttggaagtcattcaacgtcacaaccaccaggggttcggggcgggcaactttaactcactctttaaggcgtttgaggaagaacaaaatcttagaggtaatcttaccaacatggagactaacggtgttgtgccaggtatg

SEQ ID NO: 125732 - DNA, 1179 bp, Artificial Sequence
  derived and/or modified sequence
atgaccacatatagcgataagggggctaaacccgagagaggaaggttcctacattttcattcagtgaccttctgggtcggtaacgctaagcaagccgcctccttttactgctccaagatgggtttcgaaccactggcctatagaggacttgagaccggcagtcgagaagtggtctcacacgtgatcaaacagggcaagatcgtgttcgtgctctcctcagctcttaatccatggaacaaagagatgggcgatcatctggtgaaacacggtgacggggtaaaagacattgccttcgaggtggaagattgtgactacattgtgcagaaggcccgggaaaggggcgcaaagatcatgcgggagccttgggttgagcaggataagttcgggaaggtcaagttcgccgtcctgcagacttacggtgatacaactcacactttggtcgaaaagatgaattacatcgggcagttcctgccaggctacgaagccccagccttcatggacccactcttaccaaaacttcccaagtgcagtctggaaatgattgaccacatcgtcggcaaccagcctgatcaagaaatggtttcagcctccgagtggtacctaaaaaacctgcaatttcacaggttttggtctgtggacgatacacaagtccacactgaatattcttccctgcggagcatcgtagtcgctaactatgaggagtctattaaaatgcctataaacgaaccagcaccgggcaagaagaaatcacaaattcaggaatacgtcgactataacgggggggctggcgtccaacatatagccctaaagacggaggatattatcaccgccatccggcacctgagagagagaggtttagagtttctgtctgtgcccagcacatattataagcagctaagggagaagcttaaaaccgcaaagataaaagtgaaagaaaacatagacgcactagaagagctcaagatccttgtggattacgacgaaaagggctatctgctgcagatcttcacaaagcccgtgcaagacaggccaaccctgtttcttgaggtgattcagaggcacaaccatcagggatttggggctgggaacttcaattcgcttttcaaggcattcgaggaggaacaaaatcttcgggggaatcttaccaatatggagaccaacggggtggtgcctggtatg

SEQ ID NO: 125733 - DNA, 1179 bp, Artificial Sequence
  derived and/or modified sequence
atgacaacatacagtgataaaggagctaagcccgaaagagggagattcctgcactttcattcagtgactttctgggttgggaacgcaaaacaggccgcttctttctattgtagtaagatgggattcgaacctctcgcgtacaggggacttgaaactggatcaagggaagtggtgtcacatgtgatcaagcagggaaaaatagtgttcgtgttgtcatctgctctcaacccttggaataaagaaatgggggatcatcttgtcaaacatggggatggggtgaaagacatagccttcgaagtggaagattgtgattatattgtgcagaaagccagggaaaggggggcaaaaattatgcgggaaccatgggtcgaacaagataaatttggaaaagtcaaattcgcagtgctacagacttatggagatacaactcacactctcgtggaaaaaatgaattatatagggcagttccttccagggtatgaagctccagcattcatggatcccctgctgccaaagctgcctaagtgttctttagaaatgatcgatcacatcgtggggaaccagccagatcaggagatggtgtctgcatctgaatggtatctcaagaaccttcagttccatagattctggtccgtggacgacacacaggtgcatactgagtattcatctctaaggagtatcgtcgtggccaactatgaagaatctatcaaaatgcctattaacgaacctgcgccagggaaaaaaaaatcccagattcaggaatatgtcgattacaacgggggggcaggggtccaacacatcgctcttaagacagaagatataatcacagctatccgccatttaagagagcgaggactggaatttctctctgtgccatccacatattataaacagcttagggaaaaactcaaaactgccaagatcaaagtgaaagaaaatatcgacgctctagaagaactcaaaatcctcgttgattatgatgaaaaaggatatttattgcaaatattcactaaaccagtgcaagatcggccaacactattcctggaagtgatccagcggcataatcatcaggggtttggagctggaaatttcaactccctctttaaagcctttgaagaggaacagaatctcagggggaatctgactaatatggagactaacggagttgtgcccggaatg

SEQ ID NO: 125734 - DNA, 1179 bp, Artificial Sequence
  derived and/or modified sequence
atgactacttattcggataagggagctaagcccgagcggggacgcttcctacacttccattctgtgacattctgggtgggcaacgcaaaacaggcagccagtttttattgtagcaaaatggggtttgaacccctggcataccgcggccttgagaccgggtcccgggaggtggtctctcatgttataaagcaaggcaaaatagtgtttgtgctatcctccgccctgaacccctggaataaggagatgggtgatcacttggtaaagcacggcgatggcgtgaaagatatcgcatttgaggtcgaggactgtgactacatcgtacaaaaagctcgagagaggggcgccaaaattatgagggaaccatgggtagaacaagacaagttcggcaaggtcaaattcgccgtgctgcagacttatggagacactactcacactttggtagaaaagatgaattatatcggtcagttcctgcctggctatgaggctcctgcttttatggatccgctcttgcctaagctcccgaagtgtagtcttgaaatgatcgaccatattgtcggaaaccagcctgaccaggaaatggtgtcggcatccgaatggtacctcaagaacctccagttccataggttttggtctgtggatgacacgcaggtccacacagagtactcaagtcttcgcagcatagtggtggccaactacgaagagtccatcaagatgcctataaacgagccggctccaggcaagaaaaagtctcagattcaagaatacgtggactacaacggtggggcaggtgtgcagcacattgccttgaaaaccgaggacattatcactgcaatccgacacctgagagagagggggctggagttcctcagcgtgccgtctacatactataaacagctcagggagaagctaaagacagcgaaaattaaagtgaaagaaaacattgatgcattggaagagctgaagattctcgtggactacgacgagaagggatacctgctgcagatcttcacaaagcccgtgcaggacagaccaactctattcctagaggtgatccagcgccacaatcaccagggttttggcgcgggtaactttaatagcttattcaaagcatttgaagaagaacaaaaccttaggggcaatctcaccaacatggagaccaatggtgttgtgccaggaatg

SEQ ID NO: 125735 - DNA, 1179 bp, Artificial Sequence
  derived and/or modified sequence
atgaccacctactccgataaaggcgctaagcctgagcgcggtaggtttttgcacttccacagcgttaccttctgggtgggaaacgccaagcaagcggcctccttctactgctcaaagatgggctttgagcctttggcctacagaggtctggaaaccggatcacgcgaagtcgtcagccacgttatcaagcaaggaaaaatcgtgtttgtgttgtcgtccgcactgaacccgtggaacaaggagatgggcgatcacctggtgaagcatggagatggagtcaaggacatcgcgtttgaggtcgaagattgtgattacattgtgcagaaagcccgagaaagaggagcaaagatcatgagggaaccgtgggtggaacaagacaagtttggaaaggtcaagtttgctgtgctgcagacctacggggatactactcatactttggtcgaaaagatgaattacattggccagttcctgccaggatatgaggcgcccgcttttatggacccgttgctcccaaaactgccgaagtgctcgctggaaatgatcgaccatatcgtgggaaatcagccagaccaggaaatggtgtccgcttccgaatggtatctgaaaaatctccaattccaccgattctggagcgtggacgatacccaggtgcacaccgaatactcgtcactcaggtccatcgtggtggctaactacgaagaatctatcaagatgccaattaacgagccggcgcccgggaaaaagaagtcccagatacaagaatacgtcgattacaacgggggagccggcgtgcagcacatcgcgctgaaaactgaggacatcatcaccgccatccgccacctgcgcgaaaggggactggagttcctctcagtcccatcaacttactacaaacaactgcgggagaagctcaagaccgcgaagatcaaagtgaaagagaatattgacgccctcgaggagctgaaaattctcgtggactacgacgaaaagggttaccttctccagatcttcactaaaccggtgcaagatcgtccaaccctcttcctcgaggtgatccagcgccataatcatcagggcttcggagcagggaactttaactcgttgttcaaagccttcgaagaagagcaaaatcttcgcggaaacctcactaacatggaaacgaacggagtggtcccagggatg

SEQ ID NO: 125736 - DNA, 1179 bp, Artificial Sequence
  derived and/or modified sequence
atgactacctattccgacaaaggtgcaaaacctgaacgaggaagattcttgcactttcacagcgtgactttttgggtcgggaatgctaagcaggctgcttctttctactgttctaaaatgggattcgaacccctggcatatcgcggattggaaacaggaagtagggaagtagtcagtcacgtgatcaagcaaggcaaaatcgtctttgttctttcatccgctctgaacccttggaacaaggagatgggggaccatcttgtgaagcatggagatggagtgaaggatattgcttttgaagtcgaggattgtgattatattgtgcaaaaggcacgcgaacgcggtgccaagataatgagagagccctgggtcgaacaagataagttcggcaaagttaaattcgccgtgctccagacctacggcgataccacacatacactggtagagaaaatgaattacataggacagtttctgcctggatacgaggccccggcgtttatggatcctctcctccctaagctccctaagtgttccctcgaaatgatcgatcatatagttgggaaccaacccgaccaggaaatggtgagcgcttctgaatggtacctcaaaaacctccagtttcacaggttttggtctgttgacgatacccaggttcatactgagtactcgagcctgaggtcaatcgtcgtcgctaactatgaggagtctatcaaaatgcctatcaatgagcctgctcccggcaaaaaaaagagccagattcaggaatacgtcgactacaatggaggagcaggagtgcaacacatcgcactcaaaactgaggatattatcaccgcgattcgtcatctgagagagagaggcctggagttcctgtcagtgcctagcacttactataagcagctgagagaaaagctcaagaccgctaagattaaagtcaaagagaacattgatgctctggaggagctcaagattttggtggattacgatgaaaagggatatcttctgcaaatattcaccaagcctgtgcaggataggcctactcttttcctggaggttatccagagacacaaccaccaggggtttggcgccggcaacttcaactctcttttcaaagcattcgaggaggaacaaaacctccgaggtaatctcacgaatatggagacaaatggagtggtgccaggcatg

SEQ ID NO: 125737 - DNA, 1179 bp, Artificial Sequence
  derived and/or modified sequence
atgactacttactccgacaagggtgccaaaccagaacgcggacgcttcctgcacttccattcagtgaccttctgggtcggaaacgccaagcaagcagcctccttctactgctctaagatgggtttcgagccattggcctaccgcgggttggaaactggctcgcgagaggtggtgagccacgtcatcaagcagggcaaaatagtgtttgtcctcagctccgctttgaacccgtggaacaaggagatgggcgaccatttggtgaagcatggggatggcgtgaaggacattgcattcgaagttgaggactgcgattacatagtgcaaaaggcgcgcgagaggggcgctaagattatgcgagagccttgggtggaacaagataagttcggtaaagtgaagtttgcggtcctgcagacctacggagataccacccataccctggtggaaaagatgaattacatcggacagtttcttcccggatacgaggcacctgccttcatggacccactgctgccgaagttgcctaagtgttccctggaaatgatcgaccacatcgtcggaaaccagccggaccaggaaatggtgtctgcttccgaatggtacctcaagaatctgcaatttcatcggttctggagcgtggacgatacccaggtgcacaccgagtactcatcactcagaagtatcgttgtggcaaattacgaagaatcgattaagatgccaatcaatgagccagccccgggaaagaagaagtcccaaatccaggagtacgtcgattacaatggcggagcgggtgtacaacatatcgccctgaaaaccgaggacatcatcaccgcgatccgtcatctgagggaacgggggctcgaattcctctctgtcccttcaacttactataagcagctgagggagaagttgaaaacggccaaaatcaaggtgaaagaaaacatcgatgcactggaggaattgaaaatcctggtggactacgacgaaaagggctatctcctgcagatcttcactaaaccggtgcaagatagaccgactctctttctggaagttatccaacgccacaaccaccagggcttcggtgctggcaactttaactcgctgttcaaagccttcgaagaagagcagaacctgcggggaaatctgactaacatggaaactaatggagtcgttccaggaatg

SEQ ID NO: 125738 - DNA, 1179 bp, Artificial Sequence
  derived and/or modified sequence
atgactacttactccgataagggtgctaagccagaaagaggacggtttctgcacttccactctgtgacattctgggtgggcaatgcaaaacaggccgccagtttctattgctccaaaatgggcttcgagccactcgcatatcggggcctggaaacaggctcaagagaggtggtgtctcacgtcatcaaacaagggaaaattgtttttgtgctgagctccgccctcaatccttggaacaaggagatgggtgatcacttggttaagcatggcgacggagtcaaggatatcgcttttgaggtggaagattgtgattacatcgtgcagaaagctcgcgagagaggcgccaaaataatgagagaaccatgggtggaacaggacaaattcgggaaggttaaatttgccgtgctgcagacttatggtgacactacccacacgctcgttgaaaaaatgaactacattggacagttccttcctggctacgaggcacccgcctttatggacccactgctgcccaaactgccaaagtgctccttggagatgatagaccacattgtggggaatcaacctgaccaagagatggtgagcgcctctgagtggtacctaaagaatctgcagtttcacagattctggtcagtggatgacactcaagtacatacagaatacagcagtctcagatctatcgtggtggccaactacgaggagtctatcaagatgcccattaacgaacccgcacccggaaagaagaagtctcagatacaagagtatgtcgattataatgggggggcaggcgtgcaacatatcgccctcaagaccgaggacatcatcacagccatcagacatttgcgagaacgcggactcgagttcctgtctgtgcccagtacatactataagcagctgcgcgagaagctcaaaaccgccaagattaaggttaaagagaacatcgatgctctggaggagctcaaaatcctggttgattacgacgagaaaggctatctgcttcagatctttaccaagcccgtccaagacagaccaaccttgttcctggaggtaatccaaagacacaaccaccaagggtttggagccggcaactttaattcactgtttaaagcgttcgaagaagaacagaacctccggggcaatcttactaatatggagacaaatggcgtggtccccgggatg

SEQ ID NO: 125739 - DNA, 1179 bp, Artificial Sequence
  derived and/or modified sequence
atgactacctactccgataagggagcaaaacctgaaagggggagattcctgcacttccatagtgtcactttttgggtggggaacgctaagcaggctgcctccttttactgttccaagatgggttttgaacctctggcgtacaggggtttggagacgggctctcgtgaagttgtttcacacgttattaagcagggaaaaatagtgtttgttttgagcagcgcacttaatccatggaataaggaaatgggtgatcatctagttaagcatggagatggagttaaggacatcgccttcgaagtcgaggattgtgattacattgtccagaaagcaagagaaagaggcgccaagatcatgagagagccctgggtggagcaagacaaatttgggaaagttaagttcgccgtcttgcagacatatggagatacaacccatactcttgtggaaaagatgaattatattggccaatttttgcctggttatgaagctccagcttttatggatccactattgccaaaattgcctaagtgctcgttagaaatgattgatcacattgttggtaaccagcccgaccaagagatggttagcgcctctgaatggtacttgaaaaatttgcaatttcacagattttggagtgttgacgatactcaagttcatacagaatatagttcactcagatcgatcgtggtcgctaactatgaagaatcaataaagatgcctataaacgaaccagccccggggaaaaaaaaatcacagatccaggagtatgttgattacaacggcggggcaggcgtgcaacacatcgctttgaaaaccgaggatattatcacggccattcgacacctcagagagaggggactggaattcctctcggtgccttccacatactataagcaattaagggagaagctaaagaccgctaaaatcaaagtaaaggaaaacatcgacgccttggaagaattgaagatcttagtggattatgatgaaaaagggtatttgttgcaaatcttcactaaaccagtgcaagatagaccaactttgttcttggaagtgattcagaggcacaaccaccaaggttttggtgccggtaatttcaacagtctttttaaagcatttgaagaagagcaaaatcttcgaggaaacttgactaatatggaaactaatggggtggttcctggaatg

SEQ ID NO: 125740 - DNA, 1179 bp, Artificial Sequence
  derived and/or modified sequence
atgactacttactcagataaaggagcaaagcctgaacgcggaagatttctgcattttcactcagtgaccttttgggttggaaacgcaaagcaagcagcatccttttactgctccaagatggggttcgagcctttggcttaccgcggtctggaaacgggttcgagagaagtggtgtcacacgtcataaagcagggcaagatcgtgttcgtgctgagctccgccttgaatccatggaataaggaaatgggtgatcatctggtcaaacatggagatggtgtcaaggacattgccttcgaggtggaggattgcgactacatcgtgcaaaaagcacgggagcgtggcgcaaagattatgagagagccttgggtggagcaagataagtttggtaaggtgaagttcgcagtcttgcagacgtacggagatactacccatactttggtcgagaaaatgaactatatcggccagttcctgccaggttacgaagctcctgcatttatggatccccttcttcctaaattgccaaagtgctctctggaaatgattgaccatatagtgggaaaccagccagaccaggaaatggtgagcgcgtcggaatggtacctcaagaacctccaatttcaccggttttggtccgtggacgacacccaagttcacaccgaatacagctcccttcgcagcatcgtggtcgcaaattacgaagaatctattaagatgcctatcaacgaaccagcccccggaaagaagaaatcacaaatacaggaatacgtggattacaatggaggggcgggtgtgcagcatatcgcccttaagaccgaggatatcattaccgccatacgccatcttagagagcgaggcctcgagttcctttccgtgccatccacctactacaaacagctgcgcgaaaagctcaaaaccgccaaaatcaaagtgaaagaaaacatagatgcattggaggagctgaagattctcgtggattatgatgaaaagggctatctcctgcagattttcactaagcccgtgcaagacagaccaactctttttctggaagtgattcaacgtcataaccatcaaggctttggagcaggaaacttcaactcgctctttaaggcattcgaggaagagcaaaacctgcgtggaaatttgaccaacatggagactaacggagtggtgcctggtatg

SEQ ID NO: 125741 - DNA, 1179 bp, Artificial Sequence
  derived and/or modified sequence
atgaccacctactcagacaaaggtgccaagcctgagcgagggaggtttctgcactttcattcggtgacattttgggtgggcaacgccaagcaagccgcttccttctactgttctaagatgggatttgaaccactggcctaccggggcctggagacaggctcaagagaggtagtttcccatgtcattaagcagggaaaaatagtgttcgtgttgtcaagtgcgctcaacccctggaataaggagatgggcgatcatttggttaagcatggggacggcgtgaaggatattgcgtttgaagtggaggactgcgactatattgtgcaaaaggctagagagcgaggggcgaaaatcatgcgggagccttgggtcgagcaggacaaattcggcaaagtcaagtttgcggtgttgcagacctatggtgacactacccacactcttgtcgagaagatgaattatattggacagtttcttcctggctatgaagctcctgctttcatggatcccctcctaccaaaacttccaaagtgcagcctggagatgatcgaccacatagtcgggaatcaaccggaccaggagatggtctcggccagcgaatggtacttaaagaaccttcagttccatagattttggagcgtcgacgacacacaagtgcacaccgagtactcatccctgaggtcaattgtggttgctaactacgaagagtcaataaaaatgcctattaacgagcctgctccgggcaagaagaaatcccagatccaagaatacgtggattataatggcggcgccggcgtgcagcacatagccctcaaaacagaggatatcattacagccatacggcaccttcgggaaagaggattagagtttttgtccgtcccttccacgtattataaacagctgcgcgaaaaactgaagaccgccaagatcaaggttaaagagaacattgatgctttggaggagctcaaaatcctcgtagactacgatgagaaaggatacctgctgcagatatttactaaacctgtgcaagacagaccaacgcttttcctggaggtgattcagcgccacaatcatcagggctttggcgctggaaattttaacagcctgttcaaggccttcgaggaagaacagaacttgcgcgggaatctcactaatatggagacgaacggggttgtgcccggcatg

SEQ ID NO: 125742 - DNA, 1179 bp, Artificial Sequence
  derived and/or modified sequence
atgaccacctattccgacaagggggctaagcctgaacggggtagattcctccactttcattccgttaccttttgggtggggaatgccaagcaggcggctagcttctattgttctaaaatgggattcgagcctctggcctacaggggcctcgaaacgggtagtcgcgaagtggtttcccacgtcataaagcaggggaaaatcgtgtttgttctgtctagtgccctcaatccatggaacaaggaaatgggggaccatctggtcaaacacggagatggagtaaaggatatagcctttgaagtggaagactgcgattatatcgtgcaaaaggccagagagcggggcgccaaaataatgcgggaaccctgggtggagcaagataagtttggtaaggtgaagttcgccgtcttgcagacatacggcgacacaacacacaccctcgtagagaagatgaactacattggccagttccttcctggttatgaagcccccgcattcatggaccccctcctgcctaagctccctaaatgttcactcgagatgatcgatcacatcgtaggaaatcaacctgatcaggagatggtttccgcctccgagtggtatctcaagaacctccagtttcatcggttttggagcgttgatgacacccaggtgcacactgaatactcttccctgcgctccatcgtggtggccaactatgaagagagcatcaaaatgcccatcaacgaaccagcccctggcaaaaagaaatcccagatacaggagtatgtcgactacaacggaggcgcgggggtgcagcatattgcactgaaaaccgaggacataatcaccgccatcagacatctgagggagaggggactggaattcctgtcagtcccatcaacatattacaagcagctgagagaaaaactcaagaccgcaaaaattaaggtgaaggaaaatatcgatgccctcgaagagttgaagattctggttgactatgacgagaagggataccttctgcagattttcacaaaacctgtgcaggatcgcccaaccctcttcctggaagtgatccagaggcacaatcatcaggggtttggcgctggaaactttaactctcttttcaaggcttttgaggaagaacaaaatctcagggggaacctgaccaatatggagaccaatggtgttgtgcccgggatg

SEQ ID NO: 125743 - DNA, 1179 bp, Artificial Sequence
  derived and/or modified sequence
atgaccacctactccgataagggtgccaaacccgaacgcggacggtttctgcactttcactccgtgactttctgggtcggtaacgcaaagcaggctgcctccttctactgctcgaagatgggattcgaaccgctcgcctaccggggcctggaaactggatcgcgggaagtggtcagccacgtcatcaaacaaggcaaaatcgtgtttgtcctgtcctccgcgctgaacccgtggaacaaggagatgggagatcacctcgtgaagcatggcgacggagtcaaggacatcgccttcgaagtggaggactgcgactatatcgtgcagaaggcaagagaacggggcgcaaagatcatgcgggagccgtgggtggaacaggataagtttggcaaggttaagttcgccgttctccagacttacggcgacactacccatactctggtggaaaagatgaattacattggccagttcctgcctggttacgaggcccctgcatttatggatccgctgctcccgaagctgccaaagtgctccctcgaaatgattgaccatattgtgggtaatcagccggatcaagagatggtgtcagcctctgaatggtacctcaagaacttgcagtttcatcggttctggtctgtggatgacacccaggtgcacactgagtactcttcactgaggtcgattgtggtcgccaactacgaagaatccatcaagatgcctatcaacgagcctgctcctgggaagaagaagtcgcaaattcaggaatatgtggattacaacggcggggcgggagttcaacatatcgccctgaaaaccgaggacattatcaccgcgattcgacacttgagggaaaggggcctcgaatttctctcagtgccgtcaacctactacaaacaactgcgggaaaaacttaagaccgcgaaaatcaaggtcaaagagaatattgacgctctggaagagctgaagatccttgtggactacgacgaaaagggatacttgctgcaaatcttcactaaacccgtccaagacagacccacgctcttcctggaagtgattcagcggcacaatcaccaggggtttggcgccggcaatttcaatagcctgttcaaggcattcgaggaggagcagaacttgcgcggtaacctgaccaatatggaaaccaacggtgtggtcccaggaatg

SEQ ID NO: 125744 - DNA, 1179 bp, Artificial Sequence
  derived and/or modified sequence
atgaccacctactccgacaagggtgcaaaaccagaaaggggaaggttcctgcatttccattccgtgactttttgggtcggtaatgcgaaacaagcagcctcgttctactgctcaaagatgggatttgaacccctggcatatcgaggactggaaactggcagccgcgaagtggtgtcgcacgtgataaagcaggggaagattgtgtttgtcctctcctcagcattgaacccttggaacaaggaaatgggagatcatcttgtcaagcatggagacggagtgaaggacattgcctttgaggttgaagattgtgactacatagtgcaaaaggcaagagaacggggagcaaagatcatgcgggaaccttgggtggagcaagacaagtttggtaaagtgaagttcgcagtccttcaaacttatggggacaccactcatactctcgtggaaaagatgaactacattggtcagtttcttcctgggtacgaagcacccgcgtttatggatcctttgctgccaaaacttcctaagtgttcccttgagatgatcgaccacatcgtggggaaccaaccagatcaagagatggtgagcgcgtcagaatggtacctcaagaaccttcagtttcataggttttggtcggtcgatgatacccaggtccacactgagtattcatcgctgcggtccatagtcgtggccaactacgaggaatccatcaagatgccgattaacgagccagcgccgggtaagaaaaagtcgcaaattcaggagtacgttgattacaatggtggcgcgggagtccagcatatagctctgaaaaccgaagatatcattaccgcaatcaggcacctcagagaacggggcctcgagttcctgtcagttccttcgacttactacaagcaactccgagagaagctcaagactgcaaagatcaaagtgaaagagaatattgacgcgctggaagaacttaagatccttgtggattacgatgaaaagggttaccttctccaaatcttcaccaagcccgtgcaggaccggcccaccctgttcctcgaggttattcagagacataatcaccaaggtttcggtgcaggaaactttaactcgctcttcaaagccttcgaagaagaacaaaatctgagaggcaatcttacgaacatggaaactaacggagtcgtcccaggtatg

SEQ ID NO: 125745 - DNA, 1179 bp, Artificial Sequence
  derived and/or modified sequence
atgactacctacagcgataaaggggcaaagcccgagagggggcggtttctgcatttccatagcgtaactttttgggttggcaacgctaaacaagctgcttccttttactgttccaagatgggctttgagcccctcgcgtaccgtggtttggaaacagggagccgggaggtggtctcgcacgttatcaagcaagggaaaatcgtcttcgttctaagtagtgctctgaatccgtggaacaaggaaatgggcgaccacttagtgaagcacggtgatggagttaaggatatcgcattcgaggtagaagactgtgattacatcgtccaaaaggccagggagcgcggagccaagataatgcgggaaccctgggtcgagcaggataagttcggtaaggtgaaattcgctgttctgcagacctacggcgatacaactcacaccttagtggaaaagatgaattacattgggcagtttctccccggttacgaggcccctgcttttatggatcctctgctgccgaaactgccaaagtgttctctggagatgattgaccatatcgtggggaaccaaccagatcaggagatggtgtctgcctcagagtggtacttgaagaacctacagtttcacaggttttggtcagtggacgacacccaagttcacaccgagtatagtagccttaggagtatcgttgttgcaaattatgaagaatctataaaaatgcctatcaatgagcccgctcccggtaaaaagaagagccagatccaggaatacgtagactataatggcggcgcaggggtgcagcacatcgccctgaagaccgaggacatcatcacagcaatccggcatctccgggagaggggtcttgagtttttgtctgtgccctccacttactataaacaacttagggaaaagctgaagaccgcgaagatcaaagtgaaagagaatattgacgcactggaggagcttaagatcctagttgactacgacgaaaagggctacctcctccagatcttcacgaagccagtgcaggacagacccaccttattccttgaggtgattcagaggcacaatcaccaggggtttggcgcagggaatttcaattccctgttcaaggcttttgaggaagaacaaaacctaagggggaacctcaccaacatggagaccaatggcgtcgtgcccgggatg

SEQ ID NO: 125746 - DNA, 1179 bp, Artificial Sequence
  derived and/or modified sequence
atgaccacctattccgacaaaggagccaagccagaaaggggtaggttcctacattttcattcggtgaccttctgggtcggcaatgcaaaacaggccgcttccttttactgctctaaaatgggatttgaaccacttgcctatcggggcttggaaactgggagccgggaggttgtgagtcacgtgatcaagcagggtaaaatcgtatttgtcctgagctccgcgcttaatccgtggaacaaagaaatgggcgaccacctcgtcaaacacggcgatggggtcaaagacatcgcatttgaagtggaggattgcgattacattgttcagaaggcacgagaaaggggtgctaagatcatgcgcgagccctgggtggaacaagacaagttcggcaaagtgaaattcgcggtgctacagacgtacggcgatactacccataccctcgttgaaaagatgaattacatcggacagttcctgccgggctatgaagcaccagcattcatggacccactcctccctaaactgcctaaatgtagtttagaaatgatcgaccatatcgttggcaatcaaccagaccaggaaatggtgagtgcctcggaatggtacttgaagaaccttcagttccatcggttctggtctgtggacgatacccaggtgcacacagaatattcctctctgcgatctatcgtggtcgcaaattatgaagaatctatcaagatgccgataaacgaacccgcgccagggaaaaagaagagccaaatccaggagtatgtcgattacaacggcggcgcgggagtccagcacatcgctttaaaaacagaagacatcattaccgctatacgacatctgagggagcggggcctggagttcctgtccgttccttccacttattataaacagttgagagaaaaattgaaaaccgcaaagatcaaggtcaaagagaatatagatgccctggaggaactgaagatcctggttgactacgacgaaaaaggatacttgctccagatcttcacaaagccggtacaagacagacccaccctgtttctggaggtgattcaacgacataaccaccaggggtttggcgccgggaacttcaattctctctttaaagcttttgaagaggagcagaacctccgcggtaacctgactaatatggagactaacggagtggtaccgggcatg

SEQ ID NO: 125747 - DNA, 1179 bp, Artificial Sequence
  derived and/or modified sequence
atgacgacgtattcggataaaggtgcgaaaccggaacgtggtcgttttctacattttcattcggttacgttttgggtaggtaatgcgaaacaagcggcgtcgttttattgttcgaaaatgggttttgaaccgctagcgtatcgaggtttagaaacgggttcgcgagaagttgtatcgcatgttataaaacaaggtaaaatagtatttgttctatcgtcggcgttaaatccgtggaataaagaaatgggtgatcatttagtaaaacatggtgatggtgttaaagatatagcgtttgaagtagaagattgtgattatatagttcaaaaagcgcgtgaacgaggtgcgaaaataatgcgtgaaccgtgggttgaacaagataaatttggtaaagttaaatttgcggttctacaaacgtatggtgatacgacgcatacgctagtagaaaaaatgaattatataggtcaatttttaccgggttatgaagcgccggcgtttatggatccgttattaccgaaattaccgaaatgttcgttagaaatgatagatcatatagttggtaatcaaccggatcaagaaatggtatcggcgtcggaatggtatctaaaaaatttacaatttcatcgattttggtcggttgatgatacgcaagtacatacggaatattcgtcgttacgttcgatagtagtagcgaattatgaagaatcgataaaaatgccgataaatgaaccggcgccgggtaaaaaaaaatcgcaaatacaagaatatgttgattataatggtggtgcgggtgttcaacatatagcgctaaaaacggaagatataataacggcgatacgacatctacgagaacgtggtctagaatttctatcggtaccgtcgacgtattataaacaattacgagaaaaactaaaaacggcgaaaataaaagtaaaagaaaatatagatgcgttagaagaactaaaaatattagtagattatgatgaaaaaggttatctattacaaatatttacgaaaccggttcaagatcgtccgacgttatttttagaagtaatacaacgtcataatcatcaaggttttggtgcgggtaattttaattcgctatttaaagcgtttgaagaagaacaaaatttacgaggtaatctaacgaatatggaaacgaatggtgtagtaccgggtatg

SEQ ID NO: 125748 - DNA, 1179 bp, Artificial Sequence
  derived and/or modified sequence
atgaccacatacagcgataaaggagccaagcccgagcgaggtcgtttcctacacttccacagcgttaccttctgggtcgggaacgcaaaacaggcggccagtttctactgttctaaaatgggtttcgagccactggcctaccgcgggctcgaaaccggctctcgcgaagtcgtgagccacgtgattaagcaagggaaaatagtcttcgtcttgtccagtgcactcaacccctggaacaaagaaatgggagaccatcttgtgaagcacggagacggagtgaaggacatcgcattcgaggtggaggactgtgattatatcgtacagaaagccagagagcgaggggctaagatcatgagagaaccatgggtggagcaggataagtttggaaaggttaagttcgccgtgctccagacatacggagatacgacccacacactggttgaaaagatgaactacatcggccagtttctacccggctacgaggctcctgctttcatggatcccttgttgccaaagctccccaagtgctcccttgaaatgattgaccacatcgtgggaaatcagcctgatcaggaaatggtgagcgcatctgaatggtatctcaagaacctgcagttccaccgattttggtcagtggatgatacccaagtccacactgagtactcatcgctgcgttccatcgtggtcgccaactatgaggaaagtatcaagatgcccattaacgagcccgccccaggtaagaaaaaaagccagatacaggaatatgttgattacaacggcggtgctggtgttcagcacattgcactgaagaccgaagatataatcacagcgattagacacctgcgcgaaagaggcctggaatttctgagcgtgccgagcacctactataaacagctgcgggaaaagctgaaaacagccaagattaaggtcaaggaaaatatagatgccctggaagagttgaagatcttagtagactatgatgaaaaggggtatctcttacagatctttactaagcccgtacaggaccgccccaccctgttcctggaagttattcagagacacaaccatcagggatttggtgcgggcaacttcaacagtttattcaaggcctttgaggaggagcagaacctgaggggtaatcttaccaatatggagacgaatggcgtggtaccaggcatg

SEQ ID NO: 125749 - DNA, 1179 bp, Artificial Sequence
  derived and/or modified sequence
atgactacttactcggataagggggcaaaaccggaacggggacgcttccttcacttccactccgtgaccttctgggtgggaaatgccaaacaggcagcatcattctactgctctaaaatgggattcgagccgctcgcctaccgcggtctggaaaccggctcgcgggaggtggtgtcccacgtcatcaagcaaggtaagatcgtgtttgtgctgtcctcggccctgaatccatggaataaagaaatgggagatcacctggtcaagcatggcgatggggtgaaggacatcgcattcgaagtggaagattgtgactacattgtgcagaaggccagagaaaggggcgccaaaatcatgcgcgagccatgggtcgaacaagataagtttgggaaggttaagttcgccgtcttgcagacgtatggggatactacccacactctggttgaaaagatgaattacatcggccagtttctccccggatacgaggctccagcgttcatggacccgctgctcccaaagctcccgaagtgtagccttgaaatgatcgaccatatcgtgggaaaccaacccgaccaggaaatggtgtctgcatctgagtggtacctgaaaaacctccagtttcacagattttggtcggtggacgacactcaggtccacactgaatactcaagcctgcggtccatcgtggtggcgaactacgaggagtccatcaagatgcctattaacgagccggccccaggtaaaaagaagagccagattcaggagtacgtggattacaacgggggagcgggggtgcaacacatcgctttgaaaactgaggacatcattaccgcgattcggcaccttcgcgaaaggggtcttgagtttctgtcggtgccttcgacgtactataagcagctccgcgagaaacttaagaccgccaagattaaagtcaaggaaaacatcgacgccctggaagagcttaagatcctcgtcgactacgacgagaagggatacttgctgcagatcttcaccaaacccgtgcaagaccgacctacgctcttcctggaggtgatccagagacataaccatcagggattcggagcagggaacttcaattctttgttcaaggcattcgaggaagaacagaacctgcggggtaatttgaccaacatggagactaacggagtggtgccggggatg

SEQ ID NO: 125750 - DNA, 1179 bp, Artificial Sequence
  derived and/or modified sequence
atgaccacgtactcggacaagggagcgaagccagagagaggaaggttcctgcacttccacagtgtcactttttgggtggggaacgccaagcaggcagcgtctttctactgctcgaagatgggattcgaaccactcgcctaccgcggacttgaaaccggatccagagaggtcgtttcgcatgtgatcaagcagggaaagatcgtgttcgtgctgtcatcagcgcttaacccatggaacaaagagatgggcgaccacctggtgaaacatggtgacggcgtgaaggacattgcgttcgaggtggaagattgcgactacatagtgcagaaggcccgggagcgcggagccaagattatgcgggagccgtgggtcgaacaggataagttcgggaaagtcaaatttgcggtgctgcaaacctacggagatactactcatactttggtggagaagatgaattacatcgggcagttccttccaggttacgaggctcctgccttcatggacccgcttctcccgaagttgcctaagtgctcactggagatgattgaccatatcgtgggcaaccaacccgaccaggagatggtcagcgcttccgagtggtacctcaaaaatctgcagttccaccggttttggtcggttgatgatactcaggtccacactgaatactcatccctcagaagcatcgtcgtggccaattacgaagaatcgatcaagatgcccatcaacgagccggctcctggaaagaagaagtcgcagatccaagaatacgtggactacaatggaggcgctggagtccaacatatcgcactcaagaccgaagatatcatcactgcgatccggcacctgcgcgagcgcggactggaattcctgtcagtgccaagcacttactacaagcaactccgcgagaagctcaaaaccgctaaaatcaaagtcaaggaaaacattgacgcattggaggagctgaagatactggttgattacgacgaaaagggatacctgctgcaaatcttcaccaagccggtccaagaccgtcctaccctgtttcttgaagtgatccagaggcacaaccatcagggatttggagcagggaatttcaacagcctgtttaaggctttcgaggaagagcaaaacctccgcggcaatctgactaacatggagactaacggcgtggtgccgggaatg

SEQ ID NO: 125751 - DNA, 1179 bp, Artificial Sequence
  derived and/or modified sequence
atgaccacttacagcgataagggtgcaaagcctgaacgtggcagatttcttcacttccactcggtcaccttttgggtggggaacgcaaagcaggcagcttccttctactgttcaaagatgggattcgaaccactggcctacagaggtctggaaacgggctcgagggaagtggtgtcccacgtgataaagcagggaaagatagtattcgtgcttagcagcgctctgaacccttggaataaagaaatgggtgaccatctggtcaagcatggtgacggagtgaaggatattgcctttgaagtcgaggattgcgattacatagtgcaaaaggcgcgcgaacgtggggcgaaaatcatgcgcgaaccctgggtcgaacaagataagtttgggaaagtgaagtttgcagtgcttcaaacgtacggggataccactcatactctggtggagaaaatgaactatatcggtcagtttctgcctggatatgaagcgccagcattcatggaccctcttctgcccaagttgccaaagtgttccctggaaatgattgaccatattgtgggaaatcaaccagaccaagaaatggtgtcggcatcagaatggtacctgaagaaccttcagttccacagattctggtccgtggatgatacccaggtacataccgagtactcctcgctgaggtcgatcgtcgttgcaaattacgaggaatcgattaagatgcctattaacgaaccggcgccgggaaagaaaaagtcacagattcaagaatacgtcgattacaacggtggagcaggggtccaacacatcgcactgaaaactgaggacatcatcaccgcgattcgtcatcttcgagagaggggtttggagtttctctcggtgccttcgacctactacaagcagcttcgggaaaaactcaagactgcaaagatcaaagtgaaagagaacatagacgctctggaggaactcaagatcctggtggattacgatgagaagggatatctgcttcaaatctttactaaaccggtgcaggataggccgaccctgtttctcgaggtgattcaacgtcataaccatcaaggcttcggggccggaaatttcaattcactgtttaaagcctttgaagaggaacaaaacctgagaggcaacctgaccaacatggaaactaatggtgttgtcccagggatg

SEQ ID NO: 125752 - DNA, 1179 bp, Artificial Sequence
  derived and/or modified sequence
atgaccacatatagcgataagggggccaagcccgagaggggacggtttctccactttcactccgtgaccttttgggtaggcaatgctaaacaggccgcttcgttttactgcagcaagatgggatttgagccactcgcttaccgtggtctcgagaccggatcccgagaagtagtgagtcatgtgatcaagcaggggaaaattgtctttgtgttgtctagtgctcttaacccctggaacaaggaaatgggtgatcacctggtcaagcacggggacggggtaaaggacatcgctttcgaagtcgaagattgcgattacattgttcagaaggctagggaacggggggcaaagatcatgagagaaccctgggttgaacaggataaatttgggaaagtcaagttcgccgttttgcagacttacggagacactacacacacactcgtggagaagatgaattacatcggacagtttctaccaggatacgaagccccagccttcatggatcccctgctgccaaaactgcccaaatgctctcttgagatgattgaccatatcgttggaaaccagccagatcaggaaatggtctcagcctctgagtggtacctcaagaacttgcaattccacaggttttggtctgtggatgacactcaggtgcatactgaatatagttctctgagatcaattgtggtggcaaattacgaagagtctatcaagatgcctataaacgagcccgctcctggcaagaagaagtcacaaatccaagaatatgtggattataatggaggagccggcgtgcagcatatcgccttgaagacagaagatatcataacagctattcgccatctgcgggaacgaggccttgaatttctttccgtgccctctacgtactacaagcagcttagagaaaaacttaaaactgcgaaaatcaaggttaaagagaatatcgacgcgctggaagaattgaaaattctggtagattatgacgaaaaaggctacctgctgcagatcttcacaaagccggtacaggaccgtcccactttatttctagaggtgatccagaggcacaatcatcagggtttcggcgcagggaattttaacagcctcttcaaggccttcgaagaagagcagaacctccggggcaacctaactaatatggaaaccaacggcgtcgtgccaggcatg

SEQ ID NO: 125753 - DNA, 1179 bp, Artificial Sequence
  derived and/or modified sequence
atgaccacttacagcgataagggagcgaagcccgagcggggcagattcctccatttccatagcgtcactttctgggtcggaaacgccaagcaggctgcgtccttctactgttcgaaaatgggattcgaaccgctggcgtaccgaggattggaaaccggatcaagggaagtggtgagccacgtgataaagcaggggaaaatcgtgttcgtgctgagcagcgccctcaacccgtggaacaaggagatgggagatcaccttgtgaagcacggggacggcgtcaaagacatcgccttcgaagtggaagattgcgactacatcgtccagaaggcgcgcgaaagaggcgcaaagattatgcgggaaccatgggtcgaacaggacaagtttgggaaggtgaaattcgccgtcctgcagacttacggtgacaccactcacactctggtggagaagatgaactacattggtcagttcctgcccggatatgaagcccccgcgtttatggacccgttgcttccgaagctgccaaagtgctctttggagatgattgatcatatcgtgggaaatcagccagatcaggaaatggtgtcggcgtccgaatggtacctgaagaacctgcaattccaccgcttttggtctgtcgacgatactcaggtgcacaccgagtactcctcactgcggagcattgtagttgctaattacgaagagtcaatcaagatgccgatcaacgagccagcaccgggtaagaagaaaagccaaatccaagagtacgtcgactacaatggcggagccggtgtacagcacattgccctcaagactgaagatatcataacggccatccggcacctgagagaacgcggcctcgaattcctgtcggtgccatcaacctactataaacagcttcgggaaaaactcaaaaccgccaaaatcaaggtcaaggagaatatcgacgcactggaggaactcaagatccttgttgactacgatgagaagggatacctcctgcaaatctttacgaagccagtccaggacagacctacgttgttcctcgaggtgatccaaagacataaccatcaaggatttggagctggtaactttaactcacttttcaaggctttcgaggaagagcaaaacctgcggggaaacttgactaatatggaaaccaatggagtggtcccgggcatg

SEQ ID NO: 125754 - DNA, 1179 bp, Artificial Sequence
  derived and/or modified sequence
atgactacctacagcgacaagggggctaaaccggagaggggcaggttcctgcacttccatagcgtgaccttctgggtggggaatgcgaagcaggcagcctctttctattgcagtaagatgggtttcgagcccctcgcctacagggggctggaaacgggcagccgggaagtggtcagccatgtgatcaagcaaggaaagatcgtctttgtgctctcatctgctctcaacccatggaataaggaaatgggcgaccatctggtgaagcacggggacggagtgaaggacattgcgttcgaagtcgaggactgtgattacattgtgcagaaagccagagaacgcggggccaaaatcatgcgggaaccttgggtcgagcaagataagtttggaaaggttaagttcgctgtgctgcagacctacggtgacacgactcataccctggtggagaaaatgaactacattgggcagtttctcccagggtacgaagccccagccttcatggaccctcttctgccaaagctgccgaagtgcagcctggagatgatcgaccacatcgtgggcaaccaaccggatcaggaaatggtgtccgcttctgaatggtacctgaagaatctccagttccaccgcttctggtcggtggacgatactcaggtgcacacggaatactcgagcttgcgatccatcgtggtggccaactacgaagagtccatcaagatgccgatcaatgagccggcgcccgggaagaagaagtcccagatccaggaatacgtggactacaacggcggagccggggtgcaacacatcgctctgaaaaccgaggatatcatcactgcaattcgccaccttcgggagcggggacttgaattcctctcggtgccatccacgtactacaagcaattgagagagaaacttaagactgcaaaaatcaaggttaaagaaaacattgacgcactggaagagctcaagatcctggtggattacgacgagaaaggatacttgctgcagatctttacgaagcctgtgcaagatagaccgaccctcttcctggaggttatccagcgccacaatcaccaaggcttcggagccggcaactttaactctctgtttaaagcgttcgaagaggaacagaatctccggggaaacttgaccaacatggaaactaatggagtcgtcccaggaatg

SEQ ID NO: 125755 - DNA, 1179 bp, Artificial Sequence
  derived and/or modified sequence
atgaccacttactcggacaagggtgcgaagccggaacggggtcggttcctccacttccactctgtcaccttctgggtgggtaacgccaagcaggcggcatccttttactgctctaagatgggattcgaacctctggcttaccgcggcctggagactggtagcagagaggtcgtgtcccatgtgatcaaacaagggaaaatcgtgttcgtcctgtcgtccgctttgaacccgtggaataaggagatgggggaccacctcgtgaagcatggagacggagtcaaagacatcgctttcgaagtggaggactgtgactacatcgtccagaaagctcgagagagaggtgcgaagataatgcgggaaccttgggtggaacaggataagtttggcaaggtgaaattcgctgtcctgcaaacttatggagacactactcacaccctcgtggaaaagatgaactacatcgggcagttcctgcctggatacgaggcccctgctttcatggaccccttgctccctaagctgccgaagtgctcgcttgaaatgattgaccacattgtgggaaaccaaccggatcaggaaatggtgtccgcttccgagtggtatctcaagaaccttcagttccaccgcttctggagcgttgacgacactcaagtgcataccgagtacagctcgctgaggtccatcgtggtggccaactacgaagaatcgattaagatgccgatcaacgaaccggcacccggaaaaaagaagagtcagatccaggagtacgtggattacaatggaggagcaggcgtgcaacatattgccctgaaaaccgaggatatcataactgcgatccgccaccttcgggaacgtgggctcgaattcctcagcgtgccatcaacttactacaaacaactccgggagaagctgaaaaccgccaagatcaaggtgaaagaaaacattgacgcccttgaagaacttaagattctggtggactacgatgagaagggatacctcctccaaatctttactaagccggtgcaggataggccaaccctgttcctcgaggttattcagagacataatcaccaaggattcggggcaggaaacttcaactcactgtttaaagcgttcgaggaagagcagaatttgaggggtaacctcacgaatatggaaactaatggcgtggtgccgggtatg

SEQ ID NO: 125756 - DNA, 1179 bp, Artificial Sequence
  derived and/or modified sequence
atgacaacctactctgacaagggagccaagccggaacgaggccgcttcctccactttcactctgttaccttctgggtggggaacgctaaacaggccgctagtttctattgtagcaagatgggatttgaacctctggcttatagggggctggaaaccggttctagggaggtggtctcccacgtgatcaaacaggggaagatcgtgtttgttttgagctccgccctgaacccctggaacaaggaaatgggcgaccatctagtcaaacatggagatggagtgaaggacatcgcctttgaagttgaggactgcgattacatcgtgcagaaggctagggaacgaggcgccaagattatgcgagagccctgggttgaacaggacaaattcgggaaggttaagttcgccgtgctgcagacgtacggtgacacaacccatacccttgttgaaaagatgaattacatcgggcaatttcttccaggatatgaggcaccagccttcatggacccgctgctgcctaagctgcctaaatgtagccttgaaatgatcgaccatatagtaggcaaccagccagatcaggagatggtgagcgcatctgaatggtacctgaagaacctccaattccatcggttctggtctgtggacgatacacaggtgcatactgaatactcctccctgagatccatcgtggtcgccaattatgaggagagcattaagatgccgatcaatgaaccggcccccggtaagaaaaaatcccaaatccaagaatatgtagactacaatggcggggccggagtgcagcacatcgccctcaagacagaggatataatcactgcgataaggcatctgagggaaaggggtctcgagttcctatcagtgccttccacatattacaagcagttgcgtgagaagttgaaaacggcgaagatcaaggtgaaggagaacattgatgcccttgaggagttaaagatcctcgtggactacgacgaaaagggctatttgttgcaaatctttactaaaccagttcaggaccgaccaacgctcttcctggaggtcattcagcggcacaaccatcaaggcttcggggccgggaatttcaattcgctttttaaagcatttgaagaggagcagaatcttcggggaaacttgacaaatatggaaacgaatggggtggttcccggaatg

SEQ ID NO: 125757 - DNA, 1179 bp, Artificial Sequence
  derived and/or modified sequence
atgactacatattctgataaaggggcgaaaccggaaagagggagatttttgcattttcattccgtaacattttgggttgggaatgccaagcaagcagcctcgttctattgctctaaaatgggattcgaacctttagcataccgtggccttgaaaccggaagtagagaggtggtgtctcatgttatcaaacagggtaaaattgtcttcgtactgtcctctgctttaaatccttggaacaaagagatgggagatcatctggtgaaacacggcgatggagttaaggatatcgctttcgaggtcgaggactgcgactacattgttcagaaagcacgagaacgcggggcaaaaattatgagggaaccctgggtcgaacaagataaatttggcaaggtgaagttcgcagtcctgcagacgtatggcgatacaacgcatacacttgttgaaaaaatgaattatattgggcagtttctacctggatacgaagcaccggcctttatggatccgttgcttcctaaacttccaaagtgttcattagaaatgatcgaccacatcgttggaaaccagccggaccaggaaatggtgtccgcttcggaatggtatctgaaaaatcttcagtttcaccgcttttggtcagtcgatgatacacaagtacatactgaatactctagcttaagatctatcgtggtggcaaattatgaagaaagcatcaaaatgccgattaacgaaccggcgccaggtaagaaaaaatcacagattcaggagtacgttgactataacggcggagcgggggttcagcacatcgcgttgaaaacagaagacatcataaccgcgattcgacatcttcgcgagcgtggtctcgaatttcttagcgttccatcgacatattataaacagcttcgggaaaaacttaaaacggcgaaaattaaagtcaaagaaaatatcgatgcccttgaggaattgaaaattctggtggattatgatgaaaaaggttatctgcttcaaatctttacaaaaccggtccaagataggccgactctttttcttgaggtgatccaaagacataatcatcaaggctttggcgcgggtaactttaacagcctgtttaaggcatttgaggaagaacagaatctgcggggcaatttgacaaacatggaaaccaacggtgtcgtcccgggtatg

SEQ ID NO: 125758 - DNA, 1179 bp, Artificial Sequence
  derived and/or modified sequence
atgaccacttactctgacaagggggcaaagcctgaaaggggaagatttctccattttcattccgtcaccttttgggtcggaaacgcgaagcaggctgcatccttttactgctcaaagatgggattcgaacctctggcgtacagaggacttgaaaccggatccagggaagtggtgagccacgtgatcaagcagggtaagattgtgttcgtgctgtcatcggcccttaacccatggaataaggaaatgggagatcatctggtgaagcatggtgatggagtgaaggatattgccttcgaagtggaagattgtgattacattgtgcaaaaggctcgggaacgtggcgccaagattatgcgggagccgtgggtggagcaagacaaattcggaaaggtgaagtttgcagtgctgcaaacttacggcgatactacccataccctggttgaaaagatgaactacatcggacagtttttgcctggctacgaggctcctgcatttatggatccactcctgcctaagctgcctaaatgcagccttgaaatgatcgatcacattgtgggcaaccaaccagatcaagaaatggtgtcggcatcagagtggtacctgaaaaacctccagtttcataggttctggtcagtggatgatacgcaagtgcacactgaatactcgagtttgcgttcaatcgtggtggccaattacgaggagagcatcaagatgcctataaacgaacctgcacccggcaaaaagaagtcgcaaattcaggagtacgttgattacaatggaggagctggagtccaacatatcgcccttaagactgaggacatcataactgcaattcggcacctgagggaaagaggccttgaatttctttccgtgcccagcacttactacaaacaactccgtgaaaagctgaaaactgccaagatcaaggtgaaggagaatatcgacgcacttgaagaacttaagattctggtcgattatgatgaaaagggctatctgcttcagattttcaccaaacctgtgcaggaccgtccaacccttttcctggaggtgattcaacgccataaccatcaaggttttggtgctggcaactttaacagcctctttaaagcattcgaggaggaacaaaaccttagaggaaaccttaccaatatggaaactaacggagtggtcccgggtatg

SEQ ID NO: 125759 - DNA, 1179 bp, Artificial Sequence
  derived and/or modified sequence
atgaccacttactcggacaaaggagcgaaaccagagcgtggaagattcttacatttccatagcgttaccttctgggtaggaaatgcaaaacaagccgcatcgttttattgtagcaaaatgggattcgaacctcttgcgtatcggggcttggagactggtagtcgtgaagttgtttcccatgttattaagcaagggaagattgtcttcgtcctgagttcagcactgaatccgtggaacaaagaaatgggagatcacttagtaaagcatggagacggagtaaaagacattgcattcgaagtggaagactgtgattatatcgtccaaaaagcacgagaaagaggagccaagattatgcgagaaccatgggtcgaacaggataagttcggaaaagttaagtttgcagtccttcagacttatggagatactacacacactctggtagagaagatgaattacataggacaatttctgccaggatatgaggccccagcttttatggacccattattgccaaaacttcctaagtgctcactcgagatgatcgatcacattgtcggaaaccaaccagatcaagaaatggtaagcgcttcagaatggtatcttaaaaacctccagttccaccgtttctggtctgtcgacgatacacaagttcatacggagtattcatcattgagatcaatcgtggttgcaaattatgaagaatcgattaagatgccaattaatgaaccggcaccaggaaagaaaaagagccaaatacaagaatacgtggactacaatggaggggcgggagtccaacatattgcattgaagacagaggatataatcactgcaatcagacacctacgtgagcgaggactggagttcttgtcagttccaagtacatactataaacagctacgagagaaactcaagaccgctaaaattaaagtcaaagagaatatagatgcgctggaggaattgaaaattttagttgactatgatgaaaagggatacttgttgcagatttttaccaaaccagttcaagatcgtcccacactttttctggaggtaattcaacgtcataatcaccagggttttggtgcaggtaactttaacagccttttcaaggcattcgaagaggagcagaacttgcgtggaaatctgactaacatggagaccaatggagtcgtcccgggaatg

SEQ ID NO: 125760 - DNA, 1179 bp, Artificial Sequence
  derived and/or modified sequence
atgacgacctattctgacaaaggggcaaaaccagagaggggacggttcctgcatttccattccgtgacgttctgggtcggaaacgcaaaacaagcggcatccttttactgttctaagatgggtttcgaaccactggcctaccgaggactcgagacgggctcgagagaagtggtgtcccatgtgattaagcaaggaaaaatcgtgtttgtgctgtcaagcgctctgaatccttggaacaaggaaatgggggatcatctggtgaagcacggggacggtgtcaaggatattgcctttgaggtcgaggattgcgattacattgtgcaaaaggcccgggaaagaggagccaagattatgagagaaccttgggtcgaacaagataagtttggcaaggtgaagttcgcagtgcttcaaacttacggagacactacccacactcttgtcgaaaagatgaactacattggccaatttcttcccggttacgaggcgcccgcatttatggaccctctgctgcctaaattgccgaaatgtagtcttgaaatgatagaccatattgtgggcaatcagccagaccaggaaatggtgtccgcttcggagtggtacctcaaaaacctgcagtttcaccgtttctggtccgtcgacgatacccaagtgcatactgaatactcttcccttcgctcgattgtggtcgcaaattacgaagagtcaatcaaaatgccgatcaacgaacctgcaccagggaagaagaagtcgcaaatccaggagtatgtggactacaacggtggtgctggagtccagcatatagctcttaaaactgaggatatcatcaccgcgatcagacatctgcgtgagagagggcttgaatttctttcggtaccatcaacttattacaagcagctgcgggagaaactgaaaaccgcaaagatcaaagtgaaggaaaacatcgatgcacttgaagaattgaaaatccttgtggattacgatgaaaagggatacctgctccagatattcacgaagccagtgcaggataggcctacccttttcctcgaagtcattcaacgacacaatcaccaaggtttcggagcaggtaactttaacagccttttcaaagcatttgaagaggaacagaatttgcgggggaacctcactaacatggagactaatggagtcgtaccagggatg

SEQ ID NO: 125761 - DNA, 1179 bp, Artificial Sequence
  derived and/or modified sequence
atgactacatattcagacaagggcgccaagcccgagagggggagatttctccactttcactctgtcaccttctgggtggggaacgctaagcaggccgcaagtttctactgctccaagatgggattcgagccactggcctacagggggctggaaaccggcagcagggaggtggtgagtcacgtgatcaaacagggcaaaattgttttcgtcctaagctctgccttgaatccctggaacaaggaaatgggggatcaccttgtgaaacacggcgacggggtgaaggatatcgcattcgaggtcgaggattgcgactacatcgtacagaaagctagagagcgcggggctaagattatgcgcgagccttgggtagagcaggacaagttcggcaaggttaagttcgccgtcctgcagacatatggcgacacaactcataccctggttgagaagatgaattacataggccagttcttgcccggttacgaagcccccgccttcatggaccccctgctgccaaagcttccgaaatgcagtttggagatgatcgaccacatagttggaaaccaacctgatcaggaaatggtgagcgcctctgaatggtatctgaagaatcttcaatttcaccgcttttggtccgtggatgatactcaggtgcacacagaatacagcagcctgcggtcgatagtggtggcaaactacgaggaatccatcaagatgccaattaacgaacctgctcctgggaaaaagaaaagccaaattcaggaatatgtggactacaacggcggggctggcgtgcaacacattgcccttaaaaccgaagatattattacggcgattcggcatctgcgagagcgaggactcgaattcctgtccgtgccgtccacatactataaacagctgagggagaagcttaagacagcgaaaatcaaggtaaaggagaacattgatgccctggaagaactgaagatcctcgtggattacgacgaaaagggctatctccttcagatttttactaaaccagttcaagatcgtcctacacttttcttagaagtgattcaacgccacaaccaccaggggtttggcgcaggcaatttcaatagccttttcaaagctttcgaagaagagcagaatctccgaggcaacctgactaatatggagaccaacggcgtcgtgccaggcatg

SEQ ID NO: 125762 - DNA, 1179 bp, Artificial Sequence
  derived and/or modified sequence
atgactacatattctgataagggcgccaagcctgagcgtggccgcttcctgcactttcatagtgttaccttctgggtcggaaatgctaaacaggcagccagtttctattgttctaagatgggctttgagcctcttgcctatcgggggttagaaaccggctcacgggaggtggtgtcacatgtgattaaacagggaaagatagtgttcgtcctgtcttctgcactgaacccctggaataaggaaatgggtgatcacctggtgaagcatggcgacggagtaaaagacatcgctttcgaggtagaagattgcgactacattgtgcaaaaggcacgtgaaaggggggctaagattatgcgggagccctgggtggagcaggacaaattcggcaaggtcaaatttgccgtgctacaaacctatggtgatactacccacaccctagtggaaaaaatgaactatattggacaattcctgccagggtacgaggcacctgcctttatggacccactgctgcctaaacttcccaagtgctcattggaaatgattgatcatatcgtgggcaaccagcctgaccaggagatggtgagtgcatccgaatggtacctaaagaacctacagtttcataggttttggagcgttgacgatacacaggttcacactgagtacagctctctccggtccattgtcgttgctaattatgaagaaagcatcaagatgccaataaatgagccagcacccgggaagaaaaaaagccagatacaggagtacgtggactacaatggtggcgccggagttcaacatatcgccttaaagaccgaggacattatcactgccatccggcacctgcgagaaagaggcctcgaatttctcagtgtaccaagtacatactataaacagctaagagagaaactgaaaaccgccaagattaaggtcaaggaaaatatagatgcactggaggaactgaaaatccttgtcgattatgacgagaagggctacctgttacaaattttcacaaagcccgttcaggatcggccaaccctattcctggaggttatacagcggcacaatcatcagggcttcggagctggcaacttcaatagcctatttaaagccttcgaggaggagcaaaatctgcggggaaacctcaccaatatggagacaaacggcgtggtgcctggaatg

SEQ ID NO: 125763 - DNA, 1179 bp, Artificial Sequence
  derived and/or modified sequence
atgaccacgtattctgataaaggagccaagcccgagcggggaagatttctccacttccactctgtcaccttctgggtcgggaatgcgaaacaggcagcctcattctactgctcaaaaatggggttcgagcctttagcctatcgcgggttggaaacggggtcaagggaagtggtgtcacatgtcatcaagcaagggaagatcgtgtttgtgttgtcgtcagccctgaatccctggaacaaggagatgggcgaccatctggtgaaacacggagatggtgtgaaagacatcgctttcgaagtcgaggactgcgactacatcgttcaaaaagcccgggaaaggggagccaagattatgagggagccatgggttgaacaagataaattcggtaaggtgaaattcgctgtacttcagacctatggcgacactacacatactctcgttgaaaaaatgaattatatcgggcagtttttgcctggctacgaggctcccgcgtttatggatcccttgctgccgaagctacctaagtgcagtctggagatgattgatcatatagtgggtaaccaacccgaccaggagatggtgagtgcctccgaatggtacctgaaaaatctgcagtttcatcggttctggtcagttgatgacactcaggtgcatacagagtacagctcattgcggtcaatcgtggtcgccaactacgaagagagtattaaaatgccgatcaatgaaccagcccctggcaaaaagaaatcccaaatacaggagtatgtcgactacaacggcggcgcaggagttcagcacatagccctcaagaccgaagacatcatcactgcgatccgccatttgcgcgaaaggggcctggagtttctgtcagtgccaagcacgtactataagcagctgcgcgagaaattaaagacagccaagatcaaagttaaagaaaacattgacgccctagaagagttaaaaatcctggtggactacgatgagaagggatatttactgcagatctttaccaagcccgttcaggaccgccctacactgttcctggaggttatccagaggcacaatcatcagggattcggcgcaggaaattttaacagtctgtttaaagccttcgaagaagaacaaaatttaaggggcaatcttaccaatatggagaccaatggggtggtacccggaatg

SEQ ID NO: 125764 - DNA, 1179 bp, Artificial Sequence
  derived and/or modified sequence
atgacgacttattcagataaaggcgccaagccagagcggggaagatttctgcacttccattcagtgaccttttgggtgggaaacgctaagcaggccgcgagcttctattgtagcaagatgggcttcgaaccactggcttacagaggtcttgaaaccggttcaagggaagtggtgtcacatgtgatcaagcaggggaagatcgtattcgtgctgagctctgcgctgaatccctggaacaaggaaatgggggaccatcttgtcaaacacggagatggagtgaaggacattgcatttgaggtggaagattgtgattacatagttcagaaagcccgggaaagaggggcaaagataatgagggaaccttgggtggaacaggacaagtttgggaaagtcaagtttgcagtgctgcagacttacggagataccacccatacgctggtggaaaagatgaattacataggtcaattcctccccggatacgaggcacctgcatttatggacccgctgctccctaagttgccaaaatgttcgctcgaaatgatagaccatattgtcggaaatcagcctgatcaagagatggtgtccgcctccgagtggtacctcaagaacctgcaatttcacagattttggagtgtcgatgatactcaggtgcacaccgaatactcatccctccggtcgattgtggtcgcaaactacgaggaatccattaagatgccaattaacgagccagccccaggaaagaaaaagtcgcagatccaggagtacgtggactacaacgggggcgctggagtccaacatattgctctgaaaactgaggacatcattactgcgattagacatctccgagaacggggattggaatttctttcggtcccatccacttactacaaacagctgagagaaaagctgaaaacggcaaagattaaggtgaaggaaaacatcgacgcactggaagagttgaaaatactggtggattacgacgaaaagggataccttttgcaaatctttaccaaaccagttcaagatcgccccactctgtttctggaagttatccaaagacataaccaccaaggtttcggtgcagggaactttaacagcctcttcaaggcattcgaggaggaacagaaccttcgggggaatcttacgaatatggaaactaatggtgtagtgccaggtatg

SEQ ID NO: 125765 - DNA, 1179 bp, Artificial Sequence
  derived and/or modified sequence
atgactacatactcagataagggcgccaagccggagcgcggaagattccttcatttccattctgttaccttctgggtgggaaacgctaagcaagctgcctcattctactgctcaaagatgggctttgaaccactggcctaccgcggattggaaactggctctagggaggtggtttcccatgtcattaaacagggtaagatcgtttttgtcctgagtagcgcccttaatccgtggaacaaggagatgggtgatcaccttgtgaaacatggtgatggagtcaaggatattgctttcgaggtagaagactgcgactatatcgtacagaaggccagggagaggggagccaagattatgcgcgaaccttgggtcgagcaagataagttcggaaaagtcaaatttgccgtgcttcagacctatggagacaccacccacacacttgttgagaaaatgaattatatcggtcaattcctgcctggatacgaggcaccagcctttatggatcctctcctgcccaaactgcctaagtgttctttggagatgatcgaccatatcgtcggcaatcagcccgatcaggaaatggtgtccgcatctgagtggtacctcaaaaacctgcagttccaccgcttttggtcagtggatgacactcaagtgcatacagaatacagctccttgaggagcatcgtggtggctaactatgaggagtctatcaagatgcccatcaacgaacccgctcccggaaagaaaaaaagtcagatacaagagtatgtggactataacggcggtgctggtgttcaacacattgctcttaagacagaggacataatcacagctatccgccatctcagagagcgcggtctcgaattcctctcagtgccgtctacttactataagcagcttagggagaagctgaagaccgccaagatcaaggtcaaggagaatatcgacgcgttggaagaactgaaaatcttggtggattacgacgaaaagggatacttgctccagattttcacgaaaccagtccaggacaggcccaccctttttctggaggtcatccaacgccacaatcaccagggcttcggtgccggaaacttcaattccttgttcaaggctttcgaagaggagcaaaaccttagaggaaatctcaccaacatggaaacaaacggtgtcgtaccaggtatg

SEQ ID NO: 125766 - DNA, 1179 bp, Artificial Sequence
  derived and/or modified sequence
atgactacatattcagataaaggagcaaaacctgaaagaggtagattcctacactttcattcagttacattttgggttgggaacgctaaacaagcagcatcattttattgctctaaaatgggttttgaaccattagcttatagaggattagaaactggatcaagagaagttgtaagtcatgtaattaagcaaggaaaaattgtttttgttttatcaagtgctcttaatccttggaataaagaaatgggagaccatttagttaaacatggagatggagttaaagatattgcatttgaagtagaagattgtgattatattgttcaaaaggcaagagaaagaggagccaaaattatgagagaaccttgggtagaacaagataaatttgggaaggttaagttcgcagtacttcaaacttatggtgatacaacacataccttagttgaaaaaatgaattatattggacaatttcttccaggatatgaagcaccagcttttatggatccattattgccaaaattaccaaaatgttcacttgaaatgattgatcatattgtaggaaatcagccagatcaagaaatggtttctgcatcagaatggtaccttaagaatttacagttccatagattttggtctgttgatgatacacaagtacatacagaatattcatctcttagatctattgttgttgcaaattatgaagaatctattaaaatgccaattaacgagccagctcctggaaaaaaaaaatcacaaattcaagaatatgtggattataatggaggtgcaggagttcaacacattgcacttaaaactgaagatattattactgctattagacatttaagggaaagaggattagaatttttaagtgttccatcaacttattataagcaattaagagaaaaattaaaaacagcaaaaattaaagttaaagaaaatattgatgctttagaagaattaaaaattcttgtagattatgatgaaaaaggatatcttttacaaatttttactaagccagttcaagatcgaccaactctttttcttgaagtaattcaacgacataatcatcaaggattcggtgctggaaattttaattcattgttcaaggcatttgaagaagaacaaaacttaagaggtaatttaacaaatatggaaacaaatggagttgttcctggaatg

SEQ ID NO: 125767 - DNA, 1179 bp, Artificial Sequence
  derived and/or modified sequence
atgaccacttactccgataaaggtgccaagccagagcgcggccggtttctgcatttccatagcgtaaccttttgggttggtaatgccaagcaagcagccagcttctactgctccaaaatgggttttgaaccactggcataccggggcttggaaactggttcacgcgaagtggtttcacatgtcattaaacaaggaaagattgttttcgtacttagcagcgcactgaacccttggaataaagagatgggagatcacctggtgaagcatggggatggcgtgaaggacattgcgtttgaggtggaagattgcgattacatcgtgcagaaggcaagagaaaggggtgcaaagattatgcgcgagccttgggtcgaacaagacaaatttggaaaggttaagtttgccgtgcttcagacttacggcgacaccacccatacgcttgtggaaaagatgaactacattggacagtttctccctgggtacgaggcccccgcatttatggatcccctgcttccaaaactgcctaagtgcagccttgagatgattgaccatattgtgggaaatcaacctgaccaagaaatggtgagcgcctcggaatggtaccttaagaaccttcagttccatcgattctggtctgtggacgatacccaagtgcacactgagtactcctccctgagatcgatagtggtcgcaaattacgaagaatcgattaagatgccgattaacgaacccgcgccaggtaaaaagaagtcgcagatccaggagtacgtcgactataatggtggcgcaggagtccagcatattgctctcaagacggaggacataatcaccgcgatcaggcatctccgggagaggggtctggaatttctgtcggtgccctcgacctactacaaacaattgcgggaaaaacttaagaccgcgaagatcaaagtcaaggaaaacatcgatgctctggaagaacttaagattctcgtcgattatgatgaaaaaggataccttctgcagattttcactaagccagtccaggacaggccaactctgttcctcgaagtcattcagcgccacaatcatcaaggatttggagcgggtaacttcaattcactcttcaaggcatttgaagaagaacagaacctgagaggcaatcttaccaacatggaaacgaacggtgtggtgccaggtatg

SEQ ID NO: 125768 - DNA, 1179 bp, Artificial Sequence
  derived and/or modified sequence
atgaccacgtactccgataaaggcgcgaaaccggaacgcggacgcttcttgcacttccactcggtgaccttttgggtgggcaacgcgaagcaagcggcctccttttactgctccaagatgggattcgagccgctggcatacagaggactcgaaaccggatcccgcgaagtggtcagccacgtgatcaagcaaggaaagatcgtttttgtgttgtccagcgctcttaatccttggaataaggaaatgggcgatcatctggtgaagcacggggacggagtgaaggacatcgcattcgaggtcgaggactgcgactacatcgtgcagaaggcgcgcgaacgcggtgccaaaatcatgcgcgagccttgggtcgaacaggacaagtttgggaaggtcaaatttgctgtgctgcagacctatggagatactacgcatactctcgtggagaaaatgaactacattggccagttcctgcctggatatgaagcaccggcgtttatggatccgctgctgccgaagctcccaaagtgctcgctcgaaatgatcgaccatattgtgggaaatcagccggaccaggagatggtgtccgccagcgagtggtacctgaagaatctgcagtttcatagattctggtcggtggacgacacccaagttcatactgagtactcctccctgcgctccatcgtggttgctaactacgaagagtcgatcaagatgccaatcaacgaaccggcgccaggtaaaaagaagtcacagatccaagaatacgtggactacaacgggggagctggagtccagcatattgcgttgaaaactgaggacattatcaccgctatcagacacctccgcgagaggggactggaattccttagcgtcccaagcacctactacaagcagctccgggaaaagctgaaaactgccaagattaaagtcaaggagaatatcgacgccctcgaagagctgaagatcctggtcgattacgacgaaaaggggtatctgctgcagatcttcacgaaaccagtgcaggaccgcccgactctctttctcgaggtgatacagcgccacaatcatcagggattcggagccggaaacttcaactcactgtttaaagcattcgaagaggaacagaacctgcggggaaacctgaccaatatggaaactaacggcgtggtgcctggcatg

SEQ ID NO: 125769 - DNA, 1179 bp, Artificial Sequence
  derived and/or modified sequence
atgactacctactctgataaaggcgcaaagcccgagcgcggtcgcttcctccattttcacagcgtgacattctgggtcggcaacgctaagcaggcggcgagtttctattgttctaagatgggatttgagccgctcgcttaccgcggattggagaccggttcccgagaggtcgtgtcccatgttattaaacaagggaagatcgtgttcgttctctcctccgccctaaacccatggaacaaggagatgggagatcacctggtcaagcatggcgacggtgtcaaggatatcgcattcgaagtggaagattgcgattacatcgtccaaaaggcccgagagcgcggcgccaagatcatgcgcgagccctgggtcgagcaggataagttcggtaaggtcaagttcgcagtgctccaaacgtacggtgacactactcacacactggtggagaagatgaactacatcggtcagttcctgcccggttatgaagcccccgcgtttatggatcctctacttcccaagttgcccaagtgctccctggaaatgatcgaccacatcgttggcaaccagcccgatcaggagatggtgtctgcttcggaatggtatctgaagaatttgcagttccatcgcttctggagtgtggatgatacccaagtccacaccgagtactcgagtcttcgtagcatcgtcgtggccaactacgaggagtcgatcaaaatgcccatcaacgagccggcgcccggcaagaagaaatcccagatccaggaatacgttgattacaatggaggtgccggcgtgcagcatatcgccctgaagactgaggacatcattacagccatccgacacctgcgcgagcggggtcttgagtttctgtcggtcccttccacctactacaagcagctacgcgagaagttgaaaacagctaagattaaggtgaaggaaaacattgacgcactcgaggagctgaaaatcctggtggattacgacgaaaaaggttacctgcttcaaattttcacgaaaccagtccaggaccgcccaaccctcttcctagaagtgattcagcgccacaaccatcagggattcggagccggcaacttcaactcattattcaaggcgttcgaggaggaacagaatcttcggggtaatctaactaacatggagacgaacggcgttgtcccgggcatg

SEQ ID NO: 125770 - DNA, 1179 bp, Artificial Sequence
  derived and/or modified sequence
atgaccacctactcagataagggagcaaagccagagcggggacggttcttgcatttccactcagtgaccttttgggtgggcaacgcaaagcaagcagcgagcttctattgttccaagatgggttttgaacctctggcctatagggggctggaaactgggtcgagagaggtggtatcgcacgtgattaagcagggaaagatcgtgtttgtgctttcctcggcactgaatccgtggaacaaggaaatgggagatcatcttgtgaagcatggtgatggcgtgaaagacatcgcattcgaagttgaagattgtgattacattgtgcaaaaagcccgagagcgaggagctaagattatgcgggagccttgggttgaacaagacaagtttggcaaggtcaagtttgcggtgcttcaaacctacggagacaccactcacactttggtcgagaagatgaactacattggtcagtttcttcctggttacgaggcgccagcattcatggatcccctgctgcctaagctgcccaaatgctcgctggagatgattgatcacatcgtgggcaaccagccggaccaggaaatggtgtcagcatcggaatggtatttgaaaaacctccagtttcatcggttctggagtgtcgacgatacccaggtccatactgaatactcatctcttcggtcgatagttgtggcaaactatgaagaatcgatcaaaatgccgataaatgaacctgcacctggaaaaaagaaatcacaaatccaggaatacgtggattacaacggcggtgccggagtgcaacacatcgcactcaagactgaggacattatcactgcaatacgtcatcttagggaaagaggtttggaatttctgtcggtcccttcaacctactacaagcagctccgggagaagctgaaaacggcaaagattaaagtcaaggagaacattgatgcactcgaagagcttaagattctcgtggactacgacgagaaaggataccttctgcaaatctttaccaagccagtgcaagatcgcccaaccttgttcctggaagtgatccagcggcataatcatcaaggtttcggagccggtaactttaactccttgtttaaagccttcgaggaggaacaaaatctgaggggaaacctgacgaatatggaaaccaacggagtggtgcctggaatg

SEQ ID NO: 125771 - DNA, 1179 bp, Artificial Sequence
  derived and/or modified sequence
atgaccacatactctgacaagggcgccaagcctgagcgaggcagatttctgcatttccactccgtgacattttgggtgggtaacgcgaagcaagctgcttcattctactgtagcaagatgggtttcgaaccgctggcatataggggactagagacaggcagccgggaggttgtctcacacgttatcaaacagggtaaaatcgtttttgtgctgagctcagccttgaacccgtggaataaggaaatgggggaccatctggttaagcacggtgacggagtgaaagacatcgccttcgaggtcgaagattgtgattatattgtgcaaaaggcccgagagagaggcgcaaagatcatgagggagccttgggtcgagcaagataagtttggcaaggtgaaattcgccgtactccagacctacggtgacactactcataccctggtggaaaaaatgaattatatcggacaatttctgccaggatatgaggctcctgcttttatggaccctctgttacctaagctccccaaatgcagcctggagatgatagatcatatagttggaaaccaaccggaccaggagatggtttccgcatccgagtggtatctgaaaaatctccaattccatcgcttctggtccgtggatgacacacaagtgcatacggaatattcctctctgcgctccatcgtcgtggccaactatgaggagtcaattaaaatgcccatcaatgagcctgcacccgggaagaagaaaagtcagatccaagaatatgtagactacaatggaggagctggggttcagcatattgcactcaagaccgaggacatcattaccgctatcaggcacttaagagaaagggggctcgagttcctctcggtccccagcacatactacaagcagctgagagagaagctcaagaccgcaaagatcaaggtaaaggaaaatattgatgctctggaagagttgaagatcctggttgattatgacgagaagggctacctcctccagatctttaccaagcccgtgcaggacagacccactttgtttctcgaggtgattcagcggcataaccaccaaggatttggagccgggaatttcaattctctgttcaaggcattcgaagaagagcagaatctgagaggaaatctaacgaacatggaaacgaatggggtcgtccccggcatg

SEQ ID NO: 125772 - DNA, 1179 bp, Artificial Sequence
  derived and/or modified sequence
atgacaacatacagtgacaagggagctaagcctgagagaggccggttcctgcacttccattccgtcactttttgggtaggcaatgccaagcaagcagccagcttttactgttctaaaatgggatttgaacctttagcctatcgcgggttggagacagggtcgagagaggtcgtgtcgcatgttattaaacagggtaaaattgtgttcgtgctgtcttcggcccttaacccgtggaacaaggagatgggagaccacctggtgaagcatggcgatggagtgaaagacatcgcattcgaagtggaagactgtgactatattgtccaaaaagcacgggaacgaggagccaaaataatgcgagagccttgggttgaacaggataaattcggtaaggtgaagttcgccgtacttcagacctatggcgacactacgcatacactggtggaaaagatgaactacatcggccaatttctcccaggctacgaagcccccgccttcatggatcccctgcttcccaagctacctaagtgtagcctcgaaatgattgaccacatcgttggcaaccagccagatcaggaaatggtgtccgcctcagagtggtacttgaagaatcttcagttccaccgattttggtcagtggacgacactcaggttcacaccgagtatagcagcttaaggagcatagttgtcgctaactacgaggagtcaatcaagatgccaatcaacgaaccagcaccggggaagaagaaatctcagatccaagaatacgtagactacaacggcggtgctggtgtccagcatatcgcgttgaaaaccgaggatattatcaccgctatcagacaccttagagaacggggactggagtttctgtcagtgccctctacatactacaagcaactacgcgaaaaattaaaaaccgcaaagattaaggtcaaggaaaacatcgacgcgcttgaagagctgaagatccttgtcgattacgatgagaaaggttatcttcttcagatcttcactaagcccgtgcaagacaggcctacattattcctcgaagtcatccagagacataatcaccaggggtttggcgcgggaaatttcaatagcctttttaaggccttcgaggaagaacagaacttacgaggcaatctgaccaacatggagacgaacggtgtggtgcccggaatg

SEQ ID NO: 125773 - DNA, 1179 bp, Artificial Sequence
  derived and/or modified sequence
atgactacctattccgataagggggccaagccggagagaggccgctttctccacttccattccgtgaccttctgggtcggaaacgctaagcaggcagccagcttctactgttcaaaaatgggttttgagccacttgcataccggggtctggagacgggctcgagagaggtggtgtcccacgtgattaagcagggtaagattgtgtttgtgttgagcagcgcacttaacccttggaacaaggagatgggagatcacctcgtgaagcacggggatggagtcaaggatatcgcattcgaggtggaagattgcgactacattgtccagaaagcacgagaacgcggtgcaaagatcatgagagagccctgggtggagcaagataagtttggaaaggtgaaattcgccgtgctgcaaacttacggagacaccacccacaccctggtcgaaaagatgaattacattggtcaatttctcccaggatacgaggcgccggcattcatggaccccctgcttcccaaacttccaaagtgtagcttggaaatgattgaccacatcgtgggtaatcaacccgaccaagagatggtgtcagcatccgaatggtaccttaagaaccttcaatttcatcgcttctggtccgtggacgatacccaagtgcataccgagtactcaagtctccgctcgatcgtggtcgccaactacgaggaatccattaagatgccaatcaatgaaccagctcctggcaagaagaagagccagatccaggaatacgtggattacaacgggggagcaggtgtgcaacatattgcgctcaagacggaggacatcataacggcgattcgccatctgcgcgaacggggacttgaattcctttccgtcccatccacctactacaaacaacttcgagagaaactgaaaaccgccaagattaaagtcaaagaaaacatagatgcccttgaggaactgaaaatccttgtcgattacgatgaaaagggataccttctgcagattttcaccaaacctgtccaggatcggcccaccctttttctggaggtgattcaaaggcataaccaccaaggtttcggagccggcaactttaactctctgtttaaggctttcgaggaggagcagaaccttcgaggaaatcttactaatatggaaaccaacggcgttgtgccaggaatg

SEQ ID NO: 125774 - DNA, 1179 bp, Artificial Sequence
  derived and/or modified sequence
atgacaacttattccgataaaggcgccaaaccggagcgtggccgattcttgcattttcattcggtgacgttctgggtcgggaatgcaaaacaggccgcctccttttactgcagtaaaatgggcttcgagcctttggcgtatcgagggctcgagacaggctcccgagaggtcgtgtcacatgttattaaacagggtaaaatcgtctttgtcttgtctagtgcactcaatccatggaataaagagatgggcgaccaccttgtcaagcacggtgacggtgttaaagacattgcttttgaagtcgaggactgtgactacatcgtccagaaggcacgcgaacggggtgctaagattatgagagagccctgggttgagcaagataaattcggaaaggttaagttcgccgttcttcaaacatatggtgatactacacatacactcgttgagaagatgaattatataggtcaattcttgcccggttatgaagcacccgccttcatggatccattactacccaagcttccgaagtgctcattggaaatgatcgaccatattgtgggtaatcaaccggatcaagaaatggtatccgctagcgaatggtatttgaagaacctccaattccatagattctggtctgtggatgacacccaggtccatacagaatattcttcgcttcgatctatcgtcgtggctaactatgaagagagcataaagatgccgatcaacgaacctgcccccggtaaaaagaaaagccaaatccaagagtacgtggattacaatggcggagcgggggttcaacacatcgccctgaagaccgaggacattattacagcgatccgccatctgcgtgagcgaggattggagttcttatctgttccgtcaacgtactacaagcaactccgagagaagttgaagacggctaagatcaaggtcaaggaaaatatcgacgccctggaggagttgaagatccttgtggactacgacgagaagggctaccttctacagattttcactaaaccggtccaggaccgtccaactctattccttgaagtgattcagcgccacaatcatcaagggtttggggctggaaatttcaactcattatttaaggctttcgaggaagagcaaaacctccgcggtaaccttacaaacatggagaccaacggcgtcgttccaggtatg

SEQ ID NO: 125775 - DNA, 1179 bp, Artificial Sequence
  derived and/or modified sequence
atgaccacctattccgacaaaggtgcgaagcctgagaggggtaggttcctccacttccattcggtgactttttgggttggtaatgctaagcaggcagcctctttttactgcagcaaaatgggattcgagcccctggcctatcgcgggctcgagacggggagccgcgaagtcgtaagccatgtgatcaagcagggtaagattgtgttcgtgttgagtagtgccctgaatccatggaacaaagaaatgggggaccatctcgtaaaacatggagatggcgtgaaggatatcgcttttgaagttgaggattgtgattacattgttcagaaagcaagggaacggggagctaaaataatgagggaaccctgggtcgagcaagataaattcggcaaggtgaagtttgcggttctgcaaacgtacggggacacaacccatacacttgtggagaaaatgaactacatcgggcagtttttgcctgggtatgaggctcccgcttttatggatcccttgctcccaaagcttccgaagtgctcactagagatgatcgatcacatcgtgggaaatcagcctgatcaagaaatggtgtctgcaagtgagtggtatctgaagaatctgcagtttcaccggttctggagcgtggacgacacccaagttcataccgagtatagctctctcagatctatagtggtggcaaattacgaggagtcgataaaaatgcccattaatgaacctgctcctggcaagaagaagtcccagattcaggaatacgtcgactacaacgggggcgccggggtccagcacatagccctgaagactgaagacataattaccgccattcgacacctacgtgagcgcggcttagagttcctatccgtgccgagcacctattacaagcaattgagggaaaaactgaaaaccgctaagatcaaagttaaggagaacatagacgcccttgaagagctgaagatcctggttgattatgacgagaaaggatacctcctccagatctttaccaagcccgtccaagaccgccctaccctgtttttggaggttatccagaggcataatcaccagggcttcggtgcagggaactttaacagcctattcaaagccttcgaggaggagcagaacctgcggggcaacctaaccaacatggaaactaacggcgtggtgcctgggatg

SEQ ID NO: 125776 - DNA, 1179 bp, Artificial Sequence
  derived and/or modified sequence
atgactacgtattccgacaagggagctaagcccgaaagaggacgattcttgcactttcattccgtaaccttttgggtggggaatgccaagcaggctgcctctttctactgcagcaaaatgggcttcgagcctcttgcttatagaggcctcgaaacagggtcacgagaagtggtaagccatgttatcaagcaggggaagatagtttttgtgctttcttctgcactgaacccctggaataaggaaatgggggatcatcttgtgaaacacggagacggagtgaaggatatcgccttcgaagtcgaagactgcgattacattgttcagaaggcgcgggagcgaggtgccaagattatgcgtgagccctgggtggagcaagacaagtttgggaaggtcaagttcgccgtcctgcaaacatatggcgatactactcacaccctcgtagagaagatgaattacataggccagtttctgcccggctatgaagctcctgccttcatggatccactcttacccaaactccctaaatgctcactggagatgatcgaccacatcgtgggaaaccagcccgatcaggagatggtttccgcaagtgagtggtacctgaaaaatctgcagtttcacagattttggtccgtagatgatacccaagtccataccgagtatagctcactccgatccattgtcgttgccaattatgaagaaagcatcaaaatgcccattaatgaacccgcccccggaaaaaaaaaaagtcaaatccaggaatacgtggactataacggaggcgccggggttcaacatatcgccctgaaaacggaagacatcatcacagccatccgacatttacgagaaagagggcttgagttcctgagtgtaccctcaacctattataagcagttgagggaaaagttgaaaacagctaagatcaaggtcaaggaaaacatcgatgcattggaagagctcaaaatccttgtcgactacgacgaaaaagggtatctgctccaaatttttactaagcctgttcaggataggcctaccctgtttctggaggtaattcaacggcacaatcaccagggatttggcgctggaaatttcaacagtttatttaaggcttttgaagaagaacagaatctgcgagggaatctaactaacatggagacgaacggtgtggtcccaggaatg

SEQ ID NO: 125777 - DNA, 1179 bp, Artificial Sequence
  derived and/or modified sequence
atgaccacttattcggacaaaggggccaagccggaacggggacggtttctgcactttcacagcgtgaccttctgggttggaaatgcgaaacaagcagcctccttctactgctccaagatgggctttgagccccttgcttaccgcggactggagacgggaagcagagaagtggtgtcgcacgttatcaagcaggggaagatcgtgtttgtccttagcagcgcactcaatccatggaacaaggaaatgggagatcatctggtcaagcatggggacggcgttaaagacatcgcgttcgaagtggaggactgcgattacatcgtgcagaaagctcgggagagaggcgccaaaatcatgcgagagccatgggtcgagcaagataagtttggtaaggtgaagttcgcagtgctgcagacgtacggagacacgacgcataccctcgtggagaaaatgaactacattggacagttcctcccgggatacgaagctccggccttcatggatccactgctcccgaagctgccaaagtgctcgctggaaatgattgaccatatcgtcggcaatcagccagaccaggagatggtttccgcctccgagtggtacttgaagaacctgcaatttcacagattctggtcagtggacgacacccaagtgcacaccgaatatagctcgctgcgctcgatcgtcgtggccaattacgaggaatccatcaagatgcccattaacgagccggcgccgggtaaaaagaagtcgcagatccaggaatatgtcgactacaacgggggtgcgggcgtgcagcatattgcccttaagaccgaagacatcatcactgccatccgccatcttcgcgagcggggtctggaattcctcagcgttccgtctacctactacaagcagctcagggagaagctgaagaccgcgaaaatcaaagtcaaagaaaacatcgacgctcttgaggagctgaagatcctggtggattatgatgagaagggctacctcctgcaaattttcaccaagcccgtgcaggaccgcccaaccctctttctggaagtaattcagcggcataatcatcaaggttttggagctggcaacttcaattcattgttcaaagccttcgaagaagaacaaaacctgcgtggtaatctcactaatatggaaactaatggagtggtcccagggatg

SEQ ID NO: 125778 - DNA, 1179 bp, Artificial Sequence
  derived and/or modified sequence
atgaccacgtactccgacaagggtgccaagcccgagagaggacgttttctgcatttccactcagtaactttttgggtgggcaacgccaagcaggcggccagtttttattgcagtaaaatgggctttgagccactggcttaccgggggctagaaacaggatctagagaggtggtatcacacgtgatcaaacagggtaagatcgtgttcgtgctgtccagcgccctgaatccatggaataaggaaatgggtgaccatctagtcaagcatggcgacggggtcaaggatattgccttcgaagtcgaagattgcgattacatagtacaaaaagctcgagagagaggggccaagataatgcgagagccctgggtggagcaggacaagttcggtaaggtaaagtttgcagtgctgcaaacctacggggacacaacccacacacttgttgaaaaaatgaactacattggccagttcctgccaggatacgaggctcccgcctttatggacccccttttgccaaagctacctaaatgttctctagaaatgattgatcacatcgtgggaaaccagcctgaccaggagatggtgagcgcctctgagtggtatctcaagaatctgcagtttcaccgattctggagtgtggatgatacgcaggtccatacggaatatagctctctacgctcaatcgtggtcgccaactacgaggagtcaataaagatgccaatcaacgagccagcacctggcaaaaaaaagtcacagatacaggaatatgtggattacaacggaggagcaggcgttcagcacattgctttgaaaaccgaggacattattactgcaatcagacacttgagagagcggggactcgaatttctcagcgttccctcaacttactataaacagttgcgggagaagttaaagaccgccaaaattaaggtcaaggagaatattgacgccctcgaagagctgaagatcttggttgactatgacgaaaaggggtacttgctgcaaatattcacaaagccagtgcaggaccggcccaccttgttcctagaagtgatccagcgccacaaccatcagggattcggtgccggaaactttaactccctttttaaggctttcgaggaggaacagaacctgcgaggcaatctgacgaatatggaaaccaacggggtggtgccgggaatg

SEQ ID NO: 125779 - DNA, 1179 bp, Artificial Sequence
  derived and/or modified sequence
atgacgacctacagcgataaaggtgcaaagcccgagcgggggcgcttcttgcactttcattcggtgactttttgggtcggcaacgcaaaacaagcggcctccttctactgttccaagatgggattcgagccactcgcgtaccggggcctcgaaactggatcgcgagaggtggtgtcacacgtgatcaagcaaggcaagatagtttttgtgctctcgtcggcattgaatccatggaataaggaaatgggtgatcatctcgtcaaacatggagatggcgtgaaggatattgcattcgaggtggaagattgcgactacatagtgcaaaaagcacgagagcgcggggcaaagattatgcgagaaccttgggtcgaacaagataagtttggtaaggtgaagttcgcagtgcttcaaacctacggagatactactcacaccctggtggagaagatgaactacattggacagtttttgcccggatatgaagcacctgcctttatggaccccctgcttccaaagctgcctaaatgcagcctcgagatgattgaccatatagtgggcaatcagcctgaccaagaaatggtttcggcgtcagaatggtaccttaagaatctccagtttcacagattttggtccgtcgacgatacccaggtgcacaccgaatacagctcgcttcgatcgattgtcgtcgcgaattacgaagaatccattaagatgcccattaatgagcctgccccaggtaagaagaagtcacaaatccaagaatacgtggattacaacggaggcgcaggcgtgcagcacatagcactcaagaccgaggatatcataaccgccattcgtcatctgcgcgaaagaggacttgaattcctctccgtgccttcgacctattacaagcaacttagggagaaacttaagactgcgaagatcaaagtgaaagaaaacattgatgcactcgaagagcttaagattcttgtggattacgatgagaagggttacctgctgcagatctttactaaacctgtccaggaccggcccacccttttcctggaagtcatccagagacataaccaccagggttttggagctggtaacttcaactcgttgttcaaggcatttgaggaagaacagaacctgagaggaaaccttaccaacatggaaaccaatggcgtggtgcctggaatg

SEQ ID NO: 125780 - DNA, 1179 bp, Artificial Sequence
  derived and/or modified sequence
atgacaacttacagtgataagggagctaagcctgagcgcgggcggtttcttcatttccactccgtcactttctgggtaggcaacgcaaaacaagctgcttcattttattgcagtaagatgggttttgagcctcttgcgtataggggtctggaaacgggctcaagggaggttgtttctcacgtcattaagcaaggcaagatagtttttgtactatcaagtgcactgaatccgtggaacaaagagatgggagaccatctggtgaaacatggcgatggggtgaaagatattgccttcgaggttgaagactgtgattatattgtccaaaaggcaagggagcggggggccaaaattatgagagagccatgggtcgagcaggacaagttcggcaaggtgaagtttgctgtactgcagacctacggcgacacgacccatacacttgtagagaagatgaactacatcggtcagtttctgcccgggtacgaagccccagcctttatggaccccctactgcccaaattaccaaagtgctctcttgagatgatcgaccatatagtgggtaatcaacccgaccaagaaatggtgtctgcctcagagtggtacttaaagaatcttcagttccatcggttttggagtgtggacgatacacaggtgcacacagaatacagcagccttcggagtattgtagttgctaactatgaggaatctatcaagatgcccattaacgagcctgcaccaggaaagaagaaatcccagatacaagagtacgtggactacaatggcggcgcaggggtacaacatatagcccttaaaaccgaagatatcattacggctatccggcacctgcgcgaaagaggtctggaatttttgtctgttccctccacatattataagcagcttcgggagaagctgaaaacggcaaagattaaagtgaaagagaacattgacgctctggaagagctgaagatcctggtcgactacgacgagaaagggtatctgctgcagatctttacgaagcctgtgcaggacagacccactctcttcctcgaagttattcagcggcataaccatcagggtttcggcgctggtaattttaattctctctttaaagctttcgaagaggaacaaaatctgcgagggaacctgacaaatatggagacgaatggggttgtacctggtatg

SEQ ID NO: 125781 - DNA, 1179 bp, Artificial Sequence
  derived and/or modified sequence
atgaccacatactccgacaagggggccaaaccggagcgaggacggttcctgcacttccatagcgtgactttctgggtcggcaatgcaaagcaggccgcgtccttctattgcagtaagatgggtttcgagccactggcttatcggggcctagagaccggaagcagggaggtagtctctcatgttatcaagcagggcaaaatcgtctttgtcctcagcagcgcccttaatccttggaataaggagatgggagatcacctggtaaaacatggggatggagttaaagatattgcttttgaggtagaggattgtgattatatagttcaaaaagccagggaacggggtgccaaaattatgcgagagccttgggtcgaacaagataaatttggaaaggtgaaatttgcagtgctccagacctacggcgacacgacgcacaccctggtggaaaagatgaactatatagggcagttcctgccgggatacgaagcccccgccttcatggatcccttacttccaaaacttcctaaatgctcattggaaatgattgaccacatcgtggggaatcagccagatcaggagatggtatccgcctctgagtggtacttaaaaaacttgcagttccaccggttttggagcgtggatgatacgcaagtacacacggaatattcctctctgagaagtatcgtagtcgcgaactacgaagaaagtataaagatgcctattaatgagcctgctccgggcaagaagaagagccagattcaggagtacgtggattacaatgggggagccggagtccagcatattgccctgaaaacagaagacataatcacggctatccggcatctccgtgagcgggggttggaatttctgagtgtgccctcaacctattacaagcaactccgcgaaaagctcaagacagccaagatcaaagtgaaggaaaacatcgatgccctggaagagcttaagattcttgtggactatgacgagaagggatatctgctgcagatttttacaaagcccgtgcaggatcgcccgaccctattcctggaagttatccagcgacacaatcatcaggggttcggtgcgggtaactttaacagcttatttaaagctttcgaggaggagcagaaccttcgaggtaatcttacaaacatggagacaaatggtgtggtcccggggatg

SEQ ID NO: 125782 - DNA, 1179 bp, Artificial Sequence
  derived and/or modified sequence
atgaccacatacagcgataaaggcgccaagcccgagagaggtagattcctccatttccactccgtgactttttgggtcggtaacgccaaacaggccgctagcttctactgcagcaagatgggatttgagcccttggcttataggggtctggagacaggttcccgcgaagtcgtttcccacgtgataaagcaaggtaaaatcgtgtttgttctctcctctgccctcaatccatggaacaaggagatgggcgaccatctggttaagcacggagacggtgtcaaggacatcgcattcgaagttgaagactgcgactatattgtgcagaaggctagggagcgcggtgcaaagatcatgcgtgagccatgggttgagcaggacaagttcggcaaggtcaagttcgccgtcctgcagacttatggtgatactacacatacattggtcgagaaaatgaattacatcggacagttcttgccaggttacgaagcacccgctttcatggatcccctgctgcctaagttgcctaagtgttctcttgagatgatcgaccacatcgtgggaaaccagcccgaccaagagatggtgtccgcttctgagtggtacctcaagaacctccaatttcatcgcttctggtctgtcgacgacactcaagtgcataccgagtattcctctcttaggtcaattgtagtggccaattacgaagaaagcatcaagatgcctataaacgagccagctcctggcaagaaaaaatcccagattcaggaatacgtggactacaacggcggagctggtgttcagcacattgcccttaaaaccgaggatatcatcacagcaattagacacctccgcgagcgcggactcgaatttctctcagtgcccagcacttactataagcaattgcgcgagaagttgaaaacagctaagatcaaggtgaaagagaatatcgacgccctcgaggaactgaagatcctcgtcgactacgacgaaaagggatacctgttgcagattttcaccaagcctgtgcaggacaggcccacactgtttctcgaggtgatccaacgtcacaaccaccaaggatttggcgctggtaactttaatagcctgttcaaagccttcgaggaggaacagaatctgaggggaaatctgaccaacatggagactaatggcgttgtaccaggtatg

SEQ ID NO: 125783 - DNA, 1179 bp, Artificial Sequence
  derived and/or modified sequence
atgaccacttacagtgataagggagcaaagccggaacgcggacggttcttgcacttccactcagtcacgttctgggtgggaaacgcaaaacaagcggcgagcttctactgttctaagatgggattcgagcctctggcttacagaggacttgagactggatccagagaggttgtgtcacacgtgataaagcagggaaagatcgtgttcgtgctgtcgtcggcattgaacccttggaacaaagagatgggagatcatctggtcaaacacggagatggagtgaaggacatcgcctttgaagtggaggattgtgattacatcgtgcagaaagcccgggagagaggagctaagatcatgcgagagccgtgggtggaacaagataagttcggcaaggtgaaatttgcggtcttgcagacctacggagacaccactcatacgctggttgagaaaatgaattacatcgggcaatttctgcccggatacgaggcaccagcgttcatggatccgctcctcccaaagctgccgaagtgcagcctcgagatgatcgaccacattgtgggaaaccaacctgaccaagaaatggtgtccgccagcgaatggtatttgaagaaccttcagttccatcgcttctggagcgtggacgacacccaggtgcataccgaatactcgagcctgcgctcgatcgtggtggccaactacgaggaatcgatcaagatgccgatcaatgagccggcgccgggtaagaaaaagagccagatccaggaatacgtggactataacggcggagcgggagtccaacacatcgccctcaaaaccgaggacattatcaccgcaatccggcacctccgcgaaagaggcctggagtttctctcagtcccttccacgtattacaagcaactcagagagaagctcaaaactgcaaagatcaaggtgaaggagaatatcgacgcactggaagaactgaagatcttggtggattacgacgaaaagggatacctgctgcaaatctttactaaaccagtgcaggaccgcccgactctgtttctggaagttatccaaaggcacaaccatcagggatttggggctggaaactttaactcgcttttcaaggccttcgaggaagagcaaaaccttcggggaaacctcaccaacatggagactaatggggtggtgccaggaatg

SEQ ID NO: 125784 - DNA, 1179 bp, Artificial Sequence
  derived and/or modified sequence
atgaccacatacagcgacaagggcgcaaaaccagaacggggaaggtttctgcatttccactctgtgacattttgggttggtaatgccaagcaggctgcaagcttttactgcagcaagatgggattcgagccactagcttaccgaggcttggagacgggctccagggaggttgtgagtcacgtgattaagcagggtaagattgtgttcgtcctgagctccgctctcaatccatggaacaaggaaatgggagaccacctggtcaagcatggcgacggggtcaaggacatcgcattcgaggtggaggattgcgattacattgtccaaaaagcgagagagcggggggcaaaaatcatgcgagaaccctgggtcgaacaggataagtttggcaaagttaagtttgctgttctgcagacgtacggcgacacaacgcacacactggtggagaagatgaattatattgggcagtttctgcctggatacgaagcaccggctttcatggaccctttactgcccaagctgccaaaatgctccctggaaatgatcgatcatattgttggaaaccaaccggatcaagagatggtttctgcgtccgagtggtaccttaaaaatctgcagttccaccggttttggtccgtggatgatactcaggttcacaccgaatactcctcgctaaggagcattgtagtggctaattacgaagaaagtataaagatgcctataaacgagcccgctcctgggaagaagaagtcacagatacaggaatatgtcgactacaacggcggagcgggagttcagcatattgcccttaagacagaggacatcataacagctattcggcatctgcgagaacgcggcctggagttcctctctgtcccttctacatactataagcagctcagagaaaaacttaaaaccgcaaagattaaggttaaggaaaatatcgatgcgttggaggagctcaagattctggtcgactatgacgaaaagggctacctgctccagatcttcacgaaacccgtgcaggacagacctactctttttcttgaggtgatccaacgccacaatcatcagggcttcggtgccggaaacttcaattcgttgtttaaagccttcgaagaggaacagaatctcagggggaacttgaccaatatggagaccaacggagtggtgcctggcatg

SEQ ID NO: 125785 - DNA, 1179 bp, Artificial Sequence
  derived and/or modified sequence
atgacaacttattccgacaagggcgctaagccggaacgcgggcgattcctgcacttccactccgtgacgttctgggtcggaaacgccaaacaggccgccagcttctactgctcgaaaatgggcttcgagcccctagcctaccgcgggctggaaaccggaagccgggaggtggtgtcccatgtcatcaaacaagggaagattgttttcgtgctgtcctcagccttgaacccctggaataaggagatgggagatcacctggtgaaacacggtgacggcgtgaaggacatagccttcgaagtcgaagattgtgattacatcgtccagaaagcgagagagaggggcgccaagatcatgcgcgaaccttgggtggagcaagacaagttcggtaaggtaaagttcgctgtgttgcaaacatatggcgataccacacatacgctggttgagaagatgaattatatcggccagtttctccccggctacgaagcccccgccttcatggatccacttctgccgaagctgccgaagtgcagcctggagatgatcgatcacatagtcggcaaccaaccagaccaggaaatggtctccgcatccgaatggtacctgaagaatctgcagttccaccgtttctggtccgtggatgatacgcaggtacacacggagtactccagtttgaggagtattgtggtcgccaactacgaagaaagtatcaagatgccaatcaatgagcctgcgcctggcaagaaaaagtcccagatacaagagtatgtagactacaatggaggggccggcgtgcagcacattgccctgaaaacggaggatatcatcaccgccatcaggcatcttcgagaaaggggtctagagttcctgagcgttccttcgacctattacaaacaactacgcgaaaagctgaagacagccaaaattaaggtgaaggagaacatcgatgcccttgaggaactgaaaattctggtcgactatgacgagaagggttacctactccaaattttcactaagcctgtgcaagaccgtccgacgctgttcctggaagtcatccaacggcataaccatcaaggcttcggtgctggtaatttcaatagcctgttcaaggccttcgaagaggagcaaaacctgcggggcaatttaactaatatggagacgaacggagtcgtccccggtatg

SEQ ID NO: 125786 - DNA, 1179 bp, Artificial Sequence
  derived and/or modified sequence
atgactacgtattcggacaaaggggcaaaacctgagagaggccgttttttgcactttcatagtgtgaccttctgggttgggaatgccaagcaggcagcttccttttattgctccaagatgggtttcgagcccctggcgtaccggggactcgagactggatcacgggaggtcgtgtcacacgtcattaaacaaggaaaaatcgtctttgtactgtctagcgcacttaatccatggaataaggaaatgggcgaccacctagttaaacacggggatggcgtgaaggacatcgctttcgaggtggaggattgtgactacatcgtacagaaagccagggaacgcggggcaaagattatgagggagccctgggtggagcaagataaatttggtaaggtcaaattcgccgtgctgcagacgtacggggacactacgcacacattagtggaaaagatgaactatatcggacagtttctgccaggatatgaagcacctgctttcatggatcctttactccccaaactgcctaagtgctcattggaaatgattgatcatattgtgggcaaccaacccgatcaggaaatggtgtcagctagcgaatggtatttaaagaacctccagttccatagattttggagcgtagatgacacacaggtgcatacagaatactcttcccttagatctatcgtggtggccaactacgaagagagtatcaaaatgcccattaatgaacctgctcctgggaaaaagaaaagccagattcaggagtacgtggattacaatggaggggccggcgtgcagcacatcgcccttaagaccgaggatattataactgcaatcaggcacctgcgagaaagaggactcgagttcctgtccgtgccatccacttactacaaacaactgagggagaagctgaagaccgctaaaatcaaagtcaaagaaaacattgatgcattggaggagctgaaaatcttggtggactatgatgaaaagggctacctcttacaaatcttcacaaaacccgtgcaggatcggcccactctcttcttagaggtcatccagagacataaccaccaaggcttcggggcaggtaacttcaatagccttttcaaggcattcgaggaggagcaaaatctgcggggcaaccttaccaatatggagacaaatggagtcgtgccaggcatg

SEQ ID NO: 125787 - DNA, 1179 bp, Artificial Sequence
  derived and/or modified sequence
atgactacatacagtgataagggcgctaaacccgagagagggagatttctgcactttcactctgtcacattttgggtgggtaatgcaaaacaggccgcaagcttctactgcagtaagatgggatttgagcccctggcataccgagggttggagactggtagtagggaggtggtgagtcacgtcattaagcagggaaagatcgtcttcgtcctgagcagcgcgctcaatccgtggaataaagagatgggagatcacctggtgaagcatggcgatggggtaaaggatatcgcgttcgaagtcgaggattgcgattatatcgtccagaaggctagggaaagaggcgccaagattatgcgcgagccctgggtggagcaggacaagtttgggaaggtgaagtttgccgttctgcagacctacggcgacacaactcacaccctggtcgagaaaatgaactatattggacagttcctgcccggctatgaagctcccgctttcatggaccctctgctgcctaagctgccgaaatgcagtctcgagatgatcgaccatattgtgggcaatcagcccgaccaggaaatggtcagtgccagcgaatggtatctgaagaacctgcagttccatcgcttttggagtgtagatgatacgcaagtccacacagagtattcttccctgaggtccattgtggtcgctaattacgaggaaagcatcaagatgcctatcaatgagcctgcccctggcaaaaaaaaatcacaaattcaggaatacgtagactacaatggaggcgcaggagttcaacacattgcactcaagaccgaagacattatcactgcaatccggcacctgagggagagaggtctggagtttctgtccgtgccttcaacttactataagcaactgagagagaaactcaagacggctaaaattaaagtgaaagagaatattgacgctcttgaggagctgaaaatcttggtcgactacgatgaaaaaggatacctcttgcaaattttcaccaagccagtgcaggaccgccctaccttgtttctggaagttatacagcggcacaaccaccaaggtttcggtgccggcaactttaattctctgttcaaggcattcgaggaggagcagaacctgagaggcaacctgactaacatggagacaaatggagtcgtgcctggtatg

SEQ ID NO: 125788 - DNA, 1179 bp, Artificial Sequence
  derived and/or modified sequence
atgactacctacagtgacaagggcgcgaaacccgagaggggtcgtttccttcacttccacagcgtgacattttgggttgggaatgccaaacaggctgcgagcttctactgttcaaagatgggatttgagcctttggcctatcggggacttgagaccggaagcagagaagtggtatctcacgtgatcaagcagggcaagatcgtcttcgtactgtcatctgccttgaatccttggaataaagagatgggcgaccaccttgtgaaacacggcgatggcgtgaaggatattgccttcgaggtcgaggattgcgattatatcgtacaaaaggcaagagaacgcggcgccaagataatgcgtgaaccttgggttgagcaagacaagttcggaaaagtcaaattcgcagtgcttcagacctatggagacacaactcacaccttggtggaaaagatgaattacattggccagttcctccctgggtatgaagctccagcctttatggatccattgttgccaaagctcccgaagtgcagcctggagatgatagatcatattgtgggtaaccagcctgatcaggaaatggtttcagcaagcgaatggtacctaaaaaatctgcaattccacagattttggtccgtggacgacactcaggtgcatacagagtatagctctctccgaagcattgtggtggcgaattatgaggaatctataaagatgcccataaatgagccagctcctggtaagaaaaaatctcagattcaagaatatgtggactacaatggcggggctggggttcagcacattgctctgaagaccgaggacattattacagccattcggcaccttagggaacggggtttggaattcctctctgtcccttcaacatattacaaacaactgcgcgagaaactgaagaccgcaaagattaaggttaaagaaaacatcgacgccttagaggagctgaagatacttgtcgactacgatgaaaaagggtacctgctgcagattttcacaaagcctgtccaggatcggccaactttgttcctggaagtcatccagcggcacaaccaccaaggctttggggcagggaacttcaatagcctttttaaggccttcgaggaggagcagaatcttcgggggaacctgacaaacatggagactaatggcgtcgtacctggcatg

SEQ ID NO: 125789 - DNA, 1179 bp, Artificial Sequence
  derived and/or modified sequence
atgaccacctactcagacaaaggagccaagcctgaacgcggacgcttcctgcattttcattccgtgaccttttgggtgggaaacgccaaacaagccgcttcgttctactgcagcaagatgggattcgaacccctcgcatacagagggctggaaactggatcccgggaggtcgtgtcgcacgtcattaagcaaggaaagattgtttttgtgctgtcgtcggccctcaacccttggaataaggaaatgggcgatcacctggtcaagcacggcgacggtgttaaggacatcgccttcgaggtggaggattgtgactacatcgtgcaaaaagctcgcgaacggggagccaagatcatgagggagccatgggtggagcaggataagtttggcaaggtgaagtttgcggtgttgcagacgtacggagacaccactcatacgctggtagaaaagatgaactacatcggacagttcctcccaggatacgaagcaccagcttttatggatccgctcctcccgaagctccccaaatgctcgctggagatgatcgaccacatcgtgggaaaccaacccgaccaggaaatggtcagcgcctcggaatggtacttgaaaaacctgcaattccacagattttggtccgtcgacgacacccaagtgcataccgaatactcatcgctccgctcaatcgtggtcgccaactacgaggaatcgattaagatgccaatcaacgagccggcgccgggtaaaaagaagtcacagatccaggagtatgtggactacaacggaggagcgggcgtgcagcacatcgcactgaaaactgaggatatcatcactgccatccggcacctgcgcgaaaggggccttgagttcctgtccgttccgagcacctactataagcaacttcgggaaaagctcaagaccgccaagatcaaggtcaaggagaatatcgacgcgcttgaggagctgaagatcctcgtcgactatgacgaaaagggatacttgctgcaaatcttcaccaagcctgtgcaggatcgcccgactctgtttctcgaggtcattcagaggcataaccaccaaggattcggcgcaggaaactttaacagcctgttcaaagcgttcgaggaggaacaaaatctgaggggaaacctcactaatatggagactaacggagtggtcccaggtatg

SEQ ID NO: 125790 - DNA, 1179 bp, Artificial Sequence
  derived and/or modified sequence
atgactacgtactcggacaagggagcaaagccggagcgaggaagattcctgcacttccatagcgtgactttctgggtgggaaacgctaagcaggccgcatcgttctactgctcgaagatgggctttgaacccctggcgtaccggggactggaaaccggctcgcgcgaggtggtgtcgcacgtcatcaagcagggtaaaatcgtctttgtcctgtcatcggccctgaacccttggaataaagaaatgggagatcatctggtgaaacacggagacggagtgaaagatatcgcctttgaggtcgaggattgtgactacatcgtccagaaggctagggaacgcggcgctaagatcatgcgagaaccgtgggtcgagcaagacaagttcggaaaggtgaaattcgcagtgctgcaaacttacggagacaccactcataccctggtggaaaagatgaactacatcggccaatttctgccgggatatgaggcgcctgcattcatggatccacttctgccaaagctccctaaatgttcactggaaatgatcgaccacatcgtgggaaaccagccggatcaggagatggtgtcagcgtcggaatggtacctgaaaaaccttcaatttcatagattctggtcggtggacgatactcaagtgcacactgagtattcctccctccgcagcatcgtggtggccaattatgaggagtcgatcaagatgccaatcaatgaacccgccccagggaaaaagaaatcacagattcaagaatatgtcgactacaacggaggagctggagtgcagcacatcgccctgaaaactgaggacattatcaccgcgatccggcacttgagggagcgcggactcgagttcctctcagtgcccagcacctactataaacagcttagagagaagctcaagaccgcgaagattaaggtgaaggaaaacatcgacgcactcgaggaattgaagattctcgtggattacgacgaaaagggatacttgttgcagatctttaccaaacccgtgcaagacagacctaccctgttcctggaagtgattcagcggcataatcaccaaggattcggggcgggtaacttcaacagccttttcaaagcctttgaagaagaacagaatctgagaggaaacctcactaacatggaaaccaatggagtagtgccgggcatg

SEQ ID NO: 125791 - DNA, 1179 bp, Artificial Sequence
  derived and/or modified sequence
atgactacgtactctgataagggagccaaacctgagcgcggtcgcttcctccacttccactcggtgactttctgggtcggaaacgccaagcaggccgccagcttttactgcagcaagatgggatttgaacccctcgcatacagggggctggaaactggatcaagggaggtggtgtcgcatgtcattaaacaggggaagatcgtgttcgtgctgtcctcggctttgaacccttggaacaaggagatgggcgaccatctcgtgaagcatggcgatggtgtgaaggacatcgcgttcgaggttgaagattgcgactatatcgtgcagaaagcacgggagagaggtgcgaagatcatgagggaaccttgggtcgaacaggacaagttcggcaaggtcaagtttgccgtcctgcagacctacggcgacaccactcatacgctggtcgaaaagatgaactacatcgggcagttcctgccgggatacgaagctcccgcctttatggacccgctgctgccgaagctgccaaagtgctcactggagatgatcgatcacatcgtgggcaatcagcccgaccaggaaatggtgtcggctagcgagtggtacctgaaaaacctgcagttccatagattctggagcgtggatgatactcaagtgcacaccgaatactctagcctgcgcagcatcgtggtggctaattacgaagagtccatcaagatgccaatcaacgagccggccccggggaaaaagaaatcacagatccaagaatacgtggactataatggaggtgcgggggtgcagcacatcgcgctcaaaactgaggatatcatcactgcaatcagacacctgcgtgaacggggccttgaattcttgtcggtgcccagcacctactacaagcaactccgcgagaaactgaaaactgcgaaaatcaaggtcaaggagaacatcgacgccctggaggaactgaaaatcctggtggactatgatgaaaagggttacctgttgcaaatcttcactaaaccggtccaggatcggcctactctctttctggaggtgatccaaagacacaaccaccaaggatttggcgccggtaacttcaatagcctcttcaaggctttcgaggaggaacagaatctgcggggaaacctgacgaacatggaaaccaacggtgtggtcccggggatg

SEQ ID NO: 125792 - DNA, 1179 bp, Artificial Sequence
  derived and/or modified sequence
atgactacatacagtgataaaggggctaaacccgagcggggtcggttcctgcactttcatagcgttacgttctgggtggggaacgccaagcaggcagcaagcttttattgcagcaagatgggttttgagcccctagcgtatcgtggcttagagacaggatcgagggaggtggtcagtcatgtcattaaacaaggcaagatcgtctttgtcctttcctccgccctcaatccctggaataaagaaatgggcgaccatctggtcaagcacggggacggtgtcaaggacatcgcatttgaggtcgaagactgcgattatattgtgcaaaaagctagggagaggggagctaagattatgcgtgagccatgggtggagcaggataaatttggcaaagttaagtttgcagtgctgcagacctatggagatacaacacataccctggtggagaagatgaattacattgggcagtttctccctggttacgaggcgcccgcctttatggatccacttctccctaagctgcccaaatgttccttggagatgattgaccacattgtgggaaatcagcccgatcaggagatggtcagcgcatccgaatggtacttgaagaatctgcagttccacaggttttggagcgttgacgacacacaggtgcataccgaatatagctcactgaggagcattgtggtcgcaaattacgaggagagcatcaagatgcccatcaatgaacccgcaccgggcaaaaaaaagtctcagatccaagaatacgtagactataacgggggggccggcgtccagcatattgccctcaagactgaggatattattaccgccatccggcacctacgcgagcggggccttgagttcctctccgttccgagcacatactataaacagctgagagagaagctcaagaccgccaagatcaaagttaaggagaatatcgacgctcttgaggagttgaaaattctcgtcgactacgacgagaaagggtatctgctgcagatcttcacaaaaccggtgcaggataggccaactttgtttctggaggtgatccagcgacacaaccaccaggggtttggcgcgggcaacttcaatagtcttttcaaggcgtttgaggaagagcagaatctgcggggcaacctaacaaacatggagacgaatggagttgtgcctggcatg

SEQ ID NO: 125793 - DNA, 1179 bp, Artificial Sequence
  derived and/or modified sequence
atgacaacctactccgataagggtgctaagcctgagaggggcagattcctgcacttccatagcgttactttttgggtgggcaacgccaaacaggctgcaagtttttactgctcaaagatgggcttcgaacccctggcctatcgagggctggaaaccgggagcagagaagtcgtgagccatgttatcaaacagggcaagattgtgttcgtgttgtcttccgcactgaacccatggaataaggaaatgggggatcatttggttaaacacggtgacggagtgaaggacatcgcctttgaagtggaagattgtgactatatcgtgcagaaggccagggagaggggagctaagattatgagagagccttgggttgaacaagataagttcggcaaggtcaaattcgcagtcctgcagacctacggggacacaacccacaccctcgtggagaagatgaattacattggtcagttcctccctgggtacgaagcacctgccttcatggaccccctgctgccgaaacttccgaaatgctccctcgagatgattgaccacattgtcggaaatcaaccagaccaagaaatggtgtcggctagtgagtggtacctaaaaaatctccagttccatcgattctggtctgtggacgacacacaggtccacactgaatacagttccctcaggtctatcgtggttgccaactacgaagaatccatcaagatgcctatcaacgaacctgcccccggaaagaagaagtcccagattcaggaatacgtcgactataatggcggggccggcgtgcagcatatcgctctcaagactgaagatattatcactgccataagacaccttcgagagcgtggcctggaattcctgtccgtcccctctacatattacaagcagctgcgggaaaagttgaagaccgctaagattaaagtgaaggaaaacattgatgccctagaggagctgaagattctggtggactacgatgagaaaggctatctcctccaaatatttacaaagccagtgcaagatcgtcccactttatttctggaggttatccagaggcacaatcaccagggtttcggggcaggaaacttcaactccctattcaaggcgtttgaggaagagcagaacctgcgtggcaatctcactaatatggaaactaatggggtagttcccggcatg

SEQ ID NO: 125794 - RNA, 1325 nt, Artificial Sequence
  derived and/or modified sequence
gggaaauaagagagaaaagaagaguaagaagaaauauaagagccaccaugacaacauauucagauaaaggggccaagccagaacgggguagauuccuccacuuucacucggucacguucuggguagggaacgccaagcaggcggcgucauucuauugcagcaaaaugggauucgaaccuuuggccuaccgcgguuuggagacugguucgcgcgagguaguaagccacgugaucaagcaggggaagaucguguuuguguugucgucggcacugaacccguggaacaaagaaaugggcgaccaccucgucaagcauggggacggagugaaagacauugccuuugagguggaggauugugacuacaucguccagaaagcgcgagagaggggagcgaaaaucaugagggagcccugggucgagcaggauaaguuuggaaaggugaaauuugcgguccuccagacauacggagacacgacacauacguugguggaaaagaugaauuacaucggucaguuucugccgggguacgaggcaccggccuucauggacccucuccuuccuaaacugcccaaaugcucgcucgaaaugauugaccacauugucggaaaucagcccgaccaggagaugguguccgcgucagagugguaucucaagaacuugcaguuccaccgcuucuggucagucgaugauacucaaguacauacugaauacuccuccuugagaucgaucguagucgcgaauuacgaagaguccaucaagaugcccauuaaugagccagcaccggggaaaaagaagucgcaaauccaagaguacguggacuauaacggaggagccggugugcagcauauugcgcucaaaaccgaagauaucauuacggcuauccgccacuugcgggaacgagggcuggaauuucucagcgucccuuccacguauuacaaacagcuuagagaaaaacuuaagaccgcgaagauuaagguaaaggagaacaucgaugcgcuugaggagcuuaagauccuuguggacuaugaugagaagggcuaucuguugcaaaucuucaccaagcccguccaagauaggccgacccuguuccuugaggugauucagagacacaaccaucagggguuuggagcuggaaacuucaauucgcuguuuaaagcauucgaggaagaacagaaucuccggggaaaucuuacaaacauggaaacgaaugguguaguccccggcaugugauaagcugccuucugcggggcuugccuucuggccaugcccuucuucucucccuugcaccuguaccucuuggucuuugaauaaagccugaguaggaag

SEQ ID NO: 125795 - protein, 699 aa, Artificial Sequence
  derived and/or modified sequence
MGHHRPWLHASVLWAGVASLLLPPAMTQQLRGDGLGFRNRNNSTGVAGLSEEASAELRHHLHSPRDHPDENKDVSTENGHHFWSHPDREKEDEDVSKEYGHLLPGHRSQDHKVGDEGVSGEEVFAEHGGQARGHRGHGSEDTEDSAEHRHHLPSHRSHSHQDEDEDEVVSSEHHHHILRHGHRGHDGEDDEGEEEEEEEEEEEEASTEYGHQAHRHRGHGSEEDEDVSDGHHHHGPSHRHQGHEEDDDDDDDDDDDDDDDDVSIEYRHQAHRHQGHGIEEDEDVSDGHHHRDPSHRHRSHEEDDNDDDDVSTEYGHQAHRHQDHRKEEVEAVSGEHHHHVPDHRHQGHRDEEEDEDVSTERWHQGPQHVHHGLVDEEEEEEEITVQFGHYVASHQPRGHKSDEEDFQDEYKTEVPHHHHHRVPREEDEEVSAELGHQAPSHRQSHQDEETGHGQRGSIKEMSHHPPGHTVVKDRSHLRKDDSEEEKEKEEDPGSHEEDDESSEQGEKGTHHGSRDQEDEEDEEEGHGLSLNQEEEEEEDKEEEEEEEDEERREERAEVGAPLSPDHSEEEEEEEEGLEEDEPRFTIIPNPLDRREEAGGASSEEESGEDTGPQDAQEYGNYQPGSLCGYCSFCNRCTECESCHCDEENMGEHCDQCQHCQFCYLCPLVCETVCAPGSYVDYFSSSLYQALADMLETPEP

SEQ ID NO: 125796 - protein, 389 aa, Artificial Sequence
  derived and/or modified sequence
EDDNDDDDVSTEYGHQAHRHQDHRKEEVEAVSGEHHHHVPDHRHQGHRDEEEDEDVSTERWHQGPQHVHHGLVDEEEEEEEITVQFGHYVASHQPRGHKSDEEDFQDEYKTEVPHHHHHRVPREEDEEVSAELGHQAPSHRQSHQDEETGHGQRGSIKEMSHHPPGHTVVKDRSHLRKDDSEEEKEKEEDPGSHEEDDESSEQGEKGTHHGSRDQEDEEDEEEGHGLSLNQEEEEEEDEERREERAEVGAPLSPDHSEEEEEEEEGLEEDEPRFTIIPNPLDRREEAGGASSEEESGEDTGPQDAQEYGNYQPGSLCGYCSFCNRCTECESCHCDEENMGEHCDQCQHCQFCYLCPLVCETVCAPGSYVDYFSSSLYQALADMLETPEP

SEQ ID NO: 125797 - protein, 454 aa, Artificial Sequence
  derived and/or modified sequence
MGHHRPWLHASVLWAGVASLLLPPAMTQQLRGDGLGFRNRNKDVSTENGHHFWSHPDREKEDEDVSKEYGHLLPGHRSQDHKVGDEGVSGEEVFAEHGGQARGHRGHGSEDTEDSAEHRHHLPSHRSHSHQDEDEDEVVSSEHHHHILRHGHRGHDGEDDEGEEEEEEEEEEEEASTEYGHQAHRHRGHGSEEDEDVSDGHHHHGPSHRHQGHEEDDDDDDDDDDDDDDDDVSIEYRHQAHRHQGHGIEEDEDVSDGHHHRDPSHRHRSHEEDDNDDDDVSTEYGHQAHRHQDHRKEEVEAVSGEHHHHVPDHRHQGHRDEEEDEDVSTERWHQGPQHVHHGLVDEEEEEEEITVQFGHYVASHQPRGHKSDEEDFQDEYKTEVPHHHHHRVPREEDEEVSAELGHQAPSHRQSHQDEETGHGQRGSIKEMSHHPPGHTVVKDRSHLRKDDSEE

SEQ ID NO: 125798 - DNA, 2100 bp, Artificial Sequence
  derived and/or modified sequence
atgggccaccacagaccctggctgcatgcttcagtgctgtgggctggggtggcgtcactcttgctgcccccagctatgacgcaacagttaagaggagacggcctgggatttagaaaccgcaacaactcaacaggcgtggcaggacttagtgaggaggctagcgctgagctgcggcatcacttgcacagccctcgcgatcacccggacgagaataaggacgtgagtactgagaacggccaccacttctggtcccatccagacagggagaaggaagatgaggacgtaagcaaggagtacgggcacctgctgcccggacaccgctcccaagaccacaaagtgggagacgagggcgtttcaggggaggaggtcttcgccgagcacggaggccaggctaggggccatagaggccatggatccgaggacactgaggatagtgctgagcacagacaccatctgccaagccatcggagccactcccaccaggacgaagacgaagacgaggtggtgagctctgagcatcatcatcatatactgcgccatggccaccgcgggcacgacggcgaggacgatgagggcgaggaggaggaggaagaggaagaagaggaggaagaagcctctaccgaatacggccatcaggcgcaccgccatcggggccacggaagtgaggaagatgaagatgtgtccgacgggcaccaccaccatggaccttctcacagacatcaaggtcatgaagaagacgacgacgatgacgacgacgatgatgacgatgatgatgacgacgacgtcagtattgagtaccgccatcaagcccatagacaccagggtcacgggatagaggaggacgaagacgtgagtgacgggcatcaccatagggatccctcgcaccggcacagatcacatgaggaggacgataatgacgacgacgatgtctccacggagtatgggcatcaggctcatcggcaccaagaccatcgcaaagaagaggtggaggctgtatccggagagcaccatcaccatgttccagatcatcgacatcagggtcaccgggatgaggaggaggatgaggatgtttccacagagagatggcaccagggtccccagcacgttcaccacgggctggtcgatgaggaggaagaagaggaagaaattacagttcaattcggtcactacgttgcctctcaccagcccaggggccacaagtccgacgaagaagactttcaagatgaatacaagactgaagttcctcaccaccaccaccatcgcgtgccccgggaagaggacgaagaggtcagcgccgaactcggacaccaggctcctagccacaggcagtcccatcaagacgaagaaaccggccatgggcagaggggcagcatcaaggaaatgagtcaccatcccccaggtcatactgtcgtaaaggaccgcagccaccttaggaaagacgattcggaagaagaaaaggagaaggaggaagatccgggatctcacgaagaggacgacgaatctagcgagcagggcgagaaggggactcaccacggatcccgggaccaggaagacgaggaagacgaagaagagggacacggcttatcccttaatcaggaggaagaggaagaagaggataaagaagaagaggaggaggaggaagatgaggaacgaagggaggagcgtgcggaggtcggtgctcccctgtcccctgaccacagtgaggaagaagaagaggaggaggagggtttggaggaagacgagccaaggttcacgatcatcccaaatccattagatcgtagggaagaagccggcggagcgtccagcgaagaggaatctggcgaggataccggtccacaggacgcacaggaatatgggaactaccaaccgggatccctctgcggctactgctctttttgtaatcgatgtactgagtgtgaatcttgccattgcgacgaggaaaatatgggagaacattgtgatcagtgtcagcactgccaattctgttatctttgtccgctggtgtgtgaaacggtgtgcgccccgggctcctacgtagattacttctcttcttccctgtaccaggccctagccgacatgctggaaacccctgaaccatag

SEQ ID NO: 125799 - DNA, 1170 bp, Artificial Sequence
  derived and/or modified sequence
gaagatgacaatgatgatgacgacgtaagcaccgaatacggccatcaagctcacagacaccaagaccatcggaaggaggaggtcgaggccgtcagtggagagcaccatcaccacgtgcccgaccatcgacaccagggacacagggacgaggaagaggacgaagatgtgtctacagaacgctggcaccagggacctcagcacgtgcaccacggcttggttgatgaggaagaagaggaagaggagatcaccgtccagttcgggcactacgttgcctcccaccagcccagaggccataagagtgacgaggaagactttcaggacgagtataagacggaagtccctcatcatcatcaccacagggtgccgcgggaggaagacgaagaggtatcggcggagctgggacaccaagccccatcacacaggcaatcacaccaagacgaggaaaccggacatggtcagcgcgggtccataaaggagatgagtcaccacccccctggccatacagtggtaaaagaccgttcccacctacgaaaggacgatagtgaagaggagaaggaaaaggaggaagatcctggatcccacgaggaggacgatgagtcatcagagcagggcgagaagggtacacatcacggatcgagggaccaggaagacgaggaagatgaagaggagggccacgggctgtctctaaatcaagaagaagaagaggaggaagatgaagagagacgagaagagcgagctgaggtcggagccccactgagtccagaccatagcgaagaggaggaggaggaggaggagggtctggaagaagacgagccgcgttttactatcatacccaatccgcttgacagacgcgaagaggccggaggtgcaagcagcgaggaagaaagcggtgaggacaccggtccacaggacgctcaagagtatggcaattaccagcccgggtctttgtgtggatactgcagcttttgcaataggtgtacagagtgcgaaagctgtcactgcgatgaagaaaatatgggcgagcattgcgatcagtgccagcattgccaattctgttacctttgccccctggtatgcgaaaccgtttgcgcacctggctcttacgtggattatttcagcagctcgctatatcaggccctggcagacatgctggaaactccggagccctag

SEQ ID NO: 125800 - DNA, 1365 bp, Artificial Sequence
  derived and/or modified sequence
atggggcatcaccggccgtggctgcatgcttcagttctgtgggccggagttgctagcttgctgttgcccccagctatgacacagcagctgaggggcgacggactgggcttccggaatagaaataaggatgtgtcaactgagaatgggcatcacttttggtctcaccctgatagagaaaaggaggatgaagacgtgtccaaggagtatggccacctactcccaggacacaggtcccaggaccacaaagtaggtgatgagggtgtgtcaggtgaggaggtctttgccgaacatggcggccaggcacgcgggcaccgtgggcacgggtctgaagacacagaagattccgcagagcacagacatcacctgccttcccaccggagccattctcaccaagatgaggacgaagacgaggtggttagctccgagcaccatcaccacatcctaagacacggccacagaggacacgatggcgaggacgatgaaggagaggaagaggaggaggaggaagaggaggaggaagaggcatcaactgagtatggacatcaagcgcatagacatcgggggcacgggtctgaggaagacgaagacgtgtctgacgggcaccaccaccacggtccttcacacagacaccagggccacgaggaagacgacgatgacgacgacgacgacgacgacgacgacgacgatgatgacgtcagcatcgagtaccgtcatcaggcacataggcaccagggccacggcattgaagaggatgaagatgtctctgatggacaccatcaccgcgacccctctcaccggcataggtcacatgaagaggacgacaatgatgacgacgacgtctcaactgaatacggtcaccaagcccacagacatcaggaccaccgcaaggaggaagtcgaggccgtgtctggggagcaccaccatcacgttcctgatcacagacaccaagggcaccgggacgaagaagaggacgaggatgtctccacagaaagatggcatcagggacctcagcacgtgcaccacggcctagtcgacgaggaggaggaggaggaggagatcactgtccagttcggtcactatgtggcctctcaccagcctcgggggcataaatccgacgaggaggattttcaggacgagtacaagactgaggtccctcaccaccaccatcacagagttcctcgagaagaggatgaggaagtgtctgccgaacttggacatcaagcacctagccacagacagtcgcaccaggacgaagaaaccgggcacggtcagcggggaagcataaaagaaatgagtcaccatccccctggccacacagtcgtcaaagatcggagccacctgagaaaggatgactccgaagagtag

SEQ ID NO: 125801 - DNA, 2382 bp, Artificial Sequence
  derived and/or modified sequence
ctccggagacagcctcagaggggtgtccagagccaggcagcaaggaccagaggaaggtggacagagaccgaaaggacaaaggagagacacagagaaaaaaagagaccaaccccaaagggacaaagaccccaacgtttgtccacattgccgcagaggcagctggagccagtgctgcctgtccgtccccatgggccaccataggccatggctgcacgcttctgtcctctgggctggggtggccagcctgctcctccccccggccatgacccagcagctcagaggggatgggctaggcttcagaaaccggaacaacagcactggagtcgccgggctctccgaggaggcatcagcagagcttcgccaccacctccacagccctagagaccatccagatgagaacaaggatgtttccacagagaatgggcatcatttctggagccacccagaccgtgaaaaggaggatgaagatgtctccaaggaatatgggcacctactcccaggccacaggtcccaagaccacaaagtcggagatgagggtgtctcaggtgaggaggtctttgcagagcatggtgggcaggcccgtgggcacagaggccacgggagtgaagacacggaagactcagctgagcacaggcaccacctccccagccacaggagccacagccatcaagacgaggatgaggatgaagttgtgtccagtgagcatcaccatcatatcctcaggcatggacaccgaggccatgatggggaagatgatgaaggagaagaggaggaggaggaggaggaggaggaagaggaggcctccactgagtatggacaccaggcccacaggcaccgaggccatgggagtgaagaggatgaggatgtctcagatggacaccatcatcatggccccagccacaggcaccaaggccatgaagaagatgacgatgatgatgatgatgatgatgatgatgatgatgatgatgatgtctccattgaatatagacaccaggctcacaggcaccaaggccacgggattgaagaggatgaagatgtctcagatggacaccatcatcgcgaccccagccacaggcaccgaagccatgaagaagatgacaatgatgatgatgatgtctccactgagtatggacaccaggcccacaggcaccaagaccacagaaaggaagaggttgaggctgtctcaggtgaacaccaccatcatgtccctgaccacaggcaccaaggccacagagacgaggaagaagatgaggatgtgtccactgaacgttggcaccagggtccccaacatgtccaccatggccttgtagatgaggaagaggaagaagaggagatcacagtccagttcggccactatgttgcaagccaccaacctcgaggccacaagagtgatgaagaggacttccaagatgagtataaaacagaagtccctcaccatcaccaccacagagtccccagggaggaagatgaggaggtctctgctgagcttggccaccaggcccccagccacaggcaaagccaccaagatgaagaaactggccatggtcaaagagggtccatcaaagagatgagccatcaccccccaggacacacagtggtcaaggatagaagccatttgaggaaggatgattctgaggaggaaaaggagaaggaagaggaccccggctcccatgaggaagacgatgaaagttcagagcagggagagaaaggcacccatcatggcagccgggaccaggaagatgaggaggatgaggaggaaggtcatggcctcagcctgaaccaggaggaggaagaagaggaagacaaggaggaggaggaggaggaagaagacgaggagaggagggaagagagggctgaggttggggccccactgagcccagaccacagcgaggaggaagaggaggaggaggaggggctggaggaagatgagccccgcttcaccatcatccccaacccactggacaggagagaggaggctggaggtgcctccagcgaggaggaaagcggtgaggacacaggtccacaggatgctcaggagtatgggaactaccagccagggtccctgtgtggctactgctccttctgcaatcgatgcactgaatgtgagagctgtcactgtgatgaggagaacatgggtgagcactgcgaccagtgccagcactgtcagttctgctatctctgcccgctggtctgcgaaacggtctgcgctccaggaagctacgttgactatttctcctcgtccctttatcaggccctggcagacatgctggaaacgccggaaccctgacccagtcgctcgactgcgacgcaggtgtacctccccctgccttccaacccctttccacgagctatatttatttctccgaataaacgtgctccccg

SEQ ID NO: 125802 - DNA, 1265 bp, Artificial Sequence
  derived and/or modified sequence
gaagatgacaatgatgatgatgatgtctccactgagtatggacaccaggcccacaggcaccaagaccacagaaaggaagaggttgaggctgtctcaggtgaacaccaccatcatgtccctgaccacaggcaccaaggccacagagacgaggaagaagatgaggatgtgtccactgaacgttggcaccagggtccccaacatgtccaccatggccttgtagatgaggaagaggaagaagaggagatcacagtccagttcggccactatgttgcaagccaccaacctcgaggccacaagagtgatgaagaggacttccaagatgagtataaaacagaagtccctcaccatcaccaccacagagtccccagggaggaagatgaggaggtctctgctgagcttggccaccaggcccccagccacaggcaaagccaccaagatgaagaaactggccatggtcaaagagggtccatcaaagagatgagccatcaccccccaggacacacagtggtcaaggatagaagccatttgaggaaggatgattctgaggaggaaaaggagaaggaagaggaccccggctcccatgaggaagacgatgaaagttcagagcagggagagaaaggcacccatcatggcagccgggaccaggaagatgaggaggatgaggaggaaggtcatggcctcagcctgaaccaggaggaggaagaagaggaagacgaggagaggagggaagagagggctgaggttggggccccactgagcccagaccacagcgaggaggaagaggaggaggaggaggggctggaggaagatgagccccgcttcaccatcatccccaacccactggacaggagagaggaggctggaggtgcctccagcgaggaggaaagcggtgaggacacaggtccacaggatgctcaggagtatgggaactaccagccagggtccctgtgtggctactgctccttctgcaatcgatgcactgaatgtgagagctgtcactgtgatgaggagaacatgggtgagcactgcgaccagtgccagcactgtcagttctgctatctctgcccgctggtctgcgaaacggtctgcgctccaggaagctacgttgactatttctcctcgtccctttatcaggccctggcagacatgctggaaacgccggaaccctgacccagtcgctcgactgcgacgcaggtgtacctccccctgccttccaacccctttccacgagctatatttatttctccgaataaacgtgctccccg

SEQ ID NO: 125803 - DNA, 1362 bp, Artificial Sequence
  derived and/or modified sequence
atgggccaccataggccatggctgcacgcttctgtcctctgggctggggtggccagcctgctcctccccccggccatgacccagcagctcagaggggatgggctaggcttcagaaaccggaacaaggatgtttccacagagaatgggcatcatttctggagccacccagaccgtgaaaaggaggatgaagatgtctccaaggaatatgggcacctactcccaggccacaggtcccaagaccacaaagtcggagatgagggtgtctcaggtgaggaggtctttgcagagcatggtgggcaggcccgtgggcacagaggccacgggagtgaagacacggaagactcagctgagcacaggcaccacctccccagccacaggagccacagccatcaagacgaggatgaggatgaagttgtgtccagtgagcatcaccatcatatcctcaggcatggacaccgaggccatgatggggaagatgatgaaggagaagaggaggaggaggaggaggaggaggaagaggaggcctccactgagtatggacaccaggcccacaggcaccgaggccatgggagtgaagaggatgaggatgtctcagatggacaccatcatcatggccccagccacaggcaccaaggccatgaagaagatgacgatgatgatgatgatgatgatgatgatgatgatgatgatgatgtctccattgaatatagacaccaggctcacaggcaccaaggccacgggattgaagaggatgaagatgtctcagatggacaccatcatcgcgaccccagccacaggcaccgaagccatgaagaagatgacaatgatgatgatgatgtctccactgagtatggacaccaggcccacaggcaccaagaccacagaaaggaagaggttgaggctgtctcaggtgaacaccaccatcatgtccctgaccacaggcaccaaggccacagagacgaggaagaagatgaggatgtgtccactgaacgttggcaccagggtccccaacatgtccaccatggccttgtagatgaggaagaggaagaagaggagatcacagtccagttcggccactatgttgcaagccaccaacctcgaggccacaagagtgatgaagaggacttccaagatgagtataaaacagaagtccctcaccatcaccaccacagagtccccagggaggaagatgaggaggtctctgctgagcttggccaccaggcccccagccacaggcaaagccaccaagatgaagaaactggccatggtcaaagagggtccatcaaagagatgagccatcaccccccaggacacacagtggtcaaggatagaagccatttgaggaaggatgattctgaggag

SEQ ID NO: 125804 - DNA, 2100 bp, Artificial Sequence
  derived and/or modified sequence
atgggccaccaccggccctggctgcacgcctctgtgctgtgggccggcgtggccagcctgctgctgcccccagccatgacccagcagctgcggggagatggcctgggcttcaggaacagaaacaacagcactggagtggccggcctgtctgaggaggccagcgctgagctgcggcaccacctgcacagcccccgggaccacccagatgagaacaaggatgtgtccacagaaaatggccaccacttctggagccacccagaccgggagaaggaggatgaagatgtgtccaaggagtatggccacctgctgcccggccacaggagccaggaccacaaggtgggagatgaaggagtgtctggagaggaggtgtttgctgagcacggcggccaggcccggggccaccggggccacggcagcgaggacacagaagattctgctgagcaccgccaccacctgcccagccacaggagccacagccaccaggatgaagatgaagatgaggtggtgtcctctgagcaccaccaccacatcctgcggcacggccaccggggccatgatggagaagatgatgaaggagaggaggaggaggaggaggaggaggaggaggaggaggccagcacagaatatggccaccaggcccaccgccaccggggccacggctctgaagaagatgaagatgtgtctgatggccaccaccaccacggccccagccaccgccaccagggccatgaagaagatgatgatgatgatgatgatgatgatgatgatgatgatgatgatgatgtgtccattgagtaccgccaccaggcccaccgccaccagggccacggcatcgaggaggatgaagatgtgtctgatggccaccaccaccgggaccccagccaccgccacaggagccatgaggaggatgacaatgatgatgatgatgtgtccacagaatatggccaccaggcccaccgccaccaggaccacaggaaggaggaggtggaggccgtgtctggagagcaccaccaccacgtgcctgaccaccgccaccagggccacagagatgaggaggaggatgaagatgtgtccacagagcgctggcaccagggcccccagcacgtgcaccacggcctggtggatgaggaggaggaggaggaggagatcaccgtgcagtttggccactacgtggccagccaccagccccggggccacaagagtgatgaggaggacttccaggatgagtacaagacagaggtgccccaccaccaccaccaccgggtgccccgggaggaggatgaggaggtgtctgctgagctgggccaccaggcccccagccaccggcagagccaccaggatgaggagaccggccacggccagaggggcagcatcaaggagatgagccaccaccccccaggccacacagtggtgaaggacaggagccacctgaggaaggatgacagcgaggaggagaaggagaaggaggaggaccccggcagccatgaagaagatgatgagagcagcgagcagggcgagaagggcacccaccacggcagccgggaccaggaggatgaggaggatgaggaggagggccacggcctgagcctgaaccaggaggaggaggaggaggaggacaaggaggaggaggaggaggaggaggatgaggagcggcgggaggagcgggcagaggtgggcgcccccctgagcccagaccacagcgaggaggaggaggaggaggaggagggcctggaggaggatgagccccgcttcaccatcatccccaaccccctggacagaagagaggaggccggcggggccagcagcgaggaggagagcggggaggacaccggcccccaggatgcccaggagtatggcaactaccagcccggcagcctgtgtggctactgcagcttctgcaaccgctgcacagaatgtgagagctgccactgtgatgaggagaacatgggagagcactgtgaccagtgccagcactgccagttctgctacctgtgccccctggtgtgtgaaacagtgtgtgcccctggcagctatgtggactacttcagcagcagcctgtaccaggccctggccgacatgctggagaccccagagccctag

SEQ ID NO: 125805 - DNA, 1170 bp, Artificial Sequence
  derived and/or modified sequence
gaagatgacaatgatgatgatgatgtgtccacagaatatggccaccaggcccaccgccaccaggaccacaggaaggaggaggtggaggccgtgtctggagagcaccaccaccacgtgcctgaccaccgccaccagggccacagagatgaggaggaggatgaagatgtgtccacagagcgctggcaccagggcccccagcacgtgcaccacggcctggtggatgaggaggaggaggaggaggagatcaccgtgcagtttggccactacgtggccagccaccagccccggggccacaagagtgatgaggaggacttccaggatgagtacaagacagaggtgccccaccaccaccaccaccgggtgccccgggaggaggatgaggaggtgtctgctgagctgggccaccaggcccccagccaccggcagagccaccaggatgaggagactggacatggccagaggggcagcatcaaggagatgagccaccaccccccaggccacacagtggtgaaggacaggagccacctgaggaaggatgattctgaggaggagaaggagaaggaggaggaccccggcagccatgaggaggatgatgagagcagcgagcagggcgagaagggcacccaccacggcagccgggaccaggaggatgaagaagatgaggaggagggccacggcctgagcctgaaccaggaggaggaggaggaggaggatgaggagcggcgggaggagcgggcagaggtgggcgcccccctgagcccagaccacagcgaggaggaggaggaggaggaggagggcctggaggaggatgagccccgcttcaccatcatccccaaccccctggacagaagagaggaggccggcggggccagcagcgaggaggagagcggggaggacaccggcccccaggatgcccaggagtatggcaactaccagcccggcagcctgtgtggctactgcagcttctgcaaccgctgcacagaatgtgagagctgccactgtgatgaggagaacatgggagagcactgtgaccagtgccagcactgccagttctgctacctgtgccccctggtgtgtgaaacagtgtgtgcccctggcagctatgtggactacttcagcagcagcctgtaccaggccctggccgacatgctggagaccccagagccctag

SEQ ID NO: 125806 - DNA, 1365 bp, Artificial Sequence
  derived and/or modified sequence
atgggccaccaccggccctggctgcacgcctctgtgctgtgggccggcgtggccagcctgctgctgcccccagccatgacccagcagctgcggggagatggcctgggcttcaggaacagaaacaaggatgtgtccacagaaaatggccaccacttctggagccacccagaccgggagaaggaggatgaagatgtgtccaaggagtatggccacctgctgcccggccacaggagccaggaccacaaggtgggagatgaaggagtgtctggagaggaggtgtttgctgagcacggcggccaggcccggggccaccggggccacggcagcgaggacacagaagattctgctgagcaccgccaccacctgcccagccacaggagccacagccaccaggatgaagatgaagatgaggtggtgtcctctgagcaccaccaccacatcctgcggcacggccaccggggccatgatggagaagatgatgaaggagaggaggaggaggaggaggaggaggaggaggaggaggccagcacagaatatggccaccaggcccaccgccaccggggccacggctctgaagaagatgaagatgtgtctgatggccaccaccaccacggccccagccaccgccaccagggccatgaagaagatgatgatgatgatgatgatgatgatgatgatgatgatgatgatgatgtgtccattgagtaccgccaccaggcccaccgccaccagggccacggcatcgaggaggatgaagatgtgtctgatggccaccaccaccgggaccccagccaccgccacaggagccatgaggaggatgacaatgatgatgatgatgtgtccacagaatatggccaccaggcccaccgccaccaggaccacaggaaggaggaggtggaggccgtgtctggagagcaccaccaccacgtgcctgaccaccgccaccagggccacagagatgaggaggaggatgaagatgtgtccacagagcgctggcaccagggcccccagcacgtgcaccacggcctggtggatgaggaggaggaggaggaggagatcaccgtgcagtttggccactacgtggccagccaccagccccggggccacaagagtgatgaggaggacttccaggatgagtacaagacagaggtgccccaccaccaccaccaccgggtgccccgggaggaggatgaggaggtgtctgctgagctgggccaccaggcccccagccaccggcagagccaccaggatgaggagaccggccacggccagaggggcagcatcaaggagatgagccaccaccccccaggccacacagtggtgaaggacaggagccacctgaggaaggatgacagcgaggagtag

SEQ ID NO: 125807 - DNA, 2100 bp, Artificial Sequence
  derived and/or modified sequence
atgggccaccaccggccctggctgcacgccagcgtgctgtgggccggggtggcgagcctgctgctaccccctgctatgacccaacaactacgaggcgatggactgggcttccggaaccggaacaattccaccggcgtggccggcctctcggaggaagcctccgccgagcttcgacaccatctgcactcgcctcgggaccaccccgacgagaacaaagacgtctccactgagaacgggcaccatttttggtcccaccccgaccgggaaaaagaagatgaggatgtgtctaaagaatacgggcacctgcttccagggcacaggagtcaggatcataaggtaggtgatgagggcgtttctggtgaggaagtgttcgccgagcacggtggccaagcccgaggacatcggggccacggtagtgaagacaccgaggactccgcagagcatcgccaccatttgccgtctcacagaagccactcccatcaggatgaggatgaggatgaggtggtcagctctgagcatcaccaccacatcctgaggcacggccacaggggtcacgacggcgaggacgatgaaggcgaggaggaggaggaggaggaagaggaggaggaggaggcctcaacagagtacggtcatcaggcacatagacaccgcggtcacggcagcgaggaagatgaggatgtgtcagacggacatcaccaccacggacctagccaccggcaccagggccacgaagaagacgacgacgatgacgacgatgacgacgacgatgacgatgatgacgacgtctccatcgaatacaggcaccaggcacaccgccatcagggccacggtatcgaagaagacgaggacgtcagtgacggccaccaccatagagatccctctcatcgccatagatctcacgaggaagatgacaatgatgacgacgacgtgtcaaccgagtatggccaccaagcacaccggcatcaggaccaccggaaggaggaagttgaggcagtgtcgggggaacaccatcatcacgtcccagaccaccgacaccaaggtcatcgagacgaagaggaagacgaggacgtctcaaccgaacggtggcaccaggggccccagcatgtccatcacggactggtggacgaggaagaggaagaagaagagattaccgtgcagtttggacactacgtcgcatcccatcagccacgaggacacaagtctgacgaagaagattttcaggatgagtataagacagaggtgccgcaccaccaccaccaccgagtccctagagaagaagacgaggaagtgtccgctgagctggggcatcaagctccctcccatcggcagagccatcaagacgaggagactgggcacgggcagcgcggctctattaaagagatgtcccaccaccctccaggccacactgtggtcaaggacagaagtcatttgcgcaaggacgactctgaggaagaaaaagagaaagaagaggaccccggcagccatgaagaggacgatgagagctcagagcagggggagaagggtacccatcacggatcccgggatcaagaggatgaagaggacgaggaagaaggccatggattgagcttgaaccaggaagaggaggaagaggaagataaagaagaggaggaggaagaggaggacgaggaacgacgggaagagagagccgaagtgggggcccctctgtctccagaccattccgaggaggaggaagaagaagaggaaggcttggaggaagacgaaccccggttcacaattatccccaacccactcgatagacgggaagaagccgggggcgcatcgagtgaggaggagagcggtgaagatactggaccccaggacgcccaggagtatgggaactatcaacccggctccctctgtgggtattgttcattctgcaacaggtgtaccgagtgtgagagttgccattgcgacgaagagaacatgggcgaacactgcgatcagtgccagcattgccagttttgctacctgtgtcctctcgtttgcgagactgtgtgcgcccccgggagctacgttgattactttagcagcagcctgtaccaagccctggctgacatgctcgagacacctgagccatag

SEQ ID NO: 125808 - DNA, 1170 bp, Artificial Sequence
  derived and/or modified sequence
gaggacgacaacgacgacgacgacgtgagcaccgagtacggccaccaagcccacagacatcaagaccatagaaaagaggaggtggaagcagtgagcggggagcaccaccaccacgtcccagaccatcggcatcagggccaccgcgatgaggaggaggacgaggacgtgtccactgagcggtggcatcagggtcctcagcatgtgcatcacgggctggttgacgaagaagaggaggaggaagagattacagttcagttcggccactacgtcgcttcccaccaaccacgcgggcataagagtgatgaggaagactttcaggatgagtataaaactgaggtccctcaccatcaccatcacagggtgccacgcgaggaggatgaggaagtctcagctgaactcggacaccaggctcccagccatcggcagtctcaccaggacgaggagaccggccacggtcagcggggttcaattaaagagatgtcccaccaccctcctggccacacagtggtgaaggatagatctcatctgcgaaaggacgactccgaggaggagaaagagaaagaagaggatccggggtcgcacgaagaagacgatgaaagtagcgaacaaggggaaaaaggaactcatcatggatctcgcgaccaggaggatgaagaggacgaggaagaaggccacggacttagtctgaatcaggaggaggaagaggaggaggatgaggaaagaagagaggaaagggcagaggtgggagcgccccttagccctgatcacagcgaggaagaagaggaggaagaagaaggcctagaagaggacgagccaaggtttactatcatcccgaacccactggaccgaagggaagaagccggtggtgccagcagtgaggaagaatcaggcgaggacaccgggcctcaggatgctcaggaatatggcaattaccagcccggatctctctgcgggtactgctcgttctgcaaccgttgcactgaatgtgaatcgtgccattgcgatgaggagaatatgggtgaacactgtgaccaatgtcaacattgccagttctgctatctctgccccttggtgtgtgaaaccgtctgtgcccccgggagttacgtcgattacttcagcagctcactttaccaggcgctcgcggatatgcttgaaactcctgaaccatag

SEQ ID NO: 125809 - DNA, 1365 bp, Artificial Sequence
  derived and/or modified sequence
atgggccaccaccggccctggctgcacgccagcgtgctgtgggccggagtggccagcctgctgctgcctcctgcgatgactcagcagctgcggggtgacgggttgggttttagaaaccgcaacaaggatgtgtccacggaaaacgggcaccacttctggtcccatccggaccgtgaaaaggaggacgaggacgtgtccaaggaatatggccatcttctgccaggccatcgttcccaggaccataaggtgggagacgagggggttagtggggaagaggttttcgccgagcacgggggccaagcgagggggcaccgggggcacggtagcgaggatacagaagactctgctgagcacaggcatcatctgccatcccaccgctcacactcccaccaggatgaagacgaggacgaagtagtgtcgagtgaacaccaccatcatattctgcggcatggtcatcggggacatgatggcgaggatgacgagggcgaggaggaggaagaggaggaagaagaggaagaagaagcttccaccgaatacgggcaccaggcgcatcgtcaccgcggccacgggtccgaggaggatgaggatgtttccgacgggcaccaccaccacgggccaagccatcgccatcaagggcatgaggaggacgatgacgacgacgacgatgatgatgatgacgacgatgacgacgacgtcagcatcgagtaccgccaccaggcccatagacaccagggccacggaattgaggaggacgaagatgtgtccgacggacaccatcaccgggatccttcccaccgtcaccgatctcacgaagaggacgacaacgatgatgatgatgtgtctacagaatatgggcatcaggcccaccggcatcaggaccacaggaaggaggaggttgaagctgtgtccggcgagcaccatcatcatgtgccagatcaccgccatcagggacatcgggacgaggaagaggatgaggatgttagtaccgagaggtggcatcaggggccccagcacgtacatcatggcctcgtggatgaggaggaggaggaggaggagattacagtgcaattcggtcattatgtcgccagtcaccagcctaggggacacaaatccgatgaagaagattttcaggacgaatacaagaccgaggtgcctcaccatcatcaccaccgcgtcccaagagaagaggatgaagaggtgagcgcagaacttgggcatcaggctccctcgcacaggcagagtcaccaggatgaggagacgggccacggacagcgcggcagcatcaaggaaatgagtcatcatccccctggccataccgtggttaaggacagatcacatctgaggaaagatgatagtgaagaatag

SEQ ID NO: 125810 - DNA, 2100 bp, Artificial Sequence
  derived and/or modified sequence
atggggcatcacaggccgtggctccatgcatccgtcctttgggctggagttgcctccttgctgttgcccccagccatgacccagcagttgcggggtgacggtctcggctttagaaatcgcaacaactctactggggtcgcaggactgagcgaggaagcttcagctgagctgaggcatcatctccacagcccgcgtgatcatcctgacgagaacaaggatgtgtcaaccgagaacggacaccatttttggtctcacccagaccgtgagaaagaagacgaggacgtaagtaaagagtatgggcatctcctccctgggcacagatcgcaagaccacaaggttggtgacgagggcgtgtcaggcgaagaagttttcgcagagcatggtggccaggctcgaggacaccgaggacacggctcagaagacactgaggatagtgccgaacaccggcaccatctgccatcacatcgatcacattctcaccaagatgaggacgaagacgaagtggtgtcttctgaacaccatcaccacatcctgcggcatggccatcgcggacacgatggtgaggatgatgaaggtgaagaggaggaggaggaggaagaggaagaggaagaagccagtactgaatacggtcaccaggcgcataggcacaggggacacggcagcgaagaggatgaagatgttagtgacgggcatcatcaccacgggccttcacacagacaccaggggcatgaagaggatgatgacgatgatgacgacgacgacgacgatgacgacgatgacgacgttagtatcgagtaccggcatcaggctcaccgtcaccagggccacggaatcgaggaagatgaagatgtgtcggacggacaccaccatcgggatcctagccatagacatcgatctcacgaagaagatgacaacgatgacgatgacgtcagtaccgagtacggccaccaggcgcatcgccaccaggaccaccgtaaagaggaagtcgaggcagtgagcggagaacaccaccaccacgtccccgatcatagacatcagggccaccgggatgaagaagaagatgaggatgtcagcacagagcgctggcaccagggccctcagcacgtgcaccacggactggtagatgaagaggaggaggaggaagaaatcacggtacaatttggacattacgtggcgtcccaccaaccacgcggtcacaagagcgacgaagaagactttcaggatgagtataagaccgaggtgccccaccaccaccatcacagggtgccaagggaggaagatgaggaagtgagtgccgaattggggcaccaagccccttcacacagacagtctcaccaggatgaggagaccggacacggacaacgaggctcaatcaaggaaatgtcccatcacccaccgggacatactgtagttaaggacaggagtcacttaaggaaggacgatagcgaagaagagaaggaaaaagaagaagaccccggatctcacgaggaagacgacgagagctctgaacagggtgaaaaagggacacatcatggctccagagaccaagaggacgaagaggacgaagaggaaggacacgggctgtcactgaaccaggaagaagaggaggaagaagacaaggaggaagaagaggaggaggaggatgaggaaaggagggaggagagagccgaggttggcgctcctctctcgcctgaccattcagaagaggaagaggaggaggaagagggtctggaggaggatgagccacgctttactatcattcctaatcctctagaccggagggaggaagcaggcggagctagctctgaagaagaaagtggggaagacacaggcccacaggacgctcaggagtacggaaactatcagcccggatccctctgtgggtattgcagtttctgtaaccggtgtaccgagtgcgaaagttgtcattgcgatgaggaaaatatgggggaacattgcgatcagtgccagcactgccagttctgctatctgtgtcccctagtctgtgaaactgtgtgtgcacctgggagctacgtggactacttttccagcagtctataccaagccctggctgacatgctggagactccagaaccctag

SEQ ID NO: 125811 - DNA, 1170 bp, Artificial Sequence
  derived and/or modified sequence
gaagacgacaatgacgatgatgacgtgtctacagagtacggacaccaagcccacagacaccaggatcataggaaagaggaggtcgaagcggtgagcggggaacaccaccatcatgtgccggaccacagacaccagggccacagggatgaggaagaagatgaggacgtcagcaccgaacgttggcaccagggtcctcagcatgtgcatcatggccttgtggatgaggaggaggaagaagaagaaatcacagtccaatttggacactatgtagccagccaccagccaagaggacacaagagcgatgaggaggattttcaggacgagtataagacagaggtgcctcaccatcaccatcacagagtccctagggaggaggatgaagaggtgtcagctgagttggggcaccaggcccctagccatcgccagagtcatcaggatgaggagaccggccacggccaaagagggagcatcaaagaaatgtcccatcaccctcctggacacaccgttgtcaaagatcggtcacaccttcggaaagatgattctgaggaagaaaaagagaaagaagaagatcctggtagccacgaggaagatgacgaatcgtcagagcagggtgagaaagggacgcaccacggtagcagggatcaggaagacgaggaggatgaggaagagggtcacggacttagtctgaaccaagaagaagaggaggaggaggacgaggaaagacgagaagaacgggcagaggtcggtgctcccctgtcccccgaccacagtgaggaagaagaagaggaagaggagggacttgaggaagatgagccaaggtttaccatcatccctaaccctctggatcgcagggaggaggctggcggtgcaagcagcgaagaagaaagtggcgaagacacggggccacaggatgcccaagagtacggcaattaccagcccggaagcctgtgtggatattgttcattttgtaatcgctgcacagagtgcgagtcttgtcattgcgacgaagagaatatgggggagcattgtgaccagtgtcaacactgccagttttgctatttgtgtcctcttgtttgcgaaacggtgtgcgcacccggatcatatgtggactacttttcctccagtctctaccaggccctcgctgatatgctcgagacgcctgaaccctag

SEQ ID NO: 125812 - DNA, 1365 bp, Artificial Sequence
  derived and/or modified sequence
atggggcaccacagaccgtggttacacgcttccgtactctgggctggtgtcgcctccctcctgctgcccccagcgatgactcaacaactccgaggggatgggcttggattcagaaatcggaacaaggatgtcagcacggagaacggccaccacttttggagccatcctgatcgagagaaggaagacgaggacgtaagcaaggagtatggccaccttctgccgggtcaccggagtcaggaccacaaggtaggcgacgagggagtatcaggagaagaagtttttgccgagcatggtgggcaggcacggggtcaccggggacacggaagtgaagatacggaagactcagcagagcatagacatcaccttccatcccaccgaagccacagtcaccaagacgaggatgaggacgaagtcgtctcttcggaacatcaccaccatatcttgagacatggccacagaggacacgacggggaggatgacgaaggggaagaggaggaggaggaggaggaagaggaggaggaagcgtctaccgaatacggtcatcaagcccaccgccacagaggacacggatcagaagaagacgaagatgttagcgacggtcatcaccatcacggcccttcacatagacatcaaggacatgaagaagatgatgacgacgacgacgatgacgatgacgatgacgacgatgatgatgtcagtatagagtatcgccaccaggcccataggcaccaaggacatgggatcgaagaagatgaagacgtctcggatggccatcaccacagggatccgtctcaccgccaccgctcgcacgaggaagatgacaatgatgatgacgatgtgagcaccgaatatgggcaccaggcacaccgccaccaggaccaccgcaaagaagaggtggaggccgtaagtggcgaacatcatcatcatgtccccgaccacagacaccagggccaccgagatgaggaagaggatgaggacgtctcaacagagagatggcaccagggccctcagcacgtgcatcacggtctggtggacgaggaagaggaggaagaggagattactgtccagttcggacactatgtagcctcacatcagccccgtgggcacaaatcggacgaagaagactttcaggatgaatacaaaacagaggttccacaccaccaccaccatcgtgtgcccagggaggaagacgaagaagtctcagctgagctcggacaccaagccccaagtcataggcagagccaccaagacgaggagactggtcatgggcagagaggatctattaaagagatgagccaccatcctcctgggcacaccgtggttaaggacagatcccatctccggaaggatgacagcgaggaatag

SEQ ID NO: 125813 - DNA, 2100 bp, Artificial Sequence
  derived and/or modified sequence
atgggccaccacagaccctggctgcacgccagcgtgctgtgggccggcgtggccagcctgctgctgccccccgccatgacccagcagctgagaggcgacggcctgggcttcagaaacagaaacaacagcaccggcgtggccggcctgagcgaggaggccagcgccgagctgagacaccacctgcacagccccagagaccaccccgacgagaacaaggacgtgagcaccgagaacggccaccacttctggagccaccccgacagagagaaggaggacgaggacgtgagcaaggagtacggccacctgctgcccggccacagaagccaggaccacaaggtgggcgacgagggcgtgagcggcgaggaggtgttcgccgagcacggcggccaggccagaggccacagaggccacggcagcgaggacaccgaggacagcgccgagcacagacaccacctgcccagccacagaagccacagccaccaggacgaggacgaggacgaggtggtgagcagcgagcaccaccaccacatcctgagacacggccacagaggccacgacggcgaggacgacgagggcgaggaggaggaggaggaggaggaggaggaggaggaggccagcaccgagtacggccaccaggcccacagacacagaggccacggcagcgaggaggacgaggacgtgagcgacggccaccaccaccacggccccagccacagacaccagggccacgaggaggacgacgacgacgacgacgacgacgacgacgacgacgacgacgacgacgtgagcatcgagtacagacaccaggcccacagacaccagggccacggcatcgaggaggacgaggacgtgagcgacggccaccaccacagagaccccagccacagacacagaagccacgaggaggacgacaacgacgacgacgacgtgagcaccgagtacggccaccaggcccacagacaccaggaccacagaaaggaggaggtggaggccgtgagcggcgagcaccaccaccacgtgcccgaccacagacaccagggccacagagacgaggaggaggacgaggacgtgagcaccgagagatggcaccagggcccccagcacgtgcaccacggcctggtggacgaggaggaggaggaggaggagatcaccgtgcagttcggccactacgtggccagccaccagcccagaggccacaagagcgacgaggaggacttccaggacgagtacaagaccgaggtgccccaccaccaccaccacagagtgcccagagaggaggacgaggaggtgagcgccgagctgggccaccaggcccccagccacagacagagccaccaggacgaggagaccggccacggccagagaggcagcatcaaggagatgagccaccacccccccggccacaccgtggtgaaggacagaagccacctgagaaaggacgacagcgaggaggagaaggagaaggaggaggaccccggcagccacgaggaggacgacgagagcagcgagcagggcgagaagggcacccaccacggcagcagagaccaggaggacgaggaggacgaggaggagggccacggcctgagcctgaaccaggaggaggaggaggaggaggacaaggaggaggaggaggaggaggaggacgaggagagaagagaggagagagccgaggtgggcgcccccctgagccccgaccacagcgaggaggaggaggaggaggaggagggcctggaggaggacgagcccagattcaccatcatccccaaccccctggacagaagagaggaggccggcggcgccagcagcgaggaggagagcggcgaggacaccggcccccaggacgcccaggagtacggcaactaccagcccggcagcctgtgcggctactgcagcttctgcaacagatgcaccgagtgcgagagctgccactgcgacgaggagaacatgggcgagcactgcgaccagtgccagcactgccagttctgctacctgtgccccctggtgtgcgagaccgtgtgcgcccccggcagctacgtggactacttcagcagcagcctgtaccaggccctggccgacatgctggagacccccgagccctag

SEQ ID NO: 125814 - DNA, 1170 bp, Artificial Sequence
  derived and/or modified sequence
gaggacgacaacgacgacgacgacgtgagcaccgagtacggccaccaggcccacagacaccaggaccacagaaaggaggaggtggaggccgtgagcggcgagcaccaccaccacgtgcccgaccacagacaccagggccacagagacgaggaggaggacgaggacgtgagcaccgagagatggcaccagggcccccagcacgtgcaccacggcctggtggacgaggaggaggaggaggaggagatcaccgtgcagttcggccactacgtggccagccaccagcccagaggccacaagagcgacgaggaggacttccaggacgagtacaagaccgaggtgccccaccaccaccaccacagagtgcccagagaggaggacgaggaggtgagcgccgagctgggccaccaggcccccagccacagacagagccaccaggacgaggagaccggccacggccagagaggcagcatcaaggagatgagccaccacccccccggccacaccgtggtgaaggacagaagccacctgagaaaggacgacagcgaggaggagaaggagaaggaggaggaccccggcagccacgaggaggacgacgagagcagcgagcagggcgagaagggcacccaccacggcagcagagaccaggaggacgaggaggacgaggaggagggccacggcctgagcctgaaccaggaggaggaggaggaggaggacgaggagagaagagaggagagagccgaggtgggcgcccccctgagccccgaccacagcgaggaggaggaggaggaggaggagggcctggaggaggacgagcccagattcaccatcatccccaaccccctggacagaagagaggaggccggcggcgccagcagcgaggaggagagcggcgaggacaccggcccccaggacgcccaggagtacggcaactaccagcccggcagcctgtgcggctactgcagcttctgcaacagatgcaccgagtgcgagagctgccactgcgacgaggagaacatgggcgagcactgcgaccagtgccagcactgccagttctgctacctgtgccccctggtgtgcgagaccgtgtgcgcccccggcagctacgtggactacttcagcagcagcctgtaccaggccctggccgacatgctggagacccccgagccctag

SEQ ID NO: 125815 - DNA, 1365 bp, Artificial Sequence
  derived and/or modified sequence
atgggccaccacagaccctggctgcacgccagcgtgctgtgggccggcgtggccagcctgctgctgccccccgccatgacccagcagctgagaggcgacggcctgggcttcagaaacagaaacaaggacgtgagcaccgagaacggccaccacttctggagccaccccgacagagagaaggaggacgaggacgtgagcaaggagtacggccacctgctgcccggccacagaagccaggaccacaaggtgggcgacgagggcgtgagcggcgaggaggtgttcgccgagcacggcggccaggccagaggccacagaggccacggcagcgaggacaccgaggacagcgccgagcacagacaccacctgcccagccacagaagccacagccaccaggacgaggacgaggacgaggtggtgagcagcgagcaccaccaccacatcctgagacacggccacagaggccacgacggcgaggacgacgagggcgaggaggaggaggaggaggaggaggaggaggaggaggccagcaccgagtacggccaccaggcccacagacacagaggccacggcagcgaggaggacgaggacgtgagcgacggccaccaccaccacggccccagccacagacaccagggccacgaggaggacgacgacgacgacgacgacgacgacgacgacgacgacgacgacgacgtgagcatcgagtacagacaccaggcccacagacaccagggccacggcatcgaggaggacgaggacgtgagcgacggccaccaccacagagaccccagccacagacacagaagccacgaggaggacgacaacgacgacgacgacgtgagcaccgagtacggccaccaggcccacagacaccaggaccacagaaaggaggaggtggaggccgtgagcggcgagcaccaccaccacgtgcccgaccacagacaccagggccacagagacgaggaggaggacgaggacgtgagcaccgagagatggcaccagggcccccagcacgtgcaccacggcctggtggacgaggaggaggaggaggaggagatcaccgtgcagttcggccactacgtggccagccaccagcccagaggccacaagagcgacgaggaggacttccaggacgagtacaagaccgaggtgccccaccaccaccaccacagagtgcccagagaggaggacgaggaggtgagcgccgagctgggccaccaggcccccagccacagacagagccaccaggacgaggagaccggccacggccagagaggcagcatcaaggagatgagccaccacccccccggccacaccgtggtgaaggacagaagccacctgagaaaggacgacagcgaggagtag

SEQ ID NO: 125816 - protein, 387 aa, Artificial Sequence
  derived and/or modified sequence
MSTFFSDTAWICLAVPTVLCGTVFCKYKKSSGQLWSWMVCLAGLCAVCLLILSPFWGLILFSVSCFLMYTYLSGQELLPVDQKAVLVTGGDCGLGHALCKYLDELGFTVFAGVLNENGPGAEELRRTCSPRLSVLQMDITKPVQIKDAYSKVAAMLQDRGLWAVINNAGVLGFPTDGELLLMTDYKQCMAVNFFGTVEVTKTFLPLLRKSKGRLVNVSSMGGGAPMERLASYGSSKAAVTMFSSVMRLELSKWGIKVASIQPGGFLTNIAGTSDKWEKLEKDILDHLPAEVQEDYGQDYILAQRNFLLLINSLASKDFSPVLRDIQHAILAKSPFAYYTPGKGAYLWICLAHYLPIGIYDYFAKRHFGQDKPMPRALRMPNYKKKAT

SEQ ID NO: 125817 - DNA, 107 bp, Artificial Sequence
  derived and/or modified sequence
aatcaacaaggaactgaaacaagtaaacaagaaaacaaataacaccataaaacatgggcaaaggacataaacagacatttttcaaaaaagacatacaaatggccgag

SEQ ID NO: 125818 - DNA, 1164 bp, Artificial Sequence
  derived and/or modified sequence
atgtccacattcttttccgatacagcctggatttgtctcgcagtgcctactgtgctatgtgggaccgtattctgcaagtacaagaagtccagtggacagctttggagttggatggtttgcttggccggactctgtgcagtgtgtctgttgatcctgtcaccgttttggggcctaattctttttagcgtctcgtgcttcttgatgtatacctacctctcaggacaagagctcctcccggtggatcaaaaggcagtgttagttacaggaggcgactgcggactcggacatgcactgtgcaagtacctcgatgagcttggattcaccgtgtttgccggcgtattgaatgaaaatggtccgggggcagaagaactcaggagaacatgcagtcccagattgtccgtcctgcagatggacattacaaagcccgtccagatcaaagatgcatactcaaaagtggctgccatgctccaagatcgcggtctgtgggcagtgattaataacgccggcgtgctgggctttccgactgacggagagctgctcctgatgacagactacaagcagtgcatggcggtgaattttttcgggaccgtcgaggttactaagacgttcctgccgctactgcggaagagtaaaggtagactcgtaaatgtgtcatctatgggaggcggcgctcccatggaacgcctggcaagttacggctcgtccaaggcagccgtaacgatgttctcctctgtaatgcgactggaactgtccaagtggggaattaaggttgccagcattcagcccggcggttttcttacaaacattgccggaacatccgacaagtgggagaagcttgagaaagatatcttagaccatcttcccgccgaagtccaggaggactacggtcaggattacattctggcgcagcgaaacttcctgcttttgattaacagcctcgccagcaaggacttcagcccagtgttgagagatattcagcatgccattcttgcaaaatcaccgttcgcctactataccccagggaaaggggcatacctctggatatgtcttgcccactatctcccaataggaatctacgattattttgccaaacgccactttgggcaggataagcccatgccacgggctttgcgcatgccgaattataagaaaaaggctacgtag

SEQ ID NO: 125819 - DNA, 1426 bp, Artificial Sequence
  derived and/or modified sequence
ggaatatgattatgcttaatctatgctcagttgaaaggggctggggctgctttctcccctcccttcttgactctctgttcacagaactcaggctgcctccagccagcctttgcccgctagactcactggccctgagcacttgaaggtgcagcaagtcactgagaatgagcactttcttctcggacacagcatggatctgcctggctgtccccacagtactatgtgggacagtattttgcaaatacaagaagagctcagggcagctgtggagctggatggtctgcctggcaggcctctgtgcagtctgcctgctcatcctgtcccctttttggggcttgatcctcttctcggtgtcatgcttcctcatgtatacttacttatctggccaagaattgttacctgtggatcagaaggcagtcctggtgacaggtggtgattgcgggcttggccatgctttgtgcaagtatctggatgagctgggcttcacggtatttgccggagttttgaatgaaaatggcccaggagctgaggaattgcgaagaacctgctctccgcgcctctcggtgctccaaatggacatcacgaagccagtgcagataaaagatgcttacagcaaggttgcagcaatgctgcaggacagaggactgtgggctgtgatcaacaatgctggggtgcttggctttccaactgatggggagcttcttcttatgactgactacaaacaatgcatggccgtgaacttctttggaactgtggaggtcacaaagacgtttttgcctcttcttagaaaatccaaagggaggctggtgaatgtcagcagcatgggaggaggggccccaatggaaaggctggcatcttatggctcatcaaaggcggctgtgaccatgttctcatcagttatgagactggagctttccaagtggggaattaaagttgcttccatccaacctggaggcttcctaacaaatatcgcaggcaccagtgacaagtgggaaaagctggagaaggacattctggaccacctccccgctgaggtacaggaagactacggccaggactacatcttagcacagcggaatttcctcctattgatcaactcgttagccagcaaggacttctctccggtgctgcgggacatccagcatgctatcttggcgaagagcccttttgcctattacacgccagggaaaggcgcttacttgtggatctgccttgctcactatttgcctattggcatatatgattactttgctaaaagacattttggccaagacaagcccatgcccagagctctaagaatgcctaactacaagaaaaaggccacctaggcaatggaagccctcaaagaagtcggaatgtcatagtcttgaaatgaaagggaaactgggaaactgggtttctcattaaagttgtttcccactctgta

SEQ ID NO: 125820 - DNA, 1164 bp, Artificial Sequence
  derived and/or modified sequence
atgagcaccttcttcagtgacacagcctggatctgcctggccgtgcccaccgtgctgtgtggcaccgtcttctgcaagtacaagaagagcagcggccagctgtggagctggatggtgtgcctggccggcctgtgtgctgtgtgcctgctgatcctgagccccttctggggcctcatcctcttctctgtgtcctgcttcctgatgtacacctacctgagcggccaggagctgctgcctgtggaccagaaggctgtgctggtgactggaggagactgtggcctgggccacgccctgtgcaagtacctggatgagctgggcttcaccgtgtttgctggggtgctgaatgaaaatggacctggagctgaggagctgcggaggacctgcagcccccggctgtctgtgctgcagatggacatcaccaagcctgtgcagatcaaggatgcctacagcaaggtggccgccatgctgcaggaccggggcctgtgggccgtcatcaacaatgctggggtgctgggcttccccacagatggagagctgctgctgatgacagactacaagcagtgcatggctgtgaacttcttcggcaccgtggaggtgaccaagaccttcctgcccctgctgaggaagagcaagggccgcctggtgaatgtgtcctccatgggcggcggggcccccatggagcggctggccagctatggcagcagcaaggctgctgtgaccatgttcagctctgtgatgaggctggagctgagcaagtggggcatcaaggtggccagcatccagcccggcggcttcctgaccaacattgctggcaccagtgacaagtgggagaagctggagaaggacatcctggaccacctgcctgctgaggtgcaggaggactatggccaggactacatcctggcccagaggaacttcctgctgctgatcaacagcctggccagcaaggacttcagccctgtgctgcgggacatccagcacgccatcctggccaagagcccctttgcctactacacccctgggaagggggcctacctgtggatctgcctggcccactacctgcccatcggcatctatgactactttgccaagaggcacttcggccaggacaagcccatgccccgggccctgaggatgcccaactacaagaagaaggccacctag

SEQ ID NO: 125821 - DNA, 1164 bp, Artificial Sequence
  derived and/or modified sequence
atgagcaccttcttcagcgacaccgcctggatctgcctggccgtgccaaccgtactatgcggcacagtcttttgcaagtacaagaaaagtagcggccagctgtggtcttggatggtgtgtttggctggactttgcgccgtctgcttgctcatactcagtcccttctgggggttgatactgttttcagtctcttgttttctgatgtacacgtatctgagtggccaggagttgttaccagtcgatcagaaggccgttctggtgacaggcggcgattgtggcctggggcacgccctgtgcaagtatctagacgaactgggttttactgtattcgcaggtgtgctgaatgagaatggacccggagccgaagagctcagaaggacttgctcacctagactctctgtgctgcagatggacattaccaaacctgtgcagatcaaggatgcctatagcaaagtagccgccatgttacaagaccgaggactctgggcagtgattaacaacgccggggtcctcggcttcccaacggacggggaactcctgctgatgactgattataagcagtgcatggctgtgaatttttttgggaccgtggaggttacaaagactttcctgcccttgctcaggaagagtaagggccggcttgttaatgtgagttccatgggcggtggcgcgcccatggagcgcctggcctcatacggtagcagtaaggcagcggttacaatgtttagctctgtcatgcgactcgagctctctaaatggggaatcaaagtagctagtatacagcccggcggctttctgactaatattgctggaacaagtgataagtgggaaaaactggaaaaagacattctggaccatctccccgccgaggtgcaggaggattacgggcaagactacattttggctcaaagaaattttctgctccttatcaattctctggcttcaaaagacttcagccccgtgttgcgagacattcaacacgcgattctagctaagtcaccttttgcttattatacccccggaaagggtgcctacctatggatatgtcttgcccattacttgccaatcgggatttacgactactttgcaaagcgacactttggtcaggacaagcctatgccaagggcactacgtatgccaaattataaaaagaaagccacatag

SEQ ID NO: 125822 - DNA, 1164 bp, Artificial Sequence
  derived and/or modified sequence
atgagtacctttttctcagacaccgcttggatctgtctcgctgtgccaacagtcctgtgcgggacagtgttctgcaaatacaaaaagtcatccggccagttatggagttggatggtttgcctcgccggactctgcgccgtttgcctgttgattttgtctcccttctggggtctgatccttttttctgtgagctgcttccttatgtacacatatttgtccgggcaggagttgctgcccgtggaccagaaagccgtactcgtgacaggcggtgattgcggtttgggacatgccctgtgtaagtacctagatgagctcgggtttacggtgtttgccggagtgctgaacgaaaatggccctggagctgaagagctgagaaggacatgctcaccacgactgtccgtcctccaaatggatatcacaaaacctgtccagatcaaggacgcctatagcaaagtggctgctatgcttcaggatcggggtctgtgggccgtgataaacaatgccggtgttctgggcttccctaccgacggagagcttctcctgatgaccgactacaagcaatgcatggcagtcaacttttttggtaccgtcgaggtgactaagacttttttacctcttcttagaaagtccaaaggcagattggtcaatgtgtcttccatgggcggtggggcacccatggaacgattggcttcctatggtagtagcaaagccgctgtgaccatgttcagcagtgtcatgaggttggagctctcaaagtggggaatcaaggtggcttccattcaacccggagggttcctgacaaacattgcgggaacatctgacaaatgggaaaagctcgagaaagacatactcgatcacctacctgcagaggtgcaggaagactacggacaggactacatactcgctcagcgtaacttcttactgctgatcaattcgttggcatcaaaagacttctccccagtgttgcgagatatccagcacgctatcttagctaaatcacctttcgcctactacacaccaggaaaaggcgcatacctttggatttgcctagcccactatctcccaattgggatttacgactacttcgctaagcgccacttcgggcaagacaagccgatgccgagagctttgcgaatgcctaattacaaaaagaaagccacatag

SEQ ID NO: 125823 - DNA, 1164 bp, Artificial Sequence
  derived and/or modified sequence
atgagcaccttcttcagcgacaccgcctggatctgcctggccgtgcccaccgtgctgtgcggcaccgtgttctgcaagtacaagaagagcagcggccagctgtggagctggatggtgtgcctggccggcctgtgcgccgtgtgcctgctgatcctgagccccttctggggcctgatcctgttcagcgtgagctgcttcctgatgtacacctacctgagcggccaggagctgctgcccgtggaccagaaggccgtgctggtgaccggcggcgactgcggcctgggccacgccctgtgcaagtacctggacgagctgggcttcaccgtgttcgccggcgtgctgaacgagaacggccccggcgccgaggagctgagaagaacctgcagccccagactgagcgtgctgcagatggacatcaccaagcccgtgcagatcaaggacgcctacagcaaggtggccgccatgctgcaggacagaggcctgtgggccgtgatcaacaacgccggcgtgctgggcttccccaccgacggcgagctgctgctgatgaccgactacaagcagtgcatggccgtgaacttcttcggcaccgtggaggtgaccaagaccttcctgcccctgctgagaaagagcaagggcagactggtgaacgtgagcagcatgggcggcggcgcccccatggagagactggccagctacggcagcagcaaggccgccgtgaccatgttcagcagcgtgatgagactggagctgagcaagtggggcatcaaggtggccagcatccagcccggcggcttcctgaccaacatcgccggcaccagcgacaagtgggagaagctggagaaggacatcctggaccacctgcccgccgaggtgcaggaggactacggccaggactacatcctggcccagagaaacttcctgctgctgatcaacagcctggccagcaaggacttcagccccgtgctgagagacatccagcacgccatcctggccaagagccccttcgcctactacacccccggcaagggcgcctacctgtggatctgcctggcccactacctgcccatcggcatctacgactacttcgccaagagacacttcggccaggacaagcccatgcccagagccctgagaatgcccaactacaagaagaaggccacctag

SEQ ID NO: 125824 - protein, 840 aa, Artificial Sequence
  derived and/or modified sequence
MSVVGIDLGFQSCYVAVARAGGIETIANEYSDRCTPACISFGPKNRSIGAAAKSQVISNAKNTVQGFKRFHGRAFSDPFVEAEKSNLAYDIVQLPTGLTGIKVTYMEEERNFTTEQVTAMLLSKLKETAESVLKKPVVDCVVSVPCFYTDAERRSVMDATQIAGLNCLRLMNETTAVALAYGIYKQDLPALEEKPRNVVFVDMGHSAYQVSVCAFNRGKLKVLATAFDTTLGGRKFDEVLVNHFCEEFGKKYKLDIKSKIRALLRLSQECEKLKKLMSANASDLPLSIECFMNDVDVSGTMNRGKFLEMCNDLLARVEPPLRSVLEQTKLKKEDIYAVEIVGGATRIPAVKEKISKFFGKELSTTLNADEAVTRGCALQCAILSPAFKVREFSITDVVPYPISLRWNSPAEEGSSDCEVFSKNHAAPFSKVLTFYRKEPFTLEAYYSSPQDLPYPDPAIAQFSVQKVTPQSDGSSSKVKVKVRVNVHGIFSVSSASLVEVHKSEENEEPMETDQNAKEEEKMQVDQEEPHVEEQQQQTPAENKAESEEMETSQAGSKDKKMDQPPQAKKAKVKTSTVDLPIENQLLWQIDREMLNLYIENEGKMIMQDKLEKERNDAKNAVEEYVYEMRDKLSGEYEKFVSEDDRNSFTLKLEDTENWLYEDGEDQPKQVYVDKLAELKNLGQPIKIRFQESEERPKLFEELGKQIQQYMKIISSFKNKEDQYDHLDAADMTKVEKSTNEAMEWMNNKLNLQNKQSLTMDPVVKSKEIEAKIKELTSTCSPIISKPKPKVEPPKEEQKNAEQNGPVDGQGDNPGPQAAEQGTDTAVPSDSDKKLPEMDID

SEQ ID NO: 125825 - protein, 148 aa, Artificial Sequence
  derived and/or modified sequence
MSVVGIDLGFQSCYVAVARAGGIETIANEYSDRCTPACISFGPKNRSIGAAAKSQVISNAKNTVQGFKRFHGRAFSDPFVEAEKSNLAYDIVQLPTGLTGIKVTYMEEEQNGPVDGQGDNPGPQAAEQGTDTAVPSDSDKKLPEMDID

SEQ ID NO: 125826 - protein, 473 aa, Artificial Sequence
  derived and/or modified sequence
MSVVGIDLGFQSCYVAVARAGGIETIANEYSDRCTPACISFGPKNRSIGAAAKSQVISNAKNTVQGFKRFHGRAFSDPFVEAEKSNLAYDIVQLPTGLTGIKVTYMEEERNFTTEQVTAMLLSKLKETAESVLKKPVVDCVVSVPCFYTDAERRSVMDATQIAGLNCLRLMNETTAVALAYGIYKQDLPALEEKPRNVVFVDMGHSAYQVSVCAFNRGKLKVLATAFDTTLGGRKFDEVLVNHFCEEFGKKYKLDIKSKIRALLRLSQECEKLKKLMSANASDLPLSIECFMNDVDVSGTMNRGKFLEMCNDLLARVEPPLRSVLEQTKLKKEDIYAVEIVGGATRIPAVKEKISKFFGKELSTTLNADEAVTRGCALQCAILSPAFKVREFSITDVVPYPISLRWNSPAEEGSSDCEVFSKNHAAPFSKVLTFYRKEPFTLEAYYSSPGFALSRSCYSIIKSLLSLMAPVQK

SEQ ID NO: 125827 - DNA, 2523 bp, Artificial Sequence
  derived and/or modified sequence
atgagtgtggtggggattgatttagggttccagtcttgctatgtggctgtcgccagggcaggtgggatcgaaaccatcgcgaacgagtattcagatagatgcacgccggcctgtattagcttcggtccaaaaaatcggtcaatcggggcagcagctaagagccaagtgatatcgaatgctaagaacacagttcagggcttcaagcgtttccacggccgcgccttttccgacccgttcgtggaggcggaaaagtccaatctcgcttacgatattgtacagctgcctaccgggctgacaggaatcaaagttacatacatggaggaggaacggaactttacaaccgagcaggtcacagccatgcttctgtccaagctcaaagagacagctgagtccgtcctgaagaagcctgttgtggactgcgtggtgagcgtcccctgcttctacacagacgccgaaagacgaagcgtgatggacgccacacaaatcgcaggcttgaattgccttaggcttatgaacgagacaacagcggtcgctctggcttacggaatctataaacaagatttaccggcattggaggaaaagcctcgaaacgtcgtgttcgtcgatatgggtcacagcgcgtaccaggtatcagtatgtgccttcaacaggggtaaattgaaggtgcttgctacagccttcgatacaaccctgggtggccgaaagtttgatgaggtcttggtcaatcacttttgcgaggagtttgggaagaagtacaaacttgacattaaaagtaaaataagggccctactccgcttgtcccaggaatgcgagaagctcaaaaagctcatgtccgctaatgcttctgatctcccattaagtattgagtgcttcatgaacgacgtcgatgtgagtggcacgatgaaccggggcaagtttcttgagatgtgcaacgatctgctcgcgagagtagagccaccgttacgcagtgtacttgaacagactaaattaaaaaaagaagacatctatgccgtggagattgtggggggggccacccggatacctgccgtgaaagaaaaaatcagtaagttttttggtaaggagctttccactaccttgaatgctgacgaggccgtgacgagagggtgtgctctgcagtgcgccatcttgtcaccggctttcaaggtgcgagagttttccatcactgacgtcgtcccgtatcccattagcctcaggtggaacagtcccgccgaagaaggaagtagcgattgcgaagtgttcagtaagaatcatgccgccccgttttctaaagtgttgacattttaccgtaaggagccatttactctggaagcctattattcatcaccgcaggacttgccgtatccagatccagccatcgcgcaattttccgtccagaaggtcacaccacaaagtgatggaagcagtagtaaagtgaaagtgaaagtcagagtgaacgtccatggcatattcagtgttagctcagccagcttggtcgaagtgcataagtccgaggagaatgaagaacctatggaaaccgatcagaatgccaaggaagaggagaagatgcaggtcgaccaggaggaacctcacgtggaggagcagcagcagcagacccccgcagagaacaaggctgagtccgaagaaatggaaacctcccaagctggttcaaaggacaagaagatggatcagcccccccaggccaagaaggccaaggtgaagacttcgaccgtggacctgcctattgaaaatcagcttctatggcagatcgatagagaaatgctgaatctgtacatcgaaaacgagggaaagatgataatgcaagacaagctggagaaggagcggaacgatgccaagaacgcagtagaagagtacgtgtatgaaatgcgagacaaactgtctggggagtatgagaagttcgtgagcgaggatgacaggaactcgttcacactcaagctcgaagatacagaaaactggctgtatgaggatggtgaagaccagccaaagcaggtgtatgtggataagctcgcagaactgaagaatcttggtcagccgattaagatacggtttcaggaatcagaggaaagaccaaagctgtttgaggaactgggcaaacagatccagcagtatatgaagataatcagcagcttcaaaaataaggaggaccagtacgatcacctggatgcagctgacatgacaaaggttgaaaaatctaccaatgaggccatggagtggatgaataacaagctcaatctacagaacaagcaatccctgacaatggatcccgtcgtgaagtccaaagaaatcgaagcgaaaataaaggagctgacgagcacttgctccccgattatcagtaagccaaaacctaaggttgagccccctaaagaggagcagaaaaacgccgaacagaatggcccggtggatgggcaaggggataaccccggtccccaagccgccgagcagggcactgataccgctgtccccagcgatagtgacaagaaactaccagagatggacatcgactag

SEQ ID NO: 125828 - DNA, 447 bp, Artificial Sequence
  derived and/or modified sequence
atgtctgtggttgggattgatctcggctttcagagctgctatgtcgccgttgcccgcgcaggcggcatcgagaccattgcaaacgaatactccgataggtgcacgcctgcttgtataagcttcggcccaaagaatcgtagcataggggctgctgccaaatctcaggtgatctccaatgccaaaaacacagtccagggcttcaagcgctttcatggaagagccttctctgatccctttgtggaggccgaaaagagcaacctcgcgtacgacatagtgcagctgccaaccggcctgaccggtatcaaagtgacttatatggaagaggaacagaacggacctgtggatggacagggcgataacccggggccacaggctgctgaacagggcacggataccgctgtgccaagcgactcggacaagaaactgcctgagatggatatcgactag

SEQ ID NO: 125829 - DNA, 1422 bp, Artificial Sequence
  derived and/or modified sequence
atgagtgtcgttggtattgatctaggattccagagttgctacgtggcggtggcaagagcaggaggcatcgaaacaatagctaacgagtattctgatagatgcacgcctgcctgcatctcctttgggcccaaaaatcgaagcatcggggcagccgccaaaagtcaggttatatcgaacgccaaaaatactgttcagggttttaaaagattccacggccgcgctttcagcgacccgttcgtcgaagccgaaaagtctaatttagcatatgacatcgttcaactacccacgggactaaccggcatcaaggtgacttatatggaggaggagagaaatttcacgacagaacaagtcaccgctatgcttcttagcaagctgaaagaaaccgcggaatccgtgctaaagaagccagtcgttgactgcgttgtttccgtgccctgcttttacactgacgctgagcgacggtccgttatggatgcaacccaaatcgccgggctcaattgcctgcgactcatgaatgagactaccgccgtcgctttggcatacggtatctataagcaggatctccccgcactggaggagaaacctaggaacgtcgtatttgtggacatgggacactctgcttatcaagtctccgtctgtgcgtttaacagaggcaagctgaaggtactcgcgacagcctttgacacaacacttggaggaaggaagtttgacgaggtgctagtaaaccatttttgcgaagagttcggcaaaaaatataagctcgacatcaagagtaagatcagggcacttctgcgactgtctcaggagtgtgaaaagttaaagaaactcatgagcgccaacgcctcagatttgcccctgtccattgaatgctttatgaatgatgtcgacgtgtcgggcaccatgaacaggggaaagttcttagaaatgtgcaatgacctgctcgctagggtcgagcccccccttagatccgtactggaacagactaaacttaaaaaagaggatatctacgctgtcgagattgtaggcggggcaactcgcattccggcggtgaaggagaaaatatctaaatttttcgggaaggaactatccacgaccctgaatgccgacgaggccgtcacaagagggtgtgccctccagtgtgccattctgtctcctgccttcaaggtgagagaattttccatcacagatgtagttccttacccaatatccctgagatggaacagtcctgcagaggagggtagctcagattgtgaggtttttagcaagaatcacgccgcaccgttctccaaagtgctgacattctataggaaggagccctttacacttgaggcctattattccagccctggattcgcactctcaagatcttgttatagcattatcaagagcctcctgagcctgatggcccccgtgcagaaatag

SEQ ID NO: 125830 - DNA, 4825 bp, Artificial Sequence
  derived and/or modified sequence
ctttcgtagctctggtgctgcggctccgctctcgtcgcaacgagatctttcgagatcttctccgcccccgctaccggcgcctcctctgcggccactgagccggagccggcctgagcagcgctctcggttgcagtacccactggaaggacttaggcgctcgcgtggacaccgcaagcccctcagtagcctcggcccaagaggcctgctttccactcgctagccccgccgggggtccgtgtcctgtctcggtggccggacccgggcccgagcccgagcagtagccggcgccatgtcggtggtgggcatagacctgggcttccagagctgctacgtcgctgtggcccgcgccggcggcatcgagactatcgctaatgagtatagcgaccgctgcacgccggcttgcatttcttttggtcctaagaatcgttcaattggagcagcagctaaaagccaggtaatttctaatgcaaagaacacagtccaaggatttaaaagattccatggccgagcattctctgatccatttgtggaggcagaaaaatctaaccttgcatatgatattgtgcagttgcctacaggattaacaggtataaaggtgacatatatggaggaagagcgaaattttaccactgagcaagtgactgccatgcttttgtccaaactgaaggagacagccgaaagtgttcttaagaagcctgtagttgactgtgttgtttcggttccttgtttctatactgatgcagaaagacgatcagtgatggatgcaacacagattgctggtcttaattgcttgcgattaatgaatgaaaccactgcagttgctcttgcatatggaatctataagcaggatcttcctgccttagaagagaaaccaagaaatgtagtttttgtagacatgggccactctgcttatcaagtttctgtatgtgcatttaatagaggaaaactgaaagttctggccactgcatttgacacgacattgggaggtagaaaatttgatgaagtgttagtaaatcacttctgtgaagaatttgggaagaaatacaagctagacattaagtccaaaatccgtgcattattacgactctctcaggagtgtgagaaactcaagaaattgatgagtgcaaatgcttcagatctccctttgagcattgaatgttttatgaatgatgttgatgtatctggaactatgaatagaggcaaatttctggagatgtgcaatgatctcttagctagagtggagccaccacttcgtagtgttttggaacaaaccaagttaaagaaagaagatatttatgcagtggagatagttggtggtgctacacgaatccctgcggtaaaagagaagatcagcaaatttttcggtaaagaacttagtacaacattaaatgctgatgaagctgtcactcgaggctgtgcattgcagtgtgccatcttatcgcctgctttcaaagtcagagaattttctatcactgatgtagtaccatatccaatatctctgagatggaattctccagctgaagaagggtcaagtgactgtgaagtcttttccaaaaatcatgctgctcctttctctaaagttcttacattttatagaaaggaacctttcactcttgaggcctactacagctctcctcaggatttgccctatccagatcctgctatagctcagttttcagttcagaaagtcactcctcagtctgatggctccagttcaaaagtgaaagtcaaagttcgagtaaatgtccatggcattttcagtgtgtccagtgcatctttagtggaggttcacaagtctgaggaaaatgaggagccaatggaaacagatcagaatgcaaaggaggaagagaagatgcaagtggaccaggaggaaccacatgttgaagagcaacagcagcagacaccagcagaaaataaggcagagtctgaagaaatggagacctctcaagctggatccaaggataaaaagatggaccaaccaccccaagccaagaaggcaaaagtgaagaccagtactgtggacctgccaatcgagaatcagctattatggcagatagacagagagatgctcaacttgtacattgaaaatgagggtaagatgatcatgcaggataaactggagaaggagcggaatgatgctaagaacgcagtggaggaatatgtgtatgaaatgagagacaagcttagtggtgaatatgagaagtttgtgagtgaagatgatcgtaacagttttactttgaaactggaagatactgaaaattggttgtatgaggatggagaagaccagccaaagcaagtttatgttgataagttggctgaattaaaaaatctaggtcaacctattaagatacgtttccaggaatctgaagaacgaccaaaattatttgaagaactagggaaacagatccaacagtatatgaaaataatcagctctttcaaaaacaaggaggaccagtatgatcatttggatgctgctgacatgacaaaggtagaaaaaagcacaaatgaagcaatggagtggatgaataacaagctaaatctgcagaacaagcagagtttgaccatggatccagttgtcaagtcaaaagagattgaagctaaaattaaggagctgacaagtacttgtagccctataatttcaaagcccaaacccaaagtggaacctccaaaagaggaacaaaaaaatgcagagcagaatggaccagtggatggacaaggagacaacccaggcccccaggctgctgagcagggtacagacacagctgtgccttcggattcagacaagaagcttcctgaaatggacattgattgattccaacacttgtttctattaaaacagactattataaagctttaagttgtcaactttgttctaaatatcaactagcgcaagtgaatactgaagatttcttagtcagtttttaggggattttcggggaggggaaataggtaatgtatggagcattttcacttctaaatagttagatacagaaattaagtgcattgtatctttttcataatggtactatttagaagcccagttagtcttactgagcttatgcttcactcctttatgtttaaccatgtgtctacaagaataagtttgttttggaaagttgagctatagctacagctctagctatccagcagacttttcattatgacttacatggcaggagctctaattatgctttaaaaatctgttgtggagattgctttaaatgctccctgcctggtgtggggatggggtccccctctttgtgagggctggagcatggcacggcatggattaacacggcagaggaacaaaggtgtgctctgagcttcttcatatttcaccttcaccctcacctgtgttctcttccctctctcccaataaaagggctcccattataaatgccatgtacttctcttgggaaaatagacccccttgcctagagtaagttgttaactgagggctttaaacctggaggctcttcctgaaagtatgttcatgaataccccaagcatcaaggtctaaataattttcagaagattagaattgggtagatatactgttggatatagccatggtaaatttaactgaggaattaaatccttgttaattttggtgtaaagatttgtatcctggcctgtttattcaggtgggagatgttctgtataattttgaggtatagcttgaactcctagaacaagagttaaaagttctttttagctcattcacaatcacttgtgtgttaagtgttaatatctgtcatgaacctgccaatttgtacgtgttaagcagctgacagatgatgcaaaaaaaactaagatacactggattgtactggatgagtctgaaattagtgttaaagaagtgtggtgcctgatgttataacaacacctcattcttaactgtgtggccaatgtcaggtataccaaagcattcctctgactgctttttggggcagtgttgacaggagtgaggcattttggaaactccaagggaagcctgtgtttgaggccagagttggtacctgctttaagaaactgttacagggcttgttggtaatgttttgaatctttgtaaaaattgatattctgtataacagagtgcctctctgttacttttggcctatgttgttagaaataagatgctatcttgcatagttagaattaagcgtttgtccatctctagataacattgaaaagtttgagtgttacaggctctaaagtgcaatggagaacaattgcttaggaggaggaaggggaaagtatacttatgttggtgtgtaagcatgcatggaggcctcgaggcaccacaacaaggccaggttcttagcacatcctctgttctctacctgtcatgcttcaagagttccagctggcctgctgtgaagccagtagctattttaaaagtgctggctgcaggattaagccaaccctttacaactggcccagaccgtaatggccatttcttcttaaaaaaaaaaaaattttttttttttttttttttttttttttttttttttttggtgtgtgtgtgtgtgtgtgtggggaagggtgtgggtgctgggatgggggtgaatttcaagttgaaacacgatgatgtggtctgcttgctctctgcttagacaggctttaagaccaattggattttcatggaggccaggacagagagtggtaattgatggcttgtgtacagacaagcatttatccaggttgcgttatccaaactgatttgttaaagctccaggtcacgttcttacactaagaaaatcattcagtaaacatgagacaagtttaggaaaaactaataaaataaacctgtcttaaacttgaa

SEQ ID NO: 125831 - DNA, 728 bp, Artificial Sequence
  derived and/or modified sequence
gctctggtgctgcggctccgctctcgtcgcaacgagatctttcgagatcttctccgcccccgctaccggcgcctcctctgcggccactgagccggagccggcctgagcagcgctctcggttgcagtacccactggaaggacttaggcgctcgcgtggacaccgcaagcccctcagtagcctcggcccaagaggcctgctttccactcgctagccccgccgggggtccgtgtcctgtctcggtggccggacccgggcccgagcccgagcagtagccggcgccatgtcggtggtgggcatagacctgggcttccagagctgctacgtcgctgtggcccgcgccggcggcatcgagactatcgctaatgagtatagcgaccgctgcacgccggcttgcatttcttttggtcctaagaatcgttcaattggagcagcagctaaaagccaggtaatttctaatgcaaagaacacagtccaaggatttaaaagattccatggccgagcattctctgatccatttgtggaggcagaaaaatctaaccttgcatatgatattgtgcagttgcctacaggattaacaggtataaaggtgacatatatggaggaagagcagaatggaccagtggatggacaaggagacaacccaggcccccaggctgctgagcagggtacagacacagctgtgccttcggattcagacaagaagcttcctgaaatggacattgattga

SEQ ID NO: 125832 - DNA, 1703 bp, Artificial Sequence
  derived and/or modified sequence
gctctggtgctgcggctccgctctcgtcgcaacgagatctttcgagatcttctccgcccccgctaccggcgcctcctctgcggccactgagccggagccggcctgagcagcgctctcggttgcagtacccactggaaggacttaggcgctcgcgtggacaccgcaagcccctcagtagcctcggcccaagaggcctgctttccactcgctagccccgccgggggtccgtgtcctgtctcggtggccggacccgggcccgagcccgagcagtagccggcgccatgtcggtggtgggcatagacctgggcttccagagctgctacgtcgctgtggcccgcgccggcggcatcgagactatcgctaatgagtatagcgaccgctgcacgccggcttgcatttcttttggtcctaagaatcgttcaattggagcagcagctaaaagccaggtaatttctaatgcaaagaacacagtccaaggatttaaaagattccatggccgagcattctctgatccatttgtggaggcagaaaaatctaaccttgcatatgatattgtgcagttgcctacaggattaacaggtataaaggtgacatatatggaggaagagcgaaattttaccactgagcaagtgactgccatgcttttgtccaaactgaaggagacagccgaaagtgttcttaagaagcctgtagttgactgtgttgtttcggttccttgtttctatactgatgcagaaagacgatcagtgatggatgcaacacagattgctggtcttaattgcttgcgattaatgaatgaaaccactgcagttgctcttgcatatggaatctataagcaggatcttcctgccttagaagagaaaccaagaaatgtagtttttgtagacatgggccactctgcttatcaagtttctgtatgtgcatttaatagaggaaaactgaaagttctggccactgcatttgacacgacattgggaggtagaaaatttgatgaagtgttagtaaatcacttctgtgaagaatttgggaagaaatacaagctagacattaagtccaaaatccgtgcattattacgactctctcaggagtgtgagaaactcaagaaattgatgagtgcaaatgcttcagatctccctttgagcattgaatgttttatgaatgatgttgatgtatctggaactatgaatagaggcaaatttctggagatgtgcaatgatctcttagctagagtggagccaccacttcgtagtgttttggaacaaaccaagttaaagaaagaagatatttatgcagtggagatagttggtggtgctacacgaatccctgcggtaaaagagaagatcagcaaatttttcggtaaagaacttagtacaacattaaatgctgatgaagctgtcactcgaggctgtgcattgcagtgtgccatcttatcgcctgctttcaaagtcagagaattttctatcactgatgtagtaccatatccaatatctctgagatggaattctccagctgaagaagggtcaagtgactgtgaagtcttttccaaaaatcatgctgctcctttctctaaagttcttacattttatagaaaggaacctttcactcttgaggcctactacagctctcctggatttgccctatccagatcctgctatagcatcataaagtcactcctcagtctgatggctccagttcaaaagtga

SEQ ID NO: 125833 - DNA, 2523 bp, Artificial Sequence
  derived and/or modified sequence
atgtctgtggtgggcatcgacctgggcttccagagctgctacgtggccgtggcccgggccggcggcatcgagaccatcgccaatgagtacagcgaccgctgcaccccagcctgcatcagctttggccccaagaacagaagcatcggggctgctgccaagagccaggtgatcagcaatgccaagaacacagtgcagggcttcaagcgcttccacggccgggccttcagtgacccctttgtggaggccgagaagagcaacctggcctatgacatcgtgcagctgcccaccggcctgaccggcatcaaggtgacctacatggaggaggagaggaacttcaccacagagcaggtgacagccatgctgctgagcaagctgaaggagacagctgagagcgtgctgaagaagcctgtggtggactgtgtggtgtctgtgccctgcttctacacagatgctgagaggagatctgtgatggatgccacccagattgctggcctgaactgcctgcggctgatgaatgagaccacagctgtggccctggcctacggcatctacaagcaggacctgcctgccctggaggagaagcccagaaatgtggtgtttgtggacatgggccacagcgcctaccaggtgtctgtgtgtgccttcaacagaggcaagctgaaggtgctggccacagcctttgacaccaccctgggcggcaggaagtttgatgaggtgctggtgaaccacttctgtgaggagtttgggaagaagtacaagctggacatcaagagcaagatccgggccctgctgcggctgagccaggagtgtgagaagctgaagaagctgatgtctgccaatgccagtgacctgcccctgagcattgagtgcttcatgaatgatgtggatgtgtctggcaccatgaacagaggcaagttcctggagatgtgcaatgacctgctggcccgggtggagccccccctgcggtctgtgctggagcagaccaagctgaagaaggaggacatctatgctgtggagatcgtgggcggggccacccgcatcccagctgtgaaggagaagatcagcaagttcttcggcaaggagctgagcaccaccctgaatgctgatgaagctgtgacccggggctgtgccctgcagtgtgccatcctgagccctgccttcaaggtgcgggagttcagcatcacagatgtggtgccctaccccatcagcctgcgctggaacagccctgctgaggagggcagcagtgactgtgaggtgttcagcaagaaccacgccgcccccttcagcaaggtgctgaccttctacaggaaggagcccttcaccctggaggcctactacagcagcccccaggacctgccctacccagaccctgccatcgcccagttctctgtgcagaaggtgaccccccagagtgatggcagcagcagcaaggtgaaggtgaaggtgcgggtgaatgtgcacggcatcttctctgtgagcagcgccagcctggtggaggtgcacaagtcagaagaaaatgaggagcccatggagacagaccagaatgccaaggaggaggagaagatgcaggtggaccaggaggagccccacgtggaggagcagcagcagcagaccccagctgagaacaaggccgagagcgaggagatggagaccagccaggccggcagcaaggacaagaagatggaccagcccccccaggccaagaaggccaaggtgaagaccagcacagtggacctgcccatcgagaaccagctgctgtggcagattgaccgggagatgctgaacctgtacattgaaaatgaaggcaagatgatcatgcaggacaagctggagaaggagagaaatgatgccaagaatgctgtggaggagtatgtgtatgagatgagggacaagctgtctggagaatatgagaagtttgtgtctgaagatgacagaaattccttcaccctgaagctggaggacacagagaactggctgtatgaagatggagaggaccagcccaagcaggtgtatgtggacaagctggccgagctgaagaacctgggccagcccatcaagatccgcttccaggagagcgaggagcggcccaagctgtttgaggagctgggcaagcagatccagcagtacatgaagatcatcagcagcttcaagaacaaggaggaccagtatgaccacctggatgctgctgacatgaccaaggtggagaagagcaccaatgaggccatggagtggatgaacaacaagctgaacctgcagaacaagcagagcctgaccatggaccctgtggtgaagagcaaggagattgaggccaagatcaaggagctgaccagcacctgcagccccatcatcagcaagcccaagcccaaggtggagccccccaaggaggagcagaagaatgctgagcagaatggacctgtggatggccagggcgacaaccctggcccccaggccgctgagcagggcacagacacagctgtgcccagcgacagcgacaagaagctgcctgagatggacattgattag

SEQ ID NO: 125834 - DNA, 447 bp, Artificial Sequence
  derived and/or modified sequence
atgtctgtggtgggcatcgacctgggcttccagagctgctacgtggccgtggcccgggccggcggcatcgagaccatcgccaatgagtacagcgaccgctgcaccccagcctgcatcagctttggccccaagaacagaagcatcggggctgctgccaagagccaggtgatcagcaatgccaagaacacagtgcagggcttcaagcgcttccacggccgggccttcagtgacccctttgtggaggccgagaagagcaacctggcctatgacatcgtgcagctgcccaccggcctgaccggcatcaaggtgacctacatggaggaggagcagaatggacctgtggatggccagggcgacaaccctggcccccaggccgctgagcagggcacagacacagctgtgcccagcgacagcgacaagaagctgcctgagatggacattgattag

SEQ ID NO: 125835 - DNA, 1422 bp, Artificial Sequence
  derived and/or modified sequence
atgtctgtggtgggcatcgacctgggcttccagagctgctacgtggccgtggcccgggccggcggcatcgagaccatcgccaatgagtacagcgaccgctgcaccccagcctgcatcagctttggccccaagaacagaagcatcggggctgctgccaagagccaggtgatcagcaatgccaagaacacagtgcagggcttcaagcgcttccacggccgggccttcagtgacccctttgtggaggccgagaagagcaacctggcctatgacatcgtgcagctgcccaccggcctgaccggcatcaaggtgacctacatggaggaggagaggaacttcaccacagagcaggtgacagccatgctgctgagcaagctgaaggagacagctgagagcgtgctgaagaagcctgtggtggactgtgtggtgtctgtgccctgcttctacacagatgctgagaggagatctgtgatggatgccacccagattgctggcctgaactgcctgcggctgatgaatgagaccacagctgtggccctggcctacggcatctacaagcaggacctgcctgccctggaggagaagcccagaaatgtggtgtttgtggacatgggccacagcgcctaccaggtgtctgtgtgtgccttcaacagaggcaagctgaaggtgctggccacagcctttgacaccaccctgggcggcaggaagtttgatgaggtgctggtgaaccacttctgtgaggagtttgggaagaagtacaagctggacatcaagagcaagatccgggccctgctgcggctgagccaggagtgtgagaagctgaagaagctgatgtctgccaatgccagtgacctgcccctgagcattgagtgcttcatgaatgatgtggatgtgtctggcaccatgaacagaggcaagttcctggagatgtgcaatgacctgctggcccgggtggagccccccctgcggtctgtgctggagcagaccaagctgaagaaggaggacatctatgctgtggagatcgtgggcggggccacccgcatcccagctgtgaaggagaagatcagcaagttcttcggcaaggagctgagcaccaccctgaatgctgatgaagctgtgacccggggctgtgccctgcagtgtgccatcctgagccctgccttcaaggtgcgggagttcagcatcacagatgtggtgccctaccccatcagcctgcgctggaacagccctgctgaggagggcagcagtgactgtgaggtgttcagcaagaaccacgccgcccccttcagcaaggtgctgaccttctacaggaaggagcccttcaccctggaggcctactacagcagccctggctttgccctgagccgcagctgctacagcatcatcaagagcctgctgagcctgatggcccctgtgcagaagtag

SEQ ID NO: 125836 - DNA, 2523 bp, Artificial Sequence
  derived and/or modified sequence
atgagcgtggtgggcatcgacctgggcttccagagctgctacgtggccgtggcacgcgcggggggcatcgaaacaatcgccaatgagtacagtgaccgctgtaccccggcctgcatctcattcggccccaagaacagatctatcggtgccgccgccaaaagtcaggtgatcagcaacgctaagaatacagtgcaaggattcaagcggttccacggaagggcttttagcgacccgtttgttgaggcagaaaagtccaacttggcctatgacattgtgcagctgccaactggcctgaccgggatcaaagtgacgtacatggaggaagaaagaaattttaccaccgaacaggtcacagctatgctgctcagcaagctcaaagagaccgcggagagtgtgcttaaaaaaccggtggtcgattgcgttgtgagcgttccatgcttttacaccgacgctgaaaggcggtccgtaatggacgctacacagattgcaggattaaattgcctgcggctgatgaacgaaaccaccgccgtggccctggcctacggaatatacaagcaggacttacctgctctagaagaaaagcctcgaaatgtcgtgtttgttgacatgggccatagtgcttaccaggtgagcgtgtgtgccttcaatcgaggtaaattaaaggtgctggccaccgctttcgataccacactgggggggagaaagtttgacgaggtgttggtgaaccatttttgtgaagagttcggcaagaaatacaaacttgatattaagtcaaagatcagagccctgttgaggctatcacaggagtgtgagaagctgaaaaagctgatgtcggctaatgcctccgacttaccattgtccattgaatgtttcatgaacgatgtcgacgtgtcggggacaatgaatcgtggaaaattcctggaaatgtgcaacgacttgcttgctcgcgtggagcccccactgcgtagcgtgctagagcagaccaaactgaaaaaagaagacatttacgccgtggaaatcgtggggggagccaccagaatcccagccgtcaaagagaagatttccaagttttttggaaaagaacttagtacaacactcaacgccgacgaagcagtgacccggggctgtgctttgcagtgcgcgatcctctcccctgcatttaaggttagggaattctccatcaccgatgtggtaccttacccgatttctctaaggtggaactcccctgccgaagagggaagctctgattgtgaggtttttagcaagaaccatgccgcccctttcagtaaggttctcacattttatcgcaaggagccttttacgctggaggcctattattcctcccctcaggacttaccataccctgatccagcaatcgcgcagtttagtgttcagaaggtaacaccccagagtgacggaagttccagcaaggtgaaggtgaaagtacgagtgaacgtacatgggatattctccgtttcctctgcctctctcgtcgaagtgcacaaatccgaggaaaacgaagagcccatggaaaccgatcagaatgctaaggaggaggagaagatgcaagtcgatcaggaagaacctcatgtggaagaacagcagcaacagaccccagccgagaacaaagctgaatccgaggagatggaaacgagtcaagctggtagtaaagacaaaaagatggatcagccaccccaagctaagaaagcaaaagtgaaaacgtcaaccgttgatctccccattgagaaccagctcctttggcagattgacagggagatgctgaatttgtatattgagaatgagggtaagatgatcatgcaggataagctggagaaagaacgaaatgatgctaagaatgccgtcgaagagtatgtgtacgagatgagggataaactgagcggagaatatgaaaaattcgttagtgaggacgaccgcaattcctttaccctgaaactcgaggacacagaaaactggctatacgaggatggagaggatcagcccaaacaggtgtacgttgacaaattagccgaactcaagaacctcggccaaccaatcaaaattcgcttccaggaatcagaggagcgtccaaaattgttcgaggaacttggcaagcagatccagcagtacatgaagattatctcctctttcaaaaacaaggaagatcagtatgatcatctggatgctgccgatatgacgaaagttgaaaagtctaccaatgaggctatggaatggatgaataacaaactgaatctgcagaacaagcagtccctaactatggacccagtggtcaagtcaaaggagattgaagctaagataaaagagctgactagcacctgctctccgatcattagtaagccaaaacctaaggtggagccacccaaagaggaacaaaaaaatgcggaacagaacgggccggtggatgggcagggagacaatcctggcccacaggccgccgagcaaggtactgacacggccgtcccttcagacagtgacaagaaactgcccgagatggacatcgactag

SEQ ID NO: 125837 - DNA, 447 bp, Artificial Sequence
  derived and/or modified sequence
atgagcgtggtgggcatcgacctgggcttccagagctgctacgtggccgtcgctcgggctggagggatcgaaactatcgcaaacgaatactctgaccggtgcaccccagcctgcatttctttcggcccaaagaataggagcattggcgcagccgccaagtctcaggtgatcagtaatgccaaaaataccgtacagggtttcaagagattccatggacgagccttttcagaccctttcgtggaagcggaaaagtcaaatcttgcatacgatattgtacagctgcccaccggcctgaccggaattaaagtgacctacatggaggaagaacaaaacggacctgtggacgggcagggcgacaacccgggtccccaggctgctgagcaaggcactgatactgcagttccatctgactcggacaagaagctgcccgaaatggacatagactag

SEQ ID NO: 125838 - DNA, 1422 bp, Artificial Sequence
  derived and/or modified sequence
atgagcgtggtgggcatcgacctgggcttccagagctgctacgtggcagtagccagggcaggcgggatcgagaccattgccaatgagtactctgaccggtgcacgccagcctgtatcagttttggcccaaaaaacagaagtatcggtgcagctgccaagtcccaagtgatttctaacgcaaaaaacactgtgcagggcttcaagaggtttcatggacgggccttctcagatccttttgtggaggcggagaagtctaatcttgcatatgacattgtgcagttaccgacaggcttgacaggaattaaagtgacctatatggaagaggaaagaaatttcacaacagagcaggtgacagccatgctactgagtaaactcaaggagacggcagagagcgtgttgaagaagcccgttgttgactgcgtggtgtccgtcccctgcttctacaccgatgcggaaaggaggtctgtaatggacgcaactcagatagccggacttaattgtctgcgcttaatgaatgaaacaactgccgtggccctggcatacgggatctataagcaggacctgcccgccctggaggagaaaccacggaacgtcgtgttcgttgacatgggacacagcgcataccaggtttcagtgtgcgcatttaaccgcggcaaactgaaagttcttgccacagcctttgatactaccttgggggggcgcaagtttgatgaagtgttggtgaaccacttctgcgaagagtttggaaagaagtataaactcgatattaagtcgaagatccgggccctactccgcctcagtcaggagtgtgagaaacttaagaaattgatgtcagccaacgcctcagatttgccactttccattgagtgtttcatgaatgacgtcgacgtctcaggaaccatgaatagaggcaaattcttagagatgtgtaacgatcttctcgctagagtggaaccaccactgcgttctgtgctagagcagaccaagttaaaaaaggaggatatttatgccgtcgaaattgtgggtggtgccacacgcatacccgcagttaaggagaagatctctaaattctttggcaaagagttatcaaccaccctaaatgccgatgaggcagttactcgcggatgtgcactccaatgcgccatcctgtcgcctgctttcaaagtgcgtgaattcagtatcacagacgtggtcccttaccccatctcactgaggtggaattcaccagccgaggagggtagttcagattgcgaggtgttttcaaagaaccacgcggctcccttcagcaaagtccttaccttctatcggaaggagccgtttactttggaggcttattactcatcgcctggctttgctttgagccgatcctgctactccatcatcaaatcgctgctctcactcatggctcctgtccagaagtag

SEQ ID NO: 125839 - DNA, 2523 bp, Artificial Sequence
  derived and/or modified sequence
atgtctgtggttggcatcgatcttggcttccagagctgctacgtggctgttgccagagccggtggcattgagaccatcgccaatgagtactctgatcggtgcacccccgcatgtatcagtttcggccctaagaatcgaagcatcggtgcggcagccaagagccaagtcatctccaatgccaagaatactgtgcaggggttcaaacggttccacgggagggccttcagtgatccattcgtagaagctgagaagtctaatctggcctacgatatcgtgcagctgcctactggactgacaggcataaaggtcacctacatggaggaagagaggaatttcaccacagagcaagttaccgccatgctcctcagcaaactgaaagagacagcggagagtgtgttgaaaaaacctgtcgtggattgtgtggtcagtgtgccctgtttttacaccgatgcagagcgacgctccgtgatggacgcgactcagatcgctgggctgaattgcctgcgtttgatgaatgagacaacagcagttgccctggcatacggcatctacaagcaagacctccctgcactcgaggaaaaacctcgaaacgtggtttttgtggatatgggtcacagtgcctaccaggtcagcgtttgcgccttcaatcgcggaaaattgaaagtgctagctactgccttcgatactactttggggggtagaaaattcgatgaagtcttggtgaatcatttctgtgaggaatttggaaaaaagtacaagctcgacattaagagcaagataagagcacttttgagactgagtcaagagtgtgaaaagttgaagaaattgatgagcgccaatgcttctgacctgccgctgagcatagagtgttttatgaatgatgtggatgtgagtggtactatgaaccggggtaaatttctcgaaatgtgcaacgatctcctggccagggttgagccacctctccggagtgtgctcgagcaaactaagctcaaaaaggaggacatctacgctgtcgagatcgtgggcggtgcgaccagaatacccgctgtgaaggagaagatcagtaaattcttcgggaaagaattgagtactaccctcaatgctgacgaagccgtgacaagagggtgtgcactgcaatgcgcaatcctcagtcctgccttcaaagtcagggagttctccatcactgatgtggtgccttatcctatctcccttaggtggaactctcccgcagaggaaggatcttctgactgtgaagtattctctaagaaccatgctgccccattctctaaagtgctgaccttttaccgcaaggaacctttcactttggaggcttactatagcagtccccaagatctcccctatcctgaccccgctattgctcagttttctgtgcagaaagtcactccgcagtctgacggctccagtagcaaggtgaaagtgaaggtccgtgtcaatgtacacgggattttctctgtatcctctgcctctctggttgaagtacacaagagtgaagagaacgaagagcctatggagaccgatcaaaacgccaaggaggaagaaaagatgcaggtcgaccaagaagagccccacgtcgaggaacaacagcagcaaactcctgccgaaaataaggccgagagtgaagaaatggaaacaagccaagctgggtccaaggataaaaagatggaccaaccccctcaggccaagaaagccaaggtgaaaacgtcaacggtggacctgccaattgaaaatcaacttctgtggcagatcgacagggaaatgttgaacctgtatatagagaacgagggcaagatgattatgcaggacaaacttgagaaagagagaaatgatgcaaagaacgcagtggaggaatatgtatacgaaatgcgggataagcttagcggggaatatgagaaattcgtgtcagaagacgaccggaattctttcaccctgaaactcgaagacaccgagaattggctgtacgaggatggagaggaccagccaaagcaggtttatgtggacaagctcgcagaattgaaaaacctggggcaaccaatcaaaattagattccaggaatcagaagagcgaccaaagctgtttgaagagctggggaagcagatccagcaatacatgaagattatctcgtctttcaagaacaaagaggatcagtacgatcacctggatgccgctgacatgaccaaggtggagaaatctaccaacgaggccatggaatggatgaacaacaagctcaatctccagaataaacagtccctcaccatggaccctgtcgttaaaagtaaggagatagaagcaaaaattaaggaactgacgtcgacctgcagccccattatttccaaacctaagcctaaggtcgagcccccaaaggaagagcagaagaatgcagagcagaacggtcccgtcgacggccaaggagataacccgggaccccaggctgccgagcaaggaacagatactgctgtccctagtgatagtgataagaaactcccagaaatggatatagattag

SEQ ID NO: 125840 - DNA, 447 bp, Artificial Sequence
  derived and/or modified sequence
atgtcagtagtgggtatagacctcggatttcagtcatgttacgtggctgtcgcaagggccggaggtatagagaccatcgcgaacgagtactccgatcgatgcacacccgcttgcatctcctttggtccgaagaatcggtccattggtgccgcagccaagtctcaggtcatttctaatgccaagaatactgtgcagggattcaaacgtttccacggcagagccttctcggacccttttgtagaggcagagaaatcaaacctagcttatgatatagtccagttgcctacaggcctcaccggcatcaaggttacttacatggaagaagagcagaacggcccagttgatggccagggtgataatccagggcctcaggccgcagaacagggcacagatacggccgtccccagcgattctgataagaaattacctgaaatggacattgattag

SEQ ID NO: 125841 - DNA, 1422 bp, Artificial Sequence
  derived and/or modified sequence
atgtcagtggtagggatagacctgggctttcaaagttgctacgtagcagttgcgagggccggaggtatcgagactattgctaatgaatactctgatcgttgcacacctgcctgtatttcattcgggccaaaaaatcgaagcatcggcgcagctgcgaagtcacaagtgatctccaacgctaaaaacaccgtgcagggttttaaacgattccatggtcgggcattttccgatccatttgtggaggcagagaaatccaatttggcttacgacattgtgcagttacctacaggtctgacgggcatcaaggtcacatatatggaggaggaacgcaacttcacaaccgagcaggtcacagctatgttgctatcgaagcttaaagaaaccgccgaatccgttctgaagaaaccagtcgtcgactgcgtcgtctcagtcccttgcttctacactgacgccgaaaggcggtctgtgatggatgccactcaaattgccggattgaattgtttgcggcttatgaatgagaccacggcagtcgctctggcttatggcatctacaagcaagacctccccgctttggaggagaaaccaagaaacgtagtctttgtcgacatgggccacagcgcctaccaggtctctgtgtgtgcattcaatagaggaaaactaaaggtgctggctacggccttcgacactacattaggtggacgcaaatttgacgaagtgctagttaaccatttctgcgaagagttcgggaagaagtacaaactcgatataaagtccaagatacgtgcattgctgagactctctcaggaatgcgaaaagctcaaaaaattaatgagcgccaacgccagcgaccttcctctgtctatagagtgtttcatgaacgacgtcgacgtgagtgggacaatgaacaggggtaagtttctggagatgtgcaatgatctgctagcgagagtcgaaccacctctgcggagcgttttagaacagaccaaactcaagaaggaagatatctacgcagtggaaatcgtcggcggtgccacgagaatcccggcagtgaaggaaaagatatccaagttctttggcaaggagctttccaccaccctgaacgccgatgaggctgtcacgcggggatgtgctctgcagtgcgccattctatccccggctttcaaagttagagaattttccattaccgatgtcgtgccctaccccataagtctacgttggaatagtcctgccgaagagggatcatccgactgtgaagtcttctcaaaaaatcatgccgctcctttttcaaaagtgctgaccttttatcggaaggagccgttcactctcgaagcctactacagctctcccggatttgccctctctaggagctgctattccatcataaagtcacttctgtctctgatggccccagtgcaaaagtag

SEQ ID NO: 125842 - DNA, 2523 bp, Artificial Sequence
  derived and/or modified sequence
atgagcgtggtgggcatcgacctgggcttccagagctgctacgtggccgtggccagagccggcggcatcgagaccatcgccaacgagtacagcgacagatgcacccccgcctgcatcagcttcggccccaagaacagaagcatcggcgccgccgccaagagccaggtgatcagcaacgccaagaacaccgtgcagggcttcaagagattccacggcagagccttcagcgaccccttcgtggaggccgagaagagcaacctggcctacgacatcgtgcagctgcccaccggcctgaccggcatcaaggtgacctacatggaggaggagagaaacttcaccaccgagcaggtgaccgccatgctgctgagcaagctgaaggagaccgccgagagcgtgctgaagaagcccgtggtggactgcgtggtgagcgtgccctgcttctacaccgacgccgagagaagaagcgtgatggacgccacccagatcgccggcctgaactgcctgagactgatgaacgagaccaccgccgtggccctggcctacggcatctacaagcaggacctgcccgccctggaggagaagcccagaaacgtggtgttcgtggacatgggccacagcgcctaccaggtgagcgtgtgcgccttcaacagaggcaagctgaaggtgctggccaccgccttcgacaccaccctgggcggcagaaagttcgacgaggtgctggtgaaccacttctgcgaggagttcggcaagaagtacaagctggacatcaagagcaagatcagagccctgctgagactgagccaggagtgcgagaagctgaagaagctgatgagcgccaacgccagcgacctgcccctgagcatcgagtgcttcatgaacgacgtggacgtgagcggcaccatgaacagaggcaagttcctggagatgtgcaacgacctgctggccagagtggagccccccctgagaagcgtgctggagcagaccaagctgaagaaggaggacatctacgccgtggagatcgtgggcggcgccaccagaatccccgccgtgaaggagaagatcagcaagttcttcggcaaggagctgagcaccaccctgaacgccgacgaggccgtgaccagaggctgcgccctgcagtgcgccatcctgagccccgccttcaaggtgagagagttcagcatcaccgacgtggtgccctaccccatcagcctgagatggaacagccccgccgaggagggcagcagcgactgcgaggtgttcagcaagaaccacgccgcccccttcagcaaggtgctgaccttctacagaaaggagcccttcaccctggaggcctactacagcagcccccaggacctgccctaccccgaccccgccatcgcccagttcagcgtgcagaaggtgaccccccagagcgacggcagcagcagcaaggtgaaggtgaaggtgagagtgaacgtgcacggcatcttcagcgtgagcagcgccagcctggtggaggtgcacaagagcgaggagaacgaggagcccatggagaccgaccagaacgccaaggaggaggagaagatgcaggtggaccaggaggagccccacgtggaggagcagcagcagcagacccccgccgagaacaaggccgagagcgaggagatggagaccagccaggccggcagcaaggacaagaagatggaccagcccccccaggccaagaaggccaaggtgaagaccagcaccgtggacctgcccatcgagaaccagctgctgtggcagatcgacagagagatgctgaacctgtacatcgagaacgagggcaagatgatcatgcaggacaagctggagaaggagagaaacgacgccaagaacgccgtggaggagtacgtgtacgagatgagagacaagctgagcggcgagtacgagaagttcgtgagcgaggacgacagaaacagcttcaccctgaagctggaggacaccgagaactggctgtacgaggacggcgaggaccagcccaagcaggtgtacgtggacaagctggccgagctgaagaacctgggccagcccatcaagatcagattccaggagagcgaggagagacccaagctgttcgaggagctgggcaagcagatccagcagtacatgaagatcatcagcagcttcaagaacaaggaggaccagtacgaccacctggacgccgccgacatgaccaaggtggagaagagcaccaacgaggccatggagtggatgaacaacaagctgaacctgcagaacaagcagagcctgaccatggaccccgtggtgaagagcaaggagatcgaggccaagatcaaggagctgaccagcacctgcagccccatcatcagcaagcccaagcccaaggtggagccccccaaggaggagcagaagaacgccgagcagaacggccccgtggacggccagggcgacaaccccggcccccaggccgccgagcagggcaccgacaccgccgtgcccagcgacagcgacaagaagctgcccgagatggacatcgactag

SEQ ID NO: 125843 - DNA, 447 bp, Artificial Sequence
  derived and/or modified sequence
atgagcgtggtgggcatcgacctgggcttccagagctgctacgtggccgtggccagagccggcggcatcgagaccatcgccaacgagtacagcgacagatgcacccccgcctgcatcagcttcggccccaagaacagaagcatcggcgccgccgccaagagccaggtgatcagcaacgccaagaacaccgtgcagggcttcaagagattccacggcagagccttcagcgaccccttcgtggaggccgagaagagcaacctggcctacgacatcgtgcagctgcccaccggcctgaccggcatcaaggtgacctacatggaggaggagcagaacggccccgtggacggccagggcgacaaccccggcccccaggccgccgagcagggcaccgacaccgccgtgcccagcgacagcgacaagaagctgcccgagatggacatcgactag

SEQ ID NO: 125844 - DNA, 1422 bp, Artificial Sequence
  derived and/or modified sequence
atgagcgtggtgggcatcgacctgggcttccagagctgctacgtggccgtggccagagccggcggcatcgagaccatcgccaacgagtacagcgacagatgcacccccgcctgcatcagcttcggccccaagaacagaagcatcggcgccgccgccaagagccaggtgatcagcaacgccaagaacaccgtgcagggcttcaagagattccacggcagagccttcagcgaccccttcgtggaggccgagaagagcaacctggcctacgacatcgtgcagctgcccaccggcctgaccggcatcaaggtgacctacatggaggaggagagaaacttcaccaccgagcaggtgaccgccatgctgctgagcaagctgaaggagaccgccgagagcgtgctgaagaagcccgtggtggactgcgtggtgagcgtgccctgcttctacaccgacgccgagagaagaagcgtgatggacgccacccagatcgccggcctgaactgcctgagactgatgaacgagaccaccgccgtggccctggcctacggcatctacaagcaggacctgcccgccctggaggagaagcccagaaacgtggtgttcgtggacatgggccacagcgcctaccaggtgagcgtgtgcgccttcaacagaggcaagctgaaggtgctggccaccgccttcgacaccaccctgggcggcagaaagttcgacgaggtgctggtgaaccacttctgcgaggagttcggcaagaagtacaagctggacatcaagagcaagatcagagccctgctgagactgagccaggagtgcgagaagctgaagaagctgatgagcgccaacgccagcgacctgcccctgagcatcgagtgcttcatgaacgacgtggacgtgagcggcaccatgaacagaggcaagttcctggagatgtgcaacgacctgctggccagagtggagccccccctgagaagcgtgctggagcagaccaagctgaagaaggaggacatctacgccgtggagatcgtgggcggcgccaccagaatccccgccgtgaaggagaagatcagcaagttcttcggcaaggagctgagcaccaccctgaacgccgacgaggccgtgaccagaggctgcgccctgcagtgcgccatcctgagccccgccttcaaggtgagagagttcagcatcaccgacgtggtgccctaccccatcagcctgagatggaacagccccgccgaggagggcagcagcgactgcgaggtgttcagcaagaaccacgccgcccccttcagcaaggtgctgaccttctacagaaaggagcccttcaccctggaggcctactacagcagccccggcttcgccctgagcagaagctgctacagcatcatcaagagcctgctgagcctgatggcccccgtgcagaagtag

SEQ ID NO: 125845 - protein, 643 aa, Artificial Sequence
  derived and/or modified sequence
MQAPRELAVGIDLGTTYSCVGVFQQGRVEILANDQGNRTTPSYVAFTDTERLVGDAAKSQAALNPHNTVFDAKRLIGRKFADTTVQSDMKHWPFRVVSEGGKPKVRVCYRGEDKTFYPEEISSMVLSKMKETAEAYLGQPVKHAVITVPAYFNDSQRQATKDAGAIAGLNVLRIINEPTAAAIAYGLDRRGAGERNVLIFDLGGGTFDVSVLSIDAGVFEVKATAGDTHLGGEDFDNRLVNHFMEEFRRKHGKDLSGNKRALRRLRTACERAKRTLSSSTQATLEIDSLFEGVDFYTSITRARFEELCSDLFRSTLEPVEKALRDAKLDKAQIHDVVLVGGSTRIPKVQKLLQDFFNGKELNKSINPDEAVAYGAAVQAAVLMGDKCEKVQDLLLLDVAPLSLGLETAGGVMTTLIQRNATIPTKQTQTFTTYSDNQPGVFIQVYEGERAMTKDNNLLGRFELSGIPPAPRGVPQIEVTFDIDANGILSVTATDRSTGKANKITITNDKGRLSKEEVERMVHEAEQYKAEDEAQRDRVAAKNSLEAHVFHVKGSLQEESLRDKIPEEDRRKMQDKCREVLAWLEHNQLAEKEEYEHQKRELEQICRPIFSRLYGGPGVPGGSSCGTQARQGDPSTGPIIEEVD

SEQ ID NO: 125846 - protein, 619 aa, Artificial Sequence
  derived and/or modified sequence
MQAPRELAVGIDLGTTYSCVAFTDTERLVGDAAKSQAALNPHNTVFDAKRLIGRKFADTTVQSDMKHWPFRVVSEGGKPKVRVCYRGEDKTFYPEEISSMVLSKMKETAEAYLGQPVKHAVITVPAYFNDSQRQATKDAGAIAGLNVLRIINEPTAAAIAYGLDRRGAGERNVLIFDLGGGTFDVSVLSIDAGVFEVKATAGDTHLGGEDFDNRLVNHFMEEFRRKHGKDLSGNKRALRRLRTACERAKRTLSSSTQATLEIDSLFEGVDFYTSITRARFEELCSDLFRSTLEPVEKALRDAKLDKAQIHDVVLVGGSTRIPKVQKLLQDFFNGKELNKSINPDEAVAYGAAVQAAVLMGDKCEKVQDLLLLDVAPLSLGLETAGGVMTTLIQRNATIPTKQTQTFTTYSDNQPGVFIQVYEGERAMTKDNNLLGRFELSGIPPAPRGVPQIEVTFDIDANGILSVTATDRSTGKANKITITNDKGRLSKEEVERMVHEAEQYKAEDEAQRDRVAAKNSLEAHVFHVKGSLQEESLRDKIPEEDRRKMQDKCREVLAWLEHNQLAEKEEYEHQKRELEQICRPIFSRLYGGPGVPGGSSCGTQARQGDPSTGPIIEEVD

SEQ ID NO: 125847 - DNA, 1932 bp, Artificial Sequence
  derived and/or modified sequence
atgcaagcccccagggagctggccgtaggcattgacctgggcaccacgtatagctgcgtaggtgtctttcagcagggccgcgtggaaattctggccaacgatcagggcaacagaaccactccctcgtacgtggccttcacagacacagagcggctggtcggagatgcagctaaatcccaagccgctctcaatccccataacaccgtcttcgatgcaaaaagactgattgggcgcaagttcgcggatactaccgtgcaaagcgatatgaagcactggccattcagggtagtctccgagggcggaaagcccaaggttcgcgtctgttaccgcggtgaggataagacattctaccctgaagaaatttcaagcatggtcctcagcaagatgaaagaaacagccgaggcgtatctgggccagcccgtcaaacacgcagtcatcaccgtcccagcctattttaacgattcccagcggcaggcaaccaaggatgctggcgctatagccggactgaatgtgctgcgaatcatcaatgagcctacagccgctgcaatagcctacgggttggaccgaaggggggccggagaaaggaacgttcttatatttgatttgggtggcggaacattcgatgtgagcgtgctatcaattgatgccggcgtctttgaggtgaaagccactgcgggggacacacacctgggcggcgaggacttcgacaatcgtctcgtcaaccactttatggaggaattcaggagaaagcacggcaaagatctctctggaaacaagcgcgccctgaggcgcttgcggactgcatgtgagagggcaaagcgtacactgtcatccagtactcaagccactttagagatagatagtctcttcgagggagtggacttctacactagcataacgagagctcgtttcgaagagctatgctcggacctctttcggtccactttggaacctgtcgagaaagcattacgggacgcaaagctggacaaagctcagatccatgatgtagtgcttgttggaggtagcacaaggatcccaaaggtacagaagttattgcaggactttttcaacggcaaggagttaaacaaatcaatcaaccctgatgaggcggtggcctacggggcagccgtgcaggctgccgttctgatgggagacaagtgtgagaaggttcaggatttactgcttttggatgtcgcacccctctcccttggactggagactgctggaggggtgatgaccactttgattcaaagaaatgcaaccatcccgacaaagcagacacaaacttttactacctactccgacaatcagccaggggtgttcatccaggtgtatgaaggcgagagagctatgacaaaagacaataatcttctggggaggttcgagctgtcgggcattcctcccgcacctagaggcgtaccgcagattgaggtaacgttcgacatcgatgccaacggtattctttctgtgactgcaaccgatagatcaactggaaaagctaacaaaataacgatcaccaacgacaagggcagactgtcaaaggaagaggtggagcgcatggtccatgaagccgaacagtataaggcagaagatgaggctcaaagggaccgggttgccgcgaaaaacagtctggaagctcacgtgtttcatgttaaaggttctctgcaggaggaatcactgcgtgataagatccctgaagaagatcgccgtaaaatgcaggataagtgtcgggaggttcttgcttggctagaacacaaccagcttgcagagaaggaagagtatgagcaccagaagcgggaactggagcagatttgccggcctattttttcaaggttgtacggaggacccggcgttcctggcggatccagctgcggaacccaagccaggcagggagatccatctaccggccccattatcgaggaggtggattag

SEQ ID NO: 125848 - DNA, 1860 bp, Artificial Sequence
  derived and/or modified sequence
atgcaggccccaagagaactggcagtgggtatcgacctcggcacgacatatagttgtgtcgcctttaccgatactgagagactcgtgggcgatgccgcgaagtctcaggccgcgttgaatccacacaataccgtctttgacgcaaagcggctgatcgggaggaagttcgctgacacaaccgtccagtcagatatgaaacactggcctttcagagtggtcagcgaagggggcaagcccaaagtccgtgtgtgctacaggggcgaggacaagaccttctatcccgaagagatcagctccatggtgctgtctaaaatgaaggaaactgctgaagcctatttaggccagccggtgaaacatgctgtcatcaccgtgcccgcatatttcaatgattctcaacggcaggctactaaagatgcaggagcaatcgcaggactaaatgttctgcggatcatcaatgagccaaccgctgcagctatagcatacggattagaccgccgcggggcaggagagaggaacgttctaattttcgacctgggggggggcactttcgatgtgtctgtcttgtctatagatgccggcgtgtttgaagtcaaggccactgcaggtgacacacatctaggcggggaggatttcgataataggctggtgaatcactttatggaggagttccgtaggaaacatgggaaggatctttccggtaacaaacgcgccctcagacggctgagaacagcgtgtgagcgggctaagcgcacactgtcttcgagcacacaagctacactggaaatagatagcttgtttgagggagtagacttctacacatctataacgagagctcgcttcgaagagttgtgttccgatcttttccgcagcacactggaacccgttgagaaagcactccgagacgcaaaactggacaaggcccagattcacgacgttgtgctggtagggggctcgactcgaatcccgaaagtccagaaactcctgcaggactttttcaatggcaaggagctcaataagtcaatcaaccctgacgaggccgtggcatacggagccgcagttcaggcagccgtgctaatgggcgataagtgtgagaaagtccaggatcttctgctgttggatgtggctccattgtcattaggcttagaaactgccggcggcgttatgactacactgattcagcgcaacgccaccatacctacgaagcagactcaaacattcaccacgtatagcgataaccagcctggtgtgtttatccaggtgtacgagggtgaaagggcaatgacaaaggacaacaatctgctgggccgctttgagctgtctgggatcccccctgcccccagaggtgtacctcagatcgaggttacttttgatatcgacgccaacgggatcctgtctgtgactgctacagataggtctacgggaaaagctaacaaaataactatcactaacgataaggggcggttaagcaaagaggaagtggaacgtatggtccatgaggcagagcaatataaggccgaggacgaggcccaaagagaccgggtagcagccaaaaatagcctggaggcacacgtgtttcatgttaaaggttcattacaggaggaatcactccgagacaagataccagaggaagacaggcgcaaaatgcaggacaagtgcagggaggtgcttgcatggctcgaacataaccagctggccgaaaaagaagagtatgaacaccagaagcgggaactggagcaaatctgtagaccaattttcagtagattgtacggcggcccaggtgtcccaggggggagctcatgcggaacacaggcccgccagggagacccgtcgacaggccccatcatcgaggaagttgattag

SEQ ID NO: 125849 - DNA, 2646 bp, Artificial Sequence
  derived and/or modified sequence
agagccagcccggaggagctagaaccttccccgcatttctttcagcagcctgagtcagaggcgggctggcctggcgtagccgcccagcctcgcggctcatgccccgatctgcccgaaccttctcccggggtcagcgccgcgccgcgccacccggctgagtcagcccgggcgggcgagaggctctcaactgggcgggaaggtgcgggaaggtgcggaaaggttcgcgaaagttcgcggcggcgggggtcgggtgaggcgcaaaaggataaaaagccggtggaagcggagctgagcagatccgagccgggctggctgcagagaaaccgcagggagagcctcactgctgagcgcccctcgacggcggagcggcagcagcctccgtggcctccagcatccgacaagaagcttcagccatgcaggccccacgggagctcgcggtgggcatcgacctgggcaccacctactcgtgcgtgggcgtgtttcagcagggccgcgtggagatcctggccaacgaccagggcaaccgcaccacgcccagctacgtggccttcaccgacaccgagcggctggtcggggacgcggccaagagccaggcggccctgaacccccacaacaccgtgttcgatgccaagcggctgatcgggcgcaagttcgcggacaccacggtgcagtcggacatgaagcactggcccttccgggtggtgagcgagggcggcaagcccaaggtgcgcgtatgctaccgcggggaggacaagacgttctaccccgaggagatctcgtccatggtgctgagcaagatgaaggagacggccgaggcgtacctgggccagcccgtgaagcacgcagtgatcaccgtgcccgcctatttcaatgactcgcagcgccaggccaccaaggacgcgggggccatcgcggggctcaacgtgttgcggatcatcaatgagcccacggcagctgccatcgcctatgggctggaccggcggggcgcgggagagcgcaacgtgctcatttttgacctgggtgggggcaccttcgatgtgtcggttctctccattgacgctggtgtctttgaggtgaaagccactgctggagatacccacctgggaggagaggacttcgacaaccggctcgtgaaccacttcatggaagaattccggcggaagcatgggaaggacctgagcgggaacaagcgtgccctgcgcaggctgcgcacagcctgtgagcgcgccaagcgcaccctgtcctccagcacccaggccaccctggagatagactccctgttcgagggcgtggacttctacacgtccatcactcgtgcccgctttgaggaactgtgctcagacctcttccgcagcaccctggagccggtggagaaggccctgcgggatgccaagctggacaaggcccagattcatgacgtcgtcctggtggggggctccacacgcatccccaaggtgcagaagttgctgcaggacttcttcaacggcaaggagctgaacaagagcatcaaccctgatgaggctgtggcctatggggctgctgtgcaggcggccgtgttgatgggggacaaatgtgagaaagtgcaggatctcctgctgctggatgtggctcccctgtctctggggctggagacagcaggtggggtgatgaccacgctgatccagaggaacgccactatccccaccaagcagacccagactttcaccacctactcggacaaccagcctggggtcttcatccaggtgtatgagggtgagagggccatgaccaaggacaacaacctgctggggcgttttgaactcagtggcatccctcctgccccacgtggagtcccccagatagaggtgacttttgacattgatgctaatggcatcctgagcgtgacagccactgacaggagcacaggtaaggctaacaagatcaccatcaccaatgacaagggccggctgagcaaggaggaggtggagaggatggttcatgaagccgagcagtacaaggctgaggatgaggcccagagggacagagtggctgccaaaaactcgctggaggcccatgtcttccatgtgaaaggttctttgcaagaggaaagccttagggacaagattcccgaagaggacaggcgcaaaatgcaagacaagtgtcgggaagtccttgcctggctggagcacaaccagctggcagagaaggaggagtatgagcatcagaagagggagctggagcaaatctgtcgccccatcttctccaggctctatggggggcctggtgtccctgggggcagcagttgtggcactcaagcccgccagggggaccccagcaccggccccatcattgaggaggttgattgaatggcccttcgtgataagtcagctgtgactgtcagggctatgctatgggccttctagactgtcttctatgatcctgcccttcagagatgaactttccctccaaagctagaactttcttcccaggataactgaagtcttttgactttttgcggggagggcggttcatcctcttctgcttcaaataaaaagtcattaatttattaaaacttgtgtggcactttaacattgctttcacctatattttgtgtactttgttacttgcatgtatgaattttgttatgtaaaatatagttatagacct

SEQ ID NO: 125850 - DNA, 2176 bp, Artificial Sequence
  derived and/or modified sequence
cgagccgggctggctgcagagaaaccgcagggagagcctcactgctgagcgcccctcgacggcggagcggcagcagcctccgtggcctccagcatccgacaagaagcttcagccatgcaggccccacgggagctcgcggtgggcatcgacctgggcaccacctactcgtgcgtggccttcaccgacaccgagcggctggtcggggacgcggccaagagccaggcggccctgaacccccacaacaccgtgttcgatgccaagcggctgatcgggcgcaagttcgcggacaccacggtgcagtcggacatgaagcactggcccttccgggtggtgagcgagggcggcaagcccaaggtgcgcgtatgctaccgcggggaggacaagacgttctaccccgaggagatctcgtccatggtgctgagcaagatgaaggagacggccgaggcgtacctgggccagcccgtgaagcacgcagtgatcaccgtgcccgcctatttcaatgactcgcagcgccaggccaccaaggacgcgggggccatcgcggggctcaacgtgttgcggatcatcaatgagcccacggcagctgccatcgcctatgggctggaccggcggggcgcgggagagcgcaacgtgctcatttttgacctgggtgggggcaccttcgatgtgtcggttctctccattgacgctggtgtctttgaggtgaaagccactgctggagatacccacctgggaggagaggacttcgacaaccggctcgtgaaccacttcatggaagaattccggcggaagcatgggaaggacctgagcgggaacaagcgtgccctgcgcaggctgcgcacagcctgtgagcgcgccaagcgcaccctgtcctccagcacccaggccaccctggagatagactccctgttcgagggcgtggacttctacacgtccatcactcgtgcccgctttgaggaactgtgctcagacctcttccgcagcaccctggagccggtggagaaggccctgcgggatgccaagctggacaaggcccagattcatgacgtcgtcctggtggggggctccacacgcatccccaaggtgcagaagttgctgcaggacttcttcaacggcaaggagctgaacaagagcatcaaccctgatgaggctgtggcctatggggctgctgtgcaggcggccgtgttgatgggggacaaatgtgagaaagtgcaggatctcctgctgctggatgtggctcccctgtctctggggctggagacagcaggtggggtgatgaccacgctgatccagaggaacgccactatccccaccaagcagacccagactttcaccacctactcggacaaccagcctggggtcttcatccaggtgtatgagggtgagagggccatgaccaaggacaacaacctgctggggcgttttgaactcagtggcatccctcctgccccacgtggagtcccccagatagaggtgacttttgacattgatgctaatggcatcctgagcgtgacagccactgacaggagcacaggtaaggctaacaagatcaccatcaccaatgacaagggccggctgagcaaggaggaggtggagaggatggttcatgaagccgagcagtacaaggctgaggatgaggcccagagggacagagtggctgccaaaaactcgctggaggcccatgtcttccatgtgaaaggttctttgcaagaggaaagccttagggacaagattcccgaagaggacaggcgcaaaatgcaagacaagtgtcgggaagtccttgcctggctggagcacaaccagctggcagagaaggaggagtatgagcatcagaagagggagctggagcaaatctgtcgccccatcttctccaggctctatggggggcctggtgtccctgggggcagcagttgtggcactcaagcccgccagggggaccccagcaccggccccatcattgaggaggttgattgaatggcccttcgtgataagtcagctgtgactgtcagggctatgctatgggccttctagactgtcttctatgatcctgcccttcagagatgaactttccctccaaagctagaactttcttcccaggataactgaagtcttttgactttttgcggggagggcggttcatcctcttctgcttcaaataaaaagtcattaatttatt

SEQ ID NO: 125851 - DNA, 1932 bp, Artificial Sequence
  derived and/or modified sequence
atgcaggccccccgggagctggccgtgggcatcgacctgggcaccacctacagctgtgtgggcgtcttccagcagggccgggtggagatcctggccaatgaccagggcaacagaaccacccccagctatgtggccttcacagacacagagcggctggtgggagatgctgccaagagccaggccgccctgaacccccacaacacagtgtttgatgccaagaggctcatcggcaggaagtttgctgacaccaccgtgcagagcgacatgaagcactggcccttccgggtggtgtctgagggcggcaagcccaaggtgcgggtgtgctacagaggagaggacaagaccttctacccagaggagatcagctccatggtgctgagcaagatgaaggagacagctgaggcctacctgggccagcctgtgaagcacgccgtcatcaccgtgcctgcctacttcaatgacagccagaggcaggccaccaaggatgctggggccatcgccggcctgaatgtgctgcgcatcatcaatgagcccacagctgctgccatcgcctacggcctggacagaagaggagctggggagagaaatgtgctgatctttgacctgggcggcggcacctttgatgtgtctgtgctgagcattgatgctggggtgtttgaggtgaaggccacagctggggacacccacctgggcggagaagattttgacaaccggctggtgaaccacttcatggaggagttccggaggaagcacggcaaggacctgagcggcaacaagagggccctgcggcggctgaggacagcctgtgagcgggccaagaggaccctgagcagcagcacccaggccaccctggagattgacagcctgtttgagggcgtggacttctacaccagcatcacccgggccaggtttgaggagctgtgcagcgacctcttccgcagcaccctggagcctgtggagaaggccctgagagatgccaagctggacaaggcccagatccatgatgtggtgctggtgggcggcagcacccgcatccccaaggtgcagaagctgctgcaggacttcttcaacgggaaggagctgaacaagagcatcaacccagatgaggccgtggcctatggagctgctgtgcaggccgctgtgctgatgggagacaagtgtgagaaggtgcaggacctgctgctgctggatgtggcccccctgagcctgggcctggagacagctgggggcgtgatgaccaccctcatccagagaaatgccaccatccccaccaagcagacccagaccttcaccacctacagcgacaaccagcccggggtcttcatccaggtgtatgaaggagagcgggccatgaccaaggacaacaacctgctgggccgctttgagctgagcggcatccccccagccccccggggcgtgccccagatcgaggtgacctttgatattgatgccaacggcatcctgtctgtgacagccacagacaggagcacaggcaaggccaacaagatcaccatcaccaatgacaagggccgcctgagcaaggaggaggtggagaggatggtgcatgaggccgagcagtacaaggccgaggatgaggcccagagggacagagtggccgccaagaacagcctggaggcccacgtgttccacgtgaagggcagcctgcaggaggagagcctgcgggacaagatcccagaagaagatagaaggaagatgcaggacaagtgccgggaggtgctggcctggctggagcacaaccagctggccgagaaggaggagtatgagcaccagaagcgggagctggagcagatctgccggcccatcttcagccggctgtatggaggccctggggtgcctgggggcagcagctgtggcacccaggcccggcagggcgaccccagcacaggccccatcatcgaggaggtggactag

SEQ ID NO: 125852 - DNA, 1860 bp, Artificial Sequence
  derived and/or modified sequence
atgcaggccccccgggagctggccgtgggcatcgacctgggcaccacctacagctgtgtggccttcacagacacagagcggctggtgggagatgctgccaagagccaggccgccctgaacccccacaacacagtgtttgatgccaagaggctcatcggcaggaagtttgctgacaccaccgtgcagagcgacatgaagcactggcccttccgggtggtgtctgagggcggcaagcccaaggtgcgggtgtgctacagaggagaggacaagaccttctacccagaggagatcagctccatggtgctgagcaagatgaaggagacagctgaggcctacctgggccagcctgtgaagcacgccgtcatcaccgtgcctgcctacttcaatgacagccagaggcaggccaccaaggatgctggggccatcgccggcctgaatgtgctgcgcatcatcaatgagcccacagctgctgccatcgcctacggcctggacagaagaggagctggggagagaaatgtgctgatctttgacctgggcggcggcacctttgatgtgtctgtgctgagcattgatgctggggtgtttgaggtgaaggccacagctggggacacccacctgggcggagaagattttgacaaccggctggtgaaccacttcatggaggagttccggaggaagcacggcaaggacctgagcggcaacaagagggccctgcggcggctgaggacagcctgtgagcgggccaagaggaccctgagcagcagcacccaggccaccctggagattgacagcctgtttgagggcgtggacttctacaccagcatcacccgggccaggtttgaggagctgtgcagcgacctcttccgcagcaccctggagcctgtggagaaggccctgagagatgccaagctggacaaggcccagatccatgatgtggtgctggtgggcggcagcacccgcatccccaaggtgcagaagctgctgcaggacttcttcaacgggaaggagctgaacaagagcatcaacccagatgaggccgtggcctatggagctgctgtgcaggccgctgtgctgatgggagacaagtgtgagaaggtgcaggacctgctgctgctggatgtggcccccctgagcctgggcctggagacagctgggggcgtgatgaccaccctcatccagagaaatgccaccatccccaccaagcagacccagaccttcaccacctacagcgacaaccagcccggggtcttcatccaggtgtatgaaggagagcgggccatgaccaaggacaacaacctgctgggccgctttgagctgagcggcatccccccagccccccggggcgtgccccagatcgaggtgacctttgatattgatgccaacggcatcctgtctgtgacagccacagacaggagcacaggcaaggccaacaagatcaccatcaccaatgacaagggccgcctgagcaaggaggaggtggagaggatggtgcatgaggccgagcagtacaaggccgaggatgaggcccagagggacagagtggccgccaagaacagcctggaggcccacgtgttccacgtgaagggcagcctgcaggaggagagcctgcgggacaagatcccagaagaagatagaaggaagatgcaggacaagtgccgggaggtgctggcctggctggagcacaaccagctggccgagaaggaggagtatgagcaccagaagcgggagctggagcagatctgccggcccatcttcagccggctgtatggaggccctggggtgcctgggggcagcagctgtggcacccaggcccggcagggcgaccccagcacaggccccatcatcgaggaggtggactag

SEQ ID NO: 125853 - DNA, 1932 bp, Artificial Sequence
  derived and/or modified sequence
atgcaggccccccgggagctggccgtgggcatcgacctgggcaccacctattcttgtgtgggagtgttccagcagggccgcgttgagatactggctaacgaccaggggaatcggactacaccctcgtatgtggctttcactgataccgagagacttgtaggggatgccgccaagagccaggcagccttgaatccccacaacacagtctttgacgcaaaacggcttatcgggagaaagttcgccgatacgacggtgcagagtgacatgaagcactggccttttagggttgtaagtgagggaggtaagcccaaggtcagggtatgctatcgtggggaagataagacattctatccagaagaaatatcttctatggtcctatcaaaaatgaaggaaacagccgaagcttatctggggcaacccgtgaaacacgcagtaatcaccgtgccagcctactttaacgactcacagagacaggctacaaaggacgccggtgcaatcgcaggccttaatgtgctgcggatcattaatgagcctacggccgcggcaatcgcatatggtttagacagacgcggcgcaggagaaaggaacgtgttgatcttcgaccttggcggcgggacatttgatgtctctgtgctcagtattgacgccggcgtgttcgaggtgaaggccaccgccggggatacgcatttagggggcgaagattttgataacaggctggtcaatcactttatggaggagtttagaagaaagcatgggaaggacctgagcggcaataagcgggcgttgcggcgcctcagaactgcttgcgagcgcgctaagaggaccctgtcctcttctacccaggcgacgcttgagatcgattcgttatttgagggagttgatttctacacgagtattacccgtgcacgtttcgaggaactgtgttccgatctgtttagatctactcttgaacccgtggagaaggctttgagggatgccaagctcgataaggcgcagatccacgacgtggtgctagtaggcggctctacacggattcccaaggtccagaaacttctccaggacttcttcaacgggaaggaactgaacaaaagtattaaccctgatgaagcagtggcctacggagcagctgtgcaggcggccgtcctcatgggagataagtgtgagaaggtgcaggatctgctgctgctggacgttgcgcccttaagcttaggtctggagacagccggtggggtgatgacaacattgatccagcggaacgccaccatcccaactaagcagactcagacatttactacctattctgataatcagcccggtgtgtttatccaggtgtatgaaggggagcgcgccatgacaaaagataacaacctgctcggacgttttgagctttccgggattccacctgcacctaggggtgtacctcagatagaggttacgtttgacattgatgctaatggcattctgtcggtcacggcgacggaccgctcaactgggaaggcaaataagatcactatcactaacgacaagggtagactgtccaaagaggaagtggagcgaatggttcatgaggccgaacaatataaggcagaggacgaagcacaaagagatcgcgtggctgccaagaactctcttgaggcacatgtctttcatgtcaagggtagcctgcaggaagaatccctgagggacaaaattccggaagaggaccggcgcaaaatgcaagataaatgccgcgaggtattagcatggctggaacacaaccagttggccgaaaaggaagagtatgaacatcaaaaaagggagctggaacagatctgtaggcctatcttctcgagactgtatggcggtcccggcgtgccaggcggctcttcgtgcgggacgcaagcacggcagggggatcccagcacaggaccaattatcgaggaggtagactag

SEQ ID NO: 125854 - DNA, 1860 bp, Artificial Sequence
  derived and/or modified sequence
atgcaggccccccgggagctggccgtgggcatcgacctgggcaccacatattcttgtgtggcatttaccgataccgagaggctggtgggggatgctgctaagtctcaggccgctctaaaccctcacaacaccgtttttgacgccaaaagactgattggcagaaagtttgctgacacaaccgttcaaagtgatatgaagcattggccttttcgggtggtcagtgaagggggcaaacctaaggtcagagtttgctatcggggggaggacaaaaccttttaccccgaggagatttcaagtatggttttatctaagatgaaagagacagccgaggcctaccttgggcagccagtaaagcacgccgtaatcacagtccccgcttactttaacgacagccaaaggcaggccactaaagacgccggcgctattgcgggattgaatgtcttaagaattatcaatgaaccgacagctgcagccatcgcctacggcttggatcgtagaggcgcaggcgaacgcaacgtattaattttcgacctggggggaggaacattcgacgtctccgttttatctatcgacgctggagtttttgaagtgaaggcaaccgccggcgacactcacctcgggggcgaggacttcgataacagactcgtcaatcattttatggaagagtttagacgtaagcatggaaaggacctcagcgggaacaagcgcgccctcagacgtctgcgcacagcctgtgaaagagcaaagcggactctgagttctagcacccaggctacactagaaattgactctcttttcgagggggttgatttctatacaagcatcaccagggcaaggttcgaggagctttgctctgacttgtttcgctctacactcgaaccagtggaaaaggcactccgtgatgctaaacttgacaaggctcaaatacacgacgtggtgctggtcggaggatccacaagaataccgaaagtgcaaaagcttctccaggatttcttcaatggcaaggagcttaacaaatctatcaaccccgatgaagccgtggcatacggcgccgccgtacaagccgccgtgctcatgggtgataaatgcgaaaaggtacaggatcttctgctgttggatgtggctcccctgagtctgggccttgaaacagccgggggtgtgatgacaactctcatccagcgcaacgctaccatcccgacgaagcagactcaaacattcactacctatagcgataaccagcccggcgttttcattcaagtctatgagggtgagcgtgccatgacaaaggacaacaatctgctgggcagattcgaactgtcggggattccgcccgcccctcgcggcgtcccgcagatagaggtcaccttcgatatagacgccaacggtattctgagcgtcactgccaccgaccgatctactggcaaggccaataagataaccattacaaacgataagggcaggctgtccaaggaggaggtggaaaggatggttcatgaagcagaacagtacaaagcagaggacgaagcccagagggaccgagtggccgcgaagaattctttggaggcccatgtgttccatgtaaagggtagtctccaggaggaatcactgagggataagatacctgaggaggaccggagaaagatgcaggataagtgccgagaagtcctggcctggctagagcataatcaactcgccgagaaagaggagtatgaacaccagaaaagagaattagagcagatctgtcgtccgattttcagtcggctctacggggggccaggagttccaggtgggagttcctgcggtacacaagcccggcagggagatcctagtaccgggccaataattgaggaggtggactag

SEQ ID NO: 125855 - DNA, 1932 bp, Artificial Sequence
  derived and/or modified sequence
atgcaggcccctcgtgaactcgccgtgggaatagacttgggcaccacctactcctgcgtcggcgtgtttcagcagggacgtgttgaaattctggctaacgatcaagggaacaggacgaccccatcttatgtggcctttacagacacagagcggcttgttggggatgctgccaaaagtcaggcggcactcaatccacataacacagtcttcgatgctaaacgcctgatcgggagaaaattcgctgatacgacggtgcagtccgacatgaagcactggcctttcagagtagtgagtgagggtgggaagcccaaggtccgagtttgctatcgaggagaagacaagacattttatcccgaagaaattagctccatggtgctgagcaaaatgaaggagactgcagaagcttaccttggtcaaccagtgaaacatgctgtgatcaccgtccccgcatatttcaacgacagccagcggcaagctacaaaggacgcaggtgctatagctggtctgaacgtgcttaggatcataaatgaacccactgccgcagcaatcgcatacgggctcgaccgtcgtggggctggcgagaggaacgtgttgatctttgatctcggcggaggcacctttgacgtcagcgtgctctccatcgacgctggggtatttgaggtcaaggctactgctggggatacacacctcggaggagaggactttgataaccggctggtaaatcactttatggaagaatttaggaggaagcatggaaaggacctctccggcaataagcgtgctcttcgacgtctacgcaccgcgtgcgaacgagccaagcgtaccctctcatctagcacacaggccactctcgagatagacagtcttttcgagggagttgatttctatacgagcatcaccagggcccgattcgaggaactgtgctcggacctctttcggtccacactcgaaccagtggaaaaggcattgcgggatgccaaattggacaaggcacagattcatgacgttgtcctggtgggcggatcaacacggatacctaaggtccagaagcttctgcaagacttcttcaatggcaaagagctaaacaagtccattaaccccgacgaagcagtcgcctacggagccgcagttcaggccgcagtgctgatgggggacaagtgcgagaaggtgcaggaccttctgcttctcgacgtggcccctctgtcccttggtctggagaccgcagggggagtgatgaccacccttatacaaagaaatgccactatcccaacgaaacagacccagacttttaccacttattcagataaccagcccggtgtattcattcaggtttacgagggagagagagccatgaccaaggacaataacctcctgggcaggttcgagctgtccggcataccgccagcaccaaggggagtgccgcagatcgaggtgacattcgacattgacgccaacgggatcctgtccgttacggcaacagacagatccactggcaaagcaaacaagattaccataacaaacgacaaagggcgacttagtaaggaagaggttgagagaatggtgcacgaggccgagcagtacaaagcagaggacgaagcccagcgcgatagagtagccgcaaaaaattccctggaggcacacgtctttcatgtgaaggggtccctgcaagaagagtcactccgggacaagatcccagaggaagatcgaagaaaaatgcaagacaagtgtcgagaggttttggcttggctggaacataatcaattggcagagaaggaagagtacgaacaccagaaaagagagctcgaacagatatgtcgccctatctttagccgtctgtacgggggtccaggcgtgcccggtggctcatcctgtggcacacaggctagacagggcgacccaagcacaggtccgattatagaagaagttgattag

SEQ ID NO: 125856 - DNA, 1860 bp, Artificial Sequence
  derived and/or modified sequence
atgcaggctcccagagagttagcagttgggatcgatctcgggacaacatattcatgcgtggcattcaccgatacagaacggctcgtgggagacgctgccaagagccaggctgcgttaaatccgcataacacagtgttcgatgctaaacgcctaatagggcgtaagttcgctgatacgaccgtgcagtccgatatgaagcattggcctttcagggtagtaagtgaggggggaaagcctaaagtcagggtatgttatcgcggagaggataagaccttttatcccgaggaaatatccagcatggttctctcgaagatgaaagaaaccgctgaagcttacctggggcaacctgttaagcacgcagtgataacagtccccgcttacttcaatgattcacaaagacaggctacaaaagatgccggagcaatcgctggcctcaatgttttacgtatcatcaacgaacccacagccgctgccattgcctacggcttagacaggaggggagctggagagcgaaatgtcctgattttcgacctggggggtggaacgtttgatgtctccgttctgagtattgatgccggagtcttcgaagtaaaggccacagcaggcgatactcacctcggaggggaagatttcgacaataggttggtgaatcactttatggaagagttccgacgcaaacatggcaaggatctgtcaggaaataagcgggcactcagaaggctcaggaccgcttgcgagagggccaaaagaactctgtcgagcagtacacaagccaccctggagatcgacagcctgtttgaaggtgtagatttttacacttccattactagagcgaggtttgaggagctatgcagcgatctgtttaggagcaccctcgaaccagtagagaaagctctccgcgacgccaagctggacaaagcccagatccacgatgtggtcctggtgggcggttcaacccggatccccaaggtccagaaactgctgcaggacttttttaacgggaaggaactcaataagagcattaacccggatgaagccgtggcgtacggggcagcggtgcaggccgcagtgctcatgggtgataagtgtgagaaagttcaagatctacttctgctggacgtggctccactgtccctgggtctagagaccgccggaggcgtcatgaccacactcattcagaggaacgctacgatcccaaccaaacaaacccagactttcaccacctattccgacaatcagcccggtgtgtttatacaggtgtatgaaggagagcgcgctatgaccaaagataataacctgctgggaagattcgaactcagcggcattccgcctgccccacggggtgtcccccagatcgaggtgacgtttgacatagacgcaaatgggattctgagcgtgaccgcaactgacagatccacaggcaaagcgaacaagatcactataacaaacgacaaaggaagattgtccaaggaggaagttgagcgcatggttcacgaagctgagcaatacaaggcggaggacgaggcccaacgtgaccgcgtggctgctaaaaattcactcgaggcacatgttttccacgtgaaaggaagcttgcaggaagagagcttgcgggacaaaatacctgaggaggatcgacggaagatgcaagataagtgcagagaagtgttggcatggctggaacataatcagctggccgaaaaggaagaatacgagcatcagaagagggagctggagcaaatttgtagacccatattttcacgcctatacggtggaccaggcgttcccggagggtcatcctgtggcacccaggctcgtcaaggcgacccttccaccgggccaatcatcgaggaagttgactag

SEQ ID NO: 125857 - DNA, 1932 bp, Artificial Sequence
  derived and/or modified sequence
atgcaggcccccagagagctggccgtgggcatcgacctgggcaccacctacagctgcgtgggcgtgttccagcagggcagagtggagatcctggccaacgaccagggcaacagaaccacccccagctacgtggccttcaccgacaccgagagactggtgggcgacgccgccaagagccaggccgccctgaacccccacaacaccgtgttcgacgccaagagactgatcggcagaaagttcgccgacaccaccgtgcagagcgacatgaagcactggcccttcagagtggtgagcgagggcggcaagcccaaggtgagagtgtgctacagaggcgaggacaagaccttctaccccgaggagatcagcagcatggtgctgagcaagatgaaggagaccgccgaggcctacctgggccagcccgtgaagcacgccgtgatcaccgtgcccgcctacttcaacgacagccagagacaggccaccaaggacgccggcgccatcgccggcctgaacgtgctgagaatcatcaacgagcccaccgccgccgccatcgcctacggcctggacagaagaggcgccggcgagagaaacgtgctgatcttcgacctgggcggcggcaccttcgacgtgagcgtgctgagcatcgacgccggcgtgttcgaggtgaaggccaccgccggcgacacccacctgggcggcgaggacttcgacaacagactggtgaaccacttcatggaggagttcagaagaaagcacggcaaggacctgagcggcaacaagagagccctgagaagactgagaaccgcctgcgagagagccaagagaaccctgagcagcagcacccaggccaccctggagatcgacagcctgttcgagggcgtggacttctacaccagcatcaccagagccagattcgaggagctgtgcagcgacctgttcagaagcaccctggagcccgtggagaaggccctgagagacgccaagctggacaaggcccagatccacgacgtggtgctggtgggcggcagcaccagaatccccaaggtgcagaagctgctgcaggacttcttcaacggcaaggagctgaacaagagcatcaaccccgacgaggccgtggcctacggcgccgccgtgcaggccgccgtgctgatgggcgacaagtgcgagaaggtgcaggacctgctgctgctggacgtggcccccctgagcctgggcctggagaccgccggcggcgtgatgaccaccctgatccagagaaacgccaccatccccaccaagcagacccagaccttcaccacctacagcgacaaccagcccggcgtgttcatccaggtgtacgagggcgagagagccatgaccaaggacaacaacctgctgggcagattcgagctgagcggcatcccccccgcccccagaggcgtgccccagatcgaggtgaccttcgacatcgacgccaacggcatcctgagcgtgaccgccaccgacagaagcaccggcaaggccaacaagatcaccatcaccaacgacaagggcagactgagcaaggaggaggtggagagaatggtgcacgaggccgagcagtacaaggccgaggacgaggcccagagagacagagtggccgccaagaacagcctggaggcccacgtgttccacgtgaagggcagcctgcaggaggagagcctgagagacaagatccccgaggaggacagaagaaagatgcaggacaagtgcagagaggtgctggcctggctggagcacaaccagctggccgagaaggaggagtacgagcaccagaagagagagctggagcagatctgcagacccatcttcagcagactgtacggcggccccggcgtgcccggcggcagcagctgcggcacccaggccagacagggcgaccccagcaccggccccatcatcgaggaggtggactag

SEQ ID NO: 125858 - DNA, 1860 bp, Artificial Sequence
  derived and/or modified sequence
atgcaggcccccagagagctggccgtgggcatcgacctgggcaccacctacagctgcgtggccttcaccgacaccgagagactggtgggcgacgccgccaagagccaggccgccctgaacccccacaacaccgtgttcgacgccaagagactgatcggcagaaagttcgccgacaccaccgtgcagagcgacatgaagcactggcccttcagagtggtgagcgagggcggcaagcccaaggtgagagtgtgctacagaggcgaggacaagaccttctaccccgaggagatcagcagcatggtgctgagcaagatgaaggagaccgccgaggcctacctgggccagcccgtgaagcacgccgtgatcaccgtgcccgcctacttcaacgacagccagagacaggccaccaaggacgccggcgccatcgccggcctgaacgtgctgagaatcatcaacgagcccaccgccgccgccatcgcctacggcctggacagaagaggcgccggcgagagaaacgtgctgatcttcgacctgggcggcggcaccttcgacgtgagcgtgctgagcatcgacgccggcgtgttcgaggtgaaggccaccgccggcgacacccacctgggcggcgaggacttcgacaacagactggtgaaccacttcatggaggagttcagaagaaagcacggcaaggacctgagcggcaacaagagagccctgagaagactgagaaccgcctgcgagagagccaagagaaccctgagcagcagcacccaggccaccctggagatcgacagcctgttcgagggcgtggacttctacaccagcatcaccagagccagattcgaggagctgtgcagcgacctgttcagaagcaccctggagcccgtggagaaggccctgagagacgccaagctggacaaggcccagatccacgacgtggtgctggtgggcggcagcaccagaatccccaaggtgcagaagctgctgcaggacttcttcaacggcaaggagctgaacaagagcatcaaccccgacgaggccgtggcctacggcgccgccgtgcaggccgccgtgctgatgggcgacaagtgcgagaaggtgcaggacctgctgctgctggacgtggcccccctgagcctgggcctggagaccgccggcggcgtgatgaccaccctgatccagagaaacgccaccatccccaccaagcagacccagaccttcaccacctacagcgacaaccagcccggcgtgttcatccaggtgtacgagggcgagagagccatgaccaaggacaacaacctgctgggcagattcgagctgagcggcatcccccccgcccccagaggcgtgccccagatcgaggtgaccttcgacatcgacgccaacggcatcctgagcgtgaccgccaccgacagaagcaccggcaaggccaacaagatcaccatcaccaacgacaagggcagactgagcaaggaggaggtggagagaatggtgcacgaggccgagcagtacaaggccgaggacgaggcccagagagacagagtggccgccaagaacagcctggaggcccacgtgttccacgtgaagggcagcctgcaggaggagagcctgagagacaagatccccgaggaggacagaagaaagatgcaggacaagtgcagagaggtgctggcctggctggagcacaaccagctggccgagaaggaggagtacgagcaccagaagagagagctggagcagatctgcagacccatcttcagcagactgtacggcggccccggcgtgcccggcggcagcagctgcggcacccaggccagacagggcgaccccagcaccggccccatcatcgaggaggtggactag

SEQ ID NO: 125859 - protein, 573 aa, Artificial Sequence
  derived and/or modified sequence
MLRLPTVFRQMRPVSRVLAPHLTRAYAKDVKFGADARALMLQGVDLLADAVAVTMGPKGRTVIIEQSWGSPKVTKDGVTVAKSIDLKDKYKNIGAKLVQDVANNTNEEAGDGTTTATVLARSIAKEGFEKISKGANPVEIRRGVMLAVDAVIAELKKQSKPVTTPEEIAQVATISANGDKEIGNIISDAMKKVGRKGVITVKDGKTLNDELEIIEGMKFDRGYISPYFINTSKGQKCEFQDAYVLLSEKKISSIQSIVPALEIANAHRKPLVIIAEDVDGEALSTLVLNRLKVGLQVVAVKAPGFGDNRKNQLKDMAIATGGAVFGEEGLTLNLEDVQPHDLGKVGEVIVTKDDAMLLKGKGDKAQIEKRIQEIIEQLDVTTSEYEKEKLNERLAKLSDGVAVLKVGGTSDVEVNEKKDRVTDALNATRAAVEEGIVLGGGCALLRCIPALDSLTPANEDQKIGIEIIKRTLKIPAMTIAKNAGVEGSLIVEKIMQSSSEVGYDAMAGDFVNMVEKGIIDPTKVVRTALLDAAGVASLLTTAEVVVTEIPKEEKDPGMGAMGGMGGGMGGGMF

SEQ ID NO: 125860 - protein, 58 aa, Artificial Sequence
  derived and/or modified sequence
MLRLPTVFRQMRPVSRVLAPHLTRAYAKDVKFGADARALMLQGVDLLADAVAVTMGPK

SEQ ID NO: 125861 - protein, 94 aa, Artificial Sequence
  derived and/or modified sequence
MLRLPTVFRQMRPVSRVLAPHLTRAYAKDVKFGADARALMLQGVDLLADAVAVTMGPKGRTVIIEQSWGSPKVTKDGVTVAKSIDLKDKYKNIG

SEQ ID NO: 125862 - protein, 234 aa, Artificial Sequence [sequence omitted]

SEQ ID NO: 125863 - protein, 83 aa, Artificial Sequence
  derived and/or modified sequence
MLRLPTVFRQMRPVSRVLAPHLTRAYAKDVKFGADARALMLQGVDLLADAVAVTMGPKGRTVIIEQSWGSPKVTKDGVTVAKS

SEQ ID NO: 125864 - protein, 221 aa, Artificial Sequence
  derived and/or modified sequence
MLRLPTVFRQMRPVSRVLAPHLTRAYAKDVKFGADARALMLQGVDLLADAVAVTMGPKGRTVIIEQSWGSPKVTKDGVTVAKSIDLKDKYKNIGAKLVQDVANNTNEEAGDGTTTATVLARSIAKEGFEKISKGANPVEIRRGVMLAVDAVIAELKKQSKPVTTPEEIAQVATISANGDKEIGNIISDAMKKVGRKGVITVKDGKTLNDELEIIEGMKFDR

SEQ ID NO: 125865 - protein, 245 aa, Artificial Sequence
  derived and/or modified sequence
MLAVDAVIAELKKQSKPVTTPEEIAQVATISANGDKEIGNIISDAMKKVGRKGVITVKDGKTLNDELEIIEGMKFDRGYISPYFINTSKGQKCEFQDAYVLLSEKKISSIQSIVPALEIANAHRKPLVIIAEDVDGEALSTLVLNRLKVGLQVVAVKAPGFGDNRKNQLKDMAIATGGAVFGEEGLTLNLEDVQPHDLGKVGEVIVTKDDAMLLKGKGDKAQIEKRIQEIIEQLDVTTSEYEKEN

SEQ ID NO: 125866 - protein, 158 aa, Artificial Sequence
  derived and/or modified sequence
MLRLPTVFRQMRPVSRVLAPHLTRAYAKDVKFGADARALMLQGVDLLADAVAVTMGPKGRTVIIEQSWGSPKVTKDGVTVAKSIDLKDKYKNIGAKLVQDVANNTNEEAGDGTTTATVLARSIAKEGFEKISKGANPVEIRRGRNVCCHHSVLNFSVL

SEQ ID NO: 125867 - DNA, 1722 bp, Artificial Sequence
  derived and/or modified sequence
atgcttcggctgcctactgtatttagacaaatgcgtcctgtgtcccgcgtgctggccccgcatctgactcgcgcatatgctaaggacgtgaaattcggtgcagacgcccgcgctctaatgctgcaaggcgtggatctgcttgctgacgcagttgccgttacgatgggaccaaaggggcgcactgttatcattgaacagtcttgggggagtccaaaggtcactaaggatggggtgacagtggccaagagtatagacctgaaggataaatataagaacattggcgctaaattagtccaggatgtggccaataacaccaacgaagaggctggcgatggcaccaccaccgctaccgttttagccaggtcgatcgctaaggaaggcttcgagaaaatctcaaaaggcgccaaccctgtggagatccgcaggggcgttatgctagccgtggacgctgtaatagccgagctcaagaagcaatccaaacccgttacaacacccgaagagattgcccaggtagccactataagcgcaaatggagacaaagagatcggcaatattatttcagacgccatgaagaaagttgggcgcaagggggtcataaccgtcaaagacggaaagaccctgaacgacgaactggagattatcgagggcatgaagtttgatcggggctacatctccccgtactttattaacactagcaaaggccagaagtgtgagttccaggacgcctacgtgcttcttagcgagaagaagatttcctccatccagtctattgttcctgcactagaaattgcaaacgcgcatcgaaaaccattggtcataatcgcggaggatgttgatggggaggccttgagcactctggtgcttaatagactaaaagtcgggctccaggtcgtggccgtgaaggccccgggctttggcgacaatcggaagaatcagctgaaagacatggccatcgcaaccgggggagccgtatttggggaggaaggactaactctgaacctagaagacgtccagccgcacgatctgggcaaggtcggcgaggtgatcgtcaccaaggacgacgccatgctgttgaaaggcaaaggagataaagctcagatcgagaaaagaattcaagagattattgagcaactggacgtgacaacaagtgaatacgagaaggaaaagttgaatgagagattagccaaactatccgatggagtagccgtgctcaaggtaggaggtacgtcagatgttgaggtcaatgagaagaaggaccgggtcaccgacgctttgaacgcaaccagagcagcagtcgaagaaggaattgttctgggcggcggatgcgcccttttacgttgtatccccgccttggattccctgacaccagcaaacgaggatcaaaaaatcgggatcgagattatcaaacggactctgaaaattcccgccatgacaattgccaagaatgctggcgtggagggaagcctgatcgtcgaaaaaattatgcaatccagctccgaggtcggctacgacgctatggccggggattttgttaacatggtggaaaaaggcatcattgatcctacaaaggttgtccgaactgctctcctggatgcagcgggggtggcatcgctgctgaccaccgcagaggtggtagtcactgaaatcccaaaggaggaaaaagacccgggcatgggtgctatgggagggatgggcggtgggatgggtggtggcatgttctag

SEQ ID NO: 125868 - DNA, 1722 bp, Artificial Sequence
  derived and/or modified sequence
atgctgcgcctccctacggtgttccggcagatgagacctgtctcacgagttttggcaccgcatctgactagagcctacgccaaagatgtgaaatttggagcagatgccagagcccttatgcttcaaggagtagatctgctcgccgacgctgtcgccgtaaccatgggacccaagggccggacagtaatcatcgagcagagctggggaagccccaaagttaccaaggatggtgtgaccgttgcaaagagcatcgaccttaaggacaagtacaaaaacataggcgctaaattagttcaggacgtcgccaataataccaacgaagaagccggggacggcacgactacagccactgtgttagctaggtccattgcaaaagaagggtttgagaagatctccaaaggagctaatcctgttgaaatccgaaggggggtgatgttggcagttgacgctgttattgccgagttaaagaagcagagcaaacctgtgacaacacctgaagaaattgctcaagtcgctactatcagcgctaatggagataaagagataggcaacatcatctcagacgctatgaaaaaagttgggagaaagggggtgattactgtgaaagacggcaaaaccctcaatgatgagctggagattatcgaagggatgaagtttgatcgggggtatatctctccatacttcatcaatacttccaagggccagaagtgcgaatttcaagacgcctacgtcctgctgtccgagaagaagataagcagcattcagtctattgtacctgccttggagattgctaatgctcataggaagcctctagttattatcgcagaagacgtcgacggagaagccctctcaactctggtgctgaataggctcaaggtcggactgcaggtggtcgcagtaaaggctcccggattcggtgataataggaagaatcaactgaaagatatggcaatcgccactggaggagccgtttttggggaagagggccttactctgaaccttgaggacgtgcagcctcacgatcttggtaaggtaggcgaagttatagttacaaaggacgacgcgatgctactgaaggggaaaggagataaggcgcagatcgaaaagaggatccaagagattatagagcagttggatgtgacaacctcggaatacgaaaaggagaaactaaatgaacgacttgcaaagctttcagatggagtcgccgtgctcaaagtgggtggaacgagcgatgtggaggtcaacgagaaaaaggatcgtgtgacagatgccttgaacgcgaccagggccgccgtggaggagggaatagtgttaggtggtggatgtgccttgctcaggtgcattcccgctttagattcactgacacctgccaatgaggatcagaagatcggaatagagatcatcaaaaggactctcaagatccctgcgatgacaatagcaaaaaacgcgggagtcgaggggtctctaatcgttgaaaagataatgcagtcttcgtccgaggtgggatacgatgctatggctggcgatttcgtgaatatggtcgagaaagggataatcgacccaacaaaagtcgtgcgtacagctctactggatgcagccggtgtggcctcactgctaactacagccgaagtggtggttactgaaatacccaaggaggaaaaggatcccgggatgggggctatgggtggcatgggcggaggcatgggcggaggaatgttctag

SEQ ID NO: 125869 - DNA, 177 bp, Artificial Sequence
  derived and/or modified sequence
atgctgcgcctgcccactgtgttccgccagatgagaccagtctctcgcgtgttggctccacatctgacgcgggcttatgcgaaggatgtcaagttcggtgcagatgctagagccctgatgctgcagggcgttgacctgttagccgatgcagtcgcggttacgatgggccctaaatag

SEQ ID NO: 125870 - DNA, 285 bp, Artificial Sequence
  derived and/or modified sequence
atgcttcggctgccaactgtgtttcgtcagatgcggcctgtgagccgggtgctggccccacatcttactagggcctatgctaaggacgtcaagtttggtgccgatgccagggcgcttatgctccaaggggtagacctgcttgccgatgcagtggccgtcacaatgggccctaaaggtagaaccgtgatcattgagcaatcctggggatcacctaaggtgacaaaggacggcgtcactgtagccaagtctattgatttgaaggataagtacaagaacatcggctag

SEQ ID NO: 125871 - DNA, 705 bp, Artificial Sequence
  derived and/or modified sequence
atgcttcggctgcctactgtcttccgccagatgcggccagtctcgcgggtcttagcccctcacctcactcgcgcctacgcaaaggacgtaaagtttggcgcagacgcccgggccctgatgctgcagggtgtcgacctgctggcggatgcggtcgcggttactatggggccaaaagggaggaccgtgatcatcgaacagagttgggggtccccgaaagtgacaaaggacggagtgaccgtggctaagagcatagaccttaaagacaaatataagaatatcggggcaaagctggtgcaggatgtagccaacaacacaaatgaagaggccggggatggcactacaactgcaactgtcctggcaagaagtattgccaaagagggattcgagaaaatcagcaaaggcgcaaaccccgtagagattaggcgaggagtaatgctggccgttgatgccgttatcgccgagctgaagaagcagtcaaagcctgtgacaacacctgaggaaatcgcgcaggtggccaccatttcggccaacggagataaggaaattggcaacattatctctgacgcaatgaagaaggtgggacgaaagggggtgattaccgatggcaagacgcttaatgatgaactggagattatcgaagggatgaaattcgatcgtggatatatttccccttacttcatcaacacatccaagggaaagaactag

SEQ ID NO: 125872 - DNA, 252 bp, Artificial Sequence
  derived and/or modified sequence
atgctgcgtctgcccacggtcttccgtcagatgcggccagtgtcgagagtcctggctccgcacctcaccagagcttacgccaaagacgtcaagtttggcgccgacgcacgagcccttatgcttcagggagttgatctgttggctgacgccgtggctgttactatgggacccaaaggaaggaccgtgataatagaacagagctggggatcacccaaagtcacaaaagacggcgtgaccgtcgctaagtcttag

SEQ ID NO: 125873 - DNA, 666 bp, Artificial Sequence
  derived and/or modified sequence
atgctgaggctgcccactgtcttcagacaaatgaggcctgtgtctcgagtcctggcaccacacctgactagagcctatgcgaaagacgtgaagttcggcgccgacgctagagcgttgatgttgcagggcgtggatctgctggctgatgcagtggccgtgaccatggggccgaaagggcgcactgtgatcattgagcagagttggggaagcccgaaggtgactaaggatggggttacagtggcaaagagtattgacctcaaggataagtacaagaacatcggagcgaagttggtacaagacgtggccaacaataccaacgaggaagccggtgacgggactaccaccgccacggtgctcgctaggagcatagccaaggagggcttcgagaaaatcagcaagggggccaaccctgtggaaatacgaaggggtgttatgctggctgtcgacgctgtgattgccgagttgaagaagcagtccaagcctgtgacgacccctgaggaaattgcccaggtggccacaattagcgccaatggagataaggagatcggcaatatcatctcagacgccatgaaaaaggttggccggaaaggcgtaattacggtcaaagatggtaagactctgaatgacgagctggagatcatcgaggggatgaaatttgataggtag

SEQ ID NO: 125874 - DNA, 738 bp, Artificial Sequence
  derived and/or modified sequence
atgctcgctgttgatgctgtgatagctgaattgaagaaacagtccaagcccgtaactacaccggaagagatcgctcaagtagccacgatctccgctaatggcgacaaagagatcggcaatataatatcagacgcaatgaagaaagttggtcggaagggcgttataacagtcaaggatggcaaaaccctgaatgatgaactggagatcattgagggcatgaaatttgatcgagggtacatttctccatactttataaacacgtcaaaaggtcagaaatgcgagtttcaagatgcctatgtgctgctgtccgaaaagaaaatcagctccatccagagcattgtgcccgctctggagattgccaacgctcaccgcaagcctcttgttatcattgccgaagatgtcgatggcgaagccctgtcaaccctcgtgttgaataggctgaaggttgggttacaagttgtcgccgttaaggcccctgggttcggcgataatcgaaagaatcaactcaaagacatggccatcgctaccggaggggcagtatttggggaagaaggcctgaccttgaatctggaggatgtgcagccccatgatctcggtaaagtgggtgaggtgatagtcaccaaggacgatgccatgcttttaaaaggcaagggggataaagcccaaatcgagaagagaatccaggaaatcattgagcagcttgacgtgaccaccagtgaatatgagaaggaaaattag

SEQ ID NO: 125875 - DNA, 477 bp, Artificial Sequence
  derived and/or modified sequence
atgctgcgactgcctaccgtgtttcggcagatgcggccagtcagccgtgtgctggcccctcatctgactcgcgcatatgccaaggatgtcaaatttggcgcagacgcaagggccttgatgcttcagggagtagatcttttggcagacgctgtggccgtaactatggggcccaaaggacgtactgtgatcatcgagcagtcctggggttcccccaaagtgacaaaggacggggtgacggtggcaaaatccattgacctgaaagacaagtacaaaaatataggtgccaagctggttcaagatgtggcaaacaacaccaatgaagaggcaggggatggaactactaccgccaccgtgcttgcccggtcaatcgcgaaggaaggctttgagaaaatatctaagggagccaacccagtagagattcggagaggtcggaacgtttgttgccatcattctgttcttaacttttctgtcttatag

SEQ ID NO: 125876 - DNA, 2299 bp, Artificial Sequence
  derived and/or modified sequence
gccccgacgcgcaccgcgattcgccccaagggccctgcgcaggacgctgacgcgaagactcggaggcggaagaaaaaaggagctgtttctaggcttttctaggcgcccagccgagaaatgcttcggttacccacagtctttcgccagatgagaccggtgtccagggtactggctcctcatctcactcgggcttatgccaaagatgtaaaatttggtgcagatgcccgagccttaatgcttcaaggtgtagaccttttagccgatgctgtggccgttacaatggggccaaagggaagaacagtgattattgagcagagttggggaagtcccaaagtaacaaaagatggtgtgactgttgcaaagtcaattgacttaaaagataaatacaaaaacattggagctaaacttgttcaagatgttgccaataacacaaatgaagaagctggggatggcactaccactgctactgtactggcacgctctatagccaaggaaggcttcgagaagattagcaaaggtgctaatccagtggaaatcaggagaggtgtgatgttagctgttgatgctgtaattgctgaacttaaaaagcagtctaaacctgtgaccacccctgaagaaattgcacaggttgctacgatttctgcaaacggagacaaagaaattggcaatatcatctctgatgcaatgaaaaaagttggaagaaagggtgtcatcacagtaaaggatggaaaaacactgaatgatgaattagaaattattgaaggcatgaagtttgatcgaggctatatttctccatactttattaatacatcaaaaggtcagaaatgtgaattccaggatgcctatgttctgttgagtgaaaagaaaatttctagtatccagtccattgtacctgctcttgaaattgccaatgctcaccgtaagcctttggtcataatcgctgaagatgttgatggagaagctctaagtacactcgtcttgaataggctaaaggttggtcttcaggttgtggcagtcaaggctccagggtttggtgacaatagaaagaaccagcttaaagatatggctattgctactggtggtgcagtgtttggagaagagggattgaccctgaatcttgaagacgttcagcctcatgacttaggaaaagttggagaggtcattgtgaccaaagacgatgccatgctcttaaaaggaaaaggtgacaaggctcaaattgaaaaacgtattcaagaaatcattgagcagttagatgtcacaactagtgaatatgaaaaggaaaaactgaatgaacggcttgcaaaactttcagatggagtggctgtgctgaaggttggtgggacaagtgatgttgaagtgaatgaaaagaaagacagagttacagatgcccttaatgctacaagagctgctgttgaagaaggcattgttttgggagggggttgtgccctccttcgatgcattccagccttggactcattgactccagctaatgaagatcaaaaaattggtatagaaattattaaaagaacactcaaaattccagcaatgaccattgctaagaatgcaggtgttgaaggatctttgatagttgagaaaattatgcaaagttcctcagaagttggttatgatgctatggctggagattttgtgaatatggtggaaaaaggaatcattgacccaacaaaggttgtgagaactgctttattggatgctgctggtgtggcctctctgttaactacagcagaagttgtagtcacagaaattcctaaagaagagaaggaccctggaatgggtgcaatgggtggaatgggaggtggtatgggaggtggcatgttctaactcctagactagtgctttacctttattaatgaactgtgacaggaagcccaaggcagtgttcctcaccaataacttcagagaagtcagttggagaaaatgaagaaaaaggctggctgaaaatcactataaccatcagttactggtttcagttgacaaaatatataatggtttactgctgtcattgtccatgcctacagataatttattttgtatttttgaataaaaaacatttgtacattcctgatactgggtacaagagccatgtaccagtgtactgctttcaacttaaatcactgaggcatttttactactattctgttaaaatcaggattttagtgcttgccaccaccagatgagaagttaagcagcctttctgtggagagtgagaataattgtgtacaaagtagagaagtatccaattatgtgacaacctttgtgtaataaaaatttgtttaaagtt

SEQ ID NO: 125877 - DNA, 2455 bp, Artificial Sequence
  derived and/or modified sequence
agactaagccggccggagagggctgagcgcgctagcacaccctgcgcgggtagggaggggcggggctcgcgcgcagggtgtgcagattgcagggcccgggctgacgggaagtgggtgggagctgcctgcacacgcggtgccgcggggcgggagtagaggcggagggaggggacacgggctcattgcggtgtgcgccctgcactctgtccctcactcgccgccgacgacctgtctcgccgagcgcacgccttgccgccgccccgcagaaatgcttcggttacccacagtctttcgccagatgagaccggtgtccagggtactggctcctcatctcactcgggcttatgccaaagatgtaaaatttggtgcagatgcccgagccttaatgcttcaaggtgtagaccttttagccgatgctgtggccgttacaatggggccaaagggaagaacagtgattattgagcagagttggggaagtcccaaagtaacaaaagatggtgtgactgttgcaaagtcaattgacttaaaagataaatacaaaaacattggagctaaacttgttcaagatgttgccaataacacaaatgaagaagctggggatggcactaccactgctactgtactggcacgctctatagccaaggaaggcttcgagaagattagcaaaggtgctaatccagtggaaatcaggagaggtgtgatgttagctgttgatgctgtaattgctgaacttaaaaagcagtctaaacctgtgaccacccctgaagaaattgcacaggttgctacgatttctgcaaacggagacaaagaaattggcaatatcatctctgatgcaatgaaaaaagttggaagaaagggtgtcatcacagtaaaggatggaaaaacactgaatgatgaattagaaattattgaaggcatgaagtttgatcgaggctatatttctccatactttattaatacatcaaaaggtcagaaatgtgaattccaggatgcctatgttctgttgagtgaaaagaaaatttctagtatccagtccattgtacctgctcttgaaattgccaatgctcaccgtaagcctttggtcataatcgctgaagatgttgatggagaagctctaagtacactcgtcttgaataggctaaaggttggtcttcaggttgtggcagtcaaggctccagggtttggtgacaatagaaagaaccagcttaaagatatggctattgctactggtggtgcagtgtttggagaagagggattgaccctgaatcttgaagacgttcagcctcatgacttaggaaaagttggagaggtcattgtgaccaaagacgatgccatgctcttaaaaggaaaaggtgacaaggctcaaattgaaaaacgtattcaagaaatcattgagcagttagatgtcacaactagtgaatatgaaaaggaaaaactgaatgaacggcttgcaaaactttcagatggagtggctgtgctgaaggttggtgggacaagtgatgttgaagtgaatgaaaagaaagacagagttacagatgcccttaatgctacaagagctgctgttgaagaaggcattgttttgggagggggttgtgccctccttcgatgcattccagccttggactcattgactccagctaatgaagatcaaaaaattggtatagaaattattaaaagaacactcaaaattccagcaatgaccattgctaagaatgcaggtgttgaaggatctttgatagttgagaaaattatgcaaagttcctcagaagttggttatgatgctatggctggagattttgtgaatatggtggaaaaaggaatcattgacccaacaaaggttgtgagaactgctttattggatgctgctggtgtggcctctctgttaactacagcagaagttgtagtcacagaaattcctaaagaagagaaggaccctggaatgggtgcaatgggtggaatgggaggtggtatgggaggtggcatgttctaactcctagactagtgctttacctttattaatgaactgtgacaggaagcccaaggcagtgttcctcaccaataacttcagagaagtcagttggagaaaatgaagaaaaaggctggctgaaaatcactataaccatcagttactggtttcagttgacaaaatatataatggtttactgctgtcattgtccatgcctacagataatttattttgtatttttgaataaaaaacatttgtacattcctgatactgggtacaagagccatgtaccagtgtactgctttcaacttaaatcactgaggcatttttactactattctgttaaaatcaggattttagtgcttgccaccaccagatgagaagttaagcagcctttctgtggagagtgagaataattgtgtacaaagtagagaagtatccaattatgtgacaacctttgtgtaataaaaatttgtttaaagttaataa

SEQ ID NO: 125878 - DNA, 533 bp, Artificial Sequence
  derived and/or modified sequence
ccctcactcgccgccgacgacctgtctcgccgagcgcacgccttgccgccgccccgcaggcagctgggataccgcgcctccagtcttgaccttgctgggggcgttcggaaagaaggacacgtgggctcgcgccgagtgggccgggccgccgcccccagcatcgcggccttgctggttgctctgatacagtagccttgggtggatccatggagacactttgctgagcggctttttgcaccgtcaggaatacttttaacttccctggtcacttggatttgtaacttgcctctctccggctgacttggtttctcaggggccacagttggagtgggtctgcccacaaggccgttttcgcgaaatgcttcggttacccacagtctttcgccagatgagaccggtgtccagggtactggctcctcatctcactcgggcttatgccaaagatgtaaaatttggtgcagatgcccgagccttaatgcttcaaggtgtagaccttttagccgatgctgtggccgttacaatggggccaaagg

SEQ ID NO: 125879 - DNA, 549 bp, Artificial Sequence
  derived and/or modified sequence
attgcggtgtgcgccctgcactctgtccctcactcgccgccgacgacctgtctcgccgagcgcacgccttgccgccgccccgcaggcagctgggataccgcgcctccagtcttgaccttgctgggggcgttcggaaagaaggacacgtgggctcgcgccgagtgggccgggccgccgcccccagcatcgcggccttgctggttgctctgatacagtagccttgggtggatccatggagacactttgctgagcggctttttgcaccaaatgcttcggttacccacagtctttcgccagatgagaccggtgtccagggtactggctcctcatctcactcgggcttatgccaaagatgtaaaatttggtgcagatgcccgagccttaatgcttcaaggtgtagaccttttagccgatgctgtggccgttacaatggggccaaagggaagaacagtgattattgagcagagttggggaagtcccaaagtaacaaaagatggtgtgactgttgcaaagtcaattgacttaaaagataaatacaaaaacattgga

SEQ ID NO: 125880 - DNA, 754 bp, Artificial Sequence
  derived and/or modified sequence
cggaagaaaaaaggagctgtttctaggcttttctaggcgcccagccgagaaatgcttcggttacccacagtctttcgccagatgagaccggtgtccagggtactggctcctcatctcactcgggcttatgccaaagatgtaaaatttggtgcagatgcccgagccttaatgcttcaaggtgtagaccttttagccgatgctgtggccgttacaatggggccaaagggaagaacagtgattattgagcagagttggggaagtcccaaagtaacaaaagatggtgtgactgttgcaaagtcaattgacttaaaagataaatacaaaaacattggagctaaacttgttcaagatgttgccaataacacaaatgaagaagctggggatggcactaccactgctactgtactggcacgctctatagccaaggaaggcttcgagaagattagcaaaggtgctaatccagtggaaatcaggagaggtgtgatgttagctgttgatgctgtaattgctgaacttaaaaagcagtctaaacctgtgaccacccctgaagaaattgcacaggttgctacgatttctgcaaacggagacaaagaaattggcaatatcatctctgatgcaatgaaaaaagttggaagaaagggtgtcatcacagatggaaaaacactgaatgatgaattagaaattattgaaggcatgaagtttgatcgaggctatatttctccatactttattaatacatcaaaaggtaagaaca

SEQ ID NO: 125881 - DNA, 578 bp, Artificial Sequence
  derived and/or modified sequence
actcgccgccgacgacctgtctcgccgagcgcacgccttgccgccgccccgcaggcagctgggataccgcgcctccagtcttgaccttgctgggggcgttcggaaagaaggacacgtgggctcgcgccgagtgggccgggccgccgcccccagcatcgcggccttgctggttgctctgatacagtagccttgggtggatccatggagacactttgctgagcggctttttgcaccgtcaggaatacttttaacttccctggtcacttggatttgtaacttgcctctctccggctgacttggtttctcaggggccacagttggagtggaaatgcttcggttacccacagtctttcgccagatgagaccggtgtccagggtactggctcctcatctcactcgggcttatgccaaagatgtaaaatttggtgcagatgcccgagccttaatgcttcaaggtgtagaccttttagccgatgctgtggccgttacaatggggccaaagggaagaacagtgattattgagcagagttggggaagtcccaaagtaacaaaagatggtgtgactgttgcaaagtcaa

SEQ ID NO: 125882 - DNA, 888 bp, Artificial Sequence
  derived and/or modified sequence
gaagactcggaggcggaagaaaaaaggagctgtttctaggcttttctaggcgcccagccgaggtgaaagaactaccccttcgtcccctcccggaaatgacgcgatttgacccttgagccgtagggagcgcggcattttctggaaagttctggaaccgagcgaggcccgggaactagactaagccggccggagagggctgagcgcgctagcacaccctgcgcggaaatgcttcggttacccacagtctttcgccagatgagaccggtgtccagggtactggctcctcatctcactcgggcttatgccaaagatgtaaaatttggtgcagatgcccgagccttaatgcttcaaggtgtagaccttttagccgatgctgtggccgttacaatggggccaaagggaagaacagtgattattgagcagagttggggaagtcccaaagtaacaaaagatggtgtgactgttgcaaagtcaattgacttaaaagataaatacaaaaacattggagctaaacttgttcaagatgttgccaataacacaaatgaagaagctggggatggcactaccactgctactgtactggcacgctctatagccaaggaaggcttcgagaagattagcaaaggtgctaatccagtggaaatcaggagaggtgtgatgttagctgttgatgctgtaattgctgaacttaaaaagcagtctaaacctgtgaccacccctgaagaaattgcacaggttgctacgatttctgcaaacggagacaaagaaattggcaatatcatctctgatgcaatgaaaaaagttggaagaaagggtgtcatcacagtaaaggatggaaaaacactgaatgatgaattagaaattattgaaggcatgaagtttgatcga

SEQ ID NO: 125883 - DNA, 1306 bp, Artificial Sequence
  derived and/or modified sequence
actcgccgccgacgacctgtctcgccgagcgcacgccttgccgccgccccgcagaaatgcttcggttacccacagtctttcgccagatgagaccggtgtccagggtactggctcctcatctcactcgggcttatgccaaagatgtaaaatttggtgcagatgcccgagccttaatgcttcaaggtgtagaccttttagccgatgctgtggccgttacaatggggccaaagggaagaacagtgattattgagcagagttggggaagtcccaaagtaacaaaagatggtgtgatgttagctgttgatgctgtaattgctgaacttaaaaagcagtctaaacctgtgaccacccctgaagaaattgcacaggttgctacgatttctgcaaacggagacaaagaaattggcaatatcatctctgatgcaatgaaaaaagttggaagaaagggtgtcatcacagtaaaggatggaaaaacactgaatgatgaattagaaattattgaaggcatgaagtttgatcgaggctatatttctccatactttattaatacatcaaaaggtcagaaatgtgaattccaggatgcctatgttctgttgagtgaaaagaaaatttctagtatccagtccattgtacctgctcttgaaattgccaatgctcaccgtaagcctttggtcataatcgctgaagatgttgatggagaagctctaagtacactcgtcttgaataggctaaaggttggtcttcaggttgtggcagtcaaggctccagggtttggtgacaatagaaagaaccagcttaaagatatggctattgctactggtggtgcagtgtttggagaagagggattgaccctgaatcttgaagacgttcagcctcatgacttaggaaaagttggagaggtcattgtgaccaaagacgatgccatgctcttaaaaggaaaaggtgacaaggctcaaattgaaaaacgtattcaagaaatcattgagcagttagatgtcacaactagtgaatatgaaaaggaaaactgaatgaacggcttgcaaaactttcagatggagtggctgtgctgaaggttggtgggacaagtgatgttgaagtgaatgaaaagaaagacagagttacagatgcccttaatgctacaagagctgctgttgaagaaggcattgttttgggagggggttgtgccctccttcgatgcattccagccttggactcattgactccagctaatgaagatcaaaaaattggtatagaaattattaaaagaacactcaaaattccagcaatgaccattgctaagaatgca

SEQ ID NO: 125884 - DNA, 748 bp, Artificial Sequence
  derived and/or modified sequence
attttctggaaagttctggaaccgagcgaggcccgggaactagactaagccggccggagagggctgagcgcgctagcacaccctgcgcggaaatgcttcggttacccacagtctttcgccagatgagaccggtgtccagggtactggctcctcatctcactcgggcttatgccaaagatgtaaaatttggtgcagatgcccgagccttaatgcttcaaggtgtagaccttttagccgatgctgtggccgttacaatggggccaaagggaagaacagtgattattgagcagagttggggaagtcccaaagtaacaaaagatggtgtgactgttgcaaagtcaattgacttaaaagataaatacaaaaacattggagctaaacttgttcaagatgttgccaataacacaaatgaagaagctggggatggcactaccactgctactgtactggcacgctctatagccaaggaaggcttcgagaagattagcaaaggtgctaatccagtggaaatcaggagaggtaggaatgtctgttgtcaccacagtgttctaaacttcagtgtgctttaaggcattgattccttggacctaaggaaagtgttaacttgaggaaattaatccttctctcattcctcctcttggcctggagaaatcttaaactgggttttcctttagcaagcttggctgtatggtgggtaggtactgttaggtaattttgatattttacttagttggtttcttttgttttt

SEQ ID NO: 125885 - DNA, 1722 bp, Artificial Sequence
  derived and/or modified sequence
atgctgcggctgcccaccgtcttccggcagatgaggcctgtgtcccgggtgctggccccccacctgacccgggcctatgccaaggatgtgaagtttggagcagatgcccgggccctgatgctgcagggcgtggacctgctggctgatgctgtggccgtgaccatgggccccaagggccgcaccgtcatcatcgagcagagctggggcagccccaaggtgaccaaggatggagtgacagtggccaagagcattgacctgaaggacaagtacaagaacattggagccaagctggtgcaggatgtggccaacaacaccaatgaggaggccggagatggcaccaccacagccaccgtgctggcccggagcatcgccaaggagggctttgagaagatcagcaaaggagccaaccctgtggagatcagaagaggagtgatgctggccgtggatgctgtgattgctgagctgaagaagcagagcaagcctgtgaccaccccagaggagatcgcccaggtggccaccatcagcgccaatggagacaaggagatcggcaacatcatcagtgatgccatgaagaaggtgggcaggaagggcgtcatcaccgtgaaggatggcaagaccctgaatgatgagctggagatcatcgagggcatgaagtttgaccggggctacatcagcccctacttcatcaacaccagcaagggccagaagtgtgagttccaggatgcctacgtgctgctgtctgagaagaagatcagcagcatccagagcatcgtgcctgccctggagatcgccaatgcccacaggaagcccctggtgatcatcgccgaggatgtggatggagaggccctgagcaccctggtgctgaaccggctgaaggtgggcctgcaggtggtggccgtgaaggcccctggctttggagacaacaggaagaaccagctgaaggacatggccatcgccaccggcggcgctgtgtttggagaggagggcctgaccctgaacctggaggatgtgcagccccatgacctgggcaaggtgggggaggtgattgtgaccaaggatgatgccatgctgctgaagggcaaaggagacaaggcccagatcgagaagaggatccaggagatcatcgagcagctggatgtgaccaccagtgaatatgagaaggagaagctgaatgaaaggctggccaagctgagtgatggagtggccgtgctgaaggtgggcggcaccagtgatgtggaggtgaatgagaagaaggacagagtgacagatgccctgaatgccaccagggctgctgtggaggagggcatcgtgctgggcggcggctgtgccctgctgcgctgcatcccagccctggacagcctgaccccagccaatgaagaccagaagattggaattgagatcatcaagaggaccctgaagatcccagccatgaccatcgccaagaatgccggcgtggagggcagcctcatcgtggagaagatcatgcagagcagcagcgaggtgggctatgatgccatggccggggactttgtgaacatggtggagaagggcatcatcgaccccaccaaggtggtgaggacagccctgctggatgctgctggggtggccagcctgctgaccacagctgaggtggtggtgacagagatccccaaggaggagaaggaccccggcatgggcgccatgggcggcatgggcggcggcatgggcggcggcatgttttag

SEQ ID NO: 125886 - DNA, 177 bp, Artificial Sequence
  derived and/or modified sequence
atgctgcggctgcccaccgtcttccggcagatgaggcctgtgtcccgggtgctggccccccacctgacccgggcctatgccaaggatgtgaagtttggagcagatgcccgggccctgatgctgcagggcgtggacctgctggctgatgctgtggccgtgaccatgggccccaagtag

SEQ ID NO: 125887 - DNA, 285 bp, Artificial Sequence
  derived and/or modified sequence
atgctgcggctgcccaccgtcttccggcagatgaggcctgtgtcccgggtgctggccccccacctgacccgggcctatgccaaggatgtgaagtttggagcagatgcccgggccctgatgctgcagggcgtggacctgctggctgatgctgtggccgtgaccatgggccccaagggccgcaccgtcatcatcgagcagagctggggcagccccaaggtgaccaaggatggagtgacagtggccaagagcattgacctgaaggacaagtacaagaacattggatag

SEQ ID NO: 125888 - DNA, 705 bp, Artificial Sequence
  derived and/or modified sequence
atgctgcggctgcccaccgtcttccggcagatgaggcctgtgtcccgggtgctggccccccacctgacccgggcctatgccaaggatgtgaagtttggagcagatgcccgggccctgatgctgcagggcgtggacctgctggctgatgctgtggccgtgaccatgggccccaagggccgcaccgtcatcatcgagcagagctggggcagccccaaggtgaccaaggatggagtgacagtggccaagagcattgacctgaaggacaagtacaagaacattggagccaagctggtgcaggatgtggccaacaacaccaatgaggaggccggagatggcaccaccacagccaccgtgctggcccggagcatcgccaaggagggctttgagaagatcagcaaaggagccaaccctgtggagatcagaagaggagtgatgctggccgtggatgctgtgattgctgagctgaagaagcagagcaagcctgtgaccaccccagaggagatcgcccaggtggccaccatcagcgccaatggagacaaggagatcggcaacatcatcagtgatgccatgaagaaggtgggcaggaagggcgtcatcacagatggcaagaccctgaatgatgagctggagatcatcgagggcatgaagtttgaccggggctacatcagcccctacttcatcaacaccagcaagggcaagaactag

SEQ ID NO: 125889 - DNA, 252 bp, Artificial Sequence
  derived and/or modified sequence
atgctgcggctgcccaccgtcttccggcagatgaggcctgtgtcccgggtgctggccccccacctgacccgggcctatgccaaggatgtgaagtttggagcagatgcccgggccctgatgctgcagggcgtggacctgctggctgatgctgtggccgtgaccatgggccccaagggccgcaccgtcatcatcgagcagagctggggcagccccaaggtgaccaaggatggagtgacagtggccaagagctag

SEQ ID NO: 125890 - DNA, 666 bp, Artificial Sequence
  derived and/or modified sequence
atgctgcggctgcccaccgtcttccggcagatgaggcctgtgtcccgggtgctggccccccacctgacccgggcctatgccaaggatgtgaagtttggagcagatgcccgggccctgatgctgcagggcgtggacctgctggctgatgctgtggccgtgaccatgggccccaagggccgcaccgtcatcatcgagcagagctggggcagccccaaggtgaccaaggatggagtgacagtggccaagagcattgacctgaaggacaagtacaagaacattggagccaagctggtgcaggatgtggccaacaacaccaatgaggaggccggagatggcaccaccacagccaccgtgctggcccggagcatcgccaaggagggctttgagaagatcagcaaaggagccaaccctgtggagatcagaagaggagtgatgctggccgtggatgctgtgattgctgagctgaagaagcagagcaagcctgtgaccaccccagaggagatcgcccaggtggccaccatcagcgccaatggagacaaggagatcggcaacatcatcagtgatgccatgaagaaggtgggcaggaagggcgtcatcaccgtgaaggatggcaagaccctgaatgatgagctggagatcatcgagggcatgaagtttgacagatag

SEQ ID NO: 125891 - DNA, 738 bp, Artificial Sequence
  derived and/or modified sequence
atgctggccgtggatgctgtgattgctgagctgaagaagcagagcaagcctgtgaccaccccagaggagatcgcccaggtggccaccatcagcgccaatggagacaaggagatcggcaacatcatcagtgatgccatgaagaaggtgggcaggaagggcgtcatcaccgtgaaggatggcaagaccctgaatgatgagctggagatcatcgagggcatgaagtttgaccggggctacatcagcccctacttcatcaacaccagcaagggccagaagtgtgagttccaggatgcctacgtgctgctgtctgagaagaagatcagcagcatccagagcatcgtgcctgccctggagatcgccaatgcccacaggaagcccctggtgatcatcgccgaggatgtggatggagaggccctgagcaccctggtgctgaaccggctgaaggtgggcctgcaggtggtggccgtgaaggcccctggctttggagacaacaggaagaaccagctgaaggacatggccatcgccaccggcggcgctgtgtttggagaggagggcctgaccctgaacctggaggatgtgcagccccatgacctgggcaaggtgggggaggtgattgtgaccaaggatgatgccatgctgctgaagggcaaaggagacaaggcccagatcgagaagaggatccaggagatcatcgagcagctggatgtgaccaccagtgaatatgagaaggagaactag

SEQ ID NO: 125892 - DNA, 477 bp, Artificial Sequence
  derived and/or modified sequence
atgctgcggctgcccaccgtcttccggcagatgaggcctgtgtcccgggtgctggccccccacctgacccgggcctatgccaaggatgtgaagtttggagcagatgcccgggccctgatgctgcagggcgtggacctgctggctgatgctgtggccgtgaccatgggccccaagggccgcaccgtcatcatcgagcagagctggggcagccccaaggtgaccaaggatggagtgacagtggccaagagcattgacctgaaggacaagtacaagaacattggagccaagctggtgcaggatgtggccaacaacaccaatgaggaggccggagatggcaccaccacagccaccgtgctggcccggagcatcgccaaggagggctttgagaagatcagcaaaggagccaaccctgtggagatcagaagaggaagaaatgtgtgctgccaccacagcgtgctgaacttctctgtgctgtag

SEQ ID NO: 125893 - DNA, 1722 bp, Artificial Sequence
  derived and/or modified sequence
atgctgcggctgcccaccgtgttccggcagatgcggcccgtgagcagagtgctagctccacatcttaccagagcctatgctaaggacgttaaatttggcgccgacgccagggccttaatgctgcagggcgtggatctattggccgatgccgtggctgtgactatggggcctaaaggccgtaccgtgataatagagcagagttgggggagccccaaggtcactaaagacggcgtaacagtggcgaagtccattgaccttaaagacaaatacaagaatattggcgcaaaactggttcaagacgtggctaacaataccaatgaggaagcaggggatggcactaccacggccaccgtgttggcgaggtccatcgcgaaagagggctttgagaagattagcaagggagccaaccctgttgagatccgcaggggcgtgatgctggctgtggacgcagtgattgctgaactgaagaaacagagcaaaccagtaactacccctgaggagattgcacaggtcgcgaccatttccgctaatggtgacaaagaaatcggcaatatcatcagcgacgcaatgaagaaagtggggcggaaaggagtgataaccgtgaaggacggcaagacactgaatgacgagctggaaatcattgaaggcatgaagtttgatcgggggtacatttccccctattttataaacacatctaagggacaaaaatgtgagttccaggacgcatatgtcctgctgagtgaaaagaaaatttccagtatccaaagtatagttcccgctctcgaaattgcgaacgcccataggaaacccttggtcatcatcgcggaggatgtagacggggaggcactaagtaccttggtcctaaaccggctcaaggtcggccttcaggtagtcgcggtgaaagcaccagggttcggagataaccggaagaatcagctgaaggacatggccatcgctaccggaggtgccgtttttggtgaggaggggcttacattgaacttagaggacgtccagccacacgacctgggtaaagtcggcgaggtgattgttacgaaagatgatgccatgctgctgaaggggaagggagacaaggcacagatcgagaagcgcatccaggaaattattgaacaactggacgtgactacctccgagtacgaaaaagagaagctcaacgagaggctggcgaaactgtccgatggggtcgctgttctgaaggtggggggaactagcgacgtggaagtgaacgaaaaaaaagaccgggtcaccgatgctctgaatgcaactcgcgctgctgttgaggaaggtatcgtgctcggcggcgggtgcgcattgctgagatgcatcccagccctggatagcctgacacctgctaatgaagaccagaaaatagggattgaaatcattaaaagaacacttaaaattccggcgatgacaatcgctaaaaatgctggtgtcgagggctcccttatagtggagaagatcatgcagtcctcaagcgaggtaggctacgacgccatggcgggtgacttcgtgaatatggtggagaagggtattattgacccaaccaaagttgtgagaacagccctactggacgccgccggagtcgccagtctgcttactaccgctgaagtagtggtgaccgaaatccccaaggaggaaaaggatccagggatgggtgccatgggcggcatggggggcggcatgggtggcggaatgttttag

SEQ ID NO: 125894 - DNA, 1722 bp, Artificial Sequence
  derived and/or modified sequence
atgctgcggctgcccaccgtgttccggcagatgcggcccgtgagcagagtgttagcaccacatctgacccgggcatacgccaaagatgtcaaatttggcgctgacgcaagggcccttatgctccagggtgtcgatctcctggctgacgccgtggctgtgaccatgggcccgaaagggcggaccgtgattatcgaacagagttggggctcaccaaaggtcacaaaagacggcgtgaccgttgccaaatctattgaccttaaagataaatacaaaaacatcggcgcaaagctggtccaggatgtggcaaacaatacaaatgaagaggctggagacgggaccaccaccgcgactgtgctcgctagaagcattgctaaagagggctttgaaaagatctccaaaggtgctaatcccgtggagattcggcgaggggtgatgctggccgttgatgcagtaattgcagaattgaagaaacaatctaagcctgtcacaactcccgaggaaatcgcgcaagttgccaccataagtgctaacggagataaggagatcgggaacattatcagcgacgccatgaagaaagttgggcggaagggcgttatcactgtgaaggacggtaaaactctcaacgatgagttggagatcattgaaggaatgaagtttgaccgcggatacattagtccttactttatcaacacttcgaaagggcagaagtgcgagttccaggatgcatacgttctgttatccgaaaaaaagatctcttccatccagtctatcgtgcccgccctggagatagccaatgcgcacaggaaaccccttgtcatcattgcggaagatgtggatggggaggctctaagcactctcgtgctcaaccgactgaaagtgggtttgcaagtggtcgctgtcaaagcgccgggctttggggacaaccgaaagaaccagcttaaggacatggcaatagccaccggcggcgcggtcttcggtgaagaggggcttaccttgaatctagaagacgttcagccccatgatcttggcaaggtgggcgaagtgatcgtaacgaaggacgacgccatgctgctaaaaggaaagggggacaaggctcaaatcgagaagcgaatacaggagatcattgaacagctggatgtgacgacttccgaatacgagaaagagaagttaaacgagaggctggcaaagcttagcgacggcgtagctgtgcttaaagttggcggcacatctgacgttgaggtgaacgagaagaaggatagggtgactgatgccctgaacgccacccgggctgctgtagaagagggtattgtcctcgggggggggtgcgccctcttgcgctgcatcccagccttagatagccttacacctgcaaacgaggatcaaaagattgggatcgagatcatcaaaaggacacttaagattccagcgatgaccattgctaagaacgcaggcgtagaaggatccctgatagttgagaaaatcatgcaaagctcatctgaggtgggatatgacgcgatggccggggattttgtgaacatggtggagaaagggatcatagaccctacaaaggttgtaaggacagctcttttggacgccgctggggtcgcctcacttctgaccacagccgaggtcgtcgttactgagatcccgaaggaggagaaagacccagggatgggtgccatgggtgggatgggaggcggaatgggtggcggcatgttctag

SEQ ID NO: 125895 - DNA, 177 bp, Artificial Sequence
  derived and/or modified sequence
atgctgcggctgcccaccgtgttccggcagatgcggcccgtgagcagagtgctggccccccatctgaccagggcatacgcaaaagacgttaaatttggggcagatgccagagccctgatgctgcaaggtgtggatctgctggcagatgccgtggccgtgactatgggccccaaatag

SEQ ID NO: 125896 - DNA, 285 bp, Artificial Sequence
  derived and/or modified sequence
atgctgcggctgcccaccgtgttccggcagatgcggcccgtgagcagagtactggccccgcacttgacaagagcctacgcgaaggatgtcaagttcggcgccgatgctcgcgcgttgatgctgcagggagtggatctacttgcagacgctgttgccgtaacaatgggcccaaagggccgtacagtcattatcgaacagtcatggggcagccccaaggtcacaaaggacggcgttactgttgccaagtctattgaccttaaggacaagtataagaatataggatag

SEQ ID NO: 125897 - DNA, 705 bp, Artificial Sequence
  derived and/or modified sequence
atgctgcggctgcccaccgtgttccggcagatgcggcccgtgagcagagtgctggcaccacacttgacccgtgcatacgcaaaggatgttaagtttggggcagatgctagagctttgatgctccagggagtggacctgcttgcggacgccgttgccgttacaatgggccctaaggggcgaacggttatcatcgagcagtcatgggggtccccgaaagtcaccaaagacggggtcaccgtcgccaagtctattgatctgaaggataaatacaaaaacatcggggccaaacttgtgcaggatgtggcaaataacactaacgaggaggccggcgatggaaccaccactgctacagtgctcgcgcgcagcatcgccaaagaaggttttgagaaaatttcaaagggcgccaaccccgtggaaatcaggcggggggtgatgcttgcagtagacgccgtaatcgcagagcttaagaagcagtcgaagccagttacaactccggaagagatcgctcaggtcgctacaattagcgccaacggcgataaagagattggaaacattatatccgacgccatgaagaaggtgggacgcaaaggggtcatcacagatggcaagaccctgaatgatgaactcgagatcattgaggggatgaaattcgacagaggatacatatccccgtattttattaatacatctaaaggcaagaactag

SEQ ID NO: 125898 - DNA, 252 bp, Artificial Sequence
  derived and/or modified sequence
atgctgcggctgcccaccgtgttccggcagatgcggcccgtgagccgagtccttgcgcctcatctgacgcgcgcctacgccaaagacgtcaaattcggcgccgacgcccgagcactgatgcttcagggagttgacctactagccgacgccgtggcagttaccatgggtccaaaggggaggactgtaatcattgagcaatcgtgggggtcaccaaaggtcacaaaggatggggtaacagtagccaagtcatag

SEQ ID NO: 125899 - DNA, 666 bp, Artificial Sequence
  derived and/or modified sequence
atgctgcggctgcccaccgtgttccggcagatgcggcccgtgagccgggtgcttgctccccacctgacgcgggcctacgccaaagatgtgaagttcggcgccgatgccagggctctgatgctgcaaggcgtggatctgctcgccgacgcagtggctgtgacaatgggacctaaggggaggactgtaatcatcgagcaaagctggggctcacccaaagtgaccaaagacggggttactgtcgccaaatcaatcgacctgaaggacaagtataagaacatcggagcaaaactagtgcaagatgtcgctaataatacaaacgaagaggctggggatggaacaaccactgccactgtcttggctcgctcaatcgcaaaggaaggattcgaaaagatatccaaaggggctaaccccgtggaaatcaggaggggggtgatgctagctgtcgatgccgtcatcgccgagctcaagaagcagagcaagcctgtcacaactcccgaggaaattgctcaggtggccaccatctctgctaatggagataaagaaataggtaatattatatcagatgccatgaagaaagtgggacgcaagggcgtgattactgtcaaggacggtaagaccctgaacgatgaactggagatcatcgagggtatgaaatttgaccgatag

SEQ ID NO: 125900 - DNA, 738 bp, Artificial Sequence
  derived and/or modified sequence
atgctggccgtggacgccgtgatcgccgagctgaagaagcagagcaagccagtcacaacaccagaagaaatcgcccaagtggcaactatatcagcaaatggcgacaaagagataggaaatatcatttctgatgcaatgaaaaaagtgggcagaaaaggcgtaattacagtgaaagacggtaaaactctgaacgatgaactcgagataattgagggcatgaaattcgatcgcggctacatttcaccctactttatcaataccagtaagggccaaaaatgtgagtttcaagacgcatatgtactgttgtcagagaaaaagatttctagtattcagtctatcgttcctgccctcgaaattgcgaacgctcacaggaaaccactagtgatcattgccgaagatgtggatggcgaagcattgagcacactagttctgaacagactgaaggttggtctgcaggtagtggccgtcaaggccccaggctttggtgacaaccgtaaaaaccaactcaaagacatggctatagcaactggcggggccgtgttcggcgaagaggggcttactttgaaccttgaggatgtgcagccccacgatctcggaaaggtgggagaagttattgtcacaaaggacgatgcaatgttgctgaaggggaaaggcgataaagctcaaatcgaaaaaagaattcaggagattatcgagcagttagatgtgactacgagcgagtacgaaaaagagaactag

SEQ ID NO: 125901 - DNA, 477 bp, Artificial Sequence
  derived and/or modified sequence
atgctgcggctgcccaccgtgttccggcagatgcggcccgtgagcagggtactcgcgccacacctgacccgggcttacgctaaggacgttaagtttggagcagacgccagagccctgatgctgcagggggtcgatttgctggccgatgccgtggcggtcacgatggggccaaaggggcgaacagtgattattgagcagtcctggggtagtccaaaagtgacaaaagacggagtgaccgtcgcgaaaagcatcgacctgaaggataaatacaaaaacattggggccaagctcgtccaagatgtggccaacaacactaatgaagaagcgggcgatgggaccaccacagccactgtgctggcaagatccatcgcaaaagaagggtttgaaaagatttcgaagggagccaaccctgtcgagatcaggcgtggccggaacgtgtgttgccaccattctgtgctgaatttctccgtactgtag

SEQ ID NO: 125902 - DNA, 1722 bp, Artificial Sequence
  derived and/or modified sequence
atgctgcggctgccaaccgtgttcagacagatgcgccctgtttcgcgtgtactggcacctcatcttacccgagcctacgccaaagacgtcaaatttggcgcagatgccagggccttaatgttacagggagttgatttgctcgccgatgcagtcgccgttaccatgggacccaaagggaggactgtgatcatcgaacagtcatggggaagccccaaggtgacaaaagatggagtgacagtcgccaaatctattgacctcaaagacaagtataaaaacatcggagccaagttagtgcaggacgtggctaataacacaaatgaagaggccggtgatggtaccactactgctactgttctggcccgttccattgctaaggagggcttcgaaaagatcagtaaaggagcaaacccagttgagattcgtcggggtgttatgttggcggttgatgccgttatagccgaacttaagaagcaatcgaaacccgtcacaaccccagaggaaatagcacaagttgcgacaattagcgctaacggggacaaggaaataggcaacatcatctctgacgcgatgaaaaaagttggcaggaagggcgtaattactgtgaaggatggtaagaccctgaatgacgaactggagatcatcgaaggcatgaaattcgataggggttatattagcccttactttatcaacactagcaaagggcagaagtgtgaatttcaggacgcctacgttctgctatctgaaaaaaagatttcttcgattcaaagcattgtgcctgctctggagattgctaacgcccatcgaaagcctctcgtgattatagccgaggacgtggacggggaagcactcagcactttggtactgaacaggttgaaggtaggacttcaggttgtggcggtgaaggcacccggtttcggcgataaccgaaagaatcagctcaaggacatggccatcgctacgggcggtgccgtattcggcgaggaaggtctcaccctcaacctggaggacgtccagccacacgatttgggcaaggtcggcgaggtgattgtgactaaagatgacgctatgctcctcaaaggaaagggtgacaaagctcaaattgaaaaacgaatacaagaaatcattgagcagctggacgttactaccagcgaatacgagaaggaaaagcttaatgagagactggcaaagctgagcgatggtgttgccgtgctgaaggtgggcggaacaagcgatgtcgaagttaatgaaaagaaagatagagtcacggatgcacttaatgctacccgggctgcagtggaggagggaatcgtgcttggaggcggttgtgcactactgcgatgtatcccagccctggattcgttgacaccagccaacgaagatcagaaaatcggcattgagattatcaagcggaccctgaagattccagctatgactatagctaaaaacgccggagtggagggaagtttaattgtggagaagattatgcaaagttccagtgaagttgggtacgatgctatggccggagatttcgtgaatatggtagagaaggggattatcgaccctacgaaagtcgtgcgcacagccctgctggatgcagctggggtcgcctctcttctcacaacggccgaggtagtcgttacggaaataccaaaagaagagaaggaccctggaatgggcgctatgggagggatgggaggaggcatgggcggtggcatgttttag

SEQ ID NO: 125903 - DNA, 1722 bp, Artificial Sequence
  derived and/or modified sequence
atgctgcggctcccaactgtgtttcgccaaatgaggccagtgtctagagtcttagccccacacttgactagagcgtatgctaaagacgttaagtttggagctgacgcaagagctctcatgctccaaggagtcgacctgttagctgatgccgtggccgtcacgatgggacccaaaggcagaacagttatcatcgaacagagttggggctctccaaaggtgacaaaggacggcgtcaccgtagctaaaagcattgatcttaaggataaatataagaacattggcgctaagctggtgcaggatgtcgcgaacaatactaacgaggaggcaggtgacggtaccaccacagccaccgtactcgccagatccatcgcaaaggagggattcgaaaaaatctcaaagggggctaatcccgtggagatccgtcgaggtgtgatgctcgccgtggacgcggtcatcgctgagttgaaaaagcagagtaagcctgtcaccacaccggaggaaattgcacaggtggccactatttccgctaatggagataaggagattggcaacataataagcgatgccatgaaaaaggttgggagaaaaggggtgataactgtgaaggatggcaagacacttaacgacgagctcgagatcatcgaaggaatgaaattcgatcggggatacatttcaccctatttcatcaatacctcaaagggtcagaaatgcgaattccaggacgcctatgtactgctctctgaaaagaagatttccagtattcagtcaatagtgcccgctctggagatcgctaacgcgcaccggaagcctctcgtcataatagccgaagacgtcgacggggaagcattatcaactctggtactgaatcgactgaaggtcggtcttcaagtggtcgcagttaaggccccagggtttggggacaacagaaaaaaccaactgaaagacatggccatcgcaactggcggagcggtgtttggggaagaggggctcactctgaacctggaagatgtccagccccatgacttggggaaggtaggagaagtaatcgtgaccaaagacgatgctatgttactcaagggaaagggcgacaaagcacagattgaaaagcgcatacaggagataatcgagcagctggacgtcacgacttcagagtacgagaaggaaaaactgaatgagaggctggctaaactctcagatggtgtagcagttctgaaggtcggtggcactagcgacgtggaggtgaatgagaagaaagacagagtcacagacgccctcaacgcaaccagggctgctgtcgaagaaggcattgttctggggggaggttgcgcccttcttaggtgcatccccgctctggacagtctgactcctgccaatgaggatcagaaaattgggatcgagatcatcaagcgtacgcttaagatccctgcaatgaccattgccaagaatgcgggtgtggaaggatccctgatagttgagaagatcatgcagtctagctctgaagttggatatgatgcgatggcaggagacttcgtaaacatggtcgagaaaggtataatcgatccaacaaaggttgtgaggaccgcactcctagacgcagccggtgtagcaagtctgctgacaacggctgaggtggtcgtaacagagattccgaaagaggaaaaagacccgggtatgggtgccatgggcggaatggggggtggaatgggtggcggtatgttctag

SEQ ID NO: 125904 - DNA, 177 bp, Artificial Sequence
  derived and/or modified sequence
atgttacgactgcccacagtatttcggcagatgcgcccagtctctcgggtccttgccccacatctgactcgtgcatatgccaaggacgtgaagttcggagccgacgcaagagcccttatgctgcaaggcgtggacctcctggcagatgctgtagctgtgactatgggcccaaagtag

SEQ ID NO: 125905 - DNA, 285 bp, Artificial Sequence
  derived and/or modified sequence
atgttgagattgccgacagtcttcagacaaatgcgtcctgtttcccgcgtgctggcaccccatctgacccgtgcgtatgcaaaggatgtcaaattcggggctgacgcgagggcacttatgttgcaaggcgtggatctcctggctgatgctgtagccgtgaccatgggacccaagggaagaacagtcatcatcgagcagagctggggttctccgaaggtaaccaaggacggtgtgaccgtcgcgaagtctattgatctgaaggacaagtataagaacataggctag

SEQ ID NO: 125906 - DNA, 705 bp, Artificial Sequence
  derived and/or modified sequence
atgcttcgcctacccaccgtgttccgacagatgaggcccgtaagccgcgtgctggcccctcatctgacgcgtgcctacgccaaggatgtaaaattcggcgctgacgccagagctcttatgctgcaaggagtggacctgttggctgacgcagttgctgtaacaatgggccctaagggtaggaccgtgatcattgaacagtcttggggcagccccaaggttacaaaagatggcgtaactgtggccaagagcatagacctgaaggacaagtataagaatattggcgctaagctcgtccaggacgtagcgaataatacaaatgaagaagcaggagacggcaccacgacagccactgtgctagcgcgttcaattgccaaggaaggctttgagaaaatctcgaagggcgctaaccctgtagaaatacgcaggggcgttatgttggcggtcgatgccgtcatagccgaactgaagaaacagtctaaaccagtgaccacccccgaagagattgcgcaggtagccaccataagtgccaatggggacaaggagatcggaaacatcatatctgacgcgatgaagaaagttggcagaaagggtgtcataacagacggaaaaaccttgaacgatgagcttgagatcatcgaggggatgaaattcgaccggggttacatttctccctattttataaacaccagcaaagggaagaattag

SEQ ID NO: 125907 - DNA, 252 bp, Artificial Sequence
  derived and/or modified sequence
atgcttcgccttccaaccgtctttcggcaaatgaggcccgtttctcgggtgctggccccacacctgacacgggcttatgcaaaggacgttaagtttggcgcagatgcacgggcactcatgctgcagggggtggacctgcttgcagatgccgtggccgtgacaatgggacctaaaggaagaacggtgattattgaacaaagctggggttcccccaaggtgacgaaggacggcgtcacagttgctaagtcctag

SEQ ID NO: 125908 - DNA, 666 bp, Artificial Sequence
  derived and/or modified sequence
atgctgagattacccacggtcttcagacagatgagaccggtctccagagttttggcaccccaccttacacgcgcttatgccaaggatgtgaagttcggggctgacgccagggctctcatgttgcagggtgttgatcttctcgccgacgcagtggctgtgactatggggcctaagggcagaaccgtcatcattgagcagtcctggggctcgcctaaagtgacgaaagacggtgtgaccgtggccaagtccatcgatctgaaagacaagtacaaaaatatcggcgctaaattagtgcaggacgtcgcgaacaatacaaacgaagaggccggtgacggaactacgaccgctactgtgctggcacgctccattgcaaaagaaggatttgagaagattagtaagggggctaatcccgtggaaattcggagaggcgtgatgctcgcagtcgacgctgttatcgcagagctgaagaaacagagtaagcctgtaacaaccccggaggaaatcgctcaggtggcgaccattagcgccaacggcgataaggaaattgggaacatcataagtgacgctatgaagaaagtgggtcgcaagggagtgatcaccgtgaaagacggcaaaaccctgaacgatgagttggagatcatcgagggcatgaaatttgaccggtag

SEQ ID NO: 125909 - DNA, 738 bp, Artificial Sequence
  derived and/or modified sequence
atgctggcggtagatgccgtgattgccgagctgaagaaacagtccaagcccgtaacgacacctgaggagatcgctcaggttgcaaccattagcgcgaatggggataaggaaataggcaatatcatttctgatgctatgaagaaagtcggcaggaagggtgtgataacagtaaaggacggtaagactttgaacgatgagttggagatcatcgagggcatgaagtttgaccgcggatatatatctccttatttcatcaacacaagcaagggacagaagtgcgaatttcaggatgcttatgtgcttcttagcgaaaagaaaatctcgtccattcagagtatcgtcccggcattggaaattgcaaacgcccatcggaagcctctcgtgattattgccgaggatgttgacggagaggcattgagcacgcttgtgctaaataggctcaaagttggccttcaggtggtggccgtgaaggcccctgggtttggcgataacaggaagaatcaactgaaagacatggctatcgctacgggaggcgcagtgtttggcgaggaaggcctaacactcaacctcgaggacgtgcaaccccacgacctgggcaaggtgggcgaagtgatagtcaccaaagacgacgccatgctgctcaagggtaagggagataaagcccagatagagaagcggatacaggagatcatagaacagctcgatgtcaccacgtctgagtatgaaaaagagaattag

SEQ ID NO: 125910 - DNA, 477 bp, Artificial Sequence
  derived and/or modified sequence
atgctgcgccttcccaccgtttttcgccagatgcgacccgtgtcgcgtgtcttagcccctcatctcactcgagcctacgcaaaggatgtgaagttcggggctgacgccagggccctcatgctgcaaggggtagatctgctcgctgatgccgtggccgtgaccatgggccctaaggggaggactgtgatcatcgagcaatcctggggtagtcctaaggttactaaagatggcgtaacagtcgctaaaagcattgatctgaaggacaagtataaaaatatcggagcaaagttggttcaagatgtggctaacaataccaatgaggaagcaggagacggtacgactaccgccaccgtgctggccagaagtattgctaaggaaggttttgaaaagatttccaagggcgcaaatccagtcgaaattagacgtggtcgtaacgtgtgctgccatcactctgtgctgaacttttcagtcctctag

SEQ ID NO: 125911 - DNA, 1722 bp, Artificial Sequence
  derived and/or modified sequence
atgctgagactgcccaccgtgttcagacagatgagacccgtgagcagagtgctggccccccacctgaccagagcctacgccaaggacgtgaagttcggcgccgacgccagagccctgatgctgcagggcgtggacctgctggccgacgccgtggccgtgaccatgggccccaagggcagaaccgtgatcatcgagcagagctggggcagccccaaggtgaccaaggacggcgtgaccgtggccaagagcatcgacctgaaggacaagtacaagaacatcggcgccaagctggtgcaggacgtggccaacaacaccaacgaggaggccggcgacggcaccaccaccgccaccgtgctggccagaagcatcgccaaggagggcttcgagaagatcagcaagggcgccaaccccgtggagatcagaagaggcgtgatgctggccgtggacgccgtgatcgccgagctgaagaagcagagcaagcccgtgaccacccccgaggagatcgcccaggtggccaccatcagcgccaacggcgacaaggagatcggcaacatcatcagcgacgccatgaagaaggtgggcagaaagggcgtgatcaccgtgaaggacggcaagaccctgaacgacgagctggagatcatcgagggcatgaagttcgacagaggctacatcagcccctacttcatcaacaccagcaagggccagaagtgcgagttccaggacgcctacgtgctgctgagcgagaagaagatcagcagcatccagagcatcgtgcccgccctggagatcgccaacgcccacagaaagcccctggtgatcatcgccgaggacgtggacggcgaggccctgagcaccctggtgctgaacagactgaaggtgggcctgcaggtggtggccgtgaaggcccccggcttcggcgacaacagaaagaaccagctgaaggacatggccatcgccaccggcggcgccgtgttcggcgaggagggcctgaccctgaacctggaggacgtgcagccccacgacctgggcaaggtgggcgaggtgatcgtgaccaaggacgacgccatgctgctgaagggcaagggcgacaaggcccagatcgagaagagaatccaggagatcatcgagcagctggacgtgaccaccagcgagtacgagaaggagaagctgaacgagagactggccaagctgagcgacggcgtggccgtgctgaaggtgggcggcaccagcgacgtggaggtgaacgagaagaaggacagagtgaccgacgccctgaacgccaccagagccgccgtggaggagggcatcgtgctgggcggcggctgcgccctgctgagatgcatccccgccctggacagcctgacccccgccaacgaggaccagaagatcggcatcgagatcatcaagagaaccctgaagatccccgccatgaccatcgccaagaacgccggcgtggagggcagcctgatcgtggagaagatcatgcagagcagcagcgaggtgggctacgacgccatggccggcgacttcgtgaacatggtggagaagggcatcatcgaccccaccaaggtggtgagaaccgccctgctggacgccgccggcgtggccagcctgctgaccaccgccgaggtggtggtgaccgagatccccaaggaggagaaggaccccggcatgggcgccatgggcggcatgggcggcggcatgggcggcggcatgttctag

SEQ ID NO: 125912 - DNA, 177 bp, Artificial Sequence
  derived and/or modified sequence
atgctgagactgcccaccgtgttcagacagatgagacccgtgagcagagtgctggccccccacctgaccagagcctacgccaaggacgtgaagttcggcgccgacgccagagccctgatgctgcagggcgtggacctgctggccgacgccgtggccgtgaccatgggccccaagtag

SEQ ID NO: 125913 - DNA, 285 bp, Artificial Sequence
  derived and/or modified sequence
atgctgagactgcccaccgtgttcagacagatgagacccgtgagcagagtgctggccccccacctgaccagagcctacgccaaggacgtgaagttcggcgccgacgccagagccctgatgctgcagggcgtggacctgctggccgacgccgtggccgtgaccatgggccccaagggcagaaccgtgatcatcgagcagagctggggcagccccaaggtgaccaaggacggcgtgaccgtggccaagagcatcgacctgaaggacaagtacaagaacatcggctag

SEQ ID NO: 125914 - DNA, 705 bp, Artificial Sequence
  derived and/or modified sequence
atgctgagactgcccaccgtgttcagacagatgagacccgtgagcagagtgctggccccccacctgaccagagcctacgccaaggacgtgaagttcggcgccgacgccagagccctgatgctgcagggcgtggacctgctggccgacgccgtggccgtgaccatgggccccaagggcagaaccgtgatcatcgagcagagctggggcagccccaaggtgaccaaggacggcgtgaccgtggccaagagcatcgacctgaaggacaagtacaagaacatcggcgccaagctggtgcaggacgtggccaacaacaccaacgaggaggccggcgacggcaccaccaccgccaccgtgctggccagaagcatcgccaaggagggcttcgagaagatcagcaagggcgccaaccccgtggagatcagaagaggcgtgatgctggccgtggacgccgtgatcgccgagctgaagaagcagagcaagcccgtgaccacccccgaggagatcgcccaggtggccaccatcagcgccaacggcgacaaggagatcggcaacatcatcagcgacgccatgaagaaggtgggcagaaagggcgtgatcaccgacggcaagaccctgaacgacgagctggagatcatcgagggcatgaagttcgacagaggctacatcagcccctacttcatcaacaccagcaagggcaagaactag

SEQ ID NO: 125915 - DNA, 252 bp, Artificial Sequence
  derived and/or modified sequence
atgctgagactgcccaccgtgttcagacagatgagacccgtgagcagagtgctggccccccacctgaccagagcctacgccaaggacgtgaagttcggcgccgacgccagagccctgatgctgcagggcgtggacctgctggccgacgccgtggccgtgaccatgggccccaagggcagaaccgtgatcatcgagcagagctggggcagccccaaggtgaccaaggacggcgtgaccgtggccaagagctag

SEQ ID NO: 125916 - DNA, 666 bp, Artificial Sequence
  derived and/or modified sequence
atgctgagactgcccaccgtgttcagacagatgagacccgtgagcagagtgctggccccccacctgaccagagcctacgccaaggacgtgaagttcggcgccgacgccagagccctgatgctgcagggcgtggacctgctggccgacgccgtggccgtgaccatgggccccaagggcagaaccgtgatcatcgagcagagctggggcagccccaaggtgaccaaggacggcgtgaccgtggccaagagcatcgacctgaaggacaagtacaagaacatcggcgccaagctggtgcaggacgtggccaacaacaccaacgaggaggccggcgacggcaccaccaccgccaccgtgctggccagaagcatcgccaaggagggcttcgagaagatcagcaagggcgccaaccccgtggagatcagaagaggcgtgatgctggccgtggacgccgtgatcgccgagctgaagaagcagagcaagcccgtgaccacccccgaggagatcgcccaggtggccaccatcagcgccaacggcgacaaggagatcggcaacatcatcagcgacgccatgaagaaggtgggcagaaagggcgtgatcaccgtgaaggacggcaagaccctgaacgacgagctggagatcatcgagggcatgaagttcgacagatag

SEQ ID NO: 125917 - DNA, 738 bp, Artificial Sequence
  derived and/or modified sequence
atgctggccgtggacgccgtgatcgccgagctgaagaagcagagcaagcccgtgaccacccccgaggagatcgcccaggtggccaccatcagcgccaacggcgacaaggagatcggcaacatcatcagcgacgccatgaagaaggtgggcagaaagggcgtgatcaccgtgaaggacggcaagaccctgaacgacgagctggagatcatcgagggcatgaagttcgacagaggctacatcagcccctacttcatcaacaccagcaagggccagaagtgcgagttccaggacgcctacgtgctgctgagcgagaagaagatcagcagcatccagagcatcgtgcccgccctggagatcgccaacgcccacagaaagcccctggtgatcatcgccgaggacgtggacggcgaggccctgagcaccctggtgctgaacagactgaaggtgggcctgcaggtggtggccgtgaaggcccccggcttcggcgacaacagaaagaaccagctgaaggacatggccatcgccaccggcggcgccgtgttcggcgaggagggcctgaccctgaacctggaggacgtgcagccccacgacctgggcaaggtgggcgaggtgatcgtgaccaaggacgacgccatgctgctgaagggcaagggcgacaaggcccagatcgagaagagaatccaggagatcatcgagcagctggacgtgaccaccagcgagtacgagaaggagaactag

SEQ ID NO: 125918 - DNA, 477 bp, Artificial Sequence
  derived and/or modified sequence
atgctgagactgcccaccgtgttcagacagatgagacccgtgagcagagtgctggccccccacctgaccagagcctacgccaaggacgtgaagttcggcgccgacgccagagccctgatgctgcagggcgtggacctgctggccgacgccgtggccgtgaccatgggccccaagggcagaaccgtgatcatcgagcagagctggggcagccccaaggtgaccaaggacggcgtgaccgtggccaagagcatcgacctgaaggacaagtacaagaacatcggcgccaagctggtgcaggacgtggccaacaacaccaacgaggaggccggcgacggcaccaccaccgccaccgtgctggccagaagcatcgccaaggagggcttcgagaagatcagcaagggcgccaaccccgtggagatcagaagaggcagaaacgtgtgctgccaccacagcgtgctgaacttcagcgtgctgtag

SEQ ID NO: 125919 - protein, 102 aa, Artificial Sequence
  derived and/or modified sequence
MAGQAFRKFLPLFDRVLVERSAAETVTKGGIMLPEKSQGKVLQATVVAVGSGSKGKGGEIQPVSVKVGDKVLLPEYGGTKVVLDDKDYFLFRDGDILGKYVD

SEQ ID NO: 125920 - protein, 101 aa, Artificial Sequence
  derived and/or modified sequence
MAGQAFRKFLPLFDRVLVERSAAETVTKGGIMLPEKSQGKVLQATVVAVGSGSKGKGGEIQPVSVKVGDKVLLPEYGGTKVVLDDKVCKLNNSKKKSDICN

SEQ ID NO: 125921 - protein, 47 aa, Artificial Sequence
  derived and/or modified sequence
MGGEIQPVSVKVGDKVLLPEYGGTKVVLDDKDYFLFRDGDILGKYVD

SEQ ID NO: 125922 - DNA, 306 bp, Artificial Sequence
  derived and/or modified sequence
atggctggacaagccttcagaaaatttctcccactgtttgacagagttctcgtagagcggtcggccgccgagactgtgacaaagggagggatcatgctccccgagaaatcccagggcaaggtgctgcaggccaccgtggtagcggtggggtccggctctaagggcaaaggcggcgaaatacaacctgttagtgtgaaggtgggcgacaaagtgcttctgccggagtacgggggcaccaaggtagttctcgatgacaaagtctgtaaactcaacaattctaaaaaaaaatccgatatctgtaactag

SEQ ID NO: 125923 - DNA, 144 bp, Artificial Sequence
  derived and/or modified sequence
atggggggagagatccagcccgttagtgttaaggtgggagacaaggtgctgctgcccgagtacggaggcaccaaagtggtgctggatgataaggactactttctcttccgagatggggacattctcggaaagtatgtcgattag

SEQ ID NO: 125924 - DNA, 309 bp, Artificial Sequence
  derived and/or modified sequence
atggcaggtcaggcctttcgcaagttcttgcccctcttcgatcgggttctggttgaaaggagtgctgcagaaacagttaccaagggcggtattatgctgcccgagaaatctcagggaaaggtactgcaggccacagtcgtcgccgtgggatcggggtccaaaggaaaaggcggagaaatccagccggtgtccgtcaaggtgggggacaaagtcttacttcctgagtacggcggaaccaaggttgttctggacgacaaggactattttctcttccgggatggcgatatactgggtaaatatgtggactag

SEQ ID NO: 125925 - DNA, 950 bp, Artificial Sequence
  derived and/or modified sequence
cctacccgcgcagggtgtgctagcgcgctcagccctctccggccggcttagtctagttcccgggcctcgctcggttccagaactttccagaaaatgccgcgctccctacggctcaagggtcaaatcgcgtcatttccgggaggggacgaaggggtagttctttcacctcggctgggcgcctagaaaagcctagaaacagctccttttttcttccgcctccgagtcttcgcgtcagcgtcctgcgcagggcccttggggcgaatcgcggtgcgcgtcggggcgaccgccctccctccctgggaggggcgagggggctagcggcgaccgctggggcgagcgcgcctgcgcgctgggtgattttttcacgtgtcgccagggccggactgcgagtctctttgcggcgctacactagagcagagtacgagtctgaggcggagggagtaatggcaggacaagcgtttagaaagtttcttccactctttgaccgagtattggttgaaaggagtgctgctgaaactgtaaccaaaggaggcattatgcttccagaaaaatctcaaggaaaagtattgcaagcaacagtagtcgctgttggatcgggttctaaaggaaagggtggagagattcaaccagttagcgtgaaagttggagataaagttcttctcccagaatatggaggcaccaaagtagttctagatgacaaggattatttcctatttagagatggtgacattcttggaaagtacgtagactgaaataagtcactattgaaatggcatcaacatgatgctgcccattccactgaagttctgaaatctttcgtcatgtaaataatttccatatttctcttttataataaactaatgataactaatgacatccagtgtctccaaaattgtttccttgtactgatataaacacttccaaataaaaatatgtaaatgagtggttaa

SEQ ID NO: 125926 - DNA, 570 bp, Artificial Sequence
  derived and/or modified sequence
gcgagtctctttgcggcgctacactagagcagagtacgagtctgaggcggagggagtaatggcaggacaagcgtttagaaagtttcttccactctttgaccgagtattggttgaaaggagtgctgctgaaactgtaaccaaaggaggcattatgcttccagaaaaatctcaaggaaaagtattgcaagcaacagtagtcgctgttggatcgggttctaaaggaaagggtggagagattcaaccagttagcgtgaaagttggagataaagttcttctcccagaatatggaggcaccaaagtagttctagatgacaaggtgtgtaaacttaataattctaaaaagaagtcagatatttgcaattagttgtcttaactaatggtttttttcacttgcaggattatttcctatttagagatggtgacattcttggaaagtacgtagactgaaataagtcactattgaaatggcatcaacatgatgctgcccattccactgaagttctgaaatctttcgtcatgtaaataatttccatatttctcttttataataaactaatgataactaatgac

SEQ ID NO: 125927 - DNA, 478 bp, Artificial Sequence
  derived and/or modified sequence
cgaaggggtagttctttcacctcggctgggcgcctagaaaagcctagaaacagctccttttttcttccgcctccgagtcttcgcgtcagcgtcctgcgcagggcccttggggcgaatcgcggtgcgcgtcggggcgaccgccctccctccctgggaggggcgagggggctagcggcgaccgctggggcgagcgcgcctgcgcgctgggtgattttttcacgtgtcgccagggccggactgcgagtctctttgcggcgctacactagagcagagtacgagtctgaggcggagggagtaatgggtggagagattcaaccagttagcgtgaaagttggagataaagttcttctcccagaatatggaggcaccaaagtagttctagatgacaaggattatttcctatttagagatggtgacattcttggaaagtacgtagactgaaataagtcactattgaaatggcatcaacatgatgctg

SEQ ID NO: 125928 - DNA, 306 bp, Artificial Sequence
  derived and/or modified sequence
atggccggccaggccttcaggaagttcctgcccctgtttgacagagtgctggtggagaggtctgctgctgagaccgtgaccaagggcggcatcatgctgcctgagaagagccagggcaaggtgctgcaggccaccgtggtggccgtgggcagcggcagcaagggcaagggcggggagatccagcctgtgtctgtgaaggtgggggacaaggtgctgctgcctgaatatggaggcaccaaggtggtgctggatgacaaggtgtgcaagctgaacaacagcaagaagaagagtgacatctgcaactag

SEQ ID NO: 125929 - DNA, 144 bp, Artificial Sequence
  derived and/or modified sequence
atgggcggggagatccagcctgtgtctgtgaaggtgggggacaaggtgctgctgcctgaatatggaggcaccaaggtggtgctggatgacaaggactacttcctgttcagagatggagacatcctgggcaagtatgtggactag

SEQ ID NO: 125930 - DNA, 309 bp, Artificial Sequence
  derived and/or modified sequence
atggccggccaggccttcaggaagttcctgcccctgtttgacagagtgctggtggagaggtctgctgctgagaccgtgaccaagggcggcatcatgctgcctgagaagagccagggcaaggtgctgcaggccaccgtggtggccgtgggcagcggcagcaagggcaagggcggggagatccagcctgtgtctgtgaaggtgggggacaaggtgctgctgcctgaatatggaggcaccaaggtggtgctggatgacaaggactacttcctgttcagagatggagacatcctgggcaagtatgtggactag

SEQ ID NO: 125931 - DNA, 306 bp, Artificial Sequence
  derived and/or modified sequence
atggccggccaggccttccggaagttcctgcccctgttcgaccgggtcctggtggagaggtctgccgcagagacagttaccaagggcggcattatgctgcctgagaaatctcagggaaaggtgctacaggcaaccgtggtcgccgtgggttctggttctaaaggaaaggggggtgaaatccagccggtgagtgtcaaggtgggggataaagtgcttcttccagaatatggcggtaccaaggttgtcctcgacgataaggtgtgcaaactgaacaacagcaagaagaagagtgatatttgcaattag

SEQ ID NO: 125932 - DNA, 144 bp, Artificial Sequence
  derived and/or modified sequence
atgggcggcgagatccagcccgtgagcgtgaaggtgggcgacaaggtactgctccccgagtacggtgggacaaaggtggtgttggacgataaggattattttcttttccgcgacggtgatattttgggtaaatatgtggactag

SEQ ID NO: 125933 - DNA, 309 bp, Artificial Sequence
  derived and/or modified sequence
atggccggccaggccttccggaagttcctgcccctgttcgaccgggtgcttgtcgaacgcagcgcagctgagacggtcacgaaaggtggcataatgctccccgagaaaagccagggtaaggtactgcaagccactgtggtggccgtcggcagcggaagcaagggcaagggcggagagatccagccagtaagcgtaaaagtaggcgacaaggtcttgctcccagaatatggcggaacaaaggtagtgctggatgataaggactatttcttgtttcgcgatggagacatcctgggcaaatatgtggactag

SEQ ID NO: 125934 - DNA, 306 bp, Artificial Sequence
  derived and/or modified sequence
atggcgggtcaggctttccgcaaattccttcccctcttcgacagggtgctggtcgaacgcagcgctgcggagacagtcactaaagggggtatcatgctgccagagaagagccagggaaaagtgctgcaggccacggttgtggctgttgggagcggtagcaaggggaaaggtggggagatccagccagtgtctgtgaaagtcggtgacaaggtgctccttcctgagtatggcggaaccaaggtggtgctcgacgataaagtgtgcaagctcaataactcaaagaaaaagagcgacatctgtaactag

SEQ ID NO: 125935 - DNA, 144 bp, Artificial Sequence
  derived and/or modified sequence
atggggggagaaattcagccagtttcagtaaaagtaggcgataaggtcctgctgccagaatatgggggaacaaaagtcgtccttgacgacaaggactacttcctgttccgggacggtgatatccttggcaagtatgtggactag

SEQ ID NO: 125936 - DNA, 309 bp, Artificial Sequence
  derived and/or modified sequence
atggctggtcaggctttcaggaagttcctgcctttattcgaccgcgtcttggtggagcgaagtgccgctgaaacagttacgaaggggggaataatgttacccgagaagagccaaggcaaggtgctgcaagctaccgtagtcgctgtagggagcggttctaaggggaaggggggagaaatccagccagtgtccgtgaaagttggagacaaagtgctgctcccggaatacggagggaccaaagtggtgctggatgacaaagattatttcctcttccgggatggagacattttaggcaaatatgttgactag

SEQ ID NO: 125937 - DNA, 306 bp, Artificial Sequence
  derived and/or modified sequence
atggccggccaggccttcagaaagttcctgcccctgttcgacagagtgctggtggagagaagcgccgccgagaccgtgaccaagggcggcatcatgctgcccgagaagagccagggcaaggtgctgcaggccaccgtggtggccgtgggcagcggcagcaagggcaagggcggcgagatccagcccgtgagcgtgaaggtgggcgacaaggtgctgctgcccgagtacggcggcaccaaggtggtgctggacgacaaggtgtgcaagctgaacaacagcaagaagaagagcgacatctgcaactag

SEQ ID NO: 125938 - DNA, 144 bp, Artificial Sequence
  derived and/or modified sequence
atgggcggcgagatccagcccgtgagcgtgaaggtgggcgacaaggtgctgctgcccgagtacggcggcaccaaggtggtgctggacgacaaggactacttcctgttcagagacggcgacatcctgggcaagtacgtggactag

SEQ ID NO: 125939 - DNA, 309 bp, Artificial Sequence
  derived and/or modified sequence
atggccggccaggccttcagaaagttcctgcccctgttcgacagagtgctggtggagagaagcgccgccgagaccgtgaccaagggcggcatcatgctgcccgagaagagccagggcaaggtgctgcaggccaccgtggtggccgtgggcagcggcagcaagggcaagggcggcgagatccagcccgtgagcgtgaaggtgggcgacaaggtgctgctgcccgagtacggcggcaccaaggtggtgctggacgacaaggactacttcctgttcagagacggcgacatcctgggcaagtacgtggactag

SEQ ID NO: 125940 - DNA, 965 bp, Artificial Sequence
  derived and/or modified sequence
acccgcgcagggtgtgctagcgcgctcagccctctccggccggcttagtctagttcccgggcctcgctcggttccagaactttccagaaaatgccgcgctccctacggctcaagggtcaaatcgcgtcatttccgggaggggacgaaggggtagttctttcacctcggctgggcgcctagaaaagcctagaaacagctccttttttcttccgcctccgagtcttcgcgtcagcgtcctgcgcagggcccttggggcgaatcgcggtgcgcgtcggggcgaccgccctccctccctgggaggggcgagggggctagcggcgaccgctggggcgagcgcgcctgcgcgctgggtgattttttcacgtgtcgccagggccggactgcgagtctctttgcggcgctacactagagcagagtacgagtctgaggcggagggagtaatggcaggacaagcgtttagaaagtttcttccactctttgaccgagtattggttgaaaggagtgctgctgaaactgtaaccaaaggaggcattatgcttccagaaaaatctcaaggaaaagtattgcaagcaacagtagtcgctgttggatcgggttctaaaggaaagggtggagagattcaaccagttagcgtgaaagttggagataaagttcttctcccagaatatggaggcaccaaagtagttctagatgacaaggattatttcctatttagagatggtgacattcttggaaagtacgtagactgaaataagtcactattgaaatggcatcaacatgatgctgcccattccactgaagttctgaaatctttcgtcatgtaaataatttccatatttctcttttataataaactaatgataactaatgacatccagtgtctccaaaattgtttccttgtactgatataaacacttccaaataaaaatatgtaaatgagtggttaatctttaaaaaaaaaaaaa

SEQ ID NO: 125941 - protein, 340 aa, Artificial Sequence
  derived and/or modified sequence
MMCHPLDQLATRTQKKSATSKPPYSFSLLIYMAIEHSPNKCLPVKEIYSWILDHFPYFATAPTGWKNSVRHNLSLNKCFQKVERSHGKVNGKGSLWCVDPEYKPNLIQALKKQPFSSASSQNGSLSPHYLSSVIKQNQVRNLKESDIDAAAAMMLLNTSIEQGILECEKPLPLKTALQKKRSYGNAFHHPSAVRLQESDSLATSIDPKEDHNYSASSMAAQRCASRSSVSSLSSVDEVYEFIPKNSHVGSDGSEGFHSEEDTDVDYEDDPLGDSGYASQPCAKISEKGQSGKKMRKQTCQEIDEELKEAAGSLLHLAGIRTCLGSLISTAKTQNQKQRKK

SEQ ID NO: 125942 - protein, 431 aa, Artificial Sequence
  derived and/or modified sequence
MGPVIGMTPDKRAETPGAEKIAGLSQIYKMGSLPEAVDAARPKATLVDSESADDELTNLNWLHESTNLLTNFSLGSEGLPIVSPLYDIEGDDVPSFGPACYQNPEKKSATSKPPYSFSLLIYMAIEHSPNKCLPVKEIYSWILDHFPYFATAPTGWKNSVRHNLSLNKCFQKVERSHGKVNGKGSLWCVDPEYKPNLIQALKKQPFSSASSQNGSLSPHYLSSVIKQNQVRNLKESDIDAAAAMMLLNTSIEQGILECEKPLPLKTALQKKRSYGNAFHHPSAVRLQESDSLATSIDPKEDHNYSASSMAAQRCASRSSVSSLSSVDEVYEFIPKNSHVGSDGSEGFHSEEDTDVDYEDDPLGDSGYASQPCAKISEKGQSGKKMRKQTCQEIDEELKEAAGSLLHLAGIRTCLGSLISTAKTQNQKQRKK

SEQ ID NO: 125943 - protein, 246 aa, Artificial Sequence
  derived and/or modified sequence
MGPVIGMTPDKRAETPGAEKIAGLSQIYKMGSLPEAVDAARPKATLVDSESADDELTNLNWLHESTNLLTNFSLGSEGLPIVSPLYDIEGDDVPSFGPACYQNPEKKSATSKPPYSFSLLIYMAIEHSPNKCLPVKEIYSWILDHFPYFATAPTGWKNSVRHNLSLNKCFQKVERSHGKVNGKGSLWCVDPEYKPNLIQALKKQPFSSASSQNGSLSPHYLSSVIKQNQVRNLKESDIDAAAAMML

SEQ ID NO: 125944 - DNA, 1023 bp, Artificial Sequence
  derived and/or modified sequence
atgatgtgtcacccactagaccaactggctacacgtacacagaaaaagtcggccacttccaaacctccatatagtttctccctgctgatctacatggccatcgagcattccccgaacaaatgtctgccagtgaaggagatttacagctggattctggaccactttccatatttcgcaaccgcacccaccggctggaaaaactccgtgagacacaatctttctttgaataagtgttttcaaaaggtggagcgtagccacggaaaggtcaacgggaagggttcactctggtgcgtcgaccctgagtataaacctaatctgattcaggccctgaagaaacagccgttttcttccgcctcttcacagaacggatctctgtctccccactacttaagttctgttatcaaacagaaccaagtccgaaatctgaaagagtctgatattgatgccgccgcagcaatgatgctcctcaacaccagtattgagcaaggcatcctggagtgcgagaagcccctgcccctgaagaccgctctacagaaaaagagaagttacggcaatgcctttcaccacccaagtgcggtgagactgcaggaatccgactctctggcaacctctatcgaccctaaggaagaccataactactcagcttcctctatggctgctcagaggtgtgcatccaggtcaagcgtcagtagcctatcctctgttgacgaagtatacgaatttattcctaagaactctcatgtcggttctgatggttctgagggattccacagcgaagaagatacagatgtggactatgaggatgaccccctgggcgactctgggtatgcctcccagccctgcgccaagattagcgagaaggggcaaagcggcaaaaaaatgagaaagcagacttgccaagaaattgatgaagaacttaaggaggctgcaggatctctcctgcatctggccggcataaggacttgccttggttctctcatctctactgctaagacgcagaaccaaaagcagcggaagaaatag

SEQ ID NO: 125945 - DNA, 1296 bp, Artificial Sequence
  derived and/or modified sequence
atggggccagtgattggcatgacgccggataaaagggccgagactcctggagcagagaagattgccggcctgtctcagatttataagatgggctctcttcccgaggccgtggatgctgccaggcctaaggcaaccctagtggacagcgagagtgcggatgacgagctcacgaacctaaattggctacacgaaagcacaaatcttttgacaaacttcagcttggggtctgaagggctgccgatagtgagccccttgtacgatatagagggtgatgacgtgccgagttttggacccgcctgctatcagaacccagagaagaaatccgccacttcaaagccaccttactcgttcagcctcctgatttatatggccattgaacacagtcctaacaagtgcctacctgtgaaggaaatctacagctggatactagaccattttccatacttcgctactgcccccacaggctggaagaactctgtgcgccataacctgtctctgaataagtgctttcagaaggtagaacggagtcatgggaaggtcaacggaaagggctccctctggtgtgttgaccctgagtataaacccaatcttatccaggccctgaaaaagcagccgttcagctctgcgtctagccagaatggaagtctgtctcctcattatcttagttcagttatcaaacaaaaccaggtcaggaatctgaaggagtctgacatcgacgccgccgctgcgatgatgctgctcaataccagcatcgaacaaggcatcctcgagtgtgagaaaccccttcctcttaaaaccgctcttcagaagaaacgatcttacggaaatgcatttcatcacccaagcgcagtgaggctacaggagtctgattccttagcaacgtccatcgaccctaaggaggatcacaattactcggccagctccatggcagcccaaagatgcgcgtcacgaagtagtgtgagctccttgagtagcgttgatgaagtgtacgagttcatccccaaaaattctcatgtaggatcggacggttctgaggggtttcacagtgaagaggacaccgatgttgattacgaagatgaccccctgggagattccggttacgcctctcagccttgtgctaaaattagcgaaaaagggcaaagtgggaagaagatgcggaagcagacttgccaggaaatcgatgaagagttaaaggaggccgccgggagcctcctacatctggcaggaatacgaacctgtcttggttcactgattagtaccgcaaagacccagaaccagaagcaacgcaagaaatag

SEQ ID NO: 125946 - DNA, 741 bp, Artificial Sequence
  derived and/or modified sequence
atgggcccagttatcggaatgacacctgacaagcgggcggagaccccaggcgcagagaagatcgcgggactctcacagatttataaaatgggctctttgcctgaggccgtggatgcagctaggcccaaagctaccctggtggattccgaaagcgcagatgatgagctgaccaacctcaactggctgcacgaaagcaccaacctactgacaaatttctcattgggatctgagggcctccctattgtgagccccttgtacgacattgagggtgatgacgttcccagctttggccccgcttgctaccaaaaccctgagaagaaatcagcaaccagcaaaccgccgtacagcttttcattgttgatctatatggccatcgaacatagtccaaataaatgtttgcctgtgaaagagatctacagctggattctcgatcactttccctatttcgctaccgcacccaccggctggaaaaattccgtccgacacaacttatcactgaacaaatgcttccagaaagtcgaacggtcccatggtaaagtgaatggcaagggtagtctgtggtgtgtggacccagaatataagccaaacttaatacaggccctcaaaaagcaaccattctccagtgcaagcagccagaatggcagcttgtccccacactacctgagctcagttataaaacagaatcaggtgaggaatctcaaagaatcagatatagacgcagcggcggcaatgatgctgtag

SEQ ID NO: 125947 - DNA, 1023 bp, Artificial Sequence
  derived and/or modified sequence
atgatgtgccaccccctggaccagctggccaccaggacccagaagaagagcgccaccagcaagccaccctacagcttcagcctgctgatctacatggccatcgagcacagccccaacaagtgcctgcctgtgaaggagatctacagctggatcctggaccacttcccctactttgccacagcccccaccggctggaagaacagcgtgcgccacaacctgagcctgaacaagtgcttccagaaggtggagaggagccacggcaaggtgaatggcaagggcagcctgtggtgtgtggaccctgagtacaagcccaacctgatccaggccctgaagaagcagcccttcagcagcgccagcagccagaatggcagcctgagcccccactacctgagcagcgtcatcaagcagaaccaggtgaggaacctgaaggagagtgacattgatgctgctgctgccatgatgctgctgaacaccagcattgagcagggcatcctggagtgtgagaagcccctgcccctgaagacagccctgcagaagaagaggagctatggaaatgccttccaccaccccagcgctgtgcggctgcaggagagtgacagcctggccaccagcattgaccccaaggaggaccacaactacagcgccagctccatggccgcccagagatgtgccagccgcagctctgtgagcagcctgagctctgtggatgaggtgtatgagttcatccccaagaacagccacgtgggcagtgatggcagcgagggcttccacagcgaggaggacacagatgtggactatgaagatgaccccctgggggacagcggctacgccagccagccctgtgccaagatcagcgagaagggccagagcggcaagaagatgaggaagcagacctgccaggagattgatgaggagctgaaggaggccgccggcagcctgctgcacctggccggcatccgcacctgcctgggcagcctcatcagcacagccaagacccagaaccagaagcagaggaagaagtag

SEQ ID NO: 125948 - DNA, 1296 bp, Artificial Sequence
  derived and/or modified sequence
atgggccctgtgattggcatgaccccagacaagagagctgagaccccaggagctgagaagattgctggcctgagccagatctacaagatgggcagcctgcctgaggccgtggatgctgcccggcccaaggccaccctggtggacagcgagagcgcagatgatgagctgaccaacctgaactggctgcacgagagcaccaacctgctgaccaacttcagcctgggcagcgagggcctgcccatcgtgagccccctgtatgacatcgagggagatgatgtgcccagctttggacctgcctgctaccagaaccctgagaagaagagcgccaccagcaagccaccctacagcttcagcctgctgatctacatggccatcgagcacagccccaacaagtgcctgcctgtgaaggagatctacagctggatcctggaccacttcccctactttgccacagcccccaccggctggaagaacagcgtgcgccacaacctgagcctgaacaagtgcttccagaaggtggagaggagccacggcaaggtgaatggcaagggcagcctgtggtgtgtggaccctgagtacaagcccaacctgatccaggccctgaagaagcagcccttcagcagcgccagcagccagaatggcagcctgagcccccactacctgagcagcgtcatcaagcagaaccaggtgaggaacctgaaggagagtgacattgatgctgctgctgccatgatgctgctgaacaccagcattgagcagggcatcctggagtgtgagaagcccctgcccctgaagacagccctgcagaagaagaggagctatggaaatgccttccaccaccccagcgctgtgcggctgcaggagagtgacagcctggccaccagcattgaccccaaggaggaccacaactacagcgccagctccatggccgcccagagatgtgccagccgcagctctgtgagcagcctgagctctgtggatgaggtgtatgagttcatccccaagaacagccacgtgggcagtgatggcagcgagggcttccacagcgaggaggacacagatgtggactatgaagatgaccccctgggggacagcggctacgccagccagccctgtgccaagatcagcgagaagggccagagcggcaagaagatgaggaagcagacctgccaggagattgatgaggagctgaaggaggccgccggcagcctgctgcacctggccggcatccgcacctgcctgggcagcctcatcagcacagccaagacccagaaccagaagcagaggaagaagtag

SEQ ID NO: 125949 - DNA, 741 bp, Artificial Sequence
  derived and/or modified sequence
atgggccctgtgattggcatgaccccagacaagagagctgagaccccaggagctgagaagattgctggcctgagccagatctacaagatgggcagcctgcctgaggccgtggatgctgcccggcccaaggccaccctggtggacagcgagagcgcagatgatgagctgaccaacctgaactggctgcacgagagcaccaacctgctgaccaacttcagcctgggcagcgagggcctgcccatcgtgagccccctgtatgacatcgagggagatgatgtgcccagctttggacctgcctgctaccagaaccctgagaagaagagcgccaccagcaagccaccctacagcttcagcctgctgatctacatggccatcgagcacagccccaacaagtgcctgcctgtgaaggagatctacagctggatcctggaccacttcccctactttgccacagcccccaccggctggaagaacagcgtgcgccacaacctgagcctgaacaagtgcttccagaaggtggagaggagccacggcaaggtgaatggcaagggcagcctgtggtgtgtggaccctgagtacaagcccaacctgatccaggccctgaagaagcagcccttcagcagcgccagcagccagaatggcagcctgagcccccactacctgagcagcgtcatcaagcagaaccaggtgaggaacctgaaggagagtgacattgatgctgctgctgccatgatgctgtag

SEQ ID NO: 125950 - DNA, 1023 bp, Artificial Sequence
  derived and/or modified sequence
atgatgtgccaccccctggaccagctggccacccggacccagaagaagtctgctacctctaaaccaccatactcttttagtctgttaatctacatggccatagaacattcacccaataagtgcttgcccgtgaaggagatctattcatggattctcgatcattttccttattttgcaaccgcgcccacaggttggaagaacagcgttaggcataacctcagcctcaacaaatgttttcagaaggttgagcgtagccatgggaaggtaaatggtaaaggatcattatggtgcgtcgatcccgagtacaagcctaatctgatccaggctttgaagaaacagccgttttcatctgcctcatcgcagaatggatccctgagtccacattatcttagctcggtgatcaaacagaatcaggtacggaatctaaaggagtcggacattgatgccgctgcggcaatgatgctgttgaacacttcaatcgaacagggtatcttagaatgcgagaaacctctgccactgaagaccgctctgcaaaagaagcgctcttatgggaatgccttccatcatccgtcggccgttcggctgcaggagtcagacagcctcgcgacatctattgatcccaaggaggatcacaattattctgccagctccatggctgctcagcgctgcgccagcaggagcagtgtctcctcactgagcagtgtagatgaagtttatgagttcatccccaaaaactctcatgttggctcagacggatcagaagggttccactccgaagaagacactgatgttgactacgaggacgacccactgggtgactctggctacgccagccagccctgtgctaagatcagtgagaaaggacagtcagggaagaaaatgcggaagcaaacttgtcaggaaatcgacgaagaattgaaggaggccgccggctctctgctccacctggccggcatccgcacgtgcctcggctctcttatttccaccgcgaagacccagaatcagaaacagcgaaaaaagtag

SEQ ID NO: 125951 - DNA, 1296 bp, Artificial Sequence
  derived and/or modified sequence
atgggccccgtgatcggcatgacccccgacaagcgggccgagacccctggcgcagaaaagattgccggtctgtctcagatttataagatgggcagccttcctgaggccgtggatgccgccaggccaaaggctaccctggtggatagtgagtctgcagatgacgaactgactaatctgaattggctacatgagagtaccaacctcttgacaaatttcagcctcggatccgaggggttgcctattgtaagtcccctttatgatatagagggtgatgacgtgccctcatttggcccagcttgttatcagaatcccgagaaaaagtcggcaaccagcaagccaccctacagcttcagcttgctgatttatatggctatcgagcactccccaaataagtgcctgccggtaaaggaaatctattcatggatactggaccacttcccttatttcgccactgcccccactggctggaaaaacagcgttagacacaacctgtccctgaacaaatgcttccagaaggtcgaacggtcgcacggcaaggtaaacggtaagggaagtttgtggtgcgtggaccccgagtataagccaaaccttatccaggctttaaaaaagcaaccgtttagttctgcctcctcccaaaatggctcactctcaccccactatttaagcagtgtcatcaagcagaaccaagtgcgaaatctgaaggaatcagacatcgacgctgccgccgccatgatgctattgaataccagtatagagcagggcattctggagtgtgaaaaacccctgccattgaaaacagcgcttcagaagaagcgcagctacggaaacgcgttccaccatccttcggccgtgaggctacaggagtcggactcattggcaaccagtatcgacccaaaagaagatcacaattatagtgcttcttccatggctgcacagcgctgtgcatccagatcaagcgtatcatccctctcctctgtggacgaggtatatgagtttattcccaaaaactcgcacgtgggttccgatggcagcgaggggtttcattccgaagaagacacagatgtggactatgaggacgatccactcggcgactctggctacgccagtcaaccctgtgccaagatctcggagaagggtcaatccgggaaaaaaatgcgtaaacagacctgtcaggaaattgacgaggagttgaaggaagcagctggctcacttctgcaccttgccggcattagaacctgtctgggatccctgatcagcaccgccaaaacccagaaccaaaaacaaaggaagaagtag

SEQ ID NO: 125952 - DNA, 741 bp, Artificial Sequence
  derived and/or modified sequence
atgggccccgtgatcggcatgacccccgacaagcgggccgagaccccaggagccgagaaaattgctggtttatcccaaatctacaagatgggatccctgccagaggcagtggatgctgccagaccgaaggctacgctggtggattctgaatcagcagatgacgaactcacaaatctgaactggctgcacgaaagtactaacctgctcacaaactttagcctcggcagcgaaggactccctatcgtatcaccgctttacgacatcgagggagacgacgtaccgtcattcgggcctgcatgttaccagaaccctgaaaagaagagtgcaacatctaagcctccatattctttcagccttttaatctatatggcaatcgaacactctcccaataagtgcctgccggtcaaggagatatacagctggattctcgatcatttcccttatttcgccaccgctcccacaggatggaagaactcagtgcgccataacctgtctcttaacaaatgtttccagaaagtagagcgttcacacggcaaggtcaacggcaaggggtcactttggtgcgttgatccagaatataagccaaacctcatccaggccttgaagaagcagcctttttcatctgcttcttcgcagaacgggagtctgtctccccattacctcagctccgttatcaaacagaaccaggtccgaaacctgaaggaaagtgacatcgacgctgctgctgccatgatgttatag

SEQ ID NO: 125953 - DNA, 1023 bp, Artificial Sequence
  derived and/or modified sequence
atgatgtgccaccccctggaccagctggcaactcggactcagaaaaaaagtgcaaccagcaagccgccttatagtttcagcttgttaatttacatggcaatcgaacactcccctaataagtgcttgcctgttaaagaaatttactcctggatcctggatcattttccttacttcgccacagctcctactggatggaagaattctgtcaggcacaacctgtccttgaataagtgcttccagaaggtggagaggagccacgggaaagtgaacggcaaaggttccctttggtgtgtagatcctgaatacaaaccgaatctgatccaagctcttaaaaagcaacccttctcctccgcatcctcacagaatgggtccctctctccccactacctttccagtgtgatcaagcagaatcaagtgagaaacctcaaggagtctgatattgacgctgctgccgctatgatgctgctgaacacctccatcgagcaggggattctcgaatgtgaaaaacccttgcccttaaaaaccgccctgcagaaaaagagatcctatggaaatgcctttcatcatccgagcgctgtccgccttcaggaaagcgacagtctggctactagtatcgatcccaaggaggaccataactactctgcatcctccatggctgcccagcggtgcgcatctcgcagctccgtgtcatcattaagctccgtggacgaggtgtatgaattcataccaaaaaatagccacgtcggatccgacggctccgagggattccattccgaagaagacacggatgtcgactacgaggacgacccactcggagacagcggctacgcctctcagccctgcgcaaagattagtgagaaagggcagtctggaaaaaagatgcggaagcaaacatgtcaggaaatcgatgaagagcttaaagaggctgcaggcagtctgcttcacctggccggaatccgcacttgtctcggctctctaatctccacagcaaaaactcagaatcaaaagcagaggaagaagtag

SEQ ID NO: 125954 - DNA, 1296 bp, Artificial Sequence
  derived and/or modified sequence
atgggacccgtgatcgggatgactcctgataagcgagcggaaactcctggagccgaaaaaatagcaggcctgagccagatttataagatgggaagtttgccagaggctgtagacgctgccagaccaaaggcgactctagtagacagcgaatcagcggatgatgaactcaccaatctgaactggctgcatgagagcaccaacctgctcactaacttctcactcgggagtgagggactgcccatagtgtcgcccctgtacgatatagagggcgatgatgtgccgtcattcggccctgcctgctaccaaaatccagagaagaaaagtgccacttcaaagcccccatattccttcagcctgctgatatacatggcaatcgaacattcacctaataagtgcctccctgtgaaggaaatctactcgtggatattggatcacttcccttacttcgccaccgctcctaccggctggaagaactcagtgagacacaatctcagtcttaacaagtgtttccaaaaggtagagcgatctcacggcaaggtcaacggcaaggggagcctgtggtgtgtggaccccgagtacaagccaaacctgattcaagccttgaaaaagcagcctttctctagcgcttcatcccagaacgggagcctttcaccgcactacttaagcagtgtaattaagcagaaccaagtgcgcaacctcaaggagagcgatattgacgctgccgctgctatgatgctgcttaatacctccattgagcaaggcatcctggaatgtgaaaagccattaccgctgaagaccgcgcttcagaaaaagcgcagctacgggaatgcgttccatcatccctccgctgttagactgcaggaaagtgactctctcgcaacatctatcgatccgaaggaggaccataactactcagcctcatccatggccgctcaaaggtgcgcgtctcgctcaagcgtaagtagtctgtcctcagtggacgaggtctacgagttcatccccaaaaactcccacgtcggatccgacggcagtgaggggttccactcggaggaagacactgatgtggattacgaagatgatcctcttggagacagtggttacgccagtcagccttgcgctaaaatcagtgagaaaggccagagcggcaaaaaaatgaggaaacaaacctgccaagaaattgacgaggaactcaaggaggccgctgggtcccttttacatttggctgggatccgcacatgcctcggctcactgatctcaacagcaaagacacagaatcaaaaacagcggaaaaagtag

SEQ ID NO: 125955 - DNA, 741 bp, Artificial Sequence
  derived and/or modified sequence
atggggcctgtcatcggaatgactcctgacaagcgcgctgagacacccggtgccgaaaagattgcaggtttaagccaaatctacaaaatgggcagtctccctgaggctgttgacgcggcaaggcccaaggccacattagtggatagcgaaagtgcagacgacgagttaacgaacctcaattggctgcatgagagtaccaacttactcacgaatttcagccttggcagtgagggtctgcctattgtgtctcctttgtatgacatagagggcgacgatgtcccgtcttttgggcctgcatgctaccaaaaccccgagaagaagagtgccacctctaaacctccatacagtttttctcttctgatttacatggccattgaacattccccgaacaaatgcctgcctgtaaaggagatatattcgtggattctagatcacttcccttacttcgcgaccgcgccaacaggctggaagaactctgtgcgtcacaatctctcccttaataagtgcttccagaaggtggagcggtcccacgggaaggtaaatggaaaggggtcactctggtgcgtggaccctgaatacaaaccaaaccttattcaggccctgaaaaagcagccctttagctctgcctctagtcagaacggaagtctgtctccgcactacctgagctctgttatcaagcagaatcaggtgcgaaacctcaaagagtctgatattgacgccgctgccgcaatgatgctgtag

SEQ ID NO: 125956 - DNA, 5461 bp, Artificial Sequence
  derived and/or modified sequence
ggggatgtggtgctgccggggccgccactgcagctgctgctgcctgctggttgccgcgtcttcccggaggcgactgctggaagctgcagggaacagctgcggtgctctgccatattgtgtcttccccggccggtccctcgcctcccggccgagctgacgttggttgaagccatggataacagaacccacagatgcagagggctgactgtacaagtctgtcaaaaaaccaaactgctggttggctaataattggtcactgtatgacttatagtacaggtgatattacttctgattctagatgaactgtaagagtaaatgggtccagtaattggaatgactccagataagagagctgaaaccccaggagctgaaaagattgcaggattaagccagatttacaaaatgggaagcttgcctgaagctgttgatgctgccaggccgaaggccactctagtggacagtgagtcagcagatgatgaactcacaaacttgaactggcttcatgaaagcactaatcttctaacaaacttcagcctcggaagtgagggtcttccaattgttagtccattgtatgacatagagggagatgatgtgccatcctttggaccagcttgctaccagaacccagaaaaaatcagcgacttcaaagcccccatactcctttagtcttctcatttatatggccattgagcactctccaaataaatgtttgcctgtcaaagaaatttatagctggattctggaccattttccatattttgctactgcaccaacaggctggaagaattctgttcgacataatctgtccctgaataaatgttttcagaaagtggaaagaagccatggcaaggttaatggaaaaggttccttatggtgtgttgatccggaatataaacccaatcttatccaggcactgaagaagcaacctttttcttcagcatcttcacaaaatggttctttatcacctcactatttaagctctgtaatcaagcagaaccaggtgcgaaacctcaaagaatctgatattgatgctgctgctgcaatgatgcttttaaatacttctatagaacaaggaattttagaatgtgagaagcctcttcctcttaaaacagcattgcaaaaaaagaggagttacggcaatgcatttcatcatcccagtgctgtacgattacaagagagtgattctttagccaccagcattgatccaaaagaagatcacaattacagtgcaagtagcatggcagcacagcgttgtgcatccaggtctagcgtgtcttccctgtcttctgtggatgaggtatatgaatttatcccaaagaatagtcacgtgggaagtgatggcagtgaaggatttcacagtgaagaagatacagacgttgattatgaagatgatcctcttggagacagtggctatgcatcacagccttgtgcaaaaatctctgaaaaagggcagtcaggcaaaaagatgcgaaaacagacatgtcaagaaattgatgaggagctcaaagaggcagctggatctctgctccaccttgctggaattcgtacatgtttaggttccctaataagtactgcaaagacacaaaatcaaaagcaacggaaaaaatagaaatacttaaagtgtggcaatactctttcacttaattctttacaagggatatcaaagccataatggacttcattagttttagggtagggaagggatactaattacttatttctttcaaaacatttttggtttttggtttttaaaatttttattaaacaattgctgttaggatcatgcctgatcagaaatacatgatgtgaagtcctaaaagcataatttttgtgataaatgtgtccaagatttgaaaatttttatataagaaaatccccagcctctgtcttaaacttgtgggacaaaaatcctttcttctgttaatatgtcagaatgtaagatttggcaactcgataaatttttttcattttcttttccaatctgtaactatagttactgaaccagctaaaaattttgctgatgtatttttcatatacttctctcctgacacgcaatccggtaacataagattgaaatttttttactttgtcttaatttgtttctaattttttttttgttgtcgtgtgagcaaagacaaacataaattgaaaaacatcctgatgtttagaaagtttcttttggttacgtaggtagagaatacaacaaagagttctaagacttagaaaagacaattttgtggtgtcatttcatccaagaacactcccaattcctattagaatggtagctttgaagtgtttttacttcagagatcctgcatagcatttattggggccttttattctttcccaaagtgctttgcaaacattaagttttagccactagctgcctttgttgagtataagttatccagtgagaggatatagccaattaagtgtgttatggagtacacccattttgacacacttgtaataagagaatctttcatttgcctgccatgtgtactgtattatgagaatcttataatcggaatggagtgaaatgaaacattttgagtactgatggcatgttatcatacataaagtaggtcatttaggaaaaaacttctgtccaagctttgtatgaattaaattcataagtataccaaattaaatcttaatagatttaatgcaattttacagacacaataccttcatgaatttcaaaattcatataaaatttgatcttatgcaatacacctttttgaggaggcagtgtaacaacctatagtgccattgatccatgagaaaaagattttctggtactactccaaaagtgctttgactaagtatcttaactatttgaacagtctgcttatatgagacagtttttcatagtatcatttgtataatttgattagattattcagaaacaataggatgctaaactaattcattgtatcttttttttacaatggtggaagcaactttctgaaagttcagtcttatgctacatcctaagtcatagacaatgaccttgttttcattattctgatagattgtatacatatgtacacatacatatacacatatgcacagtcaaggtcatgatgttgatttgctttcagctgtttctgtgattataaagcattttttaagagacaaattttaacttttaatttttattttggcaaaactgtcaaatgagaaaaatgattttaaaaacttttttttcaattgacaagactttaagtcagggataacagtattaatgttctctgttctgtttccatgttaaatttaatttaacctggatagccacattaatgaattggtgctgtcaaaatatagtaatttttaaatttgttaataatgaaaacccttaagcatgcaggatgaggtatttgggttttttttttagatcgatcacatctacagaaaatggctaaaccaagttaacttttattatagacagtgaataaaacaccaaaaacccaaaaatgctttaaccacagtataaataatagattatacacatcatcttaataactatttttaagttatttaccatagcctctgtatagaccttaggaacagtgtttcagtgatctggcaccagtttattttgttctgctgaaattctgtatcacaaatgtgctacctggtttttgtccattagataattactctttataaggaaaggaaagagaagcagagttagttccagctctaatagggatcttcaaagttattttgtcttgatgtatgtaacagtaattctttacatcttttgatttttctcttcctttttattcactcttcccacgaatttaaatgtttaagttatattcatcactagcaaggatgataaacacttgtgcactgaaagctaacagggagaggttacacaatattttacagtttcttaaacataatttaatgcatcaccttccacttgctaacataccaagtcagttattttcaagggaagaaccttttaaattatggtcctccatttactacttccactgagagtatgctctcattcctcaggtgttttgagaaacatgactaataaccacacaattaagtagagtcattccaagtcctatggcctggaaattgtattccctataatatacaaattttcctgtaataaagtcaacttagaaactccaaggaggttacatgttttccaacatatcctaaaaactgtgatataagctaacatataatttgccttacgtcaaaagaatatgttttgttgcagctgattccagtttataatagatccctagtaaaaagctttgattcaacacaattgttcatcttcacatcccaaacagaatcactgtttcttgaatatatatttttgaagtttttttgtgcaatatattactaaatcagttattattttacttttccaaattcagagaaagaaaacagattacctgaattcatggaaaaggtggatcacctccctttttccaccttcaagcctttcctgtcctcatagccagcatgacttcttttaacttggattcctttgtatatagtaaagtttagtatatatatatttttttctttttgctactttctgaggcattatgtaaagggctcatactagatgttcagttaaatatactttagcacaaagtcaaactagagaatgtgttaaggagggaatgtatatgtcttggtagaccaggaggcctttgccagcaatttaagcaacagatgtgaatacttcacaaagctgtaaagaccattgtcttaaatactacaacaacttaacacccttttgtgaagatcacagcatttatctaagaaactgtgaggctttctggtttacatatatcttacaggtgtttttttgtatttttttttttttttagtttgaaatgtgtaagctttgatttaaaccaagtttacttcagtatgttaatgatgtagtaaaaatatttattgaaaggtgaattcgagtattttaatgttatacctgccattttttttcttaaagcatattctttgcatctaactgccagtgccattgtcaaaacttattttttaaatcgttgtacatttcttattaaactaagtgcttaattttaaagtattatgttgccatcatatagtgtataaaaatgtataattgccaattgattgtaactattatttatttttaaatgaaagtgtaagaatgctttctgattcaacaaatttgttatcaaactgtttccttatcctcttttctgatgtagcataaaaattgtcccggtttgagttataactgccagtagatgaccagtcacaagtgaaccacttctcagttgccaatctttgctcatattaaaaacaacttacaaatacttagtttttgtatctaatctctgattattaaaatgtttataaagtttatttttaccaaagagatgcaattcattatgagaaagtattgcataataaattttgttttataactttt

SEQ ID NO: 125957 - DNA, 5408 bp, Artificial Sequence
  derived and/or modified sequence
cgcgtcttcccggaggcgactgctggaagctgcagggaacagctgcggtgctctgccatattgtgtcttccccggccggtccctcgcctcccggccgagctgacgttggttgaagccatggataacagaacccacagatgcagagggctgactgtacaagtctgtcaaaaaaccaaactgctggttggctaataattggtcactgtatgacttatagtacaggtgatattacttctgattctagatgaactgtaagagtaaatgggtccagtaattggaatgactccagataagagagctgaaaccccaggagctgaaaagattgcaggattaagccagatttacaaaatgggaagcttgcctgaagctgttgatgctgccaggccgaaggccactctagtggacagtgagtcagcagatgatgaactcacaaacttgaactggcttcatgaaagcactaatcttctaacaaacttcagcctcggaagtgagggtcttccaattgttagtccattgtatgacatagagggagatgatgtgccatcctttggaccagcttgctaccagaacccagaaaaaaaatcagcgacttcaaagcccccatactcctttagtcttctcatttatatggccattgagcactctccaaataaatgtttgcctgtcaaagaaatttatagctggattctggaccattttccatattttgctactgcaccaacaggctggaagaattctgttcgacataatctgtccctgaataaatgttttcagaaagtggaaagaagccatggcaaggttaatggaaaaggttccttatggtgtgttgatccggaatataaacccaatcttatccaggcactgaagaagcaacctttttcttcagcatcttcacaaaatggttctttatcacctcactatttaagctctgtaatcaagcagaaccaggtgcgaaacctcaaagaatctgatattgatgctgctgctgcaatgatgcttttaaatacttctatagaacaaggaattttagaatgtgagaagcctcttcctcttaaaacagcattgcaaaaaaagaggagttacggcaatgcatttcatcatcccagtgctgtacgattacaagagagtgattctttagccaccagcattgatccaaaagaagatcacaattacagtgcaagtagcatggcagcacagcgttgtgcatccaggtctagcgtgtcttccctgtcttctgtggatgaggtatatgaatttatcccaaagaatagtcacgtgggaagtgatggcagtgaaggatttcacagtgaagaagatacagacgttgattatgaagatgatcctcttggagacagtggctatgcatcacagccttgtgcaaaaatctctgaaaaagggcagtcaggcaaaaagatgcgaaaacagacatgtcaagaaattgatgaggagctcaaagaggcagctggatctctgctccaccttgctggaattcgtacatgtttaggttccctaataagtactgcaaagacacaaaatcaaaagcaacggaaaaaatagaaatacttaaagtgtggcaatactctttcacttaattctttacaagggatatcaaagccataatggacttcattagttttagggtagggaagggatactaattacttatttctttcaaaacatttttggtttttggtttttaaaatttttattaaacaattgctgttaggatcatgcctgatcagaaatacatgatgtgaagtcctaaaagcataatttttgtgataaatgtgtccaagatttgaaaatttttatataagaaaatccccagcctctgtcttaaacttgtgggacaaaaatcctttcttctgttaatatgtcagaatgtaagatttggcaactcgataaatttttttcattttcttttccaatctgtaactatagttactgaaccagctaaaaattttgctgatgtatttttcatatacttctctcctgacacgcaatccggtaacataagattgaaatttttttactttgtcttaatttgtttctaattttttttttgttgtcgtgtgagcaaagacaaacataaattgaaaaacatcctgatgtttagaaagtttcttttggttacgtaggtagagaatacaacaaagagttctaagacttagaaaagacaattttgtggtgtcatttcatccaagaacactcccaattcctattagaatggtagctttgaagtgtttttacttcagagatcctgcatagcatttattggggccttttattctttcccaaagtgctttgcaaacattaagttttagccactagctgcctttgttgagtataagttatccagtgagaggatatagccaattaagtgtgttatggagtacacccattttgacacacttgtaataagagaatctttcatttgcctgccatgtgtactgtattatgagaatcttataatcggaatggagtgaaatgaaacattttgagtactgatggcatgttatcatacataaagtaggtcatttaggaaaaaacttctgtccaagctttgtatgaattaaattcataagtataccaaattaaatcttaatagatttaatgcaattttacagacacaataccttcatgaatttcaaaattcatataaaatttgatcttatgcaatacacctttttgaggaggcagtgtaacaacctatagtgccattgatccatgagaaaaagattttctggtactactccaaaagtgctttgactaagtatcttaactatttgaacagtctgcttatatgagacagtttttcatagtatcatttgtataatttgattagattattcagaaacaataggatgctaaactaattcattgtatcttttttttacaatggtggaagcaactttctgaaagttcagtcttatgctacatcctaagtcatagacaatgaccttgttttcattattctgatagattgtatacatatgtacacatacatatacacatatgcacagtcaaggtcatgatgttgatttgctttcagctgtttctgtgattataaagcattttttaagagacaaattttaacttttaatttttattttggcaaaactgtcaaatgagaaaaatgattttaaaaacttttttttcaattgacaagactttaagtcagggataacagtattaatgttctctgttctgtttccatgttaaatttaatttaacctggatagccacattaatgaattggtgctgtcaaaatatagtaatttttaaatttgttaataatgaaaacccttaagcatgcaggatgaggtatttgggttttttttttagatcgatcacatctacagaaaatggctaaaccaagttaacttttattatagacagtgaataaaacaccaaaaacccaaaaatgctttaaccacagtataaataatagattatacacatcatcttaataactatttttaagttatttaccatagcctctgtatagaccttaggaacagtgtttcagtgatctggcaccagtttattttgttctgctgaaattctgtatcacaaatgtgctacctggtttttgtccattagataattactctttataaggaaaggaaagagaagcagagttagttccagctctaatagggatcttcaaagttattttgtcttgatgtatgtaacagtaattctttacatcttttgatttttctcttcctttttattcactcttcccacgaatttaaatgtttaagttatattcatcactagcaaggatgataaacacttgtgcactgaaagctaacagggagaggttacacaatattttacagtttcttaaacataatttaatgcatcaccttccacttgctaacataccaagtcagttattttcaagggaagaaccttttaaattatggtcctccatttactacttccactgagagtatgctctcattcctcaggtgttttgagaaacatgactaataaccacacaattaagtagagtcattccaagtcctatggcctggaaattgtattccctataatatacaaattttcctgtaataaagtcaacttagaaactccaaggaggttacatgttttccaacatatcctaaaaactgtgatataagctaacatataatttgccttacgtcaaaagaatatgttttgttgcagctgattccagtttataatagatccctagtaaaaagctttgattcaacacaattgttcatcttcacatcccaaacagaatcactgtttcttgaatatatatttttgaagtttttttgtgcaatatattactaaatcagttattattttacttttccaaattcagagaaagaaaacagattacctgaattcatggaaaaggtggatcacctccctttttccaccttcaagcctttcctgtcctcatagccagcatgacttcttttaacttggattcctttgtatatagtaaagtttagtatatatatatttttttctttttgctactttctgaggcattatgtaaagggctcatactagatgttcagttaaatatactttagcacaaagtcaaactagagaatgtgttaaggagggaatgtatatgtcttggtagaccaggaggcctttgccagcaatttaagcaacagatgtgaatacttcacaaagctgtaaagaccattgtcttaaatactacaacaacttaacacccttttgtgaagatcacagcatttatctaagaaactgtgaggctttctggtttacatatatcttacaggtgtttttttgtatttttttttttttttagtttgaaatgtgtaagctttgatttaaaccaagtttacttcagtatgttaatgatgtagtaaaaatatttattgaaaggtgaattcgagtattttaatgttatacctgccattttttttcttaaagcatattctttgcatctaactgccagtgccattgtcaaaacttattttttaaatcgttgtacatttcttattaaactaagtgcttaattttaaagtattatgttgccatcatatagtgtataaaaatgtataattgccaattgattgtaactattatttatttttaaatgaaagtgtaagaatgctttctgattcaacaaatttgttatcaaactgtttccttatcctcttttctgatgtagcataaaaattgtcccggtttgagttataactgccagtagatgaccagtcacaagtgaaccacttctcagttgccaatctttgctcatattaaaaacaacttacaaatacttagtttttgtatctaatctctgattattaaaatgtttataaagtttatttttaccaaagagatgcaattcattatgagaaagtattgcataataaattttgttttataacttt

SEQ ID NO: 125958 - DNA, 932 bp, Artificial Sequence
  derived and/or modified sequence
gggaggaagcgagcgggagggggatgtggtgctgccggggccgccactgcagctgctgctgcctgctggttgccgcgtcttcccggaggcgactgctggaagctgcagggaacagctgcggtgctctgccatattgtgtcttccccggccggtccctcgcctcccggccgagctgacgaactgtaagagtaaatgggtccagtaattggaatgactccagataagagagctgaaaccccaggagctgaaaagattgcaggattaagccagatttacaaaatgggaagcttgcctgaagctgttgatgctgccaggccgaaggccactctagtggacagtgagtcagcagatgatgaactcacaaacttgaactggcttcatgaaagcactaatcttctaacaaacttcagcctcggaagtgagggtcttccaattgttagtccattgtatgacatagagggagatgatgtgccatcctttggaccagcttgctaccagaacccagaaaaaaaatcagcgacttcaaagcccccatactcctttagtcttctcatttatatggccattgagcactctccaaataaatgtttgcctgtcaaagaaatttatagctggattctggaccattttccatattttgctactgcaccaacaggctggaagaattctgttcgacataatctgtccctgaataaatgttttcagaaagtggaaagaagccatggcaaggttaatggaaaaggttccttatggtgtgttgatccggaatataaacccaatcttatccaggcactgaagaagcaacctttttcttcagcatcttcacaaaatggttctttatcacctcactatttaagctctgtaatcaagcagaaccaggtgcgaaacctcaaagaatctgatattgatgctgctgctgcaatgatgctttt

SEQ ID NO: 125959 - DNA, 1023 bp, Artificial Sequence
  derived and/or modified sequence
atgatgtgccaccccctggaccagctggccaccagaacccagaagaagagcgccaccagcaagcccccctacagcttcagcctgctgatctacatggccatcgagcacagccccaacaagtgcctgcccgtgaaggagatctacagctggatcctggaccacttcccctacttcgccaccgcccccaccggctggaagaacagcgtgagacacaacctgagcctgaacaagtgcttccagaaggtggagagaagccacggcaaggtgaacggcaagggcagcctgtggtgcgtggaccccgagtacaagcccaacctgatccaggccctgaagaagcagcccttcagcagcgccagcagccagaacggcagcctgagcccccactacctgagcagcgtgatcaagcagaaccaggtgagaaacctgaaggagagcgacatcgacgccgccgccgccatgatgctgctgaacaccagcatcgagcagggcatcctggagtgcgagaagcccctgcccctgaagaccgccctgcagaagaagagaagctacggcaacgccttccaccaccccagcgccgtgagactgcaggagagcgacagcctggccaccagcatcgaccccaaggaggaccacaactacagcgccagcagcatggccgcccagagatgcgccagcagaagcagcgtgagcagcctgagcagcgtggacgaggtgtacgagttcatccccaagaacagccacgtgggcagcgacggcagcgagggcttccacagcgaggaggacaccgacgtggactacgaggacgaccccctgggcgacagcggctacgccagccagccctgcgccaagatcagcgagaagggccagagcggcaagaagatgagaaagcagacctgccaggagatcgacgaggagctgaaggaggccgccggcagcctgctgcacctggccggcatcagaacctgcctgggcagcctgatcagcaccgccaagacccagaaccagaagcagagaaagaagtag

SEQ ID NO: 125960 - DNA, 1296 bp, Artificial Sequence
  derived and/or modified sequence
atgggccccgtgatcggcatgacccccgacaagagagccgagacccccggcgccgagaagatcgccggcctgagccagatctacaagatgggcagcctgcccgaggccgtggacgccgccagacccaaggccaccctggtggacagcgagagcgccgacgacgagctgaccaacctgaactggctgcacgagagcaccaacctgctgaccaacttcagcctgggcagcgagggcctgcccatcgtgagccccctgtacgacatcgagggcgacgacgtgcccagcttcggccccgcctgctaccagaaccccgagaagaagagcgccaccagcaagcccccctacagcttcagcctgctgatctacatggccatcgagcacagccccaacaagtgcctgcccgtgaaggagatctacagctggatcctggaccacttcccctacttcgccaccgcccccaccggctggaagaacagcgtgagacacaacctgagcctgaacaagtgcttccagaaggtggagagaagccacggcaaggtgaacggcaagggcagcctgtggtgcgtggaccccgagtacaagcccaacctgatccaggccctgaagaagcagcccttcagcagcgccagcagccagaacggcagcctgagcccccactacctgagcagcgtgatcaagcagaaccaggtgagaaacctgaaggagagcgacatcgacgccgccgccgccatgatgctgctgaacaccagcatcgagcagggcatcctggagtgcgagaagcccctgcccctgaagaccgccctgcagaagaagagaagctacggcaacgccttccaccaccccagcgccgtgagactgcaggagagcgacagcctggccaccagcatcgaccccaaggaggaccacaactacagcgccagcagcatggccgcccagagatgcgccagcagaagcagcgtgagcagcctgagcagcgtggacgaggtgtacgagttcatccccaagaacagccacgtgggcagcgacggcagcgagggcttccacagcgaggaggacaccgacgtggactacgaggacgaccccctgggcgacagcggctacgccagccagccctgcgccaagatcagcgagaagggccagagcggcaagaagatgagaaagcagacctgccaggagatcgacgaggagctgaaggaggccgccggcagcctgctgcacctggccggcatcagaacctgcctgggcagcctgatcagcaccgccaagacccagaaccagaagcagagaaagaagtag

SEQ ID NO: 125961 - DNA, 741 bp, Artificial Sequence
  derived and/or modified sequence
atgggccccgtgatcggcatgacccccgacaagagagccgagacccccggcgccgagaagatcgccggcctgagccagatctacaagatgggcagcctgcccgaggccgtggacgccgccagacccaaggccaccctggtggacagcgagagcgccgacgacgagctgaccaacctgaactggctgcacgagagcaccaacctgctgaccaacttcagcctgggcagcgagggcctgcccatcgtgagccccctgtacgacatcgagggcgacgacgtgcccagcttcggccccgcctgctaccagaaccccgagaagaagagcgccaccagcaagcccccctacagcttcagcctgctgatctacatggccatcgagcacagccccaacaagtgcctgcccgtgaaggagatctacagctggatcctggaccacttcccctacttcgccaccgcccccaccggctggaagaacagcgtgagacacaacctgagcctgaacaagtgcttccagaaggtggagagaagccacggcaaggtgaacggcaagggcagcctgtggtgcgtggaccccgagtacaagcccaacctgatccaggccctgaagaagcagcccttcagcagcgccagcagccagaacggcagcctgagcccccactacctgagcagcgtgatcaagcagaaccaggtgagaaacctgaaggagagcgacatcgacgccgccgccgccatgatgctgtag

SEQ ID NO: 125962 - protein, 38 aa, Artificial Sequence
  derived and/or modified sequence
DSHEKRHHGYRRKFHEKHHSHREFPFYGDYGSNYLYDN

SEQ ID NO: 125963 - protein, 57 aa, Artificial Sequence
  derived and/or modified sequence
MKFFVFALVLALMISMISADSHEKRHHGYRRKFHEKHHSHREFPFYGDYGSNYLYDN

SEQ ID NO: 125964 - DNA, 174 bp, Artificial Sequence
  derived and/or modified sequence
atgaagttctttgtcttcgccctagtcctggcattgatgatctccatgatctctgccgatagccacgaaaagcggcatcacggctataggagaaagtttcatgagaagcaccatagccaccgggaattccccttttatggtgattacggctccaactacctttacgacaattag

SEQ ID NO: 125965 - DNA, 174 bp, Artificial Sequence
  derived and/or modified sequence
atgaaattctttgtcttcgcgctggtgcttgccctgatgatttctatgatctcagcagattcccacgaaaagcgtcaccacggttaccgccgaaaattccatgaaaaacaccactctcatcgagagtttcctttttatggggattacggatctaactacttgtacgataattag

SEQ ID NO: 125966 - DNA, 580 bp, Artificial Sequence
  derived and/or modified sequence
aacgtgtttaaatacatcagccatatagaaaaggacatctcttgagacttcacttcagcttcactgacttcttgactctcctcttgagtaaaaggactcagccaactatgaagttttttgtctttgctttagtcttggctctcatgatttccatgattagcgctgattcacatgaaaagagacatcatgggtatagaagaaaattccatgaaaagcatcattcacatcgagaatttccattttatggggactatggatcaaattatctatatgacaattgatatccttagtaatcatggggcatgattatagaggtttgactggcaaattcactttttactcatttattctcattcatcataccgcatcacactaccactgctttttgaagaattatcataaggcaatggagaataaaagaaagaccatgatttagtgaattctgtgtttcatgatacttcccttcctaattatcatttgattagatacttgcaatttaaactgttaagctgttttcactgctgtttctgagtaatagaaattcattcctctccaaaagcaataaatttctagcacatta

SEQ ID NO: 125967 - DNA, 623 bp, Artificial Sequence
  derived and/or modified sequence
atctcttgagacttcacttcagcttcactgacttcttgactctcctcttgagtaaaaggactcagccaactatgaagttttttgtctttgctttagtcttggctctcatgatttccatgattagcgctgattcacatgaaaagagacatcatgggtatagaagaaaattccatgaaaagcatcattcacatcgagaatttccattttatggggactatggatcaaattatctatatgacaattgatatccttagtaatcatggggcatgattatagaggtaagctgactctagttgcttgtctttctagaagtgtcaacactgacagtttaaaaaaaaagccataagctaacaaccattccagtttaagaaatgtagcatgggttagctccttgaagtgtattcatttgtataaatgcttctgaagctgtagatatgtggtgttatttctgaggtctctgttctgtgccattggtctgtatgttgttttggtactggtaccatgctgttttggtaactgtagctttgtagtatagtttgaagtcaggtagtgtgatgccttcagctttgttcttttgcttacaattgtcttgggtatatgagcttttctttggatccatatga

SEQ ID NO: 125968 - DNA, 174 bp, Artificial Sequence
  derived and/or modified sequence
atgaagttctttgtgtttgccctggtgctggccctgatgatctccatgatctctgctgacagccatgagaagaggcaccacggctacagaaggaagttccacgagaagcaccacagccaccgggagttccccttctacggggactatggcagcaactacctgtatgacaactag

SEQ ID NO: 125969 - DNA, 174 bp, Artificial Sequence
  derived and/or modified sequence
atgaagttcttcgtgttcgccctggtgctggccctgatgatcagcatgattagtgcagatagccatgagaaaagacaccacgggtatcgccggaagtttcacgagaagcatcacagccatcgagagtttcctttttacggcgactatgggtcgaactacctctatgataactag

SEQ ID NO: 125970 - DNA, 174 bp, Artificial Sequence
  derived and/or modified sequence
atgaagttcttcgtgttcgccctggtgctggccctgatgatcagcatgatctcagccgacagccatgagaaacggcatcacggttaccgccgcaagtttcacgaaaaacaccactcccatagggaatttcctttctatggagactatggctcaaactatctgtatgataattag

SEQ ID NO: 125971 - DNA, 174 bp, Artificial Sequence
  derived and/or modified sequence
atgaagttcttcgtttttgccctggtattggctctcatgatctctatgatctctgccgacagccacgaaaagcgccatcacgggtaccgacgtaaatttcacgaaaaacatcattcccaccgcgagttcccattttacggtgactacggatcaaattacctttatgacaattag

SEQ ID NO: 125972 - DNA, 174 bp, Artificial Sequence
  derived and/or modified sequence
atgaaattcttcgtttttgctctcgtgctggccctgatgatctccatgatatcagccgactcacacgaaaagaggcatcacggatatcgcaggaaattccatgagaagcaccactcccatcgcgagttccccttctacggtgattacggctcaaactacctgtacgacaactag

SEQ ID NO: 125973 - DNA, 174 bp, Artificial Sequence
  derived and/or modified sequence
atgaagttcttcgtgttcgccctggtgctggccctgatgatcagcatgatcagcgccgacagccacgagaagagacaccacggctacagaagaaagttccacgagaagcaccacagccacagagagttccccttctacggcgactacggcagcaactacctgtacgacaactag

SEQ ID NO: 125974 - protein, 2201 aa, Artificial Sequence
  derived and/or modified sequence
MGAMTQLLAGVFLAFLALATEGGVLKKVIRHKRQSGVNATLPEENQPVVFNHVYNIKLPVGSQCSVDLESASGEKDLAPPSEPSESFQEHTVDGENQIVFTHRINIPRRACGCAAAPDVKELLSRLEELENLVSSLREQCTAGAGCCLQPATGRLDTRPFCSGRGNFSTEGCGCVCEPGWKGPNCSEPECPGNCHLRGRCIDGQCICDDGFTGEDCSQLACPSDCNDQGKCVNGVCICFEGYAGADCSREICPVPCSEEHGTCVDGLCVCHDGFAGDDCNKPLCLNNCYNRGRCVENECVCDEGFTGEDCSELICPNDCFDRGRCINGTCYCEEGFTGEDCGKPTCPHACHTQGRCEEGQCVCDEGFAGVDCSEKRCPADCHNRGRCVDGRCECDDGFTGADCGELKCPNGCSGHGRCVNGQCVCDEGYTGEDCSQLRCPNDCHSRGRCVEGKCVCEQGFKGYDCSDMSCPNDCHQHGRCVNGMCVCDDGYTGEDCRDRQCPRDCSNRGLCVDGQCVCEDGFTGPDCAELSCPNDCHGQGRCVNGQCVCHEGFMGKDCKEQRCPSDCHGQGRCVDGQCICHEGFTGLDCGQHSCPSDCNNLGQCVSGRCICNEGYSGEDCSEVSPPKDLVVTEVTEETVNLAWDNEMRVTEYLVVYTPTHEGGLEMQFRVPGDQTSTIIQELEPGVEYFIRVFAILENKKSIPVSARVATYLPAPEGLKFKSIKETSVEVEWDPLDIAFETWEIIFRNMNKEDEGEITKSLRRPETSYRQTGLAPGQEYEISLHIVKNNTRGPGLKRVTTTRLDAPSQIEVKDVTDTTALITWFKPLAEIDGIELTYGIKDVPGDRTTIDLTEDENQYSIGNLKPDTEYEVSLISRRGDMSSNPAKETFTTGLDAPRNLRRVSQTDNSITLEWRNGKAAIDSYRIKYAPISGGDHAEVDVPKSQQATTKTTLTGLRPGTEYGIGVSAVKEDKESNPATINAATELDTPKDLQVSETAETSLTLLWKTPLAKFDRYRLNYSLPTGQWVGVQLPRNTTSYVLRGLEPGQEYNVLLTAEKGRHKSKPARVKASTEQAPELENLTVTEVGWDGLRLNWTAADQAYEHFIIQVQEANKVEAARNLTVPGSLRAVDIPGLKAATPYTVSIYGVIQGYRTPVLSAEASTGETPNLGEVVVAEVGWDALKLNWTAPEGAYEYFFIQVQEADTVEAAQNLTVPGGLRSTDLPGLKAATHYTITIRGVTQDFSTTPLSVEVLTEEVPDMGNLTVTEVSWDALRLNWTTPDGTYDQFTIQVQEADQVEEAHNLTVPGSLRSMEIPGLRAGTPYTVTLHGEVRGHSTRPLAVEVVTEDLPQLGDLAVSEVGWDGLRLNWTAADNAYEHFVIQVQEVNKVEAAQNLTLPGSLRAVDIPGLEAATPYRVSIYGVIRGYRTPVLSAEASTAKEPEIGNLNVSDITPESFNLSWMATDGIFETFTIEIIDSNRLLETVEYNISGAERTAHISGLPPSTDFIVYLSGLAPSIRTKTISATATTEALPLLENLTISDINPYGFTVSWMASENAFDSFLVTVVDSGKLLDPQEFTLSGTQRKLELRGLITGIGYEVMVSGFTQGHQTKPLRAEIVTEAEPEVDNLLVSDATPDGFRLSWTADEGVFDNFVLKIRDTKKQSEPLEITLLAPERTRDITGLREATEYEIELYGISKGRRSQTVSAIATTAMGSPKEVIFSDITENSATVSWRAPTAQVESFRITYVPITGGTPSMVTVDGTKTQTRLVKLIPGVEYLVSIIAMKGFEESEPVSGSFTTALDGPSGLVTANITDSEALARWQPAIATVDSYVISYTGEKVPEITRTVSGNTVEYALTDLEPATEYTLRIFAEKGPQKSSTITAKFTTDLDSPRDLTATEVQSETALLTWRPPRASVTGYLLVYESVDGTVKEVIVGPDTTSYSLADLSPSTHYTAKIQALNGPLRSNMIQTIFTTIGLLYPFPKDCSQAMLNGDTTSGLYTIYLNGDKAEALEVFCDMTSDGGGWIVFLRRKNGRENFYQNWKAYAAGFGDRREEFWLGLDNLNKITAQGQYELRVDLRDHGETAFAVYDKFSVGDAKTRYKLKVEGYSGTAGDSMAYHNGRSFSTFDKDTDSAITNCALSYKGAFWYRNCHRVNLMGRYGDNNHSQGVNWFHWKGHEHSIQFAEMKLRPSNFRNLEGRRKRA

SEQ ID NO: 125975 - DNA, 6606 bp, Artificial Sequence
  derived and/or modified sequence
atgggcgccatgacccagctgctggccggcgtgttcctggccttcctggccctggccaccgagggcggcgtgctgaagaaggtgatcagacacaagagacagagcggcgtgaacgccaccctgcccgaggagaaccagcccgtggtgttcaaccacgtgtacaacatcaagctgcccgtgggcagccagtgcagcgtggacctggagagcgccagcggcgagaaggacctggccccccccagcgagcccagcgagagcttccaggagcacaccgtggacggcgagaaccagatcgtgttcacccacagaatcaacatccccagaagagcctgcggctgcgccgccgcccccgacgtgaaggagctgctgagcagactggaggagctggagaacctggtgagcagcctgagagagcagtgcaccgccggcgccggctgctgcctgcagcccgccaccggcagactggacaccagacccttctgcagcggcagaggcaacttcagcaccgagggctgcggctgcgtgtgcgagcccggctggaagggccccaactgcagcgagcccgagtgccccggcaactgccacctgagaggcagatgcatcgacggccagtgcatctgcgacgacggcttcaccggcgaggactgcagccagctggcctgccccagcgactgcaacgaccagggcaagtgcgtgaacggcgtgtgcatctgcttcgagggctacgccggcgccgactgcagcagagagatctgccccgtgccctgcagcgaggagcacggcacctgcgtggacggcctgtgcgtgtgccacgacggcttcgccggcgacgactgcaacaagcccctgtgcctgaacaactgctacaacagaggcagatgcgtggagaacgagtgcgtgtgcgacgagggcttcaccggcgaggactgcagcgagctgatctgccccaacgactgcttcgacagaggcagatgcatcaacggcacctgctactgcgaggagggcttcaccggcgaggactgcggcaagcccacctgcccccacgcctgccacacccagggcagatgcgaggagggccagtgcgtgtgcgacgagggcttcgccggcgtggactgcagcgagaagagatgccccgccgactgccacaacagaggcagatgcgtggacggcagatgcgagtgcgacgacggcttcaccggcgccgactgcggcgagctgaagtgccccaacggctgcagcggccacggcagatgcgtgaacggccagtgcgtgtgcgacgagggctacaccggcgaggactgcagccagctgagatgccccaacgactgccacagcagaggcagatgcgtggagggcaagtgcgtgtgcgagcagggcttcaagggctacgactgcagcgacatgagctgccccaacgactgccaccagcacggcagatgcgtgaacggcatgtgcgtgtgcgacgacggctacaccggcgaggactgcagagacagacagtgccccagagactgcagcaacagaggcctgtgcgtggacggccagtgcgtgtgcgaggacggcttcaccggccccgactgcgccgagctgagctgccccaacgactgccacggccagggcagatgcgtgaacggccagtgcgtgtgccacgagggcttcatgggcaaggactgcaaggagcagagatgccccagcgactgccacggccagggcagatgcgtggacggccagtgcatctgccacgagggcttcaccggcctggactgcggccagcacagctgccccagcgactgcaacaacctgggccagtgcgtgagcggcagatgcatctgcaacgagggctacagcggcgaggactgcagcgaggtgagcccccccaaggacctggtggtgaccgaggtgaccgaggagaccgtgaacctggcctgggacaacgagatgagagtgaccgagtacctggtggtgtacacccccacccacgagggcggcctggagatgcagttcagagtgcccggcgaccagaccagcaccatcatccaggagctggagcccggcgtggagtacttcatcagagtgttcgccatcctggagaacaagaagagcatccccgtgagcgccagagtggccacctacctgcccgcccccgagggcctgaagttcaagagcatcaaggagaccagcgtggaggtggagtgggaccccctggacatcgccttcgagacctgggagatcatcttcagaaacatgaacaaggaggacgagggcgagatcaccaagagcctgagaagacccgagaccagctacagacagaccggcctggcccccggccaggagtacgagatcagcctgcacatcgtgaagaacaacaccagaggccccggcctgaagagagtgaccaccaccagactggacgcccccagccagatcgaggtgaaggacgtgaccgacaccaccgccctgatcacctggttcaagcccctggccgagatcgacggcatcgagctgacctacggcatcaaggacgtgcccggcgacagaaccaccatcgacctgaccgaggacgagaaccagtacagcatcggcaacctgaagcccgacaccgagtacgaggtgagcctgatcagcagaagaggcgacatgagcagcaaccccgccaaggagaccttcaccaccggcctggacgcccccagaaacctgagaagagtgagccagaccgacaacagcatcaccctggagtggagaaacggcaaggccgccatcgacagctacagaatcaagtacgcccccatcagcggcggcgaccacgccgaggtggacgtgcccaagagccagcaggccaccaccaagaccaccctgaccggcctgagacccggcaccgagtacggcatcggcgtgagcgccgtgaaggaggacaaggagagcaaccccgccaccatcaacgccgccaccgagctggacacccccaaggacctgcaggtgagcgagaccgccgagaccagcctgaccctgctgtggaagacccccctggccaagttcgacagatacagactgaactacagcctgcccaccggccagtgggtgggcgtgcagctgcccagaaacaccaccagctacgtgctgagaggcctggagcccggccaggagtacaacgtgctgctgaccgccgagaagggcagacacaagagcaagcccgccagagtgaaggccagcaccgagcaggcccccgagctggagaacctgaccgtgaccgaggtgggctgggacggcctgagactgaactggaccgccgccgaccaggcctacgagcacttcatcatccaggtgcaggaggccaacaaggtggaggccgccagaaacctgaccgtgcccggcagcctgagagccgtggacatccccggcctgaaggccgccaccccctacaccgtgagcatctacggcgtgatccagggctacagaacccccgtgctgagcgccgaggccagcaccggcgagacccccaacctgggcgaggtggtggtggccgaggtgggctgggacgccctgaagctgaactggaccgcccccgagggcgcctacgagtacttcttcatccaggtgcaggaggccgacaccgtggaggccgcccagaacctgaccgtgcccggcggcctgagaagcaccgacctgcccggcctgaaggccgccacccactacaccatcaccatcagaggcgtgacccaggacttcagcaccacccccctgagcgtggaggtgctgaccgaggaggtgcccgacatgggcaacctgaccgtgaccgaggtgagctgggacgccctgagactgaactggaccacccccgacggcacctacgaccagttcaccatccaggtgcaggaggccgaccaggtggaggaggcccacaacctgaccgtgcccggcagcctgagaagcatggagatccccggcctgagagccggcaccccctacaccgtgaccctgcacggcgaggtgagaggccacagcaccagacccctggccgtggaggtggtgaccgaggacctgccccagctgggcgacctggccgtgagcgaggtgggctgggacggcctgagactgaactggaccgccgccgacaacgcctacgagcacttcgtgatccaggtgcaggaggtgaacaaggtggaggccgcccagaacctgaccctgcccggcagcctgagagccgtggacatccccggcctggaggccgccaccccctacagagtgagcatctacggcgtgatcagaggctacagaacccccgtgctgagcgccgaggccagcaccgccaaggagcccgagatcggcaacctgaacgtgagcgacatcacccccgagagcttcaacctgagctggatggccaccgacggcatcttcgagaccttcaccatcgagatcatcgacagcaacagactgctggagaccgtggagtacaacatcagcggcgccgagagaaccgcccacatcagcggcctgccccccagcaccgacttcatcgtgtacctgagcggcctggcccccagcatcagaaccaagaccatcagcgccaccgccaccaccgaggccctgcccctgctggagaacctgaccatcagcgacatcaacccctacggcttcaccgtgagctggatggccagcgagaacgccttcgacagcttcctggtgaccgtggtggacagcggcaagctgctggacccccaggagttcaccctgagcggcacccagagaaagctggagctgagaggcctgatcaccggcatcggctacgaggtgatggtgagcggcttcacccagggccaccagaccaagcccctgagagccgagatcgtgaccgaggccgagcccgaggtggacaacctgctggtgagcgacgccacccccgacggcttcagactgagctggaccgccgacgagggcgtgttcgacaacttcgtgctgaagatcagagacaccaagaagcagagcgagcccctggagatcaccctgctggcccccgagagaaccagagacatcaccggcctgagagaggccaccgagtacgagatcgagctgtacggcatcagcaagggcagaagaagccagaccgtgagcgccatcgccaccaccgccatgggcagccccaaggaggtgatcttcagcgacatcaccgagaacagcgccaccgtgagctggagagcccccaccgcccaggtggagagcttcagaatcacctacgtgcccatcaccggcggcacccccagcatggtgaccgtggacggcaccaagacccagaccagactggtgaagctgatccccggcgtggagtacctggtgagcatcatcgccatgaagggcttcgaggagagcgagcccgtgagcggcagcttcaccaccgccctggacggccccagcggcctggtgaccgccaacatcaccgacagcgaggccctggccagatggcagcccgccatcgccaccgtggacagctacgtgatcagctacaccggcgagaaggtgcccgagatcaccagaaccgtgagcggcaacaccgtggagtacgccctgaccgacctggagcccgccaccgagtacaccctgagaatcttcgccgagaagggcccccagaagagcagcaccatcaccgccaagttcaccaccgacctggacagccccagagacctgaccgccaccgaggtgcagagcgagaccgccctgctgacctggagaccccccagagccagcgtgaccggctacctgctggtgtacgagagcgtggacggcaccgtgaaggaggtgatcgtgggccccgacaccaccagctacagcctggccgacctgagccccagcacccactacaccgccaagatccaggccctgaacggccccctgagaagcaacatgatccagaccatcttcaccaccatcggcctgctgtaccccttccccaaggactgcagccaggccatgctgaacggcgacaccaccagcggcctgtacaccatctacctgaacggcgacaaggccgaggccctggaggtgttctgcgacatgaccagcgacggcggcggctggatcgtgttcctgagaagaaagaacggcagagagaacttctaccagaactggaaggcctacgccgccggcttcggcgacagaagagaggagttctggctgggcctggacaacctgaacaagatcaccgcccagggccagtacgagctgagagtggacctgagagaccacggcgagaccgccttcgccgtgtacgacaagttcagcgtgggcgacgccaagaccagatacaagctgaaggtggagggctacagcggcaccgccggcgacagcatggcctaccacaacggcagaagcttcagcaccttcgacaaggacaccgacagcgccatcaccaactgcgccctgagctacaagggcgccttctggtacagaaactgccacagagtgaacctgatgggcagatacggcgacaacaaccacagccagggcgtgaactggttccactggaagggccacgagcacagcatccagttcgccgagatgaagctgagacccagcaacttcagaaacctggagggcagaagaaagagagcctag

SEQ ID NO: 125976 - DNA, 3240 bp, Artificial Sequence
  derived and/or modified sequence
atgggcgccatgacccagctgctggccggcgtgttcctggccttcctggccctggccaccgagggcggcgtgctgaagaaggtgatcagacacaagagacagagcggcgtgaacgccaccctgcccgaggagaaccagcccgtggtgttcaaccacgtgtacaacatcaagctgcccgtgggcagccagtgcagcgtggacctggagagcgccagcggcgagaaggacctggccccccccagcgagcccagcgagagcttccaggagcacaccgtggacggcgagaaccagatcgtgttcacccacagaatcaacatccccagaagagcctgcggctgcgccgccgcccccgacgtgaaggagctgctgagcagactggaggagctggagaacctggtgagcagcctgagagagcagtgcaccgccggcgccggctgctgcctgcagcccgccaccggcagactggacaccagacccttctgcagcggcagaggcaacttcagcaccgagggctgcggctgcgtgtgcgagcccggctggaagggccccaactgcagcgagcccgagtgccccggcaactgccacctgagaggcagatgcatcgacggccagtgcatctgcgacgacggcttcaccggcgaggactgcagccagctggcctgccccagcgactgcaacgaccagggcaagtgcgtgaacggcgtgtgcatctgcttcgagggctacgccggcgccgactgcagcagagagatctgccccgtgccctgcagcgaggagcacggcacctgcgtggacggcctgtgcgtgtgccacgacggcttcgccggcgacgactgcaacaagcccctgtgcctgaacaactgctacaacagaggcagatgcgtggagaacgagtgcgtgtgcgacgagggcttcaccggcgaggactgcagcgagctgatctgccccaacgactgcttcgacagaggcagatgcatcaacggcacctgctactgcgaggagggcttcaccggcgaggactgcggcaagcccacctgcccccacgcctgccacacccagggcagatgcgaggagggccagtgcgtgtgcgacgagggcttcgccggcgtggactgcagcgagaagagatgccccgccgactgccacaacagaggcagatgcgtggacggcagatgcgagtgcgacgacggcttcaccggcgccgactgcggcgagctgaagtgccccaacggctgcagcggccacggcagatgcgtgaacggccagtgcgtgtgcgacgagggctacaccggcgaggactgcagccagctgagatgccccaacgactgccacagcagaggcagatgcgtggagggcaagtgcgtgtgcgagcagggcttcaagggctacgactgcagcgacatgagctgccccaacgactgccaccagcacggcagatgcgtgaacggcatgtgcgtgtgcgacgacggctacaccggcgaggactgcagagacagacagtgccccagagactgcagcaacagaggcctgtgcgtggacggccagtgcgtgtgcgaggacggcttcaccggccccgactgcgccgagctgagctgccccaacgactgccacggccagggcagatgcgtgaacggccagtgcgtgtgccacgagggcttcatgggcaaggactgcaaggagcagagatgccccagcgactgccacggccagggcagatgcgtggacggccagtgcatctgccacgagggcttcaccggcctggactgcggccagcacagctgccccagcgactgcaacaacctgggccagtgcgtgagcggcagatgcatctgcaacgagggctacagcggcgaggactgcagcgaggtgagcccccccaaggacctggtggtgaccgaggtgaccgaggagaccgtgaacctggcctgggacaacgagatgagagtgaccgagtacctggtggtgtacacccccacccacgagggcggcctggagatgcagttcagagtgcccggcgaccagaccagcaccatcatccaggagctggagcccggcgtggagtacttcatcagagtgttcgccatcctggagaacaagaagagcatccccgtgagcgccagagtggccacctacctgcccgcccccgagggcctgaagttcaagagcatcaaggagaccagcgtggaggtggagtgggaccccctggacatcgccttcgagacctgggagatcatcttcagaaacatgaacaaggaggacgagggcgagatcaccaagagcctgagaagacccgagaccagctacagacagaccggcctggcccccggccaggagtacgagatcagcctgcacatcgtgaagaacaacaccagaggccccggcctgaagagagtgaccaccaccagactggacgcccccagccagatcgaggtgaaggacgtgaccgacaccaccgccctgatcacctggttcaagcccctggccgagatcgacggcatcgagctgacctacggcatcaaggacgtgcccggcgacagaaccaccatcgacctgaccgaggacgagaaccagtacagcatcggcaacctgaagcccgacaccgagtacgaggtgagcctgatcagcagaagaggcgacatgagcagcaaccccgccaaggagaccttcaccaccggcctggacgcccccagaaacctgagaagagtgagccagaccgacaacagcatcaccctggagtggagaaacggcaaggccgccatcgacagctacagaatcaagtacgcccccatcagcggcggcgaccacgccgaggtggacgtgcccaagagccagcaggccaccaccaagaccatcaccgccaagttcaccaccgacctggacagccccagagacctgaccgccaccgaggtgcagagcgagaccgccctgctgacctggagaccccccagagccagcgtgaccggctacctgctggtgtacgagagcgtggacggcaccgtgaaggaggtgatcgtgggccccgacaccaccagctacagcctggccgacctgagcccccccagcctgttcctgcacttcatccagcagaagcccgagaagcagtactgcttccacttcaaggacatgatcaacatcatcaacatcatcatgatgatgatgatgatgaagaccaaggacttcagcagagacctgagcttccagaacatcagcggccagtacctgatcgtgttcttcttctag

SEQ ID NO: 125977 - DNA, 6606 bp, Artificial Sequence
  derived and/or modified sequence
atgggagctatgacacagctgctcgcaggtgtgttcctggccttcctggcccttgccaccgagggaggcgtgttgaaaaaggtgatcaggcacaagcgtcagagcggtgttaatgcaacattgcctgaagaaaaccagcctgtcgtctttaatcacgtgtacaacatcaaattgccagtgggttcccaatgcagcgtcgaccttgaaagcgcatccggtgaaaaggatctcgctccccctagcgaaccttcagagtcattccaggagcatactgtcgatggcgaaaaccagattgtgttcacgcatcgcattaatattccccgtcgggcatgcggatgcgctgcagcacccgacgttaaggagctactgtcacgcctagaggagctcgagaacctggtgtcttctttgagggagcagtgcacagccggggctggctgttgcctccaacccgccacaggacgcctcgacacgcgcccattttgcagtgggcggggcaacttctcgaccgaaggatgcggttgtgtctgcgagcccggttggaagggccccaattgctccgagcccgagtgtcccggtaactgccacctaagagggcggtgcatcgatggacaatgtatctgcgacgacggctttaccggagaagactgctctcagctggcatgtcctagcgactgcaatgaccagggaaagtgtgtcaatggagtatgtatctgcttcgagggttatgcaggcgcagattgttcccgggaaatttgtcctgtaccgtgttccgaggaacacggaacttgcgtcgatggcctgtgcgtgtgtcacgacggttttgctggcgacgactgtaacaagcccttatgcctgaacaattgttacaatagggggcgttgtgtggaaaatgaatgcgtttgtgatgagggttttacaggtgaggactgcagcgagctgatctgccccaatgactgtttcgatagaggtcggtgcataaatggaacctgttactgtgaggagggctttacaggggaggattgcggcaagcctacctgtcctcatgcatgccacacccaaggacgttgtgaggagggacaatgcgtttgcgatgagggttttgccggcgttgattgttcagagaagcgctgccccgccgattgccacaatagagggcgctgtgtagacgggcgatgtgagtgcgatgacggatttactggcgcagactgtggggagctgaagtgtcctaacgggtgttctggccatggaagatgtgtgaacggacagtgtgtgtgcgatgaggggtacacaggtgaggactgctcccagctgcggtgtccaaacgattgtcactctcgggggagatgcgtggagggcaaatgtgtgtgtgaacagggattcaaggggtatgattgcagcgatatgagttgcccgaacgactgccatcagcatgggcggtgcgttaatggaatgtgtgtgtgcgatgacggatacaccggtgaggattgtagggataggcagtgtcccagagactgtagtaacagagggctgtgcgtcgatggtcagtgcgtgtgtgaggatggcttcaccggaccagactgcgctgagctctcctgccctaacgactgccatggtcagggtcggtgcgtgaatggtcagtgtgtgtgtcacgagggtttcatgggcaaggattgcaaggaacagaggtgcccttctgattgccacgggcagggcaggtgcgtggatggccagtgtatttgccacgagggatttaccgggctggactgcggacagcacagttgccctagtgattgtaacaacctgggccagtgcgtaagtggaagatgtatttgcaatgagggttactctggagaggattgctctgaagtcagtcctcctaaggacctggtcgtcacagaggtgactgaagaaaccgtgaacctggcttgggataacgaaatgagggtgactgagtacctggtcgtgtatacaccaactcatgagggcggcctcgagatgcaatttagagtgcctggcgaccagacaagtacaattatccaggagctggaaccgggagtcgagtactttattcgggtgtttgcgatactggagaacaaaaagtcaattcccgtgagcgcccgcgtagccacttacctgccggcccctgagggactgaaattcaaatccattaaggaaacgtctgtggaggttgagtgggatcctctggacattgcttttgaaacatgggagatcatatttagaaatatgaataaagaagacgagggcgaaataacaaaatccctgaggaggcccgagactagctaccggcaaacaggtctggcaccggggcaagaatacgagatttcgttgcacattgtgaagaataacacacgggggcctggcctgaaaagagttacaacaacacgtttggacgctccctcacagatagaagtgaaggacgttacagatactaccgcactgattacttggttcaaacccctggctgaaattgatggcattgaattgacttacgggatcaaggacgtgccaggcgatcgtactacgatcgatctgaccgaagatgagaaccagtacagcattggtaatttgaagccggatacggagtacgaggtttctctgataagtcgtaggggggatatgagctctaatcccgccaaggagacttttaccacagggctggatgcgcctcgcaatctccggagagtatcgcaaaccgataattcaatcacattagagtggagaaacggtaaggccgcaatcgattcatatcggataaagtacgctcccatttctggaggggaccacgcagaggtagacgtgccaaaatcccaacaggccaccacaaagacaacactgacaggactgagacccggaacagagtacgggattggcgtctcagcggttaaggaggacaaagagtctaacccagccactattaatgctgcaacagagctggacaccccgaaggacctgcaggtttccgagactgccgaaacctcactaacgttgttgtggaaaacccctctggccaaattcgatcggtatagactcaattactccctcccgaccggccaatgggtaggtgtgcagctcccgaggaacaccacatcctatgttctgaggggcttggaacctggacaggaatacaatgttctgctgaccgccgaaaaagggaggcacaaaagcaagccagcacgagtaaaagcatccacggagcaggcccctgaattggaaaatttaaccgtgactgaggtaggctgggacggactgaggctgaactggacggcagcggaccaggcttacgaacactttatcatacaggtacaagaggctaataaggtagaagccgcaaggaatctgactgtaccaggttcgctacgggccgttgacatcccaggccttaaagccgccacaccatataccgtctcaatctacggtgttattcagggatataggaccccggtgctgtccgccgaagcctcaaccggcgagactcctaacctgggcgaagttgtggtagccgaagttgggtgggatgccctgaagctcaattggacagcccctgagggagcttacgaatatttctttatccaggtgcaagaagcagatacagttgaagccgcccagaacctgactgtgcctggaggactgcggtccacagacttgcccggcttaaaggccgccacacattatacaattactatccggggagtcacgcaggatttctccactacccccctcagcgtggaagtcctaacagaagaggtgccagatatgggtaacttgactgttacggaggtctcatgggacgctctgcggttgaattggacaaccccagatggaacttatgatcagtttaccatccaagttcaggaggccgatcaggtggaagaagcccataacctaactgtccccggatccctgagatcaatggagattcccggactgagggcagggactccttatacggtgaccctgcacggtgaggtgcggggacattctaccagacctctggctgttgaagtcgttactgaggaccttcctcagctgggagatctggcggtttccgaggtggggtgggatgggttacgtctcaattggaccgcagccgataatgcttacgagcactttgtgatacaggtccaggaggtcaataaagttgaggcagcacagaatctcacgctacccgggtcgctcagggcagtagatatccctgggctggaggcagccaccccttaccgggtttcgatctatggagtcataagaggatatagaactcccgtcttgtcagccgaagcatctactgcaaaagagccagaaatcggaaacctgaatgtttccgacatcactcctgagagtttcaacctgtcctggatggccaccgatggtatttttgagacctttactatcgaaatcatagattccaaccggcttcttgagactgtcgagtacaacatctccggcgccgaacgaacagctcatataagcggtctccccccatcaacagatttcattgtctatttatcaggcctggccccctcaattagaactaagacgatttctgctactgccaccacagaggccttgccgctgttggaaaacttgacaatcagcgacataaatccgtacggctttacggtttcttggatggcttccgagaatgccttcgatagttttctggtgactgtcgtggattccgggaagctgctggaccctcaggaatttactctgtctggcacgcagcggaagctagaactgcgcggactaatcacaggtattgggtacgaggtaatggtgagtggcttcacacaagggcaccagactaaacccttgcgcgcagaaatcgtcactgaagctgaacccgaagtggacaacctacttgtgagcgatgcgactcccgacggcttcagactctcttggaccgcggacgagggcgtattcgacaacttcgtgctgaagatacgcgacactaaaaagcagagcgagccactggaaataacgctgttggcgccggaacgtacccgggatattacagggctgcgcgaggccactgaatatgaaatcgagctttatggcatttccaaaggtcgtaggagccagaccgtatctgctatcgccactacagctatggggtctccaaaagaggtgatctttagcgatatcaccgaaaatagcgcaaccgtgtcttggcgcgctcctacagcgcaggttgaatcctttcgcattacctatgttcctattaccggaggaaccccatccatggtgactgtggacggcacaaagacgcagaccaggctggtgaaacttattcccggcgtggagtaccttgtgtctatcattgccatgaaaggcttcgaagagtccgagccggtttcaggctccttcactacagctctggatgggccctctggcctggtcaccgctaatattaccgactcagaggccttggccaggtggcaaccagccatcgcaactgtagacagctatgtgatctcttacacgggagagaaagtgcctgaaataacaagaaccgtttctgggaataccgtagaatacgccttgaccgacctcgaacctgcaaccgagtataccttgcgaatcttcgccgagaagggtccacaaaaatcatcaactattaccgctaagttcaccactgatcttgattcccctagagatctaacagctacagaagtgcagtctgaaactgctctactaacctggcgtcctccccgggcctcagtgaccggctacctgttagtttacgaatccgtggacggcaccgtaaaggaggtgatcgtcggcccggacactaccagctactccttggcggatctctccccctccacccactatacagccaagattcaggccctcaatggccctctgaggtccaacatgattcagacaatctttacaactattgggctgctttacccttttccaaaagattgtagccaggccatgctgaacggagatacaacttcaggcctgtacactatctatctcaacggggacaaggcggaagccctcgaggtgttttgtgacatgaccagcgacggaggcgggtggattgtgttcctgcggagaaagaacggccgggaaaacttctaccaaaattggaaggcatacgcagcaggctttggagatcgacgcgaagagttttggctgggactggataacctgaataaaataacagcacaagggcaatacgaactccgcgttgacttaagggatcatggagagacagcctttgctgtctacgacaagttctccgtaggcgacgctaagacgcggtataagctcaaggtggagggatacagcgggactgccggggattctatggcctatcataacggcagaagtttcagtactttcgacaaagacactgatagcgccatcaccaactgtgccttgtcctacaaaggggccttctggtatcgaaattgccacagagtgaatctgatgggcagatacggcgacaacaaccattctcagggagtgaactggttccactggaaaggccacgaacactctatccagtttgcagagatgaagctgaggccatccaactttcgaaacctggaaggacggagaaagcgagcatag

SEQ ID NO: 125978 - DNA, 3240 bp, Artificial Sequence
  derived and/or modified sequence
atgggggccatgacccagctacttgcgggtgtgttcttggctttcctggcactagctacggaagggggcgtgttgaagaaggtaatcaggcacaagcgccagagcggggtcaatgccacattgcccgaggagaatcagccagttgtattcaaccacgtgtataatatcaagctgcccgtcgggagccaatgcagcgtcgatctggaaagtgcttcaggtgagaaagacctggcccctccttctgaaccaagcgagagcttccaggaacataccgttgacggcgaaaaccagatagtattcactcataggatcaatattcccagacgggcctgcggctgcgctgctgcaccagatgtgaaagaactcttatccaggttggaggaactcgagaacctggtttccagcctgagagagcagtgcactgccggggccggttgctgcctgcagcctgcgaccggacggctggacacacggccattctgtagcgggaggggcaatttctcgaccgagggctgcggttgcgtatgcgagccaggctggaagggtcccaattgcagtgaaccagagtgcccggggaattgccacttgcggggacggtgcattgacggccagtgtatctgcgatgacgggtttaccggggaagattgttctcagcttgcttgcccctctgactgcaatgatcaaggcaaatgcgttaatggtgtgtgcatctgttttgagggatatgctggtgcagattgcagccgtgagatctgccctgtgccatgttccgaggagcacgggacttgcgtagacggactttgtgtgtgccacgatggcttcgcgggggatgactgtaacaagcctctttgtctcaacaattgctacaatcggggcagatgtgtggaaaacgagtgcgtctgcgacgagggatttaccggcgaagattgttcggaactgatctgtccgaacgattgtttcgatcgcggcagatgcatcaatggaacttgttattgcgaagagggtttcacgggagaggactgtggaaaaccaacatgcccgcacgcttgccacacccagggccgctgtgaagagggccaatgcgtttgcgacgaagggttcgctggtgtcgactgctctgaaaagaggtgccctgctgattgtcacaaccggggccggtgcgttgatggccgttgtgaatgtgatgatggtttcaccggagcagattgcggagaactgaaatgccccaatggctgttccggccatggtagatgcgttaacggtcagtgtgtttgtgacgaaggctacactggagaggattgtagccagctgcgatgccctaacgactgtcatagccgtggtcgctgtgttgaggggaaatgtgtgtgtgagcaaggcttcaagggatacgattgtagtgacatgtcatgtcccaatgactgccaccagcacggccggtgcgttaacgggatgtgcgtctgcgatgacggctacacaggagaggactgtagagatcggcagtgcccacgggactgtagtaatcgggggctgtgcgtagacgggcagtgcgtctgtgaggacggctttacaggccccgactgcgctgagctgagctgccctaacgactgccatgggcaaggaaggtgtgttaacggccagtgcgtgtgtcacgagggatttatgggcaaggattgtaaggagcagcggtgtccctctgactgtcacggtcaaggccgatgcgtagatggacaatgtatctgccatgaaggctttacgggtctggactgcggacagcattcttgtcccagtgactgcaataacctgggccagtgtgtaagcggtagatgcatctgtaatgaaggctatagcggggaagactgttctgaggtctccccacccaaagatctcgttgtcactgaagttacagaggagacagtaaacctggcctgggataacgaaatgcgcgtgaccgagtatctggttgtctacacgccgacccacgagggcgggctggaaatgcagtttagagtccctggggaccagacttcaacaatcatccaggagctcgaacccggagtggagtatttcatcagagtcttcgcgatactggagaacaaaaagagcatccctgtttctgcacgggtggccacttatctacccgcccctgaggggctgaaattcaagagtatcaaagaaactagcgtagaggtagaatgggatcccctagatatagcttttgagacctgggagattatttttagaaacatgaacaaagaggacgaaggggagattacaaaaagtcttcgcaggccggagacctcgtatcgccagaccggactggcccctggccaggagtacgagatatccctgcacatagtcaaaaataacacccggggcccaggtctgaaacgcgtcacaaccacccggttggacgccccttcccaaatcgaggtaaaggacgtgaccgacaccaccgctctcattacctggtttaaacctctagccgagatcgacgggatcgaactcacctacggaattaaggacgtacccggcgacaggaccaccatagacctcaccgaggatgaaaaccagtactcgatcggaaatcttaaacctgataccgagtatgaagtgagcctgataagccgccgcggagatatgtcgagcaaccccgctaaggagactttcaccacaggactcgatgcaccaagaaacttgcgcagagtgagccagacggacaacagtatcacactggaatggcggaatgggaaagccgctattgattcttatcgcatcaaatatgcacccatctctggcggggatcacgcagaagtggatgttccaaaatcccagcaagcgaccacaaaaaccatcacagcaaagtttactacagacctcgatagtccgcgggacctcactgccacagaggtgcagtccgagacagcactcctcacttggcgcccaccccgtgcgagtgtgacaggctacctgctggtgtatgaaagcgttgatggtactgtgaaggaagtaatcgttggcccagacacaacctcatattcgttggcagacctctcccccccatccttatttctccactttattcagcagaagccggaaaagcagtactgcttccatttcaaggatatgataaatattatcaatattataatgatgatgatgatgatgaaaacaaaagacttcagcagagacttgagtttccagaacatctcgggccagtacctaatcgtattcttcttctag

SEQ ID NO: 125979 - DNA, 6606 bp, Artificial Sequence
  derived and/or modified sequence
atgggcgccatgacccagctgctggccggggtcttcctggccttcctggccctggccacagagggcggcgtgctgaagaaggtgatccgccacaagaggcagagcggcgtgaatgccaccctgcctgaggagaaccagcctgtggtgttcaaccacgtgtacaacatcaagctgcctgtgggcagccagtgcagcgtggacctggagagcgccagcggggagaaggacctggcccctccttctgagcccagcgagagcttccaggagcacacagtggatggagagaaccagatcgtgttcacccaccgcatcaacatcccccggcgggcctgtggctgtgccgccgccccagatgtgaaggagctgctgagccggctggaggagctggagaacctggtgagcagcctgcgggagcagtgcacagctggggccggctgctgcctgcagcctgccaccggccgcctggacacccggcccttctgcagcggccggggcaacttcagcacagagggctgcggctgtgtgtgtgagcccggctggaagggccccaactgcagcgagccagaatgtcctggcaactgccacctgcggggccgctgcattgatggccagtgcatctgtgatgatggcttcaccggggaggactgcagccagctggcctgccccagcgactgcaatgaccagggcaaatgtgtgaatggagtgtgcatctgctttgagggctacgccggggctgactgcagccgggagatctgccctgtgccctgcagcgaggagcacggcacctgtgtggatggcctgtgtgtgtgccatgatggctttgctggagatgactgcaacaagcccctgtgcctgaacaactgctacaacagaggccgctgtgtggagaatgaatgtgtgtgtgatgagggcttcaccggggaggactgcagcgagctgatctgccccaatgactgctttgaccggggccgctgcatcaatggcacctgctactgtgaggagggcttcaccggggaggactgtgggaagcccacctgcccccacgcctgccacacccagggccgctgtgaggagggccagtgtgtgtgtgatgagggctttgctggggtggactgcagcgagaagcgctgcccagctgactgccacaacagaggccgctgtgtggatggccgctgtgaatgtgatgatggcttcaccggggctgactgtggggagctgaagtgccccaacggctgcagcggccacggccgctgtgtgaatggccagtgtgtgtgtgatgagggctacaccggggaggactgcagccagctgcgctgccccaatgactgccacagccggggccgctgtgtggagggcaaatgtgtgtgtgagcagggcttcaagggctatgactgcagcgacatgagctgccccaatgactgccaccagcacggccgctgtgtgaatggcatgtgtgtgtgtgatgatggctacaccggggaggactgccgggaccggcagtgcccccgggactgcagcaacagaggcctgtgtgtggatggccagtgtgtgtgtgaagatggcttcaccggccctgactgtgccgagctgagctgccccaatgactgccacggccagggccgctgtgtgaatggccagtgtgtgtgccacgagggcttcatgggcaaggactgcaaggagcagcgctgccccagcgactgccacggccagggccgctgtgtggatggccagtgcatctgccacgagggcttcaccggcctggactgtggccagcacagctgccccagcgactgcaacaacctgggccagtgtgtgtctggccgctgcatctgcaatgaaggctacagcggggaggactgcagcgaggtgtccccacccaaggacctggtggtgacagaggtgacagaggagaccgtgaacctggcctgggacaatgagatgagggtgacagagtacctggtggtgtacacccccacccatgagggcggcctggagatgcagttccgggtgcctggggaccagaccagcaccatcatccaggagctggagcccggggtggagtacttcatccgggtgtttgccatcctggagaacaagaagagcatccctgtgtctgcccgggtggccacctacctgcctgcccctgagggcctgaagttcaagagcatcaaggagacctctgtggaggtggagtgggaccccctggacatcgcctttgagacctgggagatcatcttcaggaacatgaacaaggaggatgaaggagagatcaccaagagcctgcggcggcctgagaccagctaccggcagacaggcctggcccctggccaggagtatgagatcagcctgcacatcgtgaagaacaacacccggggccctggcctgaagagggtgaccaccacccggctggatgcccccagccagatcgaggtgaaggatgtgacagacaccacagccctgatcacctggttcaagcccctggccgagattgatggcatcgagctgacctacggcatcaaggatgtgcctggggacaggaccaccatcgacctgacagaagatgagaaccagtacagcatcggcaacctgaagccagacacagaatatgaggtgtccctcatcagccggcggggggacatgagcagcaacccagccaaggagaccttcaccaccggcctggatgcccccaggaacctgcggcgggtgtcccagacagacaacagcatcaccctggagtggagaaatggcaaggccgccatcgacagctaccgcatcaagtatgcccccatctctggaggagaccacgccgaggtggatgtgcccaagagccagcaggccaccaccaagaccaccctgaccggcctgcggcctggaacagaatatggaattggagtgtctgctgtgaaggaggacaaggagagcaacccagccaccatcaatgctgccacagagctggacacccccaaggacctgcaggtgtctgaaacagctgagaccagcctgaccctgctgtggaagacccccctggccaagtttgaccgctaccgcctgaactacagcctgcccaccggccagtgggtgggcgtgcagctgcccaggaacaccaccagctatgtgctgcggggcctggagcccggccaggagtacaacgtgctgctgacagctgagaagggccgccacaagagcaagccagcccgggtgaaggccagcacagagcaggcccctgagctggagaacctgactgtgacagaggtgggctgggatggcctgcggctgaactggacagctgctgaccaggcctatgagcacttcatcatccaggtgcaggaggccaacaaggtggaggccgccaggaacctgactgtgcccggcagcctgcgggctgtggacatccctggcctgaaggccgccaccccctacacagtgtccatctatggagtcatccagggctaccgcacccctgtgctgtctgctgaggccagcactggagagacccccaacctgggggaggtggtggtggccgaggtgggctgggatgccctgaagctgaactggacagcccctgagggcgcctatgagtacttcttcatccaggtgcaggaggccgacacagtggaggccgcccagaacctgactgtgcctgggggcctgcggagcacagacctgcccggcctgaaggccgccacccactacaccatcaccatccggggcgtgacccaggacttcagcaccacccccctgtctgtggaggtgctgacagaggaggtgcctgacatgggcaacctgactgtgacagaggtgtcctgggatgccctgcggctgaactggaccaccccagatggcacctatgaccagttcaccatccaggtgcaggaggccgaccaggtggaggaggcccacaacctgactgtgcccggcagcctgcgctccatggagatccctggcctgcgggccggcaccccctacacagtgaccctgcatggagaggtgcggggccacagcacccggcccctggccgtggaggtggtgacagaggacctgccccagctgggggacctggccgtgtctgaggtgggctgggatggcctgcggctgaactggacagctgctgacaatgcctatgagcactttgtgatccaggtgcaggaggtgaacaaggtggaggccgcccagaacctgaccctgcccggcagcctgcgggctgtggacatccctggcctggaggccgccaccccctacagagtgtccatctacggcgtcatccggggctaccgcacccctgtgctgtctgctgaggccagcacagccaaggagcctgagatcggcaacctgaatgtgtctgacatcaccccagagagcttcaacctgtcctggatggccacagatggcatctttgagaccttcaccatcgagatcatcgacagcaaccggctgctggagaccgtggagtacaacatctctggagctgagaggacagcccacatcagcggcctgccccccagcacagacttcatcgtgtacctgagcggcctggcccccagcatccgcaccaagaccatcagcgccacagccaccacagaggccctgcccctgctggagaacctgaccatcagtgacatcaacccctacggcttcaccgtgtcctggatggcctctgaaaatgcctttgacagcttcctggtgacagtggtggacagcggcaagctgctggacccccaggagttcaccctgagcggcacccagaggaagctggagctgcggggcctcatcactggaattggctatgaggtgatggtgtctggcttcacccagggccaccagaccaagcccctgcgggcagaaattgtgacagaagctgagcctgaggtggacaacctgctggtgtctgatgccaccccagatggcttccggctgtcctggacagcagatgaaggagtgtttgacaactttgtgctgaagatccgggacaccaagaagcagagcgagcccctggagatcaccctgctggcccctgagaggacccgggacatcaccggcctgcgggaggccacagaatatgaaattgagctgtatggcatcagcaaaggaagaagaagccagacagtgtctgccatcgccaccacagccatgggcagccccaaggaggtgatcttcagtgacatcacagaaaattctgccaccgtgtcctggagggcccccacagcccaggtggagagcttccgcatcacctacgtgcccatcaccggcggcacccccagcatggtgacagtggatggcaccaagacccagacccggctggtgaagctgatccctggggtggagtacctggtgtccatcatcgccatgaagggctttgaggagagcgagcctgtgtctggcagcttcaccacagccctggatggccccagcggcctggtgacagccaacatcacagattctgaggccctggcccgctggcagcctgccatcgccaccgtggacagctatgtgatctcctacaccggggagaaggtgcctgagatcaccaggacagtgtctggcaacacagtggagtatgccctgacagacctggagcccgccacagagtacaccctgcgcatctttgctgagaagggcccccagaagagcagcaccatcacagccaagttcaccacagacctggacagcccccgggacctgacagccacagaggtgcagagcgagacagccctgctgacctggaggcctccccgggcctctgtgacaggctacctgctggtgtatgaatctgtggatggcaccgtgaaggaggtgattgtgggccctgacaccaccagctacagcctggccgacctgagccccagcacccactacacagccaagatccaggccctgaatggccccctgcggagcaacatgatccagaccatcttcaccaccatcggcctgctgtaccccttccccaaggactgcagccaggccatgctgaatggagacaccaccagcggcctgtacaccatctacctgaatggagacaaggccgaggccctggaggtgttctgtgacatgaccagtgatggcggcggctggatcgtgttcctgcggaggaagaatggccgggagaacttctaccagaactggaaggcctatgctgctggctttggagaccggcgggaggagttctggctgggcctggacaacctgaacaagatcacagcccagggccagtatgagctgcgggtggacctgcgggaccatggagaaacagcctttgctgtgtatgacaagttctctgtgggagatgccaagacccgctacaagctgaaggtggagggctacagcggcacagctggggacagcatggcctaccacaacggccgctccttcagcacctttgacaaggacacagattctgccatcaccaactgtgccctgagctacaagggggccttctggtacagaaactgccaccgggtgaacctgatgggccgctacggggacaacaaccacagccagggcgtgaactggttccactggaagggccacgagcacagcatccagtttgctgagatgaagctgcggcccagcaacttcaggaacctggagggccgcaggaagagggcctag

SEQ ID NO: 125980 - DNA, 3240 bp, Artificial Sequence
  derived and/or modified sequence
atgggcgccatgacccagctgctggccggggtcttcctggccttcctggccctggccacagagggcggcgtgctgaagaaggtgatccgccacaagaggcagagcggcgtgaatgccaccctgcctgaggagaaccagcctgtggtgttcaaccacgtgtacaacatcaagctgcctgtgggcagccagtgcagcgtggacctggagagcgccagcggggagaaggacctggcccctccttctgagcccagcgagagcttccaggagcacacagtggatggagagaaccagatcgtgttcacccaccgcatcaacatcccccggcgggcctgtggctgtgccgccgccccagatgtgaaggagctgctgagccggctggaggagctggagaacctggtgagcagcctgcgggagcagtgcacagctggggccggctgctgcctgcagcctgccaccggccgcctggacacccggcccttctgcagcggccggggcaacttcagcacagagggctgcggctgtgtgtgtgagcccggctggaagggccccaactgcagcgagccagaatgtcctggcaactgccacctgcggggccgctgcattgatggccagtgcatctgtgatgatggcttcaccggggaggactgcagccagctggcctgccccagcgactgcaatgaccagggcaaatgtgtgaatggagtgtgcatctgctttgagggctacgccggggctgactgcagccgggagatctgccctgtgccctgcagcgaggagcacggcacctgtgtggatggcctgtgtgtgtgccatgatggctttgctggagatgactgcaacaagcccctgtgcctgaacaactgctacaacagaggccgctgtgtggagaatgaatgtgtgtgtgatgagggcttcaccggggaggactgcagcgagctgatctgccccaatgactgctttgaccggggccgctgcatcaatggcacctgctactgtgaggagggcttcaccggggaggactgtgggaagcccacctgcccccacgcctgccacacccagggccgctgtgaggagggccagtgtgtgtgtgatgagggctttgctggggtggactgcagcgagaagcgctgcccagctgactgccacaacagaggccgctgtgtggatggccgctgtgaatgtgatgatggcttcaccggggctgactgtggggagctgaagtgccccaacggctgcagcggccacggccgctgtgtgaatggccagtgtgtgtgtgatgagggctacaccggggaggactgcagccagctgcgctgccccaatgactgccacagccggggccgctgtgtggagggcaaatgtgtgtgtgagcagggcttcaagggctatgactgcagcgacatgagctgccccaatgactgccaccagcacggccgctgtgtgaatggcatgtgtgtgtgtgatgatggctacaccggggaggactgccgggaccggcagtgcccccgggactgcagcaacagaggcctgtgtgtggatggccagtgtgtgtgtgaagatggcttcaccggccctgactgtgccgagctgagctgccccaatgactgccacggccagggccgctgtgtgaatggccagtgtgtgtgccacgagggcttcatgggcaaggactgcaaggagcagcgctgccccagcgactgccacggccagggccgctgtgtggatggccagtgcatctgccacgagggcttcaccggcctggactgtggccagcacagctgccccagcgactgcaacaacctgggccagtgtgtgtctggccgctgcatctgcaatgaaggctacagcggggaggactgcagcgaggtgtccccacccaaggacctggtggtgacagaggtgacagaggagaccgtgaacctggcctgggacaatgagatgagggtgacagagtacctggtggtgtacacccccacccatgagggcggcctggagatgcagttccgggtgcctggggaccagaccagcaccatcatccaggagctggagcccggggtggagtacttcatccgggtgtttgccatcctggagaacaagaagagcatccctgtgtctgcccgggtggccacctacctgcctgcccctgagggcctgaagttcaagagcatcaaggagacctctgtggaggtggagtgggaccccctggacatcgcctttgagacctgggagatcatcttcaggaacatgaacaaggaggatgaaggagagatcaccaagagcctgcggcggcctgagaccagctaccggcagacaggcctggcccctggccaggagtatgagatcagcctgcacatcgtgaagaacaacacccggggccctggcctgaagagggtgaccaccacccggctggatgcccccagccagatcgaggtgaaggatgtgacagacaccacagccctgatcacctggttcaagcccctggccgagattgatggcatcgagctgacctacggcatcaaggatgtgcctggggacaggaccaccatcgacctgacagaagatgagaaccagtacagcatcggcaacctgaagccagacacagaatatgaggtgtccctcatcagccggcggggggacatgagcagcaacccagccaaggagaccttcaccaccggcctggatgcccccaggaacctgcggcgggtgtcccagacagacaacagcatcaccctggagtggagaaatggcaaggccgccatcgacagctaccgcatcaagtatgcccccatctctggaggagaccacgccgaggtggatgtgcccaagagccagcaggccaccaccaagaccatcacagccaagttcaccacagacctggacagcccccgggacctgacagccacagaggtgcagagcgagacagccctgctgacctggaggcctccccgggcctctgtgacaggctacctgctggtgtatgaatctgtggatggcaccgtgaaggaggtgattgtgggccctgacaccaccagctacagcctggccgacctgagcccccccagcctcttcctgcacttcatccagcagaagccagagaagcagtactgcttccacttcaaggacatgatcaacatcatcaacatcatcatgatgatgatgatgatgaagaccaaggacttcagccgggacctgtccttccagaacatcagcggccagtacctgattgtgttcttcttctag

SEQ ID NO: 125981 - DNA, 6606 bp, Artificial Sequence
  derived and/or modified sequence
atgggcgccatgacccagctgctggccggcgtgttcctggccttcctggccctggccaccgagggtggcgtattgaaaaaagtgatccgacacaagaggcaatccggggtgaatgccacactcccggaggagaatcagccagtggtgtttaatcacgtatataatatcaagctcccggtgggaagccaatgctcagtcgacctcgagagtgctagtggcgagaaggatttagccccacctagtgagccatccgaatcctttcaggagcatactgtagatggtgagaaccagatcgtgttcacacacaggatcaatatcccgagacgcgcctgtggttgcgcggctgccccggatgtaaaagagctgctctctcggctcgaagaattagagaacctcgtgtcgtccttgagggagcagtgcactgcaggagctgggtgttgtctccagcccgcaacaggcaggctcgacacaaggcctttctgttccggccgcggtaacttttcgacagaagggtgcggctgcgtctgcgagcccgggtggaaaggacctaactgttcagaacctgaatgccctgggaactgtcatcttcggggacgatgtatcgatggtcaatgcatttgtgacgacggctttacaggcgaggactgttcccagcttgcctgcccctctgattgcaatgaccaaggaaaatgtgttaatggggtgtgtatatgctttgaaggctacgccggggcggattgtagccgcgaaatttgcccagtgccttgctctgaagaacacgggacttgtgtggatgggctgtgcgtgtgtcatgacggattcgcgggcgacgactgtaacaaacctctgtgcctcaacaactgctacaacagggggaggtgtgtcgaaaatgaatgtgtgtgtgacgagggctttaccggggaggactgttctgagttaatttgccctaacgactgtttcgaccgtggcaggtgcatcaatggcacatgttactgcgaggaggggttcacgggcgaagattgcgggaagcctacctgtcctcacgcctgtcacacacaggggaggtgcgaagagggtcaatgcgtctgcgacgaaggcttcgcgggagtggactgttccgagaaacgctgcccagccgattgtcacaatagaggccgttgcgtggatgggagatgtgagtgcgatgacggtttcaccggggccgactgtggagaattgaaatgtcctaacggatgtagcggacacggcagatgcgtcaatgggcagtgtgtttgcgatgagggttatacaggggaagattgctcgcagctgcgctgccctaacgactgccatagtcgtgggcgatgtgtggagggcaagtgtgtttgtgagcagggcttcaaggggtatgattgttctgacatgagctgtcctaacgactgtcaccaacatgggcggtgtgtcaatggaatgtgcgtatgcgacgacgggtataccggtgaggattgccgtgacagacaatgcccgagagattgcagcaaccgaggtttgtgcgtagacggacagtgtgtgtgcgaggacggtttcacaggaccggattgcgccgaactgtcttgcccaaacgattgccatgggcaggggcgttgtgtgaatggccagtgcgtgtgccacgaaggctttatgggcaaggattgcaaggagcagcggtgccctagtgattgccacggacagggaagatgcgtggacgggcaatgcatctgtcatgagggttttaccggcctagattgcggacaacactcctgtccttccgactgcaacaatttagggcaatgtgtctcaggcaggtgcatatgcaacgaggggtactctggagaggactgctctgaggtgtctccacctaaggatctggtggttaccgaagtgactgaagagacagtgaatctagcctgggacaacgagatgagagtaactgagtatctcgtagtgtatacccctacacacgagggcggtcttgagatgcagttcagggttccaggtgatcagacatcgacaatcattcaggaactagagcccggggtggaatatttcatcagagtcttcgccattttggagaataagaaaagcatccccgtgtccgctagagttgctacatatctcccggccccagaaggcttaaaatttaagagcatcaaggaaacttcagtcgaagtggagtgggatccattggacattgccttcgaaacctgggaaatcatatttagaaatatgaacaaggaggacgaaggcgagattactaagagtctacgtagacccgagacctcttaccggcaaaccgggctcgctccaggccaggaatatgagatatccctccatatcgtgaaaaataatactcgcggacccggattaaagagagtgacgactacacgtctggatgcaccctctcagatcgaggtgaaggacgtcaccgacacaacagccctgatcacttggttcaagcctctggccgaaatcgacggcatcgaattgacgtacgggatcaaggacgtcccaggtgacagaaccacaattgatctcaccgaagatgaaaatcagtatagcatcgggaatctcaagcccgataccgagtacgaggtgagccttatttcccgtaggggggacatgtcatctaaccctgccaaggagacatttactactggcttggacgccccaagaaacctaagacgcgtctctcagacagacaactcaatcacactggagtggcgtaatggtaaagctgcgatagacagctatagaattaagtatgccccaatatccggcggagaccatgctgaggtggacgtgcccaagtcccagcaggcaaccacaaagaccactcttacagggttgcggcctggcaccgaatacgggattggcgtatctgcagtgaaggaagataaggaatctaatccagcgacgatcaatgccgcgactgaactagacacccccaaggacctgcaggtctctgagacggctgagacttctttgaccttattatggaagactccactggctaagttcgatcggtatcgtctcaattattctctgcccaccggacagtgggtgggcgtacagcttcctcgcaataccacttcatatgtgctacggggtctggagccaggacaggaatacaatgtcctgctgactgcagagaaaggcagacataagtctaaacccgctagagtcaaggcctcgacagagcaggcacccgaattagagaacctgactgtcaccgaggtcggttgggacggcctgcgactaaattggactgcggcagatcaagcctatgaacattttatcatccaggtacaagaggccaataaggtggaggctgcccgaaaccttacagtgcccggctcactgcgcgcagtggatatcccaggcctgaaagccgctacaccttacaccgtgagtatatatggtgtgatccaaggatatcgtactcccgttctgagcgctgaggccagtactggggagacaccaaaccttggcgaggtggtggtggcagaagtggggtgggacgcactcaaactgaactggacggctccagagggcgcctacgaatacttttttattcaggtgcaagaggctgacacagtggaagcagcccagaacttgacagtaccaggcggcctgagaagtactgatctacccggcctgaaggccgctactcactataccatcacgatcaggggcgtgacccaagactttagcaccactcccctctccgtggaagttcttacagaagaggtgccagacatgggcaacttgacagtgacggaagtatcgtgggacgcactccgcctgaactggaccacccctgacggaacctacgaccagttcacaattcaggtccaagaggcggatcaagtggaggaagcgcataatctgactgtgccgggctctttacggtccatggaaattcccgggctgcgggccggcactccttacactgtgacactgcacggggaagtcagaggccattccactcgaccattggccgtggaggtggtgacagaagacctgcctcaactgggcgatctggccgtgagtgaggtaggctgggacggattgagactgaactggaccgccgccgacaacgcctacgaacacttcgtcattcaggtccaagaggtgaataaagtcgaagcagctcaaaatctgacactacccggctctctccgggcggtcgatatccccgggctagaggctgctacaccatatcgtgtgtccatttacggcgtaatcagggggtaccggacgccagtgctgagtgcagaagcatctacagccaaggagcccgaaattggtaatctgaacgtgtctgatatcacccctgaatcattcaatctgagttggatggccaccgacgggattttcgaaacctttacaatcgaaattatagattcaaacaggcttctggaaactgttgaatacaatatatcaggcgcggagaggacagcccacatcagcgggctgcccccaagcaccgacttcatcgtgtacctgtctgggctggccccctctatccgcactaagacaatctcagctacagccacaaccgaggcgctacctcttctggagaacctcaccattagcgatataaacccttatgggtttactgtgtcttggatggcttcagaaaacgcctttgactccttcctcgtcacagtagtagatagcggtaagttgctagacccacaggaattcacattgagcggcactcagagaaaactggagctgcgtggactgatcacaggcattggatacgaggtgatggtctccgggtttacccagggtcatcagactaagccgctgagagccgagatcgtgaccgaagccgagcccgaggtcgacaatctgctggtgtccgatgccacacctgacggtttcagactgtcctggaccgctgacgaaggcgtcttcgataactttgttttaaaaatccgcgacactaagaagcagagtgaacccctggagataacattgctggctccggaaaggacccgcgatatcacaggactgcgggaagctacggagtacgaaatcgaactctacggcatctcaaagggtcggcgcagccagactgtaagtgccattgccaccacggcaatgggtagcccgaaggaagtcatattctccgacattacagagaattcagccacagtctcatggcgtgcacctaccgcacaggtggaatcgtttagaatcacctacgttcccatcactggaggtaccccctctatggtgacggtagatgggacaaagacccagacacgactggtcaagctgattccaggcgtcgaatacctggtctctattatagccatgaagggttttgaggaaagtgaacccgtgtcaggttccttcactactgcacttgacgggccatccggactcgtgaccgctaatattactgactctgaagctctggccagatggcaacccgccatcgctaccgtggattcttacgtgattagctatacgggggaaaaagtcccggaaattacaaggacagtgtcaggaaacactgtggagtacgctctcaccgacttagaaccagcaaccgagtatacattaaggatcttcgcggaaaagggtccgcagaagagcagcactattaccgccaaatttactacagatctggactccccccgggatctcacagctaccgaagtccagtcagagactgcactgcttacctggcgaccaccccgcgcttccgtgactggatacctgctcgtgtatgagagcgtggacggaaccgtgaaggaagttatagttggcccggatactactagctactcacttgcagacctgagtccttctacccactataccgccaagattcaggccctgaatggtccactgcgcagcaatatgatacagacgatcttcaccacgatcggtcttctttacccctttccaaaggattgctctcaggccatgcttaatggggacaccacttccggtctctatacgatctatttaaatggggacaaggccgaggccctagaggtgttttgcgacatgactagcgacggcggcggttggatagtctttcttcgccgcaaaaatgggagggagaacttttaccagaactggaaagcctacgccgccgggtttggcgacaggcgagaggagttctggctgggcttagataatctcaacaagataactgctcaggggcagtacgaattgcgcgtggacctcagggatcacggcgagacagcttttgccgtgtacgataagttttcagtgggtgacgccaaaaccagatataagttgaaggttgaagggtatagcgggaccgcgggggacagtatggcctatcataacggccgcagcttctccactttcgacaaagatacagactctgccattaccaactgcgcactgagttacaaaggggctttctggtataggaactgtcacagggtcaacctcatgggtaggtacggagacaacaatcactcacagggagtaaactggttccactggaagggccacgaacattctatccagttcgccgaaatgaaacttagaccctcaaattttcgcaacctcgaagggaggcgaaagagagcgtag

SEQ ID NO: 125982 - DNA, 3240 bp, Artificial Sequence
  derived and/or modified sequence
atgggcgccatgacccagctgctggccggcgtgttcctggccttcctggcacttgcaactgaagggggagtgcttaagaaggttataagacacaaacgacaatccggggtgaatgccacccttcctgaggagaatcaaccggtcgtcttcaatcacgtctacaatatcaaactgcccgtgggaagccagtgctccgtcgatctggagagcgccagcggtgagaaggatctggcaccaccaagcgagccctcggaatcattccaagaacatacagtagacggcgaaaatcagatagtttttacccacagaatcaatataccacgcagggcttgtggctgtgccgcggcacccgatgtgaaagagctgttatcccgacttgaagagctggaaaacctggtgtcgtccctccgcgagcagtgtaccgcgggggccggctgttgcttacagccggccactggtagactcgacactcgaccattctgttcaggacgaggcaacttctctactgagggatgtgggtgcgtgtgcgaaccagggtggaagggaccgaattgtagcgaaccagagtgtcctggcaactgtcacctgcggggacgctgcattgacggccaatgtatctgtgacgatgggtttaccggcgaggactgtagccagctggcctgtccctcggactgtaacgatcagggcaaatgcgtgaatggtgtgtgcatctgttttgaggggtatgctggcgctgattgctcccgggagatctgcccagtgccctgcagcgaagagcatggcacctgcgtcgatgggctctgcgtatgtcatgacgggttcgctggtgacgattgcaacaaacccctctgcctgaataactgttataatagaggccgctgcgtagaaaatgaatgtgtgtgtgatgagggctttaccggcgaagactgttcagagctgatttgccctaatgattgcttcgaccgagggaggtgcatcaacgggacctgctattgtgaagagggattcaccggcgaggattgcggtaagccaacgtgccctcacgcctgccatacccagggtcgctgtgaagaaggtcagtgcgtttgtgacgaaggtttcgctggagtggactgctctgagaagcgatgtcctgctgattgccataatcgagggaggtgcgtagatggtcgctgcgagtgtgacgacggatttacaggtgcagattgcggagagcttaaatgccccaatgggtgctcaggccatggaagatgcgtgaacggacagtgcgtgtgcgacgaaggctacacaggcgaggactgtagtcaactgcgttgtccaaatgattgtcacagtagagggcgatgtgtagaaggaaagtgtgtctgcgagcagggattcaaggggtacgattgctccgatatgagctgtcccaatgattgccatcagcacgggcgctgtgttaacggtatgtgtgtgtgtgacgacggatacaccggggaggactgtcgagatcggcagtgcccccgggactgtagcaaccgcggcctgtgtgtggacggacagtgcgtgtgtgaagatggattcacaggccctgactgtgctgaattgagctgcccgaacgattgccatgggcagggcagatgtgtgaacggccagtgcgtgtgtcacgagggattcatgggaaaagactgcaaggagcaaagatgtccctccgattgccatggacaggggcggtgcgtggacggtcagtgcatttgccacgagggctttacaggattggattgtgggcagcacagttgcccgtcagattgcaacaatctggggcaatgcgtgtccggaagatgcatatgtaacgagggatactcaggggaggattgttccgaagtttctcctccgaaagacctggtggtcactgaggttaccgaagaaacagtgaacctggcatgggataatgaaatgcgcgtgacagaatacttggtggtgtacactcctacccatgagggcggattggagatgcagttccgcgttcccggcgatcaaacttcaactatcattcaagaacttgaaccaggcgttgagtatttcatccgggtgtttgccattctggaaaataagaagtcaattcccgtctcagctcgcgtggccacatatctccctgcaccggagggcctgaagtttaaatcgatcaaagagacatccgtcgaggtcgaatgggaccctctcgatatcgcctttgagacctgggagatcatcttcagaaatatgaacaaggaagacgagggcgagattactaaatctctgcgtaggcccgaaacgagttataggcagacaggactggcccctggccaggagtatgagataagtctgcacattgtgaagaacaacacccgagggcccggcctgaaacgcgtcacgacaactaggctggacgcacccagtcaaatagaagtgaaagacgtgaccgacactacggcactgattacctggttcaagccactggccgaaatcgatggtattgagctgacttacggtatcaaagacgtacctggagacaggaccaccattgacttaacggaggatgagaaccagtacagcataggtaacctgaaacctgacaccgagtacgaggtctcactcatcagccggcggggggacatgtcatccaaccccgcaaaggaaacattcaccacaggactcgacgccccccggaatcttcgccgcgtctctcagaccgataattccattaccctcgagtggcggaacggcaaggcggccatcgacagttacagaattaaatatgcaccaatatcaggcggggatcacgccgaagtggacgttcccaagagtcaacaggctacgacaaagaccatcacagctaagttcaccaccgaccttgattcgcctcgggatctaacagcaaccgaggtccagagcgaaacagccttattgacgtggcggccacctcgtgctagtgtgacaggctacctgcttgtctatgagtcagtagacggaacagtcaaggaggttatcgttggcccggatacgaccagctattccctggccgatctcagtcctcctagtctgtttctccattttattcagcagaaacccgaaaagcaatattgtttccattttaaagacatgattaatatcatcaacatcatcatgatgatgatgatgatgaagacaaaggacttctcccgcgacctgtccttccagaacatcagcggccagtacctgattgtgttttttttttag

SEQ ID NO: 125983 - DNA, 6605 bp, Artificial Sequence
  derived and/or modified sequence
atgggggcaatgacacaactactggcaggagtgtttctcgcctttctagcgctggctactgagggaggagtcttgaagaaagtcattcggcataagcgtcagagcggggtcaatgccactctgcccgaggagaatcagcctgttgtgttcaatcatgtctataacattaagctgcctgtcggatcacagtgctctgtcgacttggaaagcgccagtggcgaaaaagacctagcaccacctagcgaaccttctgagagctttcaggaacatacagttgatggtgagaaccagatcgttttcactcatagaatcaatatcccaaggagagcttgcggctgtgcggctgcccctgatgtgaaggagctattatcacggttggaagagctagagaatctggtgtcttccttgagagagcagtgcaccgcgggagcaggatgttgtctgcagccagctacaggtagactggacacacgccctttctgttccgggaggggcaatttttctactgaagggtgtggctgcgtatgcgagcccggttggaaggggccaaactgcagtgaaccagaatgtcctgggaattgccacctacgcggtcgctgtatcgatggccagtgtatctgtgatgatggctttactggtgaggactgctcgcagctcgcctgccccagtgattgcaatgaccaaggaaagtgtgtgaacggggtgtgtatttgttttgaggggtacgcaggagccgattgttcccgggagatatgccccgtcccctgtagtgaagagcatgggacatgtgtggatggtctttgcgtctgccatgacggctttgcaggagatgactgtaataaacccttgtgtttgaataattgttataaccggggtcgctgcgtggaaaatgaatgcgtgtgtgatgaggggttcacgggagaggattgtagtgagcttatctgtcctaacgattgtttcgatcggggacgatgcataaacggaacttgctactgcgaagaaggcttcaccggggaagattgtggcaagccaacgtgcccacatgcatgtcacactcagggccgatgcgaagaaggtcagtgcgtgtgcgatgagggatttgctggggtggactgcagtgaaaagcggtgtcccgcagactgtcataacagagggcgatgcgtcgacgggagatgtgagtgtgatgacggatttacaggagccgactgcggggagctaaagtgtcctaatggctgttcgggccacggacggtgtgttaacggccagtgcgtctgcgacgaaggttatacaggagaagactgcagtcagctgcggtgccctaatgactgtcatagccgcggtcggtgtgtcgagggaaagtgtgtttgtgaacagggattcaaaggttatgattgttcagacatgtcgtgcccaaatgactgccaccaacatgggaggtgtgtcaacggaatgtgcgtttgcgatgacggttacaccggagaggattgccgcgatcgccagtgtccacgagactgcagcaaccgaggcctgtgcgttgacggccagtgcgtttgcgaggacgggttcactggccctgactgcgccgaattgtcttgccccaacgactgccacggccaagggagatgtgtgaatggtcaatgtgtatgccacgaaggattcatgggcaaggattgcaaggagcaaaggtgcccttccgactgccatggacaggggagatgcgtagacggacagtgtatttgtcacgaagggttcaccggcctagactgcgggcagcactcttgcccgagcgactgtaacaatcttggccagtgtgtttcagggagatgcatctgcaacgagggatacagtggagaagattgttccgaagtgagccctccaaaggaccttgtggtcacggaggttaccgaggaaacagtgaacctcgcctgggacaacgagatgcgggtgaccgagtacttggttgtctacactcctactcatgaagggggactggagatgcaatttagagtccccggagatcagacttctacaatcatccaggagctggagcccggagtggaatatttcattcgggtctttgccatcctcgaaaataagaaaagtattccagtgtcagcaagggtggcaacttacctgccagctcctgaagggctgaagtttaaaagcattaaggagacatcggtcgaggttgagtgggatccccttgatattgcgttcgagacctgggagatcatcttccgcaatatgaacaaggaagatgaaggagagataacaaagtcacttcgtcgtcctgagaccagctacaggcagacaggtctggcaccgggacaggaatacgaaatctctctgcacatagtgaaaaacaacacccggggaccgggtctgaagagagtgactaccacacgcttggatgccccatcacaaatcgaagtaaaggacgtcaccgacaccacagcactaatcacctggtttaaacccctcgctgaaattgatggaatcgaactgacttacggcattaaggacgtccctggtgacaggacaaccattgatctgacagaggatgaaaaccaatatagtattggcaaccttaaaccggacaccgagtatgaagtgagtttaatatcacgaaggggcgatatgtctagtaatcctgctaaggagacgtttacgaccggactggatgcaccaagaaacctgcggcgtgtttcacagactgacaactcaataacactggaatggcgcaatggtaaagccgctatcgattcatatcggattaagtatgcacctatttccggaggcgatcatgctgaggtggatgttccaaaaagccagcaggctacaacgaagaccaccctgacaggtttgagacccggtacagaatatggtatcggtgtcagtgcagtcaaagaggataaggagtctaatccggctaccattaacgcagcaactgagcttgatactcctaaagacctgcaagttagtgaaacggctgaaacgagccttactctgttgtggaagacccccttggctaagtttgatcgatacagactgaactactcactgcctactgggcaatgggtcggggtgcagcttccgagaaacacaacaagttacgtgctgcgagggttggaaccgggacaggaatacaatgtgctgctcacagctgagaagggaaggcataagagcaagccggctcgagttaaggcttccactgaacaagcgccagagctagaaaacctgactgtgacagaggtgggctgggatggcctaagattaaattggaccgccgcagaccaggcttatgagcactttatcattcaggtgcaagaggcgaacaaggtggaggccgcacgaaatttgaccgtcccaggcagcctgagggccgtggacataccagggctcaaagctgctactccatataccgtctcaatttatggggtgattcagggataccggactcccgtactgtcagctgaggcctcaaccggcgagacaccgaatctcggagaagtagtggtggccgaggtcggctgggacgccctaaagctcaactggacagccccagagggcgcttacgaatatttttttattcaggtccaggaagctgacacggtcgaggcggctcagaatttaaccgtgcccggtggcctgcggagtactgatctcccaggcctgaaggccgctacacattacactatcaccattagaggggtgacccaggacttttccaccaccccgctgtctgtggaagttctgacagaagaggttccagatatgggaaatctgactgtaacagaggtgtcttgggatgctttaagactgaactggaccactccagatggtacttacgaccagtttactattcaggtgcaggaagccgatcaagtcgaagaggcccataaccttaccgtccctggatccctaaggtctatggagataccaggacttcgggcagggacaccttataccgtgactctgcatggcgaagtgcggggacacagcacacggcctttggccgtggaggtggttacggaagacctgccacagcttggcgacttagccgtttctgaagtggggtgggatgggttgcgcttaaactggacagcagccgataatgcctatgagcacttcgtgattcaagtgcaggaagtaaataaggttgaggccgcacagaacttgactcttcccggatctttgcgggcagtggacattcctggcttggaggcagccacaccctaccgtgtctccatttatggagtgatccggggataccggacgcccgtgctctccgccgaagcctccaccgccaaagaaccagagatcggaaatctgaatgtatccgatatcactccggaaagttttaatctttcttggatggccacggatggtatctttgaaacattcacaattgagattattgacagcaatagactgctagaaacagtcgagtacaatatatccggcgctgagaggactgcccacatcagcggcctgccgccttccacggactttatcgtttacctttcaggactggctccaagcattagaactaaaaccatatctgccactgcaaccacagaagccttaccactactagaaaaccttactattagcgacattaacccatacggcttcaccgtgagctggatggcctcagaaaatgcatttgattcattcctggtcacagtcgttgattcaggcaaactgctggacccccaagaattcactctatcggggacacagcgtaagcttgaactgagaggactgattacaggcattgggtatgaagttatggtttctgggtttacccagggacaccagaccaagcccttgagagcggagatcgtcaccgaggcagaacccgaagtcgataacctgctggtgagtgacgccacacctgatggtttccgcctaagctggacagccgacgagggggttttcgataactttgtactgaaaatacgggatacaaagaaacaatcagagccattggagatcacactcctggcccctgaaagaacaagggacatcacagggttgcgagaggcgaccgagtacgagatcgagctgtacggcatcagcaaagggcgacgcagccaaaccgtcagcgcaatagccactactgctatggggagcccaaaagaggtgattttttccgacataactgaaaactctgctactgtgtcatggagagcacccactgctcaggtggagagtttccgcattacatacgtgcctattaccggcggaactccatcaatggttactgtggacggaacgaagacgcagacccgcctggtgaaattgatcccgggagttgagtatttagtttccattatcgcgatgaagggattcgaggagtccgaacccgttagtggtagcttcaccaccgcccttgatggcccttctggcttagtcacagcaaacatcacagattcagaggctcttgcgagatggcagcctgcaatcgccactgtggacagttacgtgatatcctacactggcgagaaggtgcctgaaatcactcgaacagtttccggaaataccgtggagtacgcactgactgatttagagcccgcaacagagtacactcttcgaatatttgctgaaaaaggtccacaaaaaagctcgacaatcaccgctaagttcaccacagacctggattcccctcgggacctgacagctaccgaggtccagtctgaaacggcacttctgacctggaggccgccacgcgcttctgttaccgggtatctgctggtgtatgagagcgtcgatggcactgttaaggaagtgatcgttggcccagacaccacgtcctacagtctcgcggacctctcaccatctacccattataccgccaagatacaggcactcaacggccctctccggagtaacatgattcaaaccatttttactaccattggtctgctttacccattcccaaaagactgcagccaggctatgcttaatggcgataccacaagcgggctgtatactatctatcttaatggcgacaaagccgaggccctcgaagtattttgtgatatgacatctgacggtggcggttggatcgtgtttctgcgcaggaaaaacgggagagaaaatttttaccaaaattggaaggcgtatgctgcgggttttggagataggagagaggaattttggctcggtctggacaacttgaataagattactgcccagggccagtatgagttgcgtgttgatttgagagatcacggtgagacagccttcgccgtctatgacaaattttcagtcggcgatgccaaaactagatacaaactgaaggtcgagggttattcaggaaccgccggagacagcatggcctatcataacggacgttccttttctaccttcgacaaagacactgacagtgccatcactaattgcgcgctgagctataaaggggctttttggtaccgtaactgtcatcgggtgaatctgatgggaaggtatggagacaacaatcactctcagggggttaactggtttcattggaagggacacgagcactccatccaattcgccgaaatgaagctccggccatcgaattttcgcaatcttgaagggaggagaaagagggctta

SEQ ID NO: 125984 - DNA, 3240 bp, Artificial Sequence
  derived and/or modified sequence
atgggcgctatgactcagctgctggccggagtgttcctggccttcctggcactggcaacggagggtggcgtgctcaaaaaagtgatcaggcacaagcggcagtctggggtcaacgctactctgcccgaagagaaccagcctgtggtgtttaaccacgtgtataatatcaaactgcctgtggggtctcaatgcagcgtggatcttgaatccgcgtcaggcgagaaagaccttgccccacccagcgagccgagcgaatcatttcaggagcacacagtggatggcgagaaccagatcgttttcacacaccggatcaatatcccaagacgggcatgcgggtgcgccgcagctccggacgtcaaagaactgctgtcccgcctcgaagaactggaaaatctcgtaagttcactccgggagcaatgtacagcaggtgccggttgctgtttacaacccgctaccggtcgactggacacgcgccctttctgcagtggaaggggaaatttcagtactgaagggtgcgggtgcgtttgcgagcctggctggaagggaccgaactgctcagaaccagaatgccctggcaattgtcatctgcggggtcggtgtatcgatggccagtgtatctgtgacgatgggttcacaggcgaggactgctctcagctggcctgtccctccgattgtaacgatcaaggcaaatgcgtgaacggagtgtgcatctgtttcgaaggatacgctggtgccgactgttctcgtgagatttgccccgtaccatgcagtgaagaacatggcacctgtgtggacggcctgtgcgtgtgccatgatggcttcgccggtgatgactgtaataagccgctatgcctcaacaactgctacaatcgcggtcggtgcgtggagaacgaatgcgtgtgcgacgagggattcactggggaggattgctctgagctaatctgtccaaatgattgctttgacagggggagatgtatcaatggcacttgctactgcgaggaggggttcactggggaagactgtggaaaacctacttgcccccatgcatgccacactcagggcagatgtgaggaaggccaatgcgtgtgcgatgagggctttgctggcgtagattgctcagaaaaaaggtgtcccgctgattgtcacaacaggggaagatgcgtggacggtcggtgtgagtgcgacgacggctttaccggtgctgactgcggcgaactgaagtgccccaacgggtgttccggtcatggccgatgtgtgaatggtcagtgcgtatgtgatgagggatacactggggaggattgtagtcagctcagatgcccaaatgactgccactcacggggacgttgcgtcgaggggaaatgtgtctgcgagcagggctttaagggctacgattgtagcgatatgtcctgccctaatgactgccaccagcacgggaggtgtgtgaacggaatgtgcgtatgtgacgatggctatacgggagaggactgccgggatcgccagtgcccgagggactgtagcaatagagggctatgtgtcgatggccagtgcgtctgtgaggatggctttacaggtcctgattgtgcggagctgagttgccccaacgattgccacggacagggacgctgtgtcaatgggcagtgtgtttgtcacgagggctttatggggaaagattgtaaagagcaaaggtgcccctccgactgccacgggcaggggaggtgcgtggacgggcagtgcatctgccatgagggctttactgggctagattgcggccagcactcttgcccatctgattgcaacaacctagggcagtgtgtctccggtaggtgcatttgtaacgagggttatagcggagaggactgttctgaggtttctccaccaaaggatctggttgtgactgaagtaacagaggagactgtcaatctagcttgggacaacgaaatgcgagtgacagaatacctggtggtttacacaccgacacacgaaggagggctagaaatgcagttccgcgtgcccggagaccaaacctcaacaataattcaggagctcgagccaggcgtcgaatacttcatacgcgtgttcgcaatcctcgagaataaaaagagcatcccagtgagcgccagagtggcaacatacctgcctgcacctgaaggtttaaaatttaaatcaataaaggagaccagcgtggaagtggaatgggatccactagatattgctttcgagacctgggagataatcttccggaatatgaacaaagaggacgaaggagagatcaccaagagtctgcgtcgccctgaaaccagttaccgtcaaactgggttagccccaggacaggagtacgagattagtctccacatcgtgaaaaacaataccagaggacctgggttgaagagggttaccactacacgccttgacgctccctcccagatcgaagtgaaggacgtaaccgacactacagccctgatcacctggtttaaacctttggccgagatcgacgggatagaactcacttatgggatcaaggatgttccgggagataggacgactatcgatctgacagaggacgagaaccaatatagcataggtaacttgaaaccagacaccgagtatgaggtgtctctgatcagccggaggggcgacatgtctagtaatcctgccaaggagaccttcacaacgggcctggacgcccctcggaacctcagaagagtgtcccagaccgacaattcaataactctggagtggcggaacgggaaggcagctatcgactcataccgcataaaatacgccccaatcagcggaggggatcatgcggaagtggacgtgccgaagagccagcaggccaccactaaaactattacggctaaattcacaacagacctggatagccccagagatttaacagccacggaagtgcagtcagagaccgcgcttctgacctggcgtcctccacgagcgtcagtcaccgggtatttgcttgtctatgaatccgtggacgggactgtgaaggaagtgatcgttggccctgacacaacgagctactccttggccgatctgtctccccctagtctgttcctgcactttatacagcagaaacccgagaaacagtattgctttcattttaaagacatgatcaacattattaatataatcatgatgatgatgatgatgaagaccaaggattttagtagggatctttccttccagaacatctccgggcagtacctgattgttttttttttttag

SEQ ID NO: 125985 - DNA, 6606 bp, Artificial Sequence
  derived and/or modified sequence
atgggcgccatgacgcagctacttgccggggtgtttctcgcttttctcgcccttgccactgaagggggcgtgctgaaaaaggtgattaggcacaaacgacagagcggggtcaacgccactctgccagaagagaaccaacccgtagtattcaaccacgtgtacaatatcaaacttcccgtaggatcacagtgttcggttgatctggaatccgcatccggggaaaaggatcttgctccgcccagtgagccgtcagagagtttccaggaacacaccgttgatggagagaatcaaatcgttttcacacaccgcatcaacattccacgtagagcctgcggttgtgccgccgcgccagatgttaaagagctccttagtcgattggaagaattagaaaatttggtctcctcactgcgcgagcaatgtactgccggagccggatgctgcttgcaacctgccacagggaggttagacaccaggcccttttgctctggacgaggaaatttcagcaccgagggctgtggatgcgtctgtgaacccggatggaaaggcccgaactgtagcgagcccgaatgccctggtaattgccatctgagaggtcgatgtatcgatgggcagtgtatttgtgatgatggcttcactggcgaggattgtagtcagttggcctgcccttctgattgcaatgatcagggaaagtgtgtgaacggagtatgtatctgctttgagggttacgcaggggccgactgctctcgggaaatctgtccagtcccttgttctgaagagcacggaacatgtgttgatggcttgtgcgtgtgccacgatggttttgcaggagacgattgcaataaaccgctgtgccttaacaattgctacaaccggggacgctgcgtcgagaatgagtgtgtttgcgacgagggctttacgggtgaagactgctccgagttgatctgccctaacgactgttttgatcggggccgatgcatcaatgggacctgctattgtgaagaagggtttaccggggaagactgcggcaagcccacctgcccccatgcatgccatacacaggggcgttgtgaggaaggtcagtgtgtgtgcgacgagggctttgccggagtcgactgctcagaaaaaaggtgccctgccgactgccacaatcgaggccggtgcgttgacggccgctgcgaatgtgatgatggattcacaggcgccgactgcggcgaactaaaatgtcctaatggatgtagcggccacgggagatgcgttaacgggcagtgcgtgtgcgatgaaggctataccggagaagactgtagtcagctccgttgtccaaatgattgtcattcgcgcggcaggtgtgtggaagggaaatgtgtgtgtgagcaagggtttaaaggatacgactgttccgacatgtcctgtcccaatgactgccatcagcacgggcggtgtgtgaatggaatgtgcgtgtgcgatgacggatatacgggcgaagactgtcgcgaccgacaatgcccgagggattgtagtaatcgggggctatgtgttgatggacagtgcgtttgcgaagacgggttcaccgggccagattgcgcggagctcagttgcccaaacgactgtcacggccagggcaggtgcgtgaatggacaatgtgtctgtcacgaaggattcatgggaaaggactgcaaggagcagagatgcccaagtgattgccatggccagggaaggtgcgtggatggccagtgcatctgccacgagggctttaccggcctggactgcgggcagcacagctgtccttcagactgcaacaatctgggtcagtgtgtgagtgggcggtgcatctgcaatgagggctactctggagaggactgcagcgaggtgtccccgcccaaggatctggtcgttacagaggtgacggaggaaaccgtgaatctcgcttgggacaacgaaatgcgggtgactgaatatcttgtggtttacaccccgactcatgagggtggcctagaaatgcagttccgcgtgcccggcgatcagacatcaaccattattcaagagctcgagcccggcgtggagtatttcattagggtgtttgctattctggagaataagaaaagcatacccgttagcgcccgcgttgcaacttatcttcccgctcccgagggtttgaagttcaagtccattaaagaaacttcagtggaggtggaatgggatcctctggatatcgcattcgaaacctgggaaattatttttcgtaatatgaataaggaagatgagggcgagatcacaaagtccctgcgaaggcctgaaacctcttataggcagactggactcgctcccggccaagaatatgaaataagcctccatatcgtgaagaataatacgcgagggccagggttgaaacgcgtgactacaacccgcctcgacgccccatcacagatcgaggttaaagatgtgacagacaccacggctttgataacttggttcaagccactggctgagatcgacgggatcgaactcacttacgggataaaggatgttcctggagatagaacaacgatcgacctgacagaagacgagaatcagtatagtattgggaatctcaagccagacaccgagtacgaagtgtctctcatttcacgtaggggcgacatgtcttccaatcctgctaaagagacattcacaaccgggttagatgctccccgcaatctgaggagagtgtcccagacagacaactctattaccctggagtggcgtaatggtaaagctgccattgacagctaccgaatcaagtacgcaccaatcagcggtggcgaccatgccgaagtcgatgtgccaaagtcccagcaggcgacaactaagacgacgcttaccggcctcaggccaggcacagagtacggtattggggtgtccgccgtgaaagaagacaaggaatctaatcccgcaactattaatgctgcaacagaattagatacccctaaagatctgcaggtgtccgagaccgccgaaacatcgcttacactgctgtggaaaacgcctctcgccaagtttgacagatacagactcaactactcgctccccacaggacaatgggtaggcgtgcagcttccccggaatactacttcttacgtgctccggggtctggagccaggtcaagaatataatgtactactcaccgccgaaaaaggacgacataagtccaaacccgcgagagttaaggcttccacagaacaagcccctgagctggaaaacctgaccgtgacagaggttggctgggacggccttagattgaattggaccgctgccgaccaggcttacgagcattttatcatacaagttcaggaagctaataaagtggaggccgcccggaatctgactgtgcctggtagcctgcgagctgtggatatcccagggctgaaagccgccaccccatatacagtttccatttatggtgtcatccaggggtaccgcacacccgtgctttccgcagaagcgagtaccggcgaaacccccaatctgggggaagttgtggtagcagaagtaggatgggacgcgttgaagctcaattggacagctcctgaaggcgcatacgagtactttttcatacaagtgcaggaagcggatactgtagaggctgcccagaacctcacggttccaggagggctgaggtcgacagatctcccaggcttaaaagctgccacccattacaccatcacaatccgaggggtgacccaggatttcagcacaactcccttatctgtggaagtgctgaccgaggaagtacccgacatggggaaccttactgtgacagaggtctcatgggacgccttgcgcctgaattggacaacacccgatggtacttacgatcagttcaccatccaggttcaggaagctgatcaggttgaagaggctcataacctgactgtccctggaagcttgcgatctatggaaatccctgggttgcgcgcaggaaccccgtacactgtgaccctgcacggagaagtgagggggcactccacgcgtccgcttgctgttgaggtagtgacagaggaccttccacagctgggagatctggccgtctccgaggtgggttgggacggtctgagattgaattggacagcggccgataatgcctatgagcacttcgttatacaggtgcaagaagtgaataaggtcgaggctgcacagaatctgactcttcctggtagtttgcgggctgtggatattccgggcctggaagccgctaccccctaccgtgtctctatctacggagttatcagagggtaccgcactcccgttttatcagctgaagcttccaccgcaaaggagcctgagatcgggaaccttaatgtatcggacatcacaccggaatctttcaacctctcctggatggcaactgacgggatattcgagaccttcacgattgagattatcgactcaaatagactgctggagactgtggaatataatatcagtggagctgaacgtactgcacacattagcggccttccaccttctaccgactttattgtgtacctgagcggactcgcaccatccatccgtactaagaccattagcgctactgccaccaccgaagctcttccgctcctcgagaacctcactatatctgatatcaacccttatggtttcacagtgagttggatggccagtgaaaacgcattcgactccttcctcgtgactgtggttgatagcggaaaactactggatcctcaggaatttactctgtcaggcactcagcgcaagttggagcttagaggactcattactggaatcggatacgaagtcatggtatccggatttacacagggtcatcaaaccaagccactccgcgcagagatcgtaacagaggccgagcccgaagtggataatttgctggtgtcagacgctacccccgacggtttcagactttcctggacagctgacgaaggagtttttgataatttcgtactcaaaattcgggataccaaaaagcaatccgaacccctggaaataactctgctggctcccgagcggacacgggacatcactggcctccgggaggcaactgaatatgagatagaattatacggcatcagcaagggcagaaggtcccagacagtttccgccatagctacaacagccatgggatcccctaaagaggtgatattttctgacatcactgaaaactccgccactgtctcatggagagccccaacggctcaggttgagagcttcaggataacatacgtgcctattaccggaggtacaccctcaatggtcactgtggacggcaccaagacccagacccggttggtaaaactcattccgggtgtcgagtatctggtgtctattatcgctatgaagggcttcgaagaatcagaaccagtgtccggatcctttactaccgcgctcgacggaccgtccggcttagtgaccgccaacatcacggacagcgaagcactggcaagatggcagcctgctatcgccactgtggacagctacgtgatcagctataccggcgaaaaagtcccagagattacaagaacagtaagtggaaataccgtggagtatgctctgaccgacctcgagccagccactgagtataccctgagaattttcgccgaaaaagggcctcagaaaagttcaacgatcactgccaagtttacaaccgatctggattccccaagggacctcacagctaccgaagtgcagagcgaaacagccctcttgacctggaggccaccacgggcttcagtgaccgggtacctgctggtgtatgaatccgttgatggaaccgttaaggaggtcatcgttggacctgacacaacgtcgtactcactggctgatctgagcccatcaacccattacacagcaaaaatccaggcccttaacggtcctctgagaagtaatatgattcagactatctttactactattgggttactatatcctttccccaaagattgcagtcaagccatgcttaacggcgacacgacctccgggctatacactatctacttgaatggtgataaggcagaggccctggaggtcttctgcgatatgacttcggatgggggaggctggattgtctttctgcggagaaaaaatggtcgagagaacttctatcagaactggaaggcctatgctgccggctttggcgatcgaagggaagagttctggctgggcctggataatttgaacaaaattacagcgcagggacagtatgaactgcgggtagacctgcgggaccatggagagaccgccttcgcggtgtacgacaagttcagtgtgggtgacgctaagacccggtacaaattaaaggtggaaggctacagtggtacggcaggcgactctatggcataccataatgggagatcattctctacatttgacaaggacaccgattcagccatcaccaactgtgccttgagttacaaaggcgcattttggtatcgaaattgtcatcgtgtgaatcttatggggaggtacggggataacaaccactctcaaggtgtgaactggttccattggaagggtcacgaacattccatccagttcgctgagatgaagctgcggcccagtaacttccgaaatcttgagggccgccgcaagcgagcttag

SEQ ID NO: 125986 - DNA, 3240 bp, Artificial Sequence
  derived and/or modified sequence
atgggcgcaatgacccagctgcttgccggggtgtttttagcgttcctagccctggcaacagaggggggggtacttaaaaaagtaattagacacaagaggcagtcaggcgttaatgctacattaccagaggagaatcagcccgtggtgtttaatcacgtgtataatatcaaactccccgtaggatcacagtgctcagtcgatctggaatcagcctcaggcgaaaaagatttagcccccccatccgaaccttctgaatcattccaagagcacacggtggacggggaaaaccaaatcgtgttcacccatcgcatcaacatccctagacgagcctgcggctgtgcggctgcccccgatgtgaaggaactactaagccgactcgaagagctcgagaacctcgtgagcagcctccgagaacagtgcaccgccggtgcaggctgctgccttcaacccgcaaccggtcggctagatactcgcccattttgctctggtcggggaaactttagtaccgagggttgcggctgtgtatgtgaaccggggtggaaaggaccaaattgttctgagccggagtgccctggaaactgtcacctgcggggccggtgcattgacgggcagtgcatttgtgatgacggctttacaggcgaggactgtagtcaattagcatgccccagtgattgcaatgatcagggcaagtgtgtgaatggagtctgtatctgctttgaaggctatgccggtgccgattgcagtcgggagatctgcccagtgccctgctccgaggagcatggtacttgcgtggacggactctgcgtgtgtcatgacgggtttgcgggagacgactgtaataagccattatgtttgaacaactgttataatcgagggaggtgcgtcgaaaacgagtgtgtgtgcgacgaaggatttaccggggaagactgttcggagctgatttgcccgaatgactgctttgatcgcggccgctgtattaatggaacatgttactgtgaagagggcttcaccggggaagattgcggcaaaccaacatgtccgcatgcctgtcacacacagggacgatgcgaagaagggcagtgtgtgtgcgacgaaggcttcgcaggggtagactgttcggagaagagatgtcccgcagattgtcacaatagagggcgatgcgtggacggaagatgcgaatgcgatgatggttttacaggggctgactgcggcgaactaaagtgccccaacggctgttctggccacgggcggtgcgttaatggacagtgtgtgtgcgacgaggggtataccggagaggactgcagtcagcttcgatgtcccaatgactgtcatagtagaggccgctgtgtggagggtaagtgcgtgtgcgaacaagggttcaaagggtacgactgttccgacatgagctgtccgaacgattgtcatcagcacggtcgctgcgtaaatggaatgtgcgtatgtgacgacggctacacaggcgaggactgtcgagaccgccagtgcccccgagactgttccaatcgcgggctttgtgtggacgggcagtgtgtgtgtgaagatggcttcactggacccgattgtgccgaactgtcatgcccaaatgattgccacggtcagggacgctgcgtgaacggacagtgcgtgtgccacgaaggctttatgggaaaggattgtaaagaacagcgatgccccagtgactgccacggacaggggcgctgtgtcgatggccagtgtatttgccatgagggctttaccggtcttgactgcggacagcacagctgcccgtccgattgcaataatcttggacaatgcgtcagtggcagatgcatatgcaatgaaggctatagcggcgaggactgctcggaagtgtcacctccaaaggacctggtggtcacagaggtcaccgaggaaaccgtgaacctagcctgggataatgaaatgcgcgttaccgagtatctggtggtgtacacccctacccacgaaggaggattggaaatgcagttcagggtgcctggggatcagacttctaccatcatccaggaactggagcccggcgttgagtactttataagagtcttcgccatactggagaataagaaaagcattcctgtcagcgcaagggtggccacctacctccctgctcctgagggactgaagtttaaaagcattaaggaaacgagtgtggaagtggagtgggaccccctcgatattgcgttcgagacatgggaaatcatcttcaggaacatgaacaaggaggacgaaggggagatcacaaagtccttaaggagacctgagacttcttaccgacaaacaggattggcacccgggcaggagtacgagatatcactgcacatagttaagaacaacacccggggtccggggctgaaacgcgtaactacaaccagacttgatgctccaagccagattgaagttaaggacgtgacagacactaccgccttgataacgtggtttaaacccctcgcagagattgacggcatcgagctaacttatggaattaaggacgtgcctggagaccgtactaccatagatctgaccgaagatgagaaccagtactctatagggaacctgaaaccggacacagagtatgaggtatctctgatctctcgccgcggagatatgagttccaatcctgctaaagaaacctttacaaccggccttgacgccccacgtaatctgcggagagtcagccagaccgataacagtattacgctggaatggaggaacggcaaagcggctattgattcttatcggatcaaatacgcacccatctccggcggtgaccacgccgaggttgacgtccctaagagtcaacaggctacgacaaaaaccattacagctaaatttacaacagacctggatagccctcgcgatttaacggccacagaggtgcaaagcgagaccgccttgctcacttggaggcccccccgagcctcagtaaccggatacctgctggtatacgaatcagtcgacggcacggttaaggaggttatcgtcggacctgacacaacatcatattctctagcagatctgtcgcctccttctttattcctgcacttcatacagcagaagccagaaaagcaatattgtttccactttaaggatatgataaacatcataaatattattatgatgatgatgatgatgaaaacaaaggacttttctcgagatctgtctttccagaacatcagtggccagtaccttatagtattcttcttttag

SEQ ID NO: 125987 - DNA, 6606 bp, Artificial Sequence
  derived and/or modified sequence
atgggcgccatgacccagctgctggcaggcgtatttttggccttcctggctctcgctactgaaggcggggtcctcaaaaaagttattagacataaaagacaatccggagtcaatgcaaccctcccagaggaaaatcagcctgtcgtgtttaatcacgtgtacaatattaaattgcccgtgggaagtcaatgctctgtcgatttggagtcggcctccggcgagaaagatctcgctcccccttccgagccgagcgaatcctttcaagaacacaccgtcgacggcgagaatcagattgtattcacacaccgcatcaacattccacgtagagcctgcggttgtgccgccgcgccagatgttaaagagctccttagtcgattggaagaattagaaaatttggtctcctcactgcgcgagcaatgtactgccggagccggatgctgcttgcaacctgccacagggaggttagacaccaggcccttttgctctggacgaggaaatttcagcaccgagggctgtggatgcgtctgtgaacccggatggaaaggcccgaactgtagcgagcccgaatgccctggtaattgccatctgagaggtcgatgtatcgatgggcagtgcatctgcgacgacggcttcacgggggaggattgttcacaattagcatgtccatctgactgtaacgaccagggaaaatgtgtgaatggagtgtgcatttgctttgaaggctacgccggcgctgactgtagcagggagatatgcccggtgccttgcagtgaagaacatggaacttgcgttgatgggctttgcgtctgtcacgatggttttgctggcgatgactgtaataagcccctgtgtttgaacaattgttataatagagggcgatgtgttgaaaatgagtgtgtttgcgatgagggattcaccggggaggattgctctgaactcatctgtcctaacgactgcttcgacagaggacgatgcatcaacggaacatgttactgcgaggaagggttcactggggaggattgcggaaaaccaacctgcccacatgcctgtcatacccagggcagatgcgaagaaggacagtgcgtgtgtgacgagggctttgccggagtggattgtagtgaaaagaggtgcccagctgattgtcacaaccgaggtaggtgcgtagatggccgatgcgaatgtgatgatggtttcactggagcagattgtggagagctaaaatgccctaatggatgcagtggacacggcagatgcgtaaatgggcagtgtgtgtgtgatgagggctacacaggggaagactgtagccaactgagatgccctaatgattgtcattcgcggggacggtgcgttgaggggaaatgcgtttgcgagcagggtttcaaagggtatgactgtagcgacatgagctgtccaaacgattgccatcaacatggacgctgcgttaatggcatgtgtgtgtgcgacgacggctataccggggaagactgtcgagatcgccagtgtcccagagactgctctaacagaggactgtgtgttgatggccagtgcgtgtgcgaggacgggtttacaggcccagattgtgccgaactgagttgccccaatgattgccatgggcagggccgatgtgtgaacgggcagtgtgtgtgtcacgagggttttatggggaaggactgtaaagagcaaagatgcccatcagactgccatggacaggggagatgcgtagatggacagtgtatttgccacgaaggctttactggtcttgactgtggacagcactcttgtccttctgactgtaacaacttaggtcagtgcgtatctgggagatgtatctgcaacgaaggttatagcggggaggattgttccgaggtctcacctcctaaggatctcgttgtgaccgaagtgacggaggagacagtgaatttggcatgggacaacgaaatgcgagtgacggaataccttgtagtatacacaccaacacatgaaggcggcctcgaaatgcaatttcgcgtgccaggggaccagactagcaccattatccaggagttagaacccggcgtcgagtatttcataagagtatttgcgattcttgaaaacaagaagagcattcctgtgagcgctagagtggccacctatttacctgctcccgaaggacttaaatttaaaagcatcaaagagacatctgtcgaagtggagtgggatcccctggacatcgcattcgagacctgggagattatctttcgcaatatgaataaggaagacgaaggggagataacaaagtccctgcgtagacccgaaacctcttatagacaaactggtcttgcgccaggacaggagtacgagatctctttacatattgttaaaaacaacacacgcgggcccgggctgaagagagtgacaactacacgactcgacgcgcctagccagattgaggttaaagatgtgaccgatactacagccctcatcacctggttcaagccactcgcagagattgacgggatcgaactgacttacggcattaaagacgtgcctggcgaccgcacaactattgacctgactgaggacgagaaccaatatagcattggcaatctcaaacctgataccgagtacgaggtgagcctgattagccggcgaggagatatgtcatcaaatcccgcaaaggagacctttaccacaggactcgacgccccacgcaaccttaggcgagtgtcccagaccgataactccatcactcttgagtggcggaatggcaaagccgcaatcgatagctacaggatcaaatatgcccccatctctggaggcgatcacgcagaggttgatgttccaaagtcacagcaggccacaacgaagacaacacttacgggacttagaccgggcacagaatatggaataggagtttctgccgtgaaagaagataaagagtccaacccagcaactattaatgcagcgaccgaactcgacacaccaaaggatctacaggtgtctgaaaccgcagagacgagtctcactctgttatggaaaactcctttggccaagttcgataggtatcggctgaactatagtctaccaactggacaatgggtcggagttcagctcccgcggaacaccacttcatacgttctaaggggtctcgagccaggtcaagaatataacgtgctcctgacagctgagaaaggtagacataagtccaagcccgcacgcgtgaaagcttccacggaacaggcaccagaattagagaatttaaccgttacagaagttgggtgggatggcttaagactgaactggaccgctgccgaccaggcctatgaacacttcatcattcaagttcaggaggctaataaggtcgaagctgcacgcaacctcactgtgcccgggtcactgagggctgtcgatattccgggattaaaagctgctaccccctacaccgtttcaatctatggcgttatacagggttacaggactccagtgttgagtgcagaagctagtacaggggagactcctaatttaggggaagtggtcgtggctgaagtgggctgggacgcactgaagcttaattggacagcacccgagggggcgtacgagtatttttttatccaggttcaagaagctgacacagtggaagctgcgcaaaatttgaccgtgccaggcggactccgttctactgacttaccgggactgaaggctgccacacactacacaattaccattaggggcgtgacacaggacttctctactacacctctcagtgtggaagtgttgacagaagaagtcccagacatgggtaatttgaccgttaccgaggtgagctgggatgccctgagattaaactggactaccccggacggaacctacgatcaatttacaatccaagtgcaggaggcggatcaggttgaagaagcacacaatctaaccgttcccggctcccttagaagtatggagatcccaggcctgcgcgcgggtacaccctacaccgtaacactgcacggggaagtacgtggccattccacaagaccgctggccgttgaagtcgtgacagaggatcttcctcaattgggtgacctcgccgtgtccgaagtgggatgggacggtctgaggctcaactggacagcagccgataacgcttacgagcattttgtgatccaagtacaggaagtgaacaaggtcgaggctgcccagaacttgacacttcccgggtcacttcgtgccgtcgacatccctgggttggaagccgccactccttatagagtgtctatttacggtgttataaggggttatagaacaccggtcctgagcgcagaagcgagcacagccaaggaaccagagattggaaatttaaacgtgagtgacattaccccagagtcttttaatttaagctggatggccacagatggcatatttgagactttcacaatcgagatcattgattcaaatagacttcttgagacggtggagtataacatcagcggcgctgaacgtaccgcacacatatctgggctgcccccaagtacagatttcatcgtctatctttccggcctcgctcccagcattcggaccaagaccatatcagctactgctaccacggaggctctgccattgcttgagaacctaacaattagcgacataaatccttacggattcacggtatcctggatggctagtgagaacgcattcgactcgtttttagtgactgtcgtcgactctggaaagctgcttgatcctcaagaatttactctatccggaacccaacgtaagctcgagctccgaggtctcatcaccggcattggatacgaagtaatggttagcggatttactcagggccatcagacaaaaccattaagagccgagattgtgaccgaggccgaacctgaagtggacaacctgctggtgtctgacgccacccccgacggattcaggctgagctggactgctgacgagggagtcttcgataatttcgtgcttaagatccgcgacaccaagaagcaaagcgagcccttggagatcacgctcctggcaccagaaaggactcgagacatcacaggattacgggaagcaactgaatatgaaatcgaactctacgggatctcgaaaggacgaagatcacagacagtaagtgcaattgctacgacagcaatgggaagccctaaggaggttatcttctccgacattacagagaattccgctaccgtgagctggcgtgctcctaccgctcaagtagaaagttttcgcatcacatacgtcccaattaccggaggtactccctcaatggtaacggtcgacggcacaaagacccagacccgcctggtaaaattgatccccggagtagagtaccttgtgagtattatagccatgaaaggattcgaagagagcgaacctgtttcaggaagcttcacaaccgccctcgacggtcccagcgggctcgtaacagccaacattacagatagtgaagctcttgctcgatggcagccggcaattgctacagtggatagttacgttatcagctataccggagagaaggtacctgagattacacgtacagtaagcggcaatacagtagaatatgcactaacagatctggaacctgccacagaatacactctcaggattttcgccgaaaaaggtccccaaaaatcatctactataactgcaaaatttactacggacctcgactcacctagagacctgacagccacggaggtccagagtgaaaccgcgctgctgacttggaggccccctcgcgcctcagttactggatatttactcgtgtacgagtccgtggatggaaccgtcaaggaagtcattgtgggcccagatacaacatcttactctctcgctgatttatcgccaagcacccactacaccgccaagattcaagcgcttaatggccctctaaggtccaatatgatccagaccatcttcacaactatcgggcttctgtacccgtttcccaaagactgcagtcaagccatgctcaatggcgacacaacttccggcctatataccatctacttgaacggtgacaaagcagaggctctcgaggtgttttgtgacatgaccagcgatggggggggatggatagtctttctaaggaggaaaaatggcagggagaatttctaccagaattggaaggcatatgcggctgggtttggtgacagacgggaggaattctggcttgggcttgacaatttgaacaaaatcaccgcccagggacagtacgaactgagggtggacctgagggatcatggtgagaccgcatttgctgtttatgataagtttagtgtgggagatgcaaagacccggtataaattgaaggttgagggctatagcggaactgctggggattccatggcctatcataatgggagatctttcagcacatttgataaagacaccgacagcgctattaccaactgtgcgctgagctacaagggcgctttttggtaccgcaattgccaccgcgtgaacctcatgggcaggtacggcgacaataatcactctcagggcgtgaactggtttcactggaagggtcatgaacatagcattcagttcgcggagatgaaactgagacctagcaatttcaggaacctggagggacgacggaagagagcttag

SEQ ID NO: 125988 - DNA, 3240 bp, Artificial Sequence
  derived and/or modified sequence
atgggtgccatgacacagctacttgccggtgtattcctagcttttttggccctggcaacagaagggggcgttctcaagaaggttattagacacaaaagacagagtggcgtgaatgctacgctacccgaagaaaaccaaccagtcgtgttcaaccacgtttataacatcaagcttcccgttggcagtcagtgctccgtagatcttgaaagtgccagtggtgagaaagacttggctccaccaagtgaacctagcgagtcattccaagagcatacggttgatggtgagaatcaaattgtgttcacacatagaatcaatattccgcgccgcgcttgcgggtgcgccgccgccccagatgttaaggaactgctgtctcgtctcgaggaactggagaatctggtatcaagtctccgcgaacagtgtacagctggcgccgggtgctgcctgcagcccgcaacagggcgcctggacacgcgacccttttgcagcggaagagggaatttttcgacggaaggctgtggatgcgtatgcgaaccaggctggaaaggacccaattgctcagagccagaatgcccaggcaactgtcacctaagaggaaggtgcatagatggccagtgcatttgcgacgatggattcaccggcgaagactgttctcagctggcctgcccatctgattgtaatgatcagggtaaatgtgtcaacggtgtctgcatttgttttgaagggtacgctggggctgactgctcaagggaaatttgtcctgtgccatgttcagaagaacacgggacttgcgtggatgggttatgcgtgtgtcatgatggtttcgcaggggatgattgcaacaaaccactgtgcctgaataattgttataatagaggcagatgtgtggaaaacgagtgtgtatgtgatgagggatttactggggaagactgctctgagctgatctgtccaaacgactgttttgatcgcggacggtgtatcaatggtacatgttactgtgaggaaggctttacaggggaagactgcggtaaaccaacatgcccccatgcttgtcacacccaaggacgttgtgaagaagggcagtgtgtttgtgacgaaggattcgctggcgtggattgctctgaaaaaaggtgccctgctgattgccataaccgcggaagatgtgtcgacggtaggtgtgaatgcgacgacggatttactggagcagattgcggtgaattgaaatgtccaaacggttgcagtgggcatgggagatgtgtgaatggacagtgcgtgtgtgacgaaggttatacgggggaagattgctcacagctaaggtgtcctaatgattgccattctaggggccgatgcgtcgagggtaagtgtgtgtgcgagcagggcttcaagggctacgactgctcagacatgtcatgtcccaatgattgccaccagcacggtcgttgcgtgaatggaatgtgtgtgtgtgatgatggctacaccggggaagactgccgcgaccgtcagtgtccgcgtgattgttcaaaccgcggtttatgtgttgatgggcagtgcgtgtgtgaggacggctttacgggccccgactgcgcggagctgtcatgccccaatgactgccacggccaggggaggtgtgttaacggtcagtgtgtgtgtcacgagggatttatgggaaaggactgtaaggagcagagatgcccatccgattgccacggccaggggagatgcgtggatggacagtgcatttgtcacgaaggattcaccggtttggattgcggccaacatagttgcccctctgactgcaataacctgggacagtgtgttagcgggcgatgtatttgtaatgagggatactctggtgaggactgcagcgaggttagtccacctaaagaccttgtggtgactgaagtgacagaagaaactgtgaatctggcatgggataatgagatgagggtgactgagtacttggtggtctatactccgacacatgagggtggtctcgaaatgcaattccgagttccgggtgatcaaaccagtactattatccaggagttggagccaggtgtggaatactttatcagagtttttgccatcctggaaaacaagaaatccattccagtcagtgctcgcgtcgccacttacctgcctgcacctgagggattaaagttcaaatctatcaaagagacatccgtcgaggtagaatgggatccgcttgacatagctttcgaaacctgggaaatcatcttcagaaacatgaacaaagaggacgaaggagagatcacaaagtcactgagacgccccgaaacgtcatatcgacagactgggcttgcaccagggcaggagtacgaaattagcctgcatattgttaagaacaacacccgtggccctgggctgaaaagagttacaaccacgagactggatgctccctcccagattgaagtgaaggatgtaactgatacaaccgcactcatcacctggtttaagccactcgctgagattgatggcatagaacttacatacggcattaaggacgtacccggcgacagaactacgattgatctgactgaagacgaaaaccagtactctatcggaaaccttaagcctgacaccgaatacgaagtctccctaatctctagaagaggtgacatgtcctcgaaccctgcaaaggaaacctttaccactggactagacgcacctcggaatctgcgccgggtctcacaaaccgacaatagcatcacattggagtggaggaatggaaaagccgccatagatagctaccgcattaaatacgcacctatctcaggcggagatcatgctgaagttgatgtcccaaagtcgcagcaggctacaactaaaacaattactgctaaattcaccaccgatcttgacagtccacgggacttgaccgcgaccgaggtccagagcgaaaccgcccttctcacgtggcgcccccctcgagcatcggttaccgggtacctattggtctatgaaagtgtagacggaaccgtcaaagaagtgatagtgggccccgataccacgagctactcccttgctgacctgagccccccctctctcttccttcactttattcaacagaagccagagaagcagtattgtttccattttaaggatatgatcaatataattaacattattatgatgatgatgatgatgaaaactaaggatttctctcgcgacctgtctttccaaaacatctccggccagtacctgatcgtcttttttttctag

SEQ ID NO: 125989 - DNA, 7641 bp, Artificial Sequence
  derived and/or modified sequence
aattcgccaactgaaaaagtgggaaaggatgtctggaggcgaggcgtcccattacagaggaaggagctcgctatataagccagccaaagttggctgcaccggccacagcctgcctactgtcacccgcctctcccgcgcgcagatacacgcccccgcctccgtgggcacaaaggcagcgctgctggggaactcgggggaacgcgcacgtgggaaccgccgcagctccacactccaggtacttcttccaaggacctaggtctctcgcccatcggaaagaaaataattctttcaagaagatcagggacaactgatttgaagtctactctgtgcttctaaatccccaattctgctgaaagtgagataccctagagccctagagccccagcagcacccagccaaacccacctccaccatgggggccatgactcagctgttggcaggtgtctttcttgctttccttgccctcgctaccgaaggtggggtcctcaagaaagtcatccggcacaagcgacagagtggggtgaacgccaccctgccagaagagaaccagccagtggtgtttaaccacgtttacaacatcaagctgccagtgggatcccagtgttcggtggatctggagtcagccagtggggagaaagacctggcaccgccttcagagcccagcgaaagctttcaggagcacacagtggatggggaaaaccagattgtcttcacacatcgcatcaacatcccccgccgggcctgtggctgtgccgcagcccctgatgttaaggagctgctgagcagactggaggagctggagaacctggtgtcttccctgagggagcaatgtactgcaggagcaggctgctgtctccagcctgccacaggccgcttggacaccaggcccttctgtagcggtcggggcaacttcagcactgaaggatgtggctgtgtctgcgaacctggctggaaaggccccaactgctctgagcccgaatgtccaggcaactgtcaccttcgaggccggtgcattgatgggcagtgcatctgtgacgacggcttcacgggcgaggactgcagccagctggcttgccccagcgactgcaatgaccagggcaagtgcgtaaatggagtctgcatctgtttcgaaggctacgccggggctgactgcagccgtgaaatctgcccagtgccctgcagtgaggagcacggcacatgtgtagatggcttgtgtgtgtgccacgatggctttgcaggcgatgactgcaacaagcctctgtgtctcaacaattgctacaaccgtggacgatgcgtggagaatgagtgcgtgtgtgatgagggtttcacgggcgaagactgcagtgagctcatctgccccaatgactgcttcgaccggggccgctgcatcaatggcacctgctactgcgaagaaggcttcacaggtgaagactgcgggaaacccacctgcccacatgcctgccacacccagggccggtgtgaggaggggcagtgtgtatgtgatgagggctttgccggtgtggactgcagcgagaagaggtgtcctgctgactgtcacaatcgtggccgctgtgtagacgggcggtgtgagtgtgatgatggtttcactggagctgactgtggggagctcaagtgtcccaatggctgcagtggccatggccgctgtgtcaatgggcagtgtgtgtgtgatgagggctatactggggaggactgcagccagctacggtgccccaatgactgtcacagtcggggccgctgtgtcgagggcaaatgtgtatgtgagcaaggcttcaagggctatgactgcagtgacatgagctgccctaatgactgtcaccagcacggccgctgtgtgaatggcatgtgtgtttgtgatgacggctacacaggggaagactgccgggatcgccaatgccccagggactgcagcaacaggggcctctgtgtggacggacagtgcgtctgtgaggacggcttcaccggccctgactgtgcagaactctcctgtccaaatgactgccatggccagggtcgctgtgtgaatgggcagtgcgtgtgccatgaaggatttatgggcaaagactgcaaggagcaaagatgtcccagtgactgtcatggccagggccgctgcgtggacggccagtgcatctgccacgagggcttcacaggcctggactgtggccagcactcctgccccagtgactgcaacaacttaggacaatgcgtctcgggccgctgcatctgcaacgagggctacagcggagaagactgctcagaggtgtctcctcccaaagacctcgttgtgacagaagtgacggaagagacggtcaacctggcctgggacaatgagatgcgggtcacagagtaccttgtcgtgtacacgcccacccacgagggtggtctggaaatgcagttccgtgtgcctggggaccagacgtccaccatcatccaggagctggagcctggtgtggagtactttatccgtgtatttgccatcctggagaacaagaagagcattcctgtcagcgccagggtggccacgtacttacctgcacctgaaggcctgaaattcaagtccatcaaggagacatctgtggaagtggagtgggatcctctagacattgcttttgaaacctgggagatcatcttccggaatatgaataaagaagatgagggagagatcaccaaaagcctgaggaggccagagacctcttaccggcaaactggtctagctcctgggcaagagtatgagatatctctgcacatagtgaaaaacaatacccggggccctggcctgaagagggtgaccaccacacgcttggatgcccccagccagatcgaggtgaaagatgtcacagacaccactgccttgatcacctggttcaagcccctggctgagatcgatggcattgagctgacctacggcatcaaagacgtgccaggagaccgtaccaccatcgatctcacagaggacgagaaccagtactccatcgggaacctgaagcctgacactgagtacgaggtgtccctcatctcccgcagaggtgacatgtcaagcaacccagccaaagagaccttcacaacaggcctcgatgctcccaggaatcttcgacgtgtttcccagacagataacagcatcaccctggaatggaggaatggcaaggcagctattgacagttacagaattaagtatgcccccatctctggaggggaccacgctgaggttgatgttccaaagagccaacaagccacaaccaaaaccacactcacaggtctgaggccgggaactgaatatgggattggagtttctgctgtgaaggaagacaaggagagcaatccagcgaccatcaacgcagccacagagttggacacgcccaaggaccttcaggtttctgaaactgcagagaccagcctgaccctgctctggaagacaccgttggccaaatttgaccgctaccgcctcaattacagtctccccacaggccagtgggtgggagtgcagcttccaagaaacaccacttcctatgtcctgagaggcctggaaccaggacaggagtacaatgtcctcctgacagccgagaaaggcagacacaagagcaagcccgcacgtgtgaaggcatccactgaacaagcccctgagctggaaaacctcaccgtgactgaggttggctgggatggcctcagactcaactggaccgcagctgaccaggcctatgagcactttatcattcaggtgcaggaggccaacaaggtggaggcagctcggaacctcaccgtgcctggcagccttcgggctgtggacataccgggcctcaaggctgctacgccttatacagtctccatctatggggtgatccagggctatagaacaccagtgctctctgctgaggcctccacaggggaaactcccaatttgggagaggtcgtggtggccgaggtgggctgggatgccctcaaactcaactggactgctccagaaggggcctatgagtactttttcattcaggtgcaggaggctgacacagtagaggcagcccagaacctcaccgtcccaggaggactgaggtccacagacctgcctgggctcaaagcagccactcattataccatcaccatccgcggggtcactcaggacttcagcacaacccctctctctgttgaagtcttgacagaggaggttccagatatgggaaacctcacagtgaccgaggttagctgggatgctctcagactgaactggaccacgccagatggaacctatgaccagtttactattcaggtccaggaggctgaccaggtggaagaggctcacaatctcacggttcctggcagcctgcgttccatggaaatcccaggcctcagggctggcactccttacacagtcaccctgcacggcgaggtcaggggccacagcactcgaccccttgctgtagaggtcgtcacagaggatctcccacagctgggagatttagccgtgtctgaggttggctgggatggcctcagactcaactggaccgcagctgacaatgcctatgagcactttgtcattcaggtgcaggaggtcaacaaagtggaggcagcccagaacctcacgttgcctggcagcctcagggctgtggacatcccgggcctcgaggctgccacgccttatagagtctccatctatggggtgatccggggctatagaacaccagtactctctgctgaggcctccacagccaaagaacctgaaattggaaacttaaatgtttctgacataactcccgagagcttcaatctctcctggatggctaccgatgggatcttcgagacctttaccattgaaattattgattccaataggttgctggagactgtggaatataatatctctggtgctgaacgaactgcccatatctcagggctaccccctagtactgattttattgtctacctctctggacttgctcccagcatccggaccaaaaccatcagtgccacagccacgacagaggccctgccccttctggaaaacctaaccatttccgacattaatccctacgggttcacagtttcctggatggcatcggagaatgcctttgacagctttctagtaacggtggtggattctgggaagctgctggacccccaggaattcacactttcaggaacccagaggaagctggagcttagaggcctcataactggcattggctatgaggttatggtctctggcttcacccaagggcatcaaaccaagcccttgagggctgagattgttacagaagccgaaccggaagttgacaaccttctggtttcagatgccaccccagacggtttccgtctgtcctggacagctgatgaaggggtcttcgacaattttgttctcaaaatcagagataccaaaaagcagtctgagccactggaaataaccctacttgcccccgaacgtaccagggacataacaggtctcagagaggctactgaatacgaaattgaactctatggaataagcaaaggaaggcgatcccagacagtcagtgctatagcaacaacagccatgggctccccaaaggaagtcattttctcagacatcactgaaaattcggctactgtcagctggagggcacccacagcccaagtggagagcttccggattacctatgtgcccattacaggaggtacaccctccatggtaactgtggacggaaccaagactcagaccaggctggtgaaactcatacctggcgtggagtaccttgtcagcatcatcgccatgaagggctttgaggaaagtgaacctgtctcagggtcattcaccacagctctggatggcccatctggcctggtgacagccaacatcactgactcagaagccttggccaggtggcagccagccattgccactgtggacagttatgtcatctcctacacaggcgagaaagtgccagaaattacacgcacggtgtccgggaacacagtggagtatgctctgaccgacctcgagcctgccacggaatacacactgagaatctttgcagagaaagggccccagaagagctcaaccatcactgccaagttcacaacagacctcgattctccaagagacttgactgctactgaggttcagtcggaaactgccctccttacctggcgacccccccgggcatcagtcaccggttacctgctggtctatgaatcagtggatggcacagtcaaggaagtcattgtgggtccagataccacctcctacagcctggcagacctgagcccatccacccactacacagccaagatccaggcactcaatgggcccctgaggagcaatatgatccagaccatcttcaccacaattggactcctgtaccccttccccaaggactgctcccaagcaatgctgaatggagacacgacctctggcctctacaccatttatctgaatggtgataaggctgaggcgctggaagtcttctgtgacatgacctctgatgggggtggatggattgtgttcctgagacgcaaaaacggacgcgagaacttctaccaaaactggaaggcatatgctgctggatttggggaccgcagagaagaattctggcttgggctggacaacctgaacaaaatcacagcccaggggcagtacgagctccgggtggacctgcgggaccatggggagacagcctttgctgtctatgacaagttcagcgtgggagatgccaagactcgctacaagctgaaggtggaggggtacagtgggacagcaggtgactccatggcctaccacaatggcagatccttctccacctttgacaaggacacagattcagccatcaccaactgtgctctgtcctacaaaggggctttctggtacaggaactgtcaccgtgtcaacctgatggggagatatggggacaataaccacagtcagggcgttaactggttccactggaagggccacgaacactcaatccagtttgctgagatgaagctgagaccaagcaacttcagaaatcttgaaggcaggcgcaaacgggcataaattccagggaccactgggtgagagaggaataaggcccagagcgaggaaaggattttaccaaagcatcaatacaaccagcccaaccatcggtccacacctgggcatttggtgagagtcaaagctgaccatggatccctggggccaacggcaacagcatgggcctcacctcctctgtgatttctttctttgcaccaaagacatcagtctccaacatgtttctgttttgttgtttgattcagcaaaaatctcccagtgacaacatcgcaatagttttttacttctcttaggtggctctgggaatgggagaggggtaggatgtacaggggtagtttgttttagaaccagccgtattttacatgaagctgtataattaattgtcattatttttgttagcaaagattaaatgtgtcattggaagccatccctttttttacatttcatacaacagaaaccagaaaagcaatactgtttccattttaaggatatgattaatattattaatataataatgatgatgatgatgatgaaaactaaggatttttcaagagatctttctttccaaaacatttctggacagtacctgattgtattttttttttaaataaaagcacaagtacttttga

SEQ ID NO: 125990 - DNA, 3602 bp, Artificial Sequence
  derived and/or modified sequence
attacagaggaaggagctcgctatataagccagccaaagttggctgcaccggccacagcctgcctactgtcacccgcctctcccgcgcgcagatacacgcccccgcctccgtgggcacaaaggcagcgctgctggggaactcgggggaacgcgcacgtgggaaccgccgcagctccacactccaggtacttcttccaaggacctaggtctctcgcccatcggaaagaaaataattctttcaagaagatcagggacaactgatttgaagtctactctgtgcttctaaatccccaattctgctgaaagtgagataccctagagccctagagccccagcagcacccagccaaacccacctccaccatgggggccatgactcagctgttggcaggtgtctttcttgctttccttgccctcgctaccgaaggtggggtcctcaagaaagtcatccggcacaagcgacagagtggggtgaacgccaccctgccagaagagaaccagccagtggtgtttaaccacgtttacaacatcaagctgccagtgggatcccagtgttcggtggatctggagtcagccagtggggagaaagacctggcaccgccttcagagcccagcgaaagctttcaggagcacacagtggatggggaaaaccagattgtcttcacacatcgcatcaacatcccccgccgggcctgtggctgtgccgcagcccctgatgttaaggagctgctgagcagactggaggagctggagaacctggtgtcttccctgagggagcaatgtactgcaggagcaggctgctgtctccagcctgccacaggccgcttggacaccaggcccttctgtagcggtcggggcaacttcagcactgaaggatgtggctgtgtctgcgaacctggctggaaaggccccaactgctctgagcccgaatgtccaggcaactgtcaccttcgaggccggtgcattgatgggcagtgcatctgtgacgacggcttcacgggcgaggactgcagccagctggcttgccccagcgactgcaatgaccagggcaagtgcgtaaatggagtctgcatctgtttcgaaggctacgccggggctgactgcagccgtgaaatctgcccagtgccctgcagtgaggagcacggcacatgtgtagatggcttgtgtgtgtgccacgatggctttgcaggcgatgactgcaacaagcctctgtgtctcaacaattgctacaaccgtggacgatgcgtggagaatgagtgcgtgtgtgatgagggtttcacgggcgaagactgcagtgagctcatctgccccaatgactgcttcgaccggggccgctgcatcaatggcacctgctactgcgaagaaggcttcacaggtgaagactgcgggaaacccacctgcccacatgcctgccacacccagggccggtgtgaggaggggcagtgtgtatgtgatgagggctttgccggtgtggactgcagcgagaagaggtgtcctgctgactgtcacaatcgtggccgctgtgtagacgggcggtgtgagtgtgatgatggtttcactggagctgactgtggggagctcaagtgtcccaatggctgcagtggccatggccgctgtgtcaatgggcagtgtgtgtgtgatgagggctatactggggaggactgcagccagctacggtgccccaatgactgtcacagtcggggccgctgtgtcgagggcaaatgtgtatgtgagcaaggcttcaagggctatgactgcagtgacatgagctgccctaatgactgtcaccagcacggccgctgtgtgaatggcatgtgtgtttgtgatgacggctacacaggggaagactgccgggatcgccaatgccccagggactgcagcaacaggggcctctgtgtggacggacagtgcgtctgtgaggacggcttcaccggccctgactgtgcagaactctcctgtccaaatgactgccatggccagggtcgctgtgtgaatgggcagtgcgtgtgccatgaaggatttatgggcaaagactgcaaggagcaaagatgtcccagtgactgtcatggccagggccgctgcgtggacggccagtgcatctgccacgagggcttcacaggcctggactgtggccagcactcctgccccagtgactgcaacaacttaggacaatgcgtctcgggccgctgcatctgcaacgagggctacagcggagaagactgctcagaggtgtctcctcccaaagacctcgttgtgacagaagtgacggaagagacggtcaacctggcctgggacaatgagatgcgggtcacagagtaccttgtcgtgtacacgcccacccacgagggtggtctggaaatgcagttccgtgtgcctggggaccagacgtccaccatcatccaggagctggagcctggtgtggagtactttatccgtgtatttgccatcctggagaacaagaagagcattcctgtcagcgccagggtggccacgtacttacctgcacctgaaggcctgaaattcaagtccatcaaggagacatctgtggaagtggagtgggatcctctagacattgcttttgaaacctgggagatcatcttccggaatatgaataaagaagatgagggagagatcaccaaaagcctgaggaggccagagacctcttaccggcaaactggtctagctcctgggcaagagtatgagatatctctgcacatagtgaaaaacaatacccggggccctggcctgaagagggtgaccaccacacgcttggatgcccccagccagatcgaggtgaaagatgtcacagacaccactgccttgatcacctggttcaagcccctggctgagatcgatggcattgagctgacctacggcatcaaagacgtgccaggagaccgtaccaccatcgatctcacagaggacgagaaccagtactccatcgggaacctgaagcctgacactgagtacgaggtgtccctcatctcccgcagaggtgacatgtcaagcaacccagccaaagagaccttcacaacaggcctcgatgctcccaggaatcttcgacgtgtttcccagacagataacagcatcaccctggaatggaggaatggcaaggcagctattgacagttacagaattaagtatgcccccatctctggaggggaccacgctgaggttgatgttccaaagagccaacaagccacaaccaaaaccatcactgccaagttcacaacagacctcgattctccaagagacttgactgctactgaggttcagtcggaaactgccctccttacctggcgacccccccgggcatcagtcaccggttacctgctggtctatgaatcagtggatggcacagtcaaggaagtcattgtgggtccagataccacctcctacagcctggcagacctgagcccaccatccctttttttacatttcatacaacagaaaccagaaaagcaatactgtttccattttaaggatatgattaatattattaatataataatgatgatgatgatgatgaaaactaaggatttttcaagagatctttctttccaaaacatttctggacagtacctgattgtattttttttttaa

SEQ ID NO: 125991 - protein, 547 aa, Artificial Sequence
  derived and/or modified sequence
MATMVPSVLWPRACWTLLVCCLLTPGVQGQEFLLRVEPQNPVLSAGGSLFVNCSTDCPSSEKIALETSLSKELVASGMGWAAFNLSNVTGNSRILCSVYCNGSQITGSSNITVYRLPERVELAPLPPWQPVGQNFTLRCQVEDGSPRTSLTVVLLRWEEELSRQPAVEEPAEVTATVLASRDDHGAPFSCRTELDMQPQGLGLFVNTSAPRQLRTFVLPVTPPRLVAPRFLEVETSWPVDCTLDGLFPASEAQVYLALGDQMLNATVMNHGDTLTATATATARADQEGAREIVCNVTLGGERREARENLTVFSFLGPIVNLSEPTAHEGSTVTVSCMAGARVQVTLDGVPAAAPGQPAQLQLNATESDDGRSFFCSATLEVDGEFLHRNSSVQLRVLYGPKIDRATCPQHLKWKDKTRHVLQCQARGNPYPELRCLKEGSSREVPVGIPFFVNVTHNGTYQCQASSSRGKYTLVVVMDIEAGSSHFVPVFVAVLLTLGVVTIVLALMYVFREHQRSGSYHVREESTYLPLTSMQPTEAMGEEPSRAE

SEQ ID NO: 125992 - DNA, 1644 bp, Artificial Sequence
  derived and/or modified sequence
atggccacaatggtcccctcagtgctatggcctagagcctgttggactcttcttgtctgttgcctattgactcccggagttcagggtcaagaatttttgctgcgggtcgagccgcagaatcccgtgttatccgccggcggttcactctttgtgaactgctcaacagactgtcccagtagtgagaaaatcgccctcgagacgtccctttcgaaagaactcgtggctagcgggatggggtgggctgcatttaacctgagtaacgtgaccgggaactcaagaattttgtgcagcgtgtattgtaatggttcacagattactggctcctctaacattacagtctataggctgccggagcgggtcgaacttgctccgctgcccccctggcagcctgtgggccaaaactttactctcaggtgtcaggtggaggacggctctccgcgaacctcgctgactgtcgtgctgctaaggtgggaggaagaactgtcccggcagccagcggtggaagaaccagcggaggttactgccacagtattggccagcagggatgaccatggcgctcccttctcctgtagaactgagctcgacatgcaacctcagggattaggactgttcgtgaatacgagcgctccccgccagctgcgaacattcgtgctcccggtgactcctcctcgactggtggcgccgcgcttcctcgaggtggaaacatcctggccagttgactgcacacttgatggcctctttcccgcctcagaagcgcaagtgtatctagccctgggagatcaaatgcttaacgcgaccgtgatgaaccatggagatacgcttactgctaccgcgaccgctacggcacgtgctgaccaggagggggctcgggagattgtgtgcaacgtcaccctggggggggagcgaagagaggcccgtgaaaacctgaccgtgttttccttccttggacctattgtaaatcttagcgaaccaaccgcacacgaggggtccaccgtgaccgtgtcatgcatggctggcgccagggtgcaggttacgctggatggcgtgcccgctgccgcccccggtcagcccgcccaactgcagcttaatgctacagaaagcgatgatggaagatccttcttttgctccgccactctcgaggttgacggcgaattcctccacagaaactcctccgtccaattaagggtgttgtatggcccaaaaatcgatagggccacatgtccccagcatttaaaatggaaggataaaacgcgccatgttctgcagtgccaggccagaggcaacccatatccggaacttcgctgcctgaaggagggctccagtcgtgaggtccctgtaggcattccattttttgtgaatgtcacgcacaacggaacctatcagtgccaagcttcttcttcaagaggcaagtataccctcgtagttgtcatggatatcgaggctgggtctagccacttcgtccctgtgttcgtggctgttctgctgacccttggagttgtgacaattgtcttggctttgatgtacgtgtttcgcgagcaccaacgctccggatcgtaccacgtcagagaagaatcaacatacttgcctctgacgagcatgcagcccacagaagctatgggggaggagcccagtcgagctgagtag

SEQ ID NO: 125993 - DNA, 1778 bp, Artificial Sequence
  derived and/or modified sequence
ccttttcccctgcctgcccttcgggcacctcaggaaggcaccttcctctgtcagaatggccaccatggtaccatccgtgttgtggcccagggcctgctggactctgctggtctgctgtctgctgaccccaggtgtccaggggcaggagttccttttgcgggtggagccccagaaccctgtgctctctgctggagggtccctgtttgtgaactgcagtactgattgtcccagctctgagaaaatcgccttggagacgtccctatcaaaggagctggtggccagtggcatgggctgggcagccttcaatctcagcaacgtgactggcaacagtcggatcctctgctcagtgtactgcaatggctctcagataacaggctcctctaacatcaccgtgtacaggctcccggagcgtgtggagctggcacccctgcctccttggcagccggtgggccagaacttcaccctgcgctgccaagtggaggatgggtcgccccggaccagcctcacggtggtgctgcttcgctgggaggaggagctgagccggcagcccgcagtggaggagccagcggaggtcactgccactgtgctggccagcagagacgaccacggagcccctttctcatgccgcacagaactggacatgcagccccaggggctgggactgttcgtgaacacctcagccccccgccagctccgaacctttgtcctgcccgtgacccccccgcgcctcgtggccccccggttcttggaggtggaaacgtcgtggccggtggactgcaccctagacgggctttttccagcctcagaggcccaggtctacctggcgctgggggaccagatgctgaatgcgacagtcatgaaccacggggacacgctaacggccacagccacagccacggcgcgcgcggatcaggagggtgcccgggagatcgtctgcaacgtgaccctagggggcgagagacgggaggcccgggagaacttgacggtctttagcttcctaggacccattgtgaacctcagcgagcccaccgcccatgaggggtccacagtgaccgtgagttgcatggctggggctcgagtccaggtcacgctggacggagttccggccgcggccccggggcagccagctcaacttcagctaaatgctaccgagagtgacgacggacgcagcttcttctgcagtgccactctcgaggtggacggcgagttcttgcacaggaacagtagcgtccagctgcgagtcctgtatggtcccaaaattgaccgagccacatgcccccagcacttgaaatggaaagataaaacgagacacgtcctgcagtgccaagccaggggcaacccgtaccccgagctgcggtgtttgaaggaaggctccagccgggaggtgccggtggggatcccgttcttcgtcaacgtaacacataatggtacttatcagtgccaagcgtccagctcacgaggcaaatacaccctggtcgtggtgatggacattgaggctgggagctcccactttgtccccgtcttcgtggcggtgttactgaccctgggcgtggtgactatcgtactggccttaatgtacgtcttcagggagcaccaacggagcggcagttaccatgttagggaggagagcacctatctgcccctcacgtctatgcagccgacagaagcaatgggggaagaaccgtccagagctgagtgacgctgggatccgggatcaaagttggcgggggcttggctgtgccctcagattccgcaccaataaagccttcaaactccct

SEQ ID NO: 125994 - DNA, 1644 bp, Artificial Sequence
  derived and/or modified sequence
atggccaccatggtgcccagcgtgctgtggccccgggcctgctggaccctgctggtgtgctgcctgctgaccccaggagtgcagggccaggagttcctgctgcgggtggagccccagaaccctgtgctgtctgctgggggcagcctgtttgtgaactgcagcacagactgccccagcagcgagaagatcgccctggagaccagcctgagcaaggagctggtggccagcggcatgggctgggccgccttcaacctgagcaatgtgactggaaacagccgcatcctgtgcagcgtgtactgcaatggcagccagatcaccggcagcagcaacatcaccgtgtaccgcctgcctgagcgggtggagctggcccccctgcccccctggcagcctgtgggccagaacttcaccctgcgctgccaggtggaggatggcagccccaggaccagcctgactgtggtgctgctgcgctgggaggaggagctgagccggcagcctgctgtggaggagcctgctgaggtgacagccaccgtgctggccagcagagatgaccacggggcccccttcagctgcaggacagagctggacatgcagccccagggcctgggcctgtttgtgaacaccagcgccccccggcagctgcggacctttgtgctgcctgtgaccccaccccggctggtggccccccgcttcctggaggtggagacctcctggcctgtggactgcaccctggatggcctcttccctgccagcgaggcccaggtgtacctggccctgggggaccagatgctgaatgccaccgtgatgaaccacggggacaccctgacagccacagccacagccacagcccgggctgaccaggagggcgcccgggagatcgtgtgcaatgtgaccctgggcggggagcggcgggaggcccgggagaacctgaccgtcttctccttcctgggccccatcgtgaacctgtctgagcccacagcccacgagggcagcacagtgacagtgtcctgcatggccggggcccgggtgcaggtgaccctggatggagtgcctgctgctgcccctggccagcctgcccagctgcagctgaatgccacagaaagtgatgatggccgctccttcttctgcagcgccaccctggaggtggatggagagttcctgcacaggaacagctctgtgcagctgcgggtgctgtatggccccaagattgaccgggccacctgcccccagcacctgaagtggaaggacaagaccaggcatgtgctgcagtgccaggcccggggcaacccctacccagagctgcgctgcctgaaggagggcagcagccgggaggtgcctgtgggcatccccttctttgtgaatgtgacccacaacggcacctaccagtgccaggccagcagcagccggggcaagtacaccctggtggtggtgatggacattgaagctggcagcagccactttgtgcctgtgtttgtggccgtgctgctgaccctgggcgtggtgaccatcgtgctggccctgatgtatgtgttccgggagcaccagaggagcggcagctaccacgtgcgggaggagagcacctacctgcccctgacctccatgcagcccacagaggccatgggagaggagcccagcagagctgagtag

SEQ ID NO: 125995 - DNA, 1644 bp, Artificial Sequence
  derived and/or modified sequence
atggccaccatggtgcccagcgtgctgtggccccgggcctgctggacactgctggtgtgctgcttactcacccctggggtgcagggacaggaatttctcttgcgagtggagccccaaaatcccgtactgtccgcaggcggttcgctcttcgtgaactgctccaccgactgtccttcctccgaaaagatagcgctggagacgtctctgagtaaagagctagtggcttctgggatgggttgggccgcttttaatctgagcaacgtgactggcaattccaggattctctgctcagtgtactgtaacgggagccagattaccggcagtagcaatatcactgtataccggctgccggaaagagtggaactggcgccactgccgccgtggcaacctgtgggccagaacttcacccttcgatgccaagtggaagacggaagtccgcggacgtcactcacggtcgtgctcttgcggtgggaagaggagctgtcacgacagcccgcggttgaggagcctgccgaagtcaccgcgacggttctcgctagtagagatgatcacggtgctccattcagttgcaggacagaactggatatgcagccgcaggggctcggactgtttgtcaatacaagtgcaccacgacaattgcgcactttcgtgttacctgtgacgccaccaaggctggttgctcccagattcttagaagtcgaaacctcatggccagttgactgcaccctggacggtttgttccctgctagcgaggcacaggtatacttggccctgggggaccagatgcttaacgccaccgtgatgaaccatggcgatactctgactgccacagccacagcaaccgcacgggctgaccaggagggagctcgcgaaattgtttgcaatgtgactctgggcggcgaacgcagagaagctagagagaacctgaccgtcttttctttccttggacctattgtaaacttatcagagcccaccgctcacgagggaagcaccgtcacagtgtcatgcatggccggggctcgcgtccaggttacccttgacggagtccctgccgccgcccccggccagcccgcacaactacaactgaatgccactgagtcagatgacggacgaagcttcttctgctcagccacactcgaggtcgacggggaattcttacacagaaacagctctgtacaactccgggtgctctacggtccaaaaattgatagggcaacctgtcctcagcacctaaagtggaaagataagacccggcacgtgttgcagtgtcaagcacgcggtaatccttacccagaacttcgatgtctgaaggagggctcaagccgagaggtgcccgttggcatcccattcttcgtaaacgtaacccacaacgggacttatcagtgccaggcctcgtcaagccgcggcaaatacaccctggtcgtggttatggacatcgaagctggatcctcccactttgtcccagtgttcgtggctgtcttgctgaccctgggggtagtcactatcgtgctcgctctaatgtatgtgtttcgcgagcatcagcgttcaggtagttatcacgtgcgtgaagaaagcacttatctgccactcacaagcatgcagcccaccgaggcaatgggggaggaacccagtcgcgccgagtag

SEQ ID NO: 125996 - DNA, 1644 bp, Artificial Sequence
  derived and/or modified sequence
atggcgaccatggtaccatccgtactatggccacgggcatgctggacacttttagtatgctgtctccttacgcccggtgtccaagggcaggaattcctgcttcgagtggagccacagaatcccgtgctgtctgctggcggatccctgttcgtcaattgctcaactgactgtccctcctccgagaagatcgcactagagacaagtctgtcaaaagagctagtagcgtcaggtatgggctgggccgcattcaacctgtccaatgtgaccggaaacagtcggattctatgttctgtgtattgcaacgggagccagataaccgggtccagcaacataactgtttatcgtctgcctgaacgggtggagctggcgcctttgccgccttggcaaccggtagggcaaaattttaccctgaggtgccaggttgaggacggaagtccgcgtacttcccttacagtggtgcttctacgatgggaagaagaactcagtcggcaacccgctgtggaagaaccagctgaggtcacggcaactgttctggccagccgcgatgatcatggcgctccatttagttgtcggaccgagctggacatgcagccccaggggttaggcctttttgtcaacacatctgctccccgtcagctgcgaacatttgtcctcccggtgacccccccacgattggtggcaccccgattccttgaagtcgaaacatcatggccagtggactgtacactagacggccttttcccagcatccgaggcacaggtgtaccttgccctaggagaccagatgctaaatgctaccgtcatgaatcacggggacactctcaccgctacagctacagccactgcaagggccgaccaggagggtgctcgtgaaatcgtgtgtaacgtaacactcggaggggaaagacgcgaagcgagagagaacctgaccgttttttcttttctgggtcctattgtgaacttaagtgaacctaccgcacacgagggatctaccgtcaccgtgagctgcatggccggagccagagttcaggtgactttagacggggtccctgcagcagcccctgggcagcccgcacagcttcaactcaacgccaccgaatccgacgatggcaggtcatttttctgtagcgcaactttggaggtggatggcgagttcctccacaggaacagtagtgtgcagctgcgcgttctgtacgggcctaagattgaccgtgcaacctgcccacaacacttgaagtggaaggacaaaacaagacacgttctgcagtgccaggccagaggcaacccttacccagaactgcgctgcctgaaggagggttcctccagagaagttcctgtggggatccctttcttcgttaacgtgacacataacggcacctatcagtgccaggccagctcaagcagaggcaagtatactttagtcgtcgtgatggacatagaggcaggctctagtcacttcgtgcctgtgtttgtggccgttctcttgaccctgggtgtagtgacaatcgtactcgccctcatgtacgtgttcagagagcatcaaaggagcgggagctaccacgtgagggaggaatctacttatctccctctcacatccatgcaacccaccgaagctatgggggaggagccctcccgcgcagaatag

SEQ ID NO: 125997 - DNA, 1644 bp, Artificial Sequence
  derived and/or modified sequence
atggctaccatggtcccatccgtcctgtggcccagagcctgctggaccctgttagtatgctgcctgctgactcccggagttcagggtcaagaattccttctccgggttgagccccaaaaccctgtcctctcagctggaggctcattgttcgtgaactgttccactgattgcccctcttcagagaaaatcgccctcgaaactagcctcagcaaagagctggtagcctccggaatgggctgggccgcgttcaatttgagtaacgtcactgggaacagcagaattctgtgtagcgtgtactgtaacggcagtcagatcacaggatcgtccaacataaccgtgtaccggctcccagagcgcgtggagcttgctccactgcccccttggcagcctgtagggcaaaatttcacccttcggtgtcaggtggaagatgggtcaccacgcacctctctcactgtggtcctgctgaggtgggaggaggagctttcccgacagccagccgtggaggagcccgccgaggtgaccgcaactgtgctggcttcaagagatgatcacggcgcccccttctcatgtagaacggaactggatatgcaacctcagggtctaggtttgtttgttaatacttccgccccgcgtcagctgagaacattcgtcctacctgttacgccaccgcgccttgtggctccacggtttctagaagtggagacgtcctggcccgtggactgcaccttagacggattgttccccgccagcgaggcacaggtctacctagcattaggagatcagatgttaaacgcaactgtgatgaatcacggcgacactctgactgcaacagctacagccaccgcaagagccgatcaggagggagccagagagattgtctgcaacgttaccctggggggggagaggagagaggcgagagaaaatctgacagtcttttcttttctgggtccaatagtgaacctgtcggagccaacagcacatgagggcagtaccgtaactgtatcctgtatggccggcgcgcgggtgcaggtcactctggatggggtgccagccgccgcccccggccagccagcccaactccaactgaacgccaccgaaagcgacgatggacgatccttcttctgctcagccacattggaggttgatggagaatttctgcacaggaactctagtgtgcagctgcgcgtgctgtatggtcctaagatcgatcgtgctacctgtccccagcatctaaaatggaaggacaaaacccgacacgtgttacagtgtcaagccaggggcaacccctatcctgagcttaggtgccttaaagagggaagcagtagagaagtcccagtgggaattcctttcttcgtgaacgtgactcataacgggacttatcagtgccaggcgtcatcttctcgggggaaatacacactcgtggttgttatggacattgaagcagggagctctcattttgtacctgtatttgtggcggtgttgcttacgttgggggttgtgacaatcgtacttgcactcatgtacgtcttccgggaacatcagcggagtggcagctatcatgttcgagaggaatctacctatctgcctcttactagtatgcagcctacagaggcgatgggggaggagccttccagagccgaatag

SEQ ID NO: 125998 - DNA, 1644 bp, Artificial Sequence
  derived and/or modified sequence
atggctacaatggtgccatcggtgttgtggccgcgcgcctgttggacattgttggtgtgctgtttacttacccctggtgtacagggccaagagttcctactgagagttgagcctcaaaatcccgtcttgtctgccggtgggtcactgtttgttaactgctcaactgactgtccctcaagcgaaaaaattgctctagaaacaagcttatctaaagaattagtagcctctggcatgggatgggctgccttcaatctgtccaatgtaaccggtaatagccggatcctttgcagtgtttattgcaatggcagccaaatcactggatcatcaaacatcaccgtataccgcctgcccgaacgcgttgaactggcgcctctccctccttggcagcctgtgggacaaaactttactctgcgctgtcaagtggaggatggatctccccgtacgtcgttaaccgttgtgctgctgcgatgggaggaggaactcagccggcaacccgccgtggaagagcccgccgaggtaaccgccaccgtattagcctcaagggatgatcacggagcgcctttctcatgtaggaccgagctggacatgcaaccacaagggctaggcctgtttgttaatacctccgccccccgacaacttcgaacatttgtgttaccagtgacaccacccaggttggtggccccacggttcttagaagtggaaacctcatggcccgttgattgcacacttgatggtctgttccccgcgagcgaggctcaggtgtatcttgctcttggcgaccagatgcttaacgcaactgtcatgaaccacggagatacccttacagccacggctactgcaacagcccgcgctgaccaggaaggcgctcgcgaaattgtatgtaatgtaacactcggaggtgagaggagagaggcccgcgaaaacctaactgtcttttcatttctgggaccaatcgtaaacttatctgaaccaaccgcacacgagggctccacagtgacagtatcttgtatggccggggctagagtacaagtgaccttggatggcgtgcctgccgccgcgcctgggcagccagcacaattgcagctgaacgctaccgaatctgatgatggccggtccttcttctgctccgccacccttgaagttgacggggagtttttacatcgcaactcttctgtccaattgagagtcctgtatggtcccaaaattgatagagccacttgcccccaacacctgaaatggaaagacaaaacccgacacgtgcttcagtgtcaggccaggggtaatccctatcctgagcttcgatgcctcaaggaaggtagctccagagaggtacctgtaggaatcccgttttttgttaacgtgacccacaatggaacatatcaatgtcaagcgtcatcttctcgcggcaagtacaccctcgtcgtagtgatggatattgaagcgggcagcagccatttcgtccctgtctttgtcgcagtgctgttaacactcggggttgtgacgattgtactcgcactcatgtacgttttccgtgaacaccaacgatccggtagctaccacgttagggaagaaagtacctatttacccctcaccagtatgcaaccaacagaggctatgggggaagagccatcgagagcagaatag

SEQ ID NO: 125999 - DNA, 1644 bp, Artificial Sequence
  derived and/or modified sequence
atggccaccatggtgcccagcgtgctgtggcccagagcctgctggaccctgctggtgtgctgcctgctgacccccggcgtgcagggccaggagttcctgctgagagtggagccccagaaccccgtgctgagcgccggcggcagcctgttcgtgaactgcagcaccgactgccccagcagcgagaagatcgccctggagaccagcctgagcaaggagctggtggccagcggcatgggctgggccgccttcaacctgagcaacgtgaccggcaacagcagaatcctgtgcagcgtgtactgcaacggcagccagatcaccggcagcagcaacatcaccgtgtacagactgcccgagagagtggagctggcccccctgcccccctggcagcccgtgggccagaacttcaccctgagatgccaggtggaggacggcagccccagaaccagcctgaccgtggtgctgctgagatgggaggaggagctgagcagacagcccgccgtggaggagcccgccgaggtgaccgccaccgtgctggccagcagagacgaccacggcgcccccttcagctgcagaaccgagctggacatgcagccccagggcctgggcctgttcgtgaacaccagcgcccccagacagctgagaaccttcgtgctgcccgtgaccccccccagactggtggcccccagattcctggaggtggagaccagctggcccgtggactgcaccctggacggcctgttccccgccagcgaggcccaggtgtacctggccctgggcgaccagatgctgaacgccaccgtgatgaaccacggcgacaccctgaccgccaccgccaccgccaccgccagagccgaccaggagggcgccagagagatcgtgtgcaacgtgaccctgggcggcgagagaagagaggccagagagaacctgaccgtgttcagcttcctgggccccatcgtgaacctgagcgagcccaccgcccacgagggcagcaccgtgaccgtgagctgcatggccggcgccagagtgcaggtgaccctggacggcgtgcccgccgccgcccccggccagcccgcccagctgcagctgaacgccaccgagagcgacgacggcagaagcttcttctgcagcgccaccctggaggtggacggcgagttcctgcacagaaacagcagcgtgcagctgagagtgctgtacggccccaagatcgacagagccacctgcccccagcacctgaagtggaaggacaagaccagacacgtgctgcagtgccaggccagaggcaacccctaccccgagctgagatgcctgaaggagggcagcagcagagaggtgcccgtgggcatccccttcttcgtgaacgtgacccacaacggcacctaccagtgccaggccagcagcagcagaggcaagtacaccctggtggtggtgatggacatcgaggccggcagcagccacttcgtgcccgtgttcgtggccgtgctgctgaccctgggcgtggtgaccatcgtgctggccctgatgtacgtgttcagagagcaccagagaagcggcagctaccacgtgagagaggagagcacctacctgcccctgaccagcatgcagcccaccgaggccatgggcgaggagcccagcagagccgagtag

SEQ ID NO: 126000 - protein, 426 aa, Artificial Sequence
  derived and/or modified sequence
MCDRNGGRRLRQWLIEQIDSSMYPGLIWENEEKSMFRIPWKHAGKQDYNQEVDASIFKAWAVFKGKFKEGDKAEPATWKTRLRCALNKSPDFEEVTDRSQLDISEPYKVYRIVPEEEQKCKLGVATAGCVNEVTEMECGRSEIDELIKEPSVDDYMGMIKRSPSPPEACRSQLLPDWWAQQPSTGVPLVTGYTTYDAHHSAFSQMVISFYYGGKLVGQATTTCPEGCRLSLSQPGLPGTKLYGPEGLELVRFPPADAIPSERQRQVTRKLFGHLERGVLLHSSRQGVFVKRLCQGRVFCSGNAVVCKGRPNKLERDEVVQVFDTSQFFRELQQFYNSQGRLPDGRVVLCFGEEFPDMAPLRSKLILVQIEQLYVRQLAEEAGKSCGAGSVMQAPEEPPPDQVFRMFPDICASHQRSFFRENQQITV

SEQ ID NO: 126001 - DNA, 1281 bp, Artificial Sequence
  derived and/or modified sequence
atgtgtgataggaatggcggtaggagactgcgccagtggttgattgaacaaatcgacagctcaatgtatcccggactgatctgggagaatgaggagaagtccatgttcagaataccctggaagcatgcaggcaagcaggattataatcaagaggtggatgcttcaattttcaaggcttgggccgtcttcaaaggaaaattcaaagaaggggataaggctgaacccgcaacctggaagacccgcctgaggtgtgcgctgaacaaatcccccgattttgaggaggtgactgacaggtctcagctggacataagcgaaccttacaaagtgtatcggatcgtccctgaagaggagcagaagtgtaagttaggagtggcaactgcaggttgcgtgaatgaggtcacagagatggagtgcgggagaagtgagatagacgaacttatcaaggagccaagcgtagatgactatatgggcatgatcaaaagatccccgtctccacctgaggcgtgccggtcccagcttttgcctgactggtgggcacagcagccctcaaccggcgtccctctggtgacagggtacacgacttacgacgcgcaccattccgccttttcccaaatggtcatcagcttctactatgggggtaagctggtgggtcaggcaaccaccacctgcccagaaggctgccgcttgtccctgtcccagccaggtctccctgggaccaaactgtacgggcccgagggcctcgaactggtgagattcccgcccgctgacgcaattccaagcgagcgacaaaggcaggtaactcggaaactgttcggacacttagagcgcggagtgctcctccattcatccagacaaggtgtgtttgtaaaacgcctttgtcagggccgagtcttctgtagcggcaacgccgttgtctgcaaaggcaggcccaataagctagagagagatgaagtcgtgcaagtctttgatacctcacagtttttccgcgagctgcagcagttttataattctcagggacgcctgcctgacggccgagtggtcttatgcttcggtgaagaatttccagatatggccccactgaggagcaaactgatcttggtgcagatcgagcagctgtatgtgcggcaactggctgaggaggcaggaaagagctgtggagcagggagcgtgatgcaggccccagaagaacccccaccagatcaagtttttcgtatgtttcccgacatttgcgccagtcatcagagaagtttttttcgcgaaaaccaacagattacagtatag

SEQ ID NO: 126002 - DNA, 3012 bp, Artificial Sequence
  derived and/or modified sequence
agtggctcgctcgggagccgccgcactcccggggctgtccgcccgagccggcctggaaggcggaggacgcctccaggtcgctccgcggggcctccggaattcctgggaaagcccccctgcagcgccgcccctggaccccaggtgtgaggagcggggctcggccagcggctccagaagaggcccggaccccactgccgtggctgccgggggcgggaaagtgatttctcggaaagcagagcacttcgaagaaggcgggccgcgcgagccaagctgacgctattggtcggtgtggccgtcgctctgcgcaccgcccgtcccccccacgaccctttttaaggccgcgcgaccgctggcgcatcgcctggagcgcggcagcaagcgtgggaacgcgggcggcgagacggcggcaggacggcggcaggatgtgtgaccggaatggtggtcggcggcttcgacagtggctgatcgagcagattgacagtagcatgtatccaggactgatttgggagaatgaggagaagagcatgttccggatcccttggaaacacgctggcaagcaagattataatcaggaagtggatgcctccatttttaaggcctgggcagtttttaaagggaagtttaaagaaggggacaaagctgaaccagccacttggaagacgaggttacgctgtgctttgaataagagcccagattttgaggaagtgacggaccggtcccaactggacatttccgagccatacaaagtttaccgaattgttcctgaggaagagcaaaaatgcaaactaggcgtggcaactgctggctgcgtgaatgaagttacagagatggagtgcggtcgctctgaaatcgacgagctgatcaaggagccttctgtggacgattacatggggatgatcaaaaggagcccttccccgccggaggcctgtcggagtcagctccttccagactggtgggcgcagcagcccagcacaggcgtgccgctggtgacggggtacaccacctacgacgcgcaccattcagcattctcccagatggtgatcagcttctactatgggggcaagctggtgggccaggccaccaccacctgccccgagggctgccgcctgtccctgagccagcctgggctgcccggcaccaagctgtatgggcccgagggcctggagctggtgcgcttcccgccggccgacgccatccccagcgagcgacagaggcaggtgacgcggaagctgttcgggcacctggagcgcggggtgctgctgcacagcagccggcagggcgtgttcgtcaagcggctgtgccagggccgcgtgttctgcagcggcaacgccgtggtgtgcaaaggcaggcccaacaagctggagcgtgatgaggtggtccaggtcttcgacaccagccagttcttccgagagctgcagcagttctataacagccagggccggcttcctgacggcagggtggtgctgtgctttggggaagagtttccggatatggcccccttgcgctccaaactcattctcgtgcagattgagcagctgtatgtccggcaactggcagaagaggctgggaagagctgtggagccggctctgtgatgcaggcccccgaggagccgccgccagaccaggtcttccggatgtttccagatatttgtgcctcacaccagagatcatttttcagagaaaaccaacagatcaccgtctaagtgcgtcgcttgggcgccccaccccgtctgcgtcctgcatccatctccctgttacagtggcccgcatcatgattaaagaatgtggatccctctgtctggggtgggatgccttactttgcacttaatttaataagggcattctcggaggagtagacgtttaatacgaagtggcggcatagccctgccgagatgtcggtgatggcctggatgctgtaaccacaacctgtggctaaaaattttattttctatcctttacccgtcattatcattagttgctatgattctttctgcattttcggttaactatcatttccaaagacttgtcattcagtaatattagcagatagctgcttcgataaaggaatttggagtttaaaaatcaacttgtgaaaacaaggttgtttttgtctttatcgtttgttagagttatagatttatgatttcataggcttgattctatgtgaaatatctttttacttttatgcattttaataagatttaaaaatatttagattaaagccccctttaatgagtacaagaaaaactcttggcttgttagaagaaagtatattctttctagaatttggtgcaggaatatgtgttcatatccaggcaaacgggtgtgtttttatcttcagacaatgaaaccttctcctctggggctttgttgccaggaagattagaactaaatttatttttttcatttctgtcatgaaatcattccagatacctcttttcttctttccaaatggttttcacatgtgtttgaaatatttgtacttcgaattgtcggattttccatgtcctcctttctcctttgtgcccagcctgagtcagcaccaatcccgcattcagaacctcccagtgaaagggcagccttcattttgagaaggtggaaggtgttagggtttgggagacagctcatccaatctcccaagtctcatggtggatttgtgactgtgagagtttccggtttaaaatctgaaaagccagatatgcctgtttccttttcccagcaccatgcctgtggaggggacagtcagacccagaggtcctttacgtgtggatggagttcacaggcgaatagaggagaggaccaggggacgtggcttgtcccttttgtccaacaaagcattatatttttaagaatggcagacctgtttgctgaagtgttcataagataacaataggcttgaatctccaattcaaatgaatgtcaaagcacatatctttaatatgctgaatgaatatttatttttgtatccattaaaacagtatattgatctcttttattctttattaaaataaa

SEQ ID NO: 126003 - DNA, 1281 bp, Artificial Sequence
  derived and/or modified sequence
atgtgtgacagaaatggaggccggcggctgcggcagtggctgattgagcagattgacagctccatgtacccaggcctcatctgggagaatgaggagaagtccatgttccgcatcccctggaagcatgctgggaagcaggactacaaccaggaggtggatgccagcatcttcaaggcctgggccgtgttcaagggcaagttcaaggagggggacaaggccgagcccgccacctggaagacccggctgcgctgtgccctgaacaagagcccagactttgaggaggtgacagacaggagccagctggacatcagcgagccctacaaggtgtaccgcatcgtgcctgaggaggagcagaagtgcaagctgggcgtggccacagctggctgtgtgaatgaggtgacagagatggagtgtggccgctcagaaattgatgagctgatcaaggagcccagcgtggatgactacatgggcatgatcaagaggagccccagccccccagaggcctgccgcagccagctgctgcctgactggtgggcccagcagcccagcactggagtgcccctggtgacaggctacaccacctatgatgcccaccacagcgccttcagccagatggtgatctccttctactatggaggcaagctggtgggccaggccaccaccacctgcccagagggctgccgcctgagcctgagccagcccggcctgcccggcaccaagctgtatggccctgagggcctggagctggtgcgcttccccccagcagatgccatccccagcgagcggcagaggcaggtgaccaggaagctgtttggccacctggagcggggcgtgctgctgcacagcagccggcagggcgtgtttgtgaagaggctgtgccagggccgggtcttctgcagcggaaatgctgtggtgtgcaagggccggcccaacaagctggagagagatgaggtggtgcaggtgtttgacaccagccagttcttccgggagctgcagcagttctacaacagccagggccgcctgcctgatggccgggtggtgctgtgcttcggggaggagttcccagacatggcccccctgcggagcaagctgatcctggtgcagatcgagcagctgtatgtgcggcagctggccgaggaggccggcaagagctgtggggccggctctgtgatgcaggcccctgaggagcccccaccagaccaggtgttcaggatgtttcctgacatctgtgccagccaccagaggagcttcttccgggagaaccagcagatcaccgtgtag

SEQ ID NO: 126004 - DNA, 1281 bp, Artificial Sequence
  derived and/or modified sequence
atgtgcgaccggaacggcggccggcggctgcggcagtggctgatcgagcaaattgattctagcatgtaccctggcctaatttgggaaaacgaggaaaaatcaatgtttcgtattccatggaagcacgctggcaagcaggattacaaccaggaggtggacgcttccatattcaaagcctgggccgtttttaaggggaagtttaaagagggcgataaagccgaacccgccacctggaaaacgcgcttgagatgtgctctaaacaaatcccctgacttcgaagaagtaaccgaccgttcccaactagatatttccgagccatataaagtatatcgcatcgttcctgaagaggagcagaaatgtaagctgggtgtagccactgcgggctgtgtaaatgaagtgacagaaatggagtgtggccgtagtgagattgacgaactgatcaaggaacccagcgtggacgactatatggggatgatcaagagatcccctagtccccctgaagcgtgtaggagccagcttctgccggactggtgggcacaacagccaagtactggagtcccactcgtcactggttacacaacctacgatgcccaccacagcgccttcagtcaaatggtaatctccttctactacggtggcaaactcgtgggtcaggccaccacaacatgtcccgaaggatgtaggctgagcttaagccagccaggccttccaggaaccaaattatacggtcctgaaggcctagagctcgtccgctttccccccgcagatgcaattccttcagagcgacaaaggcaggttacccgaaagctttttggacaccttgagaggggggtgttgcttcattcttccagacaaggcgtgtttgtgaaaagactgtgccaaggccgggtattttgctcaggaaatgccgtggtatgtaaaggccggccaaacaaactggaacgcgatgaggtggtacaggtgttcgacacaagtcaattttttagagagttgcagcagttctacaactctcagggaagattgcccgacgggcgggtagttctgtgttttggcgaagagtttcctgatatggcaccgttacgaagcaaactaatcctggtgcagattgaacagctgtatgttcgccagctcgctgaggaggccgggaagtcatgtggggctggatccgtaatgcaggcacctgaagagcctccccctgaccaggtttttcgaatgtttcccgacatctgtgcctcacatcagagatcattcttcagggaaaatcagcagatcactgtgtag

SEQ ID NO: 126005 - DNA, 1281 bp, Artificial Sequence
  derived and/or modified sequence
atgtgcgatagaaatgggggacgcagactcagacagtggctgatagaacagattgatagctctatgtatcctggcctgatctgggagaatgaggagaagtcgatgttccggataccttggaagcacgcagggaagcaagactataaccaggaggttgacgcaagcattttcaaagcatgggctgtgtttaaagggaaatttaaagagggtgataaggccgaaccggctacttggaagactcggctgcgttgcgctctgaacaagtcacctgacttcgaggaggtgaccgaccgctctcaattagatatcagcgaaccttataaggtgtaccggatcgttccagaggaagaacagaaatgtaaactgggggtggccacagcgggttgcgttaatgaagtcacagagatggaatgcgggaggagtgaaatcgatgagctgattaaagaacctagcgtcgacgactatatgggaatgatcaagagatccccaagcccgccagaggcgtgccgatcccagctgctccccgattggtgggcacagcagccatctacaggtgtgccattggtgacaggttacacaacatacgacgctcatcacagcgcgttttcgcagatggtcattagcttctactacggtggtaagttggtgggacaagcaaccacaacttgtcctgagggctgtcgcttatccctgtcacagccagggcttccaggtaccaaactctatggcccagaggggcttgagttggtcagatttcctcccgcagacgcgatcccctccgagcgccagaggcaggtgacaagaaaacttttcgggcacctggaaaggggggtattacttcatagctctaggcagggcgtcttcgtgaagcgcttatgccagggccgtgttttctgttctgggaacgccgtcgtctgtaagggacggccaaataagttggagcgagacgaggtagtgcaggtgttcgacacatcacagttcttcagagagttacagcagttctacaacagccagggtaggttgccagatggaagggttgtcctttgtttcggggaggaattccctgacatggccccactgagaagcaaactcattctagtccaaatcgagcagttgtatgtgcggcagttggccgaagaggctgggaagtcctgtggagctggctcagtcatgcaggcacccgaagagcctccaccagatcaggtattcaggatgtttcccgacatctgtgcttcccatcagcgatctttcttccgggaaaaccaacagattacagtttag

SEQ ID NO: 126006 - DNA, 1281 bp, Artificial Sequence
  derived and/or modified sequence
atgtgcgacagaaacggcggcagaagactgagacagtggctgatcgagcagatcgacagcagcatgtaccccggcctgatctgggagaacgaggagaagagcatgttcagaatcccctggaagcacgccggcaagcaggactacaaccaggaggtggacgccagcatcttcaaggcctgggccgtgttcaagggcaagttcaaggagggcgacaaggccgagcccgccacctggaagaccagactgagatgcgccctgaacaagagccccgacttcgaggaggtgaccgacagaagccagctggacatcagcgagccctacaaggtgtacagaatcgtgcccgaggaggagcagaagtgcaagctgggcgtggccaccgccggctgcgtgaacgaggtgaccgagatggagtgcggcagaagcgagatcgacgagctgatcaaggagcccagcgtggacgactacatgggcatgatcaagagaagccccagcccccccgaggcctgcagaagccagctgctgcccgactggtgggcccagcagcccagcaccggcgtgcccctggtgaccggctacaccacctacgacgcccaccacagcgccttcagccagatggtgatcagcttctactacggcggcaagctggtgggccaggccaccaccacctgccccgagggctgcagactgagcctgagccagcccggcctgcccggcaccaagctgtacggccccgagggcctggagctggtgagattcccccccgccgacgccatccccagcgagagacagagacaggtgaccagaaagctgttcggccacctggagagaggcgtgctgctgcacagcagcagacagggcgtgttcgtgaagagactgtgccagggcagagtgttctgcagcggcaacgccgtggtgtgcaagggcagacccaacaagctggagagagacgaggtggtgcaggtgttcgacaccagccagttcttcagagagctgcagcagttctacaacagccagggcagactgcccgacggcagagtggtgctgtgcttcggcgaggagttccccgacatggcccccctgagaagcaagctgatcctggtgcagatcgagcagctgtacgtgagacagctggccgaggaggccggcaagagctgcggcgccggcagcgtgatgcaggcccccgaggagcccccccccgaccaggtgttcagaatgttccccgacatctgcgccagccaccagagaagcttcttcagagagaaccagcagatcaccgtgtag

SEQ ID NO: 126007 - protein, 403 aa, Artificial Sequence [sequence omitted]

SEQ ID NO: 126008 - protein, 78 aa, Artificial Sequence
  derived and/or modified sequence
MAHAMENSWTISKEYHIDEEVGFALPNPQENLPDFYNDWMFIAKHLPDLIESGQLRERVEKLNMLSIDHLTDHKSQRL

SEQ ID NO: 126009 - protein, 180 aa, Artificial Sequence
  derived and/or modified sequence
MAHAMENSWTISKEYHIDEEVGFALPNPQENLPDFYNDWMFIAKHLPDLIESGQLRERVEKLNMLSIDHLTDHKSQRLARLVLGCITMAYVWGKGHGDVRKVLPRNIAVPYCQLSKKLELPPILVYADCVLANWKKKDPNKPLTYENMDVLFSFRDGDCSKGFFLVSLLVEIAAASAIKV

SEQ ID NO: 126010 - protein, 47 aa, Artificial Sequence
  derived and/or modified sequence
MAHAMENSWTISKEYHIDEEVGFALPNPQENLPDFYNDWMFIAKHLP

SEQ ID NO: 126011 - DNA, 1212 bp, Artificial Sequence
  derived and/or modified sequence
atggctcatgctatggagaattcatggacaatcagcaaggagtaccacatcgacgaggaggttggattcgccctgcctaacccacaggagaaccttccagacttttacaacgactggatgttcattgccaagcacctgcccgacctgatcgagtcaggccaactccgggaacgggtcgagaaacttaatatgctaagtattgatcacttgaccgatcataagtcgcaaagactggcgaggctggtattaggatgtattaccatggcctatgtctgggggaaaggtcacggtgacgtgcggaaggtcctcccgcgaaatatcgctgtcccttattgtcagctctcaaaaaaacttgagttgcctccaattctggtttatgccgattgcgtattggctaactggaaaaagaaagacccgaataagcccctgacatacgagaacatggatgtactattctcatttagagacggagactgctcaaagggtttttttctcgtttcactgctggtggagattgcagcggcctcggctatcaaagtcataccaacagtgtttaaggccatgcagatgcaagaacgagatactttacttaaagctctgttggaaattgcctcttgcctcgaaaaagccctgcaggtgttccaccagatccacgatcacgtcaatcccaaggccttcttttccgtgcttcgtatctatctgtcaggttggaaaggaaatccccagctgagcgatggactggtctatgagggtttctgggaggatccgaaggagtttgctggtggctcagctggacagagttccgtgttccaatgtttcgatgtgttactcggaatacagcagaccgccggaggcggccacgcagctcaatttctccaggacatgcggcgctatatgccacctgcccaccggaacttcctgtgttctttggaatctaacccgtccgtgagggaattcgtactttccaaaggggatgccggattgcgagaggcctatgacgcatgcgttaaagccctggtgtccctcagatcttaccatcttcagatcgttacgaagtacattcttataccggcgtcacaacagcctaaggagaataagactagcgaggacccaagcaaattggaagccaagggcacaggcggaaccgatctcatgaatttcctgaagacggttcggtctaccaccgaaaagtccctgctaaaggagggatag

SEQ ID NO: 126012 - DNA, 237 bp, Artificial Sequence
  derived and/or modified sequence
atggctcatgctatggaaaacagctggaccataagcaaggagtaccacatcgacgaagaggtgggattcgctctgcccaatccccaggagaacctacccgacttctataacgactggatgtttattgcaaagcacctgcctgacctcatcgagtccggacaattgcgggaaagagtggagaagctcaacatgctgagtatcgaccacctcactgatcataagagtcagaggctttag

SEQ ID NO: 126013 - DNA, 543 bp, Artificial Sequence
  derived and/or modified sequence
atggcccatgccatggaaaattcctggaccataagcaaagagtaccacatcgacgaagaagtaggtttcgcgttgccaaacccgcaggagaacctacccgacttttataacgattggatgtttatcgcgaaacaccttcctgatttaatcgagtccgggcaactgagggagcgcgtggagaagctgaacatgctgagtattgaccacctcaccgaccacaaatcacagcggctcgcccgcctagtgcttggttgcatcactatggcctatgtttgggggaaggggcacggcgacgtgagaaaagtcctcccccggaatatcgctgtgccttactgtcagctaagcaaaaagctcgagttacctccgatactggtttacgccgattgtgtgctggccaactggaagaaaaaagatcctaataagcctttgacatacgagaatatggacgtactgttttctttccgagacggagactgttcaaaaggcttttttttggtttctctactggttgaaattgccgccgcaagtgccatcaaagtatag

SEQ ID NO: 126014 - DNA, 1212 bp, Artificial Sequence
  derived and/or modified sequence
atggctcacgctatggaaaattcctggaccatcagcaaggagtaccacatagacgaggaagtgggattcgccctgcccaacccacaggagaacctgcccgatttctacaatgactggatgttcatcgcaaagcacctcccggacctcatagagtccggccaactgcgcgaaagagtcgagaagctaaacatgctgtccattgatcacctgacagatcataagtcacagagactggccaggctcgtgctgggctgcatcacgatggcctatgtctggggtaagggacacggcgacgtcagaaaagttctcccgcggaatatcgccgtcccctattgtcaactgtccaaaaagttggaattgcccccaatacttgtctatgctgactgtgttctggccaattggaagaaaaaagatcccaacaaaccgctaacctatgaaaacatggacgttctcttctcttttagggacggcgactgttctaaaggattctttctggtgtccctgctggtggaaatagctgctgctagcgcgataaaagtgatccctacggtctttaaggccatgcagatgcaggaacgggatacgctgcttaaggccctcttagaaatcgcgtcatgcctcgagaaagcactgcaggtattccatcagattcacgaccatgttaatcctaaggcctttttttctgtcctaagaatctaccttagcggctggaaaggcaacccccagttgagtgacggcctggtttacgaggggttctgggaggaccccaaggagtttgcaggagggagcgccggtcagtcaagcgtgttccaatgtttcgatgtacttctggggattcagcagacggccggggggggccacgctgctcagttccttcaagatatgcgtaggtatatgcctccagcccacagaaactttctttgttcactggagagtaaccccagcgtgagagagtttgttctgagcaaaggagacgcaggtctgcgtgaagcttacgatgcatgcgtgaaagccctggtatccctgcggtcctaccatttacagatagttaccaagtatatcctcatacctgcgtcccagcaacccaaagagaacaagacttcagaggacccttctaaactggaggctaaaggcacaggtggcactgatctcatgaacttcctcaagacggtgcgttcaacgaccgagaagagcctcctcaaagaaggctag

SEQ ID NO: 126015 - DNA, 144 bp, Artificial Sequence
  derived and/or modified sequence
atggctcatgctatggagaactcttggacaatcagcaaggagtaccacatcgatgaagaggttggcttcgctctaccaaacccacaagagaatctcccagacttctacaacgactggatgttcatcgctaaacacctgccgtag

SEQ ID NO: 126016 - DNA, 2097 bp, Artificial Sequence
  derived and/or modified sequence
tgagaagggcaaatgctatcattggaaaaactgacaaaagtcccaataggaaaaataaggaagtggagagttactatgtttctaatttttcatgtgcttctatttttttcctacttcagagccattgactaatagttgagtataacacaggttgtgtttccgggctgctgaaacatgacactaatattttcaaagaactgtggaagcctaaaaggaagccaatgagaaataactaaatgagagtttaggactgcagccttcattttcattcaaagatttaaaagtttccataaagtaaaatgttcttctccggccacctgttttcatagttctgtgttttccttcaggcctttctggcttcctatatggcagtaagaaaatgatgtgcttaatgattacaaatttcatatggaatacgaactttcagtttgtacatatgatgcacagagatgcttttgtggttttattggttttcatattacaaacaaagaaactagaaaatgaaaccattccaaaagtggaagtaatttctcactgcccctgtgataaactgtggtcactggctgtggcagcaactattataagatgctctgaaaactcttcagacactgaggggcaccagaggagcagactacaagaatggcacacgctatggaaaactcctggacaatcagtaaagagtaccatattgatgaagaagtgggctttgctctgccaaatccacaggaaaatctacctgatttttataatgactggatgttcattgctaaacatctgcctgatctcatagagtctggccagcttcgagaaagagttgagaagttaaacatgctcagcattgatcatctcacagaccacaagtcacagcgccttgcacgtctagttctgggatgcatcaccatggcatatgtgtggggcaaaggtcatggagatgtccgtaaggtcttgccaagaaatattgctgttccttactgccaactctccaagaaactggaactgcctcctattttggtttatgcagactgtgtcttggcaaactggaagaaaaaggatcctaataagcccctgacttatgagaacatggacgttttgttctcatttcgtgatggagactgcagtaaaggattcttcctggtctctctattggtggaaatagcagctgcttctgcaatcaaagtaattcctactgtattcaaggcaatgcaaatgcaagaacgggacactttgctaaaggcgctgttggaaatagcttcttgcttggagaaagcccttcaagtgtttcaccaaatccacgatcatgtgaacccaaaagcatttttcagtgttcttcgcatatatttgtctggctggaaaggcaacccccagctatcagacggtctggtgtatgaagggttctgggaagacccaaaggagtttgcagggggcagtgcaggccaaagcagcgtctttcagtgctttgacgtcctgctgggcatccagcagactgctggtggaggacatgctgctcagttcctccaggacatgagaagatatatgccaccagctcacaggaacttcctgtgctcattagagtcaaatccctcagtccgtgagtttgtcctttcaaaaggtgatgctggcctgcgggaagcttatgacgcctgtgtgaaagctctggtctccctgaggagctaccatctgcaaatcgtgactaagtacatcctgattcctgcaagccagcagccaaaggagaataagacctctgaagacccttcaaaactggaagccaaaggaactggaggcactgatttaatgaatttcctgaagactgtaagaagtacaactgagaaatcccttttgaaggaaggttaatgtaacccaacaagagcacattttatcatagcagagacatctgtatgcattcctgtcattacccattgtaacagagccacaaactaatactatgcaatgttttaccaataatgcaatacaaaagacctcaaaatacctgtgcatttcttgtaggaaaacaacaaaaggtaattatgtgtaattatactagaagttttgtaatctgtatcttatcattggaataaaatgacattcaataaataaaaa

SEQ ID NO: 126017 - DNA, 612 bp, Artificial Sequence
  derived and/or modified sequence
ttttctcctattaatctgctttgtcatttgattttcaatgaaccttcagagggcaaaaggaaagttttccctcagctccaacagttttggcccagtgaacaggacaaccaaaactgctctgctcttccgaaaattgcagtcagggaacctgggacccggcaagccagcagaaggaacacagttggagactctggttattttaccaaggctttgactgaaatgccatattttcagatgtgaccagacagctttaagaaactgaggttgatattatgaagcccataggagcttttggaaaaactggtctaatatcctaaatacacggttcacataatgggcttgtgacactgaggggcaccagaggagcagactacaagaatggcacacgctatggaaaactcctggacaatcagtaaagagtaccatattgatgaagaagtgggctttgctctgccaaatccacaggaaaatctacctgatttttataatgactggatgttcattgctaaacatctgcctgatctcatagagtctggccagcttcgagaaagagttgagaagttaaacatgctcagcattgatcatctcacagaccacaagtcacagcgcctt

SEQ ID NO: 126018 - DNA, 1138 bp, Artificial Sequence
  derived and/or modified sequence
gaacaggacaaccaaaactgctctgctcttccgaaaattgcagtcagggaacctgggacccggcaagccagcagaaggagccattgactaatagttgagtataacacaggttgtgtttccgggctgctgaaacatgacactaatattttcaaagaactgtggaagcctaaaaggaagccaatgagaaataactaaatgagagtttaggactgcagccttcattttcattcaaagatttaaaagtttccataaagtaaaatgttcttctccggccacctgttttcatagttctgtgttttccttcaggcctttctggcttcctatatggcagtaagaaaatgatgtgcttaatgattacaaatttcatatggaatacgaactttcagtttgtacatatgatgcacagagatgcttttgtggttttattggttttcatattacaaacaaagaaactagaaaatgaaaccattccaaaagtggaagtaatttctcactgcccctgtgataaactgtggtcactggctgtggcagcaactattataagatgctctgaaaactcttcagacactgaggggcaccagaggagcagactacaagaatggcacacgctatggaaaactcctggacaatcagtaaagagtaccatattgatgaagaagtgggctttgctctgccaaatccacaggaaaatctacctgatttttataatgactggatgttcattgctaaacatctgcctgatctcatagagtctggccagcttcgagaaagagttgagaagttaaacatgctcagcattgatcatctcacagaccacaagtcacagcgccttgcacgtctagttctgggatgcatcaccatggcatatgtgtggggcaaaggtcatggagatgtccgtaaggtcttgccaagaaatattgctgttccttactgccaactctccaagaaactggaactgcctcctattttggtttatgcagactgtgtcttggcaaactggaagaaaaaggatcctaataagcccctgacttatgagaacatggacgttttgttctcatttcgtgatggagactgcagtaaaggattcttcctggtctctctattggtggaaatagcagctgcttctgcaatcaaagta

SEQ ID NO: 126019 - DNA, 1709 bp, Artificial Sequence
  derived and/or modified sequence
aggacaaccaaaactgctctgctcttccgaaaattgcagtcagggaacctgggacccggcaagccagcagaaggaggaacgggcaacttggtttcttctttagcttccttgttctcattaagattgaacaatgcctctaaagtgaaccacagacttgcatgcaagctgaaaacctttaccaaatgcagtcttaatttgtactttgagaaaaacattttcaagacactgaggggcaccagaggagcagactacaagaatggcacacgctatggaaaactcctggacaatcagtaaagagtaccatattgatgaagaagtgggctttgctctgccaaatccacaggaaaatctacctgatttttataatgactggatgttcattgctaaacatctgcctgatctcatagagtctggccagcttcgagaaagagttgagaagttaaacatgctcagcattgatcatctcacagaccacaagtcacagcgccttgcacgtctagttctgggatgcatcaccatggcatatgtgtggggcaaaggtcatggagatgtccgtaaggtcttgccaagaaatattgctgttccttactgccaactctccaagaaactggaactgcctcctattttggtttatgcagactgtgtcttggcaaactggaagaaaaaggatcctaataagcccctgacttatgagaacatggacgttttgttctcatttcgtgatggagactgcagtaaaggattcttcctggtctctctattggtggaaatagcagctgcttctgcaatcaaagtaattcctactgtattcaaggcaatgcaaatgcaagaacgggacactttgctaaaggcgctgttggaaatagcttcttgcttggagaaagcccttcaagtgtttcaccaaatccacgatcatgtgaacccaaaagcatttttcagtgttcttcgcatatatttgtctggctggaaaggcaacccccagctatcagacggtctggtgtatgaagggttctgggaagacccaaaggagtttgcagggggcagtgcaggccaaagcagcgtctttcagtgctttgacgtcctgctgggcatccagcagactgctggtggaggacatgctgctcagttcctccaggacatgagaagatatatgccaccagctcacaggaacttcctgtgctcattagagtcaaatccctcagtccgtgagtttgtcctttcaaaaggtgatgctggcctgcgggaagcttatgacgcctgtgtgaaagctctggtctccctgaggagctaccatctgcaaatcgtgactaagtacatcctgattcctgcaagccagcagccaaaggagaataagacctctgaagacccttcaaaactggaagccaaaggaactggaggcactgatttaatgaatttcctgaagactgtaagaagtacaactgagaaatcccttttgaaggaaggttaatgtaacccaacaagagcacattttatcatagcagagacatctgtatgcattcctgtcattacccattgtaacagagccacaaactaatactatgcaatgttttaccaataatgcaatacaaaagacctcaaaatacctgtgcatttcttgtaggaaaacaacaaaaggtaattatgtgtaattatactagaagttttgtaatctgtatcttatcattggaataaaatgacattcaataaat

SEQ ID NO: 126020 - DNA, 572 bp, Artificial Sequence
  derived and/or modified sequence
aaccaaaactgctctgctcttccgaaaattgcagtcagggaacctgggacccggcaagccagcagaaggagttaaggaaaatgtttgttctgttaagctttacagaaatggaacacagttggagactctggttattttaccaaggctttgactgaaatgccatattttcagatgtgaccagacagctttaagaaactgaggttgatattatgaagcccataggagcttttggaaaaactggtctaatatcctaaatacacggttcacataatgggcttgtgaaactagaaaatgaaaccattccaaaagtggaagtaatttctcactgcccctgtgataaactgtggtcactggctgtggcagcaactattataagatgctctgaaaactcttcagacactgaggggcaccagaggagcagactacaagaatggcacacgctatggaaaactcctggacaatcagtaaagagtaccatattgatgaagaagtgggctttgctctgccaaatccacaggaaaatctacctgatttttataatgactggatgttcattgctaaacatctgcctg

SEQ ID NO: 126021 - DNA, 1212 bp, Artificial Sequence
  derived and/or modified sequence
atggcccacgccatggagaacagctggaccatcagcaaggagtaccacattgatgaggaggtgggctttgccctgcccaacccccaggagaacctgcctgacttctacaatgactggatgttcatcgccaagcacctgcctgacctgattgagagcggccagctgcgggagcgggtggagaagctgaacatgctgagcattgaccacctgacagaccacaagagccagaggctggcccggctggtgctgggctgcatcaccatggcctacgtgtggggcaagggccatggagatgtgaggaaggtgctgcccagaaatattgctgtgccctactgccagctgagcaagaagctggagctgccccccatcctggtgtatgctgactgtgtgctggccaactggaagaagaaggaccccaacaagcccctgacctatgagaacatggatgtgctcttctccttcagagatggagactgcagcaagggcttcttcctggtgtccctgctggtggagattgctgctgccagcgccatcaaggtgatccccaccgtcttcaaggccatgcagatgcaggagcgggacaccctgctgaaggccctgctggagatcgccagctgcctggagaaggccctgcaggtgttccaccagatccatgaccacgtgaaccccaaggccttcttctctgtgctgcgcatctacctgagcggctggaagggcaacccccagctgagtgatggcctggtgtatgagggcttctgggaggaccccaaggagtttgctgggggcagcgctggccagagcagcgtcttccagtgctttgatgtgctgctgggcatccagcagacagctgggggcggccacgccgcccagttcctgcaggacatgaggcgctacatgcccccagcccacaggaacttcctgtgcagcctggagagcaaccccagcgtgcgggagtttgtgctgagcaaaggagatgctggcctgcgggaggcctatgatgcctgtgtgaaggccctggtgtccctgcggagctaccacctgcagatcgtgaccaagtacatcctgatcccagccagccagcagcccaaggagaacaagaccagcgaggaccccagcaagctggaggccaagggcactggaggaacagacctgatgaacttcctgaagacagtgcgcagcaccacagagaagagcctgctgaaggagggctag

SEQ ID NO: 126022 - DNA, 237 bp, Artificial Sequence
  derived and/or modified sequence
atggcccacgccatggagaacagctggaccatcagcaaggagtaccacattgatgaggaggtgggctttgccctgcccaacccccaggagaacctgcctgacttctacaatgactggatgttcatcgccaagcacctgcctgacctgattgagagcggccagctgcgggagcgggtggagaagctgaacatgctgagcattgaccacctgacagaccacaagagccagaggctgtag

SEQ ID NO: 126023 - DNA, 543 bp, Artificial Sequence
  derived and/or modified sequence
atggcccacgccatggagaacagctggaccatcagcaaggagtaccacattgatgaggaggtgggctttgccctgcccaacccccaggagaacctgcctgacttctacaatgactggatgttcatcgccaagcacctgcctgacctgattgagagcggccagctgcgggagcgggtggagaagctgaacatgctgagcattgaccacctgacagaccacaagagccagaggctggcccggctggtgctgggctgcatcaccatggcctacgtgtggggcaagggccatggagatgtgaggaaggtgctgcccagaaatattgctgtgccctactgccagctgagcaagaagctggagctgccccccatcctggtgtatgctgactgtgtgctggccaactggaagaagaaggaccccaacaagcccctgacctatgagaacatggatgtgctcttctccttcagagatggagactgcagcaagggcttcttcctggtgtccctgctggtggagattgctgctgccagcgccatcaaggtgtag

SEQ ID NO: 126024 - DNA, 144 bp, Artificial Sequence
  derived and/or modified sequence
atggcccacgccatggagaacagctggaccatcagcaaggagtaccacattgatgaggaggtgggctttgccctgcccaacccccaggagaacctgcctgacttctacaatgactggatgttcatcgccaagcacctgccctag

SEQ ID NO: 126025 - DNA, 1212 bp, Artificial Sequence
  derived and/or modified sequence
atggcccacgccatggagaacagctggaccatcagcaaggagtaccacattgacgaggaggttggatttgcccttcctaaccctcaggaaaacttaccagatttctacaacgactggatgttcatagcgaaacacttacccgatttaatcgaatcggggcaacttcgggaaagggtcgagaaacttaacatgctgagcattgaccacttgactgatcacaagtcacaaaggctggcaagattggtgctggggtgtatcaccatggcatacgtgtggggaaaaggccatggcgatgtgcgcaaagtcctgcctcgaaacatcgctgtgccctattgtcagttatctaaaaagctggagctgccccctattctggtgtatgccgattgtgtcctcgccaattggaaaaagaaggatccgaataagcccctgacgtatgaaaacatggacgtcctcttctccttccgtgacggcgactgctctaaaggcttctttctggtgtctctgctggttgagatagcagcagcttccgccattaaagttattccaacagtgtttaaggccatgcaaatgcaggaacgtgatactttgctgaaagcactgttggaaatcgcatcttgcctggaaaaggctctacaggttttccatcagatccacgatcacgtgaatcccaaagcctttttcagtgtgttgagaatctatcttagcgggtggaaaggaaaccctcagctgagtgacgggctcgtgtatgaagggttttgggaggatcccaaggagtttgctggggggtcagcaggacaatcaagcgtgtttcagtgcttcgacgtcctgctgggaatccagcaaactgctggtggtgggcacgctgctcaattcctccaggacatgcgtcgctacatgccaccagcccacaggaattttctgtgttccctcgagagcaacccctccgtgcgggagttcgtgctgagtaagggagatgcagggcttcgcgaagcatatgacgcatgtgtgaaagccctggtaagcctgcgctcataccatctgcagatcgtgacaaagtatatcctgatccccgcatcacagcagcccaaggagaacaagactagtgaggacccgtccaagttggaagccaaaggtacaggcggaaccgacctgatgaatttcttaaaaacagtcaggtcgacaactgaaaaaagcctgctgaaggaaggctag

SEQ ID NO: 126026 - DNA, 237 bp, Artificial Sequence
  derived and/or modified sequence
atggcccacgccatggagaacagctggaccatcagcaaggagtaccacattgacgaagaagtgggttttgcactgccgaatccccaagagaacctccctgacttctacaacgattggatgttcatagcgaagcacctccctgacctcattgagtctggtcaactgcgtgagcgggtcgagaagctcaatatgctgtccattgatcacttgaccgaccacaaaagtcaacgcctgtag

SEQ ID NO: 126027 - DNA, 543 bp, Artificial Sequence
  derived and/or modified sequence
atggcccacgccatggagaacagctggaccatcagcaaggagtaccacattgacgaagaggtcggctttgccctgccaaacccccaggaaaatttgccagacttctacaacgactggatgttcattgccaaacacctccccgacttaattgagtccggacagctgcgcgaaagggtggagaagctgaacatgctcagcattgatcacctgacagaccataagagccagagactggcgaggctggtcctgggttgtatcaccatggcctacgtttggggcaaaggccacggcgacgtgaggaaagtccttcctaggaacattgccgtgccttattgtcagctctccaaaaagctggagttgccacctatcctcgtgtacgccgattgtgtgctagcgaactggaagaaaaaggatcctaataagcccttaacgtatgaaaatatggacgtgctgttctctttcagagatggcgactgcagtaaaggattttttctcgtcagcctactggtggagatcgcagctgcctctgccatcaaagtgtag

SEQ ID NO: 126028 - DNA, 1212 bp, Artificial Sequence
  derived and/or modified sequence
atggcccacgccatggagaacagctggaccatcagcaaggagtaccatattgatgaagaggtcggcttcgctctgccaaaccctcaagaaaacttacccgacttttacaatgactggatgttcatcgccaaacatctgcctgatctaattgagtcagggcaattgcgtgaacgggtcgagaaactgaacatgttgagcattgaccatctcacggaccataagagtcaaaggctggcccggctggttctgggatgtattacgatggcctatgtgtggggcaagggccacggcgatgtgcgcaaagtgctgcctcggaacatagcagtgccctactgtcagctgagtaagaaacttgaacttccaccaatcctcgtgtacgctgactgcgtgctcgccaattggaaaaagaaagaccccaacaagcccctcacttacgaaaatatggatgtcctgttctctttcagggatggtgactgctcaaagggctttttcctagtgtcgttactcgttgaaattgctgccgcatcagcgatcaaggttattccgaccgtctttaaagcaatgcagatgcaggaacgggacactctgctcaaggccctgctggagatcgccagctgtctggagaaagcccttcaagtcttccaccagatccacgatcacgttaacccgaaggcgttcttttcagtgttacggatttacctttctggttggaagggtaatcctcagctatcggatggattggtctatgaggggttttgggaagaccccaaggagttcgccgggggcagcgctggccaaagctcagtcttccagtgctttgatgttctgctgggcatccagcagaccgctggcggaggacacgctgcccagttcctgcaagacatgcgacgctacatgccaccagcccaccgcaatttcctgtgctctttagaatcgaatccatctgtaagggaattcgtgcttagcaagggggacgctggactccgggaagcttatgatgcttgcgtcaaggcacttgttagcctgaggagttaccatctgcagattgtgacaaaatacatcttgatcccggctagccaacagcccaaggagaacaaaacgtctgaggaccctagcaagctggaagctaaagggacaggcggtaccgacctcatgaatttcctgaagacggtgcggagtaccacggaaaagtcattactaaaggagggctag

SEQ ID NO: 126029 - DNA, 144 bp, Artificial Sequence
  derived and/or modified sequence
atggcccacgccatggagaacagctggaccatcagcaaggagtaccacatagacgaggaggtgggtttcgctctgcctaatccacaagagaaccttccggatttctacaacgattggatgttcattgccaaacatctgccttag

SEQ ID NO: 126030 - DNA, 1212 bp, Artificial Sequence
  derived and/or modified sequence
atggctcacgccatggaaaacagctggacaatcagtaaggaataccacattgacgaggaagttggattcgccctcccgaacccacaagaaaatctgcctgacttctataacgactggatgttcatcgccaagcatcttcccgatttaatcgagagtggacaattgcgcgaacgcgtggaaaaactgaacatgctgtcgatagaccacttgactgaccacaagtcccagcgcttggcccgattggtgttgggttgcatcaccatggcgtatgtgtggggaaaaggacacggggacgtcaggaaggtcctccctagaaacattgccgttccctactgccaactgagcaaaaaattggagcttccacccatccttgtgtacgcagactgcgtgcttgctaactggaagaagaaggaccccaataaacccttgacctacgagaacatggatgtcttgttcagcttcagagatggtgactgtagcaagggcttttttcttgtgtccctacttgtagagatagctgcagcgtcagcaatcaaagttatccccacagtatttaaagccatgcaaatgcaagagcgggacaccctcctgaaggcactcttggaaattgccagctgcttggaaaaagctctgcaagtcttccaccaaattcatgaccatgttaacccaaaggccttctttagtgtgcttcggatctatttgagtggctggaagggaaatccccagttgtccgatggcctagtctacgaaggcttttgggaagatcctaaggagtttgccggagggtcagccggacagtccagcgtcttccagtgctttgacgtactgctgggcatccagcagaccgctgggggaggacacgctgctcagtttctccaggacatgaggaggtatatgccccctgcccacagaaatttcctgtgttctctggaatccaatccctcagtacgggagttcgtcctctccaaaggtgacgccggtctcagagaggcatacgacgcgtgtgtgaaagctcttgtctcactccgcagctaccacctgcagatagttaccaagtatatactgatacccgctagtcagcaaccgaaggaaaataagacatccgaagacccatccaagctggaggctaagggcactggaggcactgacctcatgaactttctgaaaacagtcagatctactactgaaaaatccctgctgaaagaaggttag

SEQ ID NO: 126031 - DNA, 237 bp, Artificial Sequence
  derived and/or modified sequence
atggcgcacgcgatggaaaactcttggactatttcgaaggaataccatatcgatgaggaagtgggtttcgcactgcccaatccacaggaaaaccttcccgatttctataatgattggatgtttatagctaagcacctccccgatctgatcgaaagcggccagttaagggaacgcgtggaaaaactgaatatgctgtctatagaccacttaactgaccacaagtcacagcggctttag

SEQ ID NO: 126032 - DNA, 543 bp, Artificial Sequence
  derived and/or modified sequence
atggcacacgcgatggagaatagttggaccataagcaaggaatatcatatagacgaggaagtggggttcgccctccccaatcctcaggagaatctgcctgacttttataatgattggatgttcatagccaaacacctcccggaccttatagagagtgggcagttgagagagcgggtcgaaaaactgaacatgctctccatcgatcatctcacggaccacaaaagccagcgcttggccagactagtgctggggtgtatcacaatggcatacgtgtggggaaaggggcatggggacgtgcggaaggtcctcccacgtaatatcgctgttccctattgtcagctcagcaagaagctcgaactccctccgattctggtgtacgccgattgtgtcctggctaattggaaaaagaaggacccgaacaagccactcacttatgagaacatggacgtcctcttcagtttccgtgacggagattgttccaagggcttttttcttgtctcattgttagtggaaattgctgccgcttcagctattaaggtctag

SEQ ID NO: 126033 - DNA, 1212 bp, Artificial Sequence
  derived and/or modified sequence
atggcccatgccatggaaaattcctggacgatttcaaaagaatatcacattgacgaggaggttggatttgccctacccaacccccaggaaaatcttcccgacttctataacgactggatgtttatcgccaaacacctaccagatctgattgaatcaggccagctccgggaacgggtcgaaaagctgaatatgctttctatcgaccacctcactgatcacaaaagccagcgccttgctcggctagtccttggatgcataactatggcttatgtgtggggaaagggacatggagatgtccgcaaagtactgccccgaaatatagcagtaccttactgtcaattgtccaagaaactcgagctgccacctatcctggtgtatgcggactgtgtgttagccaactggaagaagaaagaccccaacaagcccctcacgtacgagaacatggatgttctgttcagctttagagatggtgattgttctaaagggttttttttggtgagccttcttgtggagatcgccgcagccagcgcaatcaaggtgatacccacagtgtttaaggcaatgcaaatgcaagaaagggatacgctcttaaaggccttgctcgagattgcttcatgcctcgagaaggcactccaggttttccatcagatccatgatcacgttaaccctaaagcgtttttctctgtcctgcgcatctacctgtcagggtggaaaggcaaccctcagttatctgacgggctggtttacgaggggttctgggaggacccgaaggagtttgccggaggatccgccggacagtcatctgtgttccagtgttttgacgtactgctgggtattcagcaaactgccggtgggggacacgccgcacagtttctgcaggacatgcggagatatatgcccccagcccacagaaactttctgtgttcactggagagtaacccatcagtccgtgagttcgtgttaagcaagggggatgccggactgagggaggcctacgacgcctgcgttaaagcgttggtaagcttgcgctcgtatcacctacagattgttaccaagtacatcctgattcctgcctcacagcagccaaaggagaacaagacctcagaagatccaagcaaactcgaagcaaagggcaccggcggaacagaccttatgaattttcttaaaacagtcagatcaactacagaaaaaagcctcttaaaagagggctag

SEQ ID NO: 126034 - DNA, 144 bp, Artificial Sequence
  derived and/or modified sequence
atggcccacgctatggaaaactcatggaccatctcaaaagaatatcacatagatgaggaggtcggctttgctctccccaatcctcaagagaatctgccagatttttataacgactggatgtttattgcaaaacacctgccatag

SEQ ID NO: 126035 - DNA, 1212 bp, Artificial Sequence
  derived and/or modified sequence
atggcccacgccatggagaacagctggaccatcagcaaggagtaccacatcgacgaggaggtgggcttcgccctgcccaacccccaggagaacctgcccgacttctacaacgactggatgttcatcgccaagcacctgcccgacctgatcgagagcggccagctgagagagagagtggagaagctgaacatgctgagcatcgaccacctgaccgaccacaagagccagagactggccagactggtgctgggctgcatcaccatggcctacgtgtggggcaagggccacggcgacgtgagaaaggtgctgcccagaaacatcgccgtgccctactgccagctgagcaagaagctggagctgccccccatcctggtgtacgccgactgcgtgctggccaactggaagaagaaggaccccaacaagcccctgacctacgagaacatggacgtgctgttcagcttcagagacggcgactgcagcaagggcttcttcctggtgagcctgctggtggagatcgccgccgccagcgccatcaaggtgatccccaccgtgttcaaggccatgcagatgcaggagagagacaccctgctgaaggccctgctggagatcgccagctgcctggagaaggccctgcaggtgttccaccagatccacgaccacgtgaaccccaaggccttcttcagcgtgctgagaatctacctgagcggctggaagggcaacccccagctgagcgacggcctggtgtacgagggcttctgggaggaccccaaggagttcgccggcggcagcgccggccagagcagcgtgttccagtgcttcgacgtgctgctgggcatccagcagaccgccggcggcggccacgccgcccagttcctgcaggacatgagaagatacatgccccccgcccacagaaacttcctgtgcagcctggagagcaaccccagcgtgagagagttcgtgctgagcaagggcgacgccggcctgagagaggcctacgacgcctgcgtgaaggccctggtgagcctgagaagctaccacctgcagatcgtgaccaagtacatcctgatccccgccagccagcagcccaaggagaacaagaccagcgaggaccccagcaagctggaggccaagggcaccggcggcaccgacctgatgaacttcctgaagaccgtgagaagcaccaccgagaagagcctgctgaaggagggctag

SEQ ID NO: 126036 - DNA, 237 bp, Artificial Sequence
  derived and/or modified sequence
atggcccacgccatggagaacagctggaccatcagcaaggagtaccacatcgacgaggaggtgggcttcgccctgcccaacccccaggagaacctgcccgacttctacaacgactggatgttcatcgccaagcacctgcccgacctgatcgagagcggccagctgagagagagagtggagaagctgaacatgctgagcatcgaccacctgaccgaccacaagagccagagactgtag

SEQ ID NO: 126037 - DNA, 543 bp, Artificial Sequence
  derived and/or modified sequence
atggcccacgccatggagaacagctggaccatcagcaaggagtaccacatcgacgaggaggtgggcttcgccctgcccaacccccaggagaacctgcccgacttctacaacgactggatgttcatcgccaagcacctgcccgacctgatcgagagcggccagctgagagagagagtggagaagctgaacatgctgagcatcgaccacctgaccgaccacaagagccagagactggccagactggtgctgggctgcatcaccatggcctacgtgtggggcaagggccacggcgacgtgagaaaggtgctgcccagaaacatcgccgtgccctactgccagctgagcaagaagctggagctgccccccatcctggtgtacgccgactgcgtgctggccaactggaagaagaaggaccccaacaagcccctgacctacgagaacatggacgtgctgttcagcttcagagacggcgactgcagcaagggcttcttcctggtgagcctgctggtggagatcgccgccgccagcgccatcaaggtgtag

SEQ ID NO: 126038 - DNA, 144 bp, Artificial Sequence
  derived and/or modified sequence
atggcccacgccatggagaacagctggaccatcagcaaggagtaccacatcgacgaggaggtgggcttcgccctgcccaacccccaggagaacctgcccgacttctacaacgactggatgttcatcgccaagcacctgccctag

SEQ ID NO: 126039 - protein, 155 aa, Artificial Sequence
  derived and/or modified sequence
MKVASGSTATAAAGPSCALKAGKTASGAGEVVRCLSEQSVAISRCAGGAGARLPALLDEQQVNVLLYDMNGCYSRLKELVPTLPQNRKVSKVEILQHVIDYIRDLQLELNSESEVGTPGGRGLPVRAPLSTLNGEISALTAEAACVPADDRILCR

SEQ ID NO: 126040 - DNA, 993 bp, Artificial Sequence
  derived and/or modified sequence
attccacgttcttaactgttccattttccgtatctgcttcgggcttccacctcatttttttcgctttgcccattctgtttcagccagtcgccaagaatcatgaaagtcgccagtggcagcaccgccaccgccgccgcgggccccagctgcgcgctgaaggccggcaagacagcgagcggtgcgggcgaggtggtgcgctgtctgtctgagcagagcgtggccatctcgcgctgcgccgggggcgccggggcgcgcctgcctgccctgctggacgagcagcaggtaaacgtgctgctctacgacatgaacggctgttactcacgcctcaaggagctggtgcccaccctgccccagaaccgcaaggtgagcaaggtggagattctccagcacgtcatcgactacatcagggaccttcagttggagctgaactcggaatccgaagttggaacccccgggggccgagggctgccggtccgggctccgctcagcaccctcaacggcgagatcagcgccctgacggccgaggcggcatgcgttcctgcggacgatcgcatcttgtgtcgctgaagcgcctcccccagggaccggcggaccccagccatccagggggcaagaggaattacgtgctctgtgggtctcccccaacgcgcctcgccggatctgagggagaacaagaccgatcggcggccactgcgcccttaactgcatccagcctggggctgaggctgaggcactggcgaggagagggcgctcctctctgcacacctactagtcaccagagactttagggggtgggattccactcgtgtgtttctattttttgaaaagcagacattttaaaaaatggtcacgtttggtgcttctcagatttctgaggaaattgctttgtattgtatattacaatgatcaccgactgaaaatattgttttacaatagttctgtggggctgtttttttgttattaaacaaataatttagatggtgaaaaaaaaaa

SEQ ID NO: 126041 - DNA, 468 bp, Artificial Sequence
  derived and/or modified sequence
atgaaggtggccagcggcagcaccgccaccgccgccgccggccccagctgcgccctgaaggccggcaagaccgccagcggcgccggcgaggtggtgagatgcctgagcgagcagagcgtggccatcagcagatgcgccggcggcgccggcgccagactgcccgccctgctggacgagcagcaggtgaacgtgctgctgtacgacatgaacggctgctacagcagactgaaggagctggtgcccaccctgccccagaacagaaaggtgagcaaggtggagatcctgcagcacgtgatcgactacatcagagacctgcagctggagctgaacagcgagagcgaggtgggcacccccggcggcagaggcctgcccgtgagagcccccctgagcaccctgaacggcgagatcagcgccctgaccgccgaggccgcctgcgtgcccgccgacgacagaatcctgtgcagatag

SEQ ID NO: 126042 - DNA, 468 bp, Artificial Sequence
  derived and/or modified sequence
atgaaggtggcctccggatcaaccgccaccgctgctgccggtccttcctgtgctcttaaggcgggcaaaaccgcttcaggagcaggagaagtggtacgatgtctttccgaacaaagcgtagcaatctctaggtgtgccggaggggccggtgccagactccctgctttgcttgatgagcagcaggtgaacgtgctgctgtatgacatgaatggctgctacagcagactgaaagagttagtgccaactcttcctcagaataggaaagtgagtaaggtggaaatattacagcacgtcatcgattacatcagggatttgcaacttgagctcaacagcgagagcgaggtgggcacacctggaggacgggggctccctgtcagagcgcccctgtctaccctgaacggagagatcagcgccttgactgccgaggcggcgtgcgtccctgcagatgaccgaatcctatgccggtag

SEQ ID NO: 126043 - DNA, 468 bp, Artificial Sequence
  derived and/or modified sequence
atgaaggtggccagcggcagcacagccacagctgctgctggccccagctgtgccctgaaggccggcaagacagccagcggggccggggaggtggtgcgctgcctgtctgagcagagcgtggccatcagccgctgtgccggcggggccggggcccggctgcctgccctgctggatgagcagcaggtgaatgtgctgctgtatgacatgaatggctgctacagccggctgaaggagctggtgcccaccctgccccagaacaggaaggtgtccaaggtggagatcctgcagcacgtgattgactacatccgggacctgcagctggagctgaacagcgagagcgaggtgggcacccctgggggccggggcctgcctgtgcgggcccccctgagcaccctgaatggagagatcagcgccctgacagctgaggccgcctgtgtgcctgcagatgaccgcatcctgtgcaggtag

SEQ ID NO: 126044 - DNA, 994 bp, Artificial Sequence
  derived and/or modified sequence
actctcattccacgttcttaactgttccattttccgtatctgcttcgggcttccacctcatttttttcgctttgcccattctgtttcagccagtcgccaagaatcatgaaagtcgccagtggcagcaccgccaccgccgccgcgggccccagctgcgcgctgaaggccggcaagacagcgagcggtgcgggcgaggtggtgcgctgtctgtctgagcagagcgtggccatctcgcgctgcgccgggggcgccggggcgcgcctgcctgccctgctggacgagcagcaggtaaacgtgctgctctacgacatgaacggctgttactcacgcctcaaggagctggtgcccaccctgccccagaaccgcaaggtgagcaaggtggagattctccagcacgtcatcgactacatcagggaccttcagttggagctgaactcggaatccgaagttggaacccccgggggccgagggctgccggtccgggctccgctcagcaccctcaacggcgagatcagcgccctgacggccgaggcggcatgcgttcctgcggacgatcgcatcttgtgtcgctgaagcgcctcccccagggaccggcggaccccagccatccagggggcaagaggaattacgtgctctgtgggtctcccccaacgcgcctcgccggatctgagggagaacaagaccgatcggcggccactgcgcccttaactgcatccagcctggggctgaggctgaggcactggcgaggagagggcgctcctctctgcacacctactagtcaccagagactttagggggtgggattccactcgtgtgtttctattttttgaaaagcagacattttaaaaaatggtcacgtttggtgcttctcagatttctgaggaaattgctttgtattgtatattacaatgatcaccgactgaaaatattgttttacaatagttctgtggggctgtttttttgttattaaacaaataatttagatggtggtaaa

SEQ ID NO: 126045 - DNA, 468 bp, Artificial Sequence
  derived and/or modified sequence
atgaaggtggccagcggcagcaccgccaccgccgccgccggccccagctgtgccctgaaagccggtaagaccgcctctggtgccggcgaagttgtccggtgcctttcagagcaaagtgttgcaatctcaagatgcgctggtggggcaggcgcccgcctgcctgcccttttagacgaacaacaggttaatgttctcctctacgacatgaacggttgctactcacggctcaaagagctggttccaactctgcctcaaaaccgcaaagtctccaaggttgagatccttcagcacgtcattgactatattagagacctgcaacttgaactcaattccgaatctgaggttgggacacccggcggtcggggtttaccagtcagggctccactgagtacactcaacggcgagatctctgcccttactgccgaagccgcatgcgtgccagccgatgatcggattctatgccggtag

SEQ ID NO: 126046 - DNA, 468 bp, Artificial Sequence
  derived and/or modified sequence
atgaaggtcgccagcgggagtaccgcaacggccgctgcaggcccatcatgtgccctgaaggcagggaagactgcctcaggggcaggcgaagtggttcggtgtctgtccgagcagtcagtcgctatttcccgctgcgctggaggcgcaggggcaagacttcctgccctactcgatgaacaacaagtgaacgtcctgttatatgacatgaatggctgctactcaagactgaaagagttggtgcctacattaccacaaaaccgtaaggtgtcaaaagtagaaattctccagcatgttatcgactacatacgcgatctccagttagagttgaattctgagagtgaggtcgggacccccggtgggagggggctgcccgtgagggcccctctgtcaaccttaaacggcgagatcagcgctctgaccgcagaggctgcctgcgtgccagcagatgacaggatcctttgtaggtag

SEQ ID NO: 126047 - protein, 134 aa, Artificial Sequence
  derived and/or modified sequence
MKAFSPVRSVRKNSLSDHSLGISRSKTPVDDPMSLLYNMNDCYSKLKELVPSIPQNKKVSKMEILQHVIDYILDLQIALDSHPTIVSLHHQRPGQNQASRTPLTTLNTDISILSLQASEFPSELMSNDSKALCG

SEQ ID NO: 126048 - DNA, 1402 bp, Artificial Sequence
  derived and/or modified sequence
ggggacgaagggaagctccagcgtgtggccccggcgagtgcggataaaagccgccccgccgggctcgggcttcattctgagccgagcccggtgccaagcgcagctagctcagcaggcggcagcggcggcctgagcttcagggcagccagctccctcccggtctcgccttccctcgcggtcagcatgaaagccttcagtcccgtgaggtccgttaggaaaaacagcctgtcggaccacagcctgggcatctcccggagcaaaacccctgtggacgacccgatgagcctgctatacaacatgaacgactgctactccaagctcaaggagctggtgcccagcatcccccagaacaagaaggtgagcaagatggaaatcctgcagcacgtcatcgactacatcttggacctgcagatcgccctggactcgcatcccactattgtcagcctgcatcaccagagacccgggcagaaccaggcgtccaggacgccgctgaccaccctcaacacggatatcagcatcctgtccttgcaggcttctgaattcccttctgagttaatgtcaaatgacagcaaagcactgtgtggctgaataagcggtgttcatgatttcttttattctttgcacaacaacaacaacaacaaattcacggaatcttttaagtgctgaacttatttttcaaccatttcacaaggaggacaagttgaatggacctttttaaaaagaaaaaaaaaatggaaggaaaactaagaatgatcatcttcccagggtgttctcttacttggactgtgatattcgttatttatgaaaaagacttttaaatgccctttctgcagttggaaggttttctttatatactattcccaccatggggagcgaaaacgttaaaatcacaaggaattgcccaatctaagcagactttgccttttttcaaaggtggagcgtgaataccagaaggatccagtattcagtcacttaaatgaagtcttttggtcagaaattacctttttgacacaagcctactgaatgctgtgtatatatttatatataaatatatctatttgagtgaaaccttgtgaactctttaattagagttttcttgtatagtggcagagatgtctatttctgcattcaaaagtgtaatgatgtacttattcatgctaaactttttataaaagtttagttgtaaacttaacccttttatacaaaataaatcaagtgtgtttattgaatggtgattgcctgctttatttcagaggaccagtgctttgatttttattatgctatgttataactgaacccaaataaatacaagttcaaatttatgtagactgtataagattataataaaacatgtctgaagtcaaaaaaaaaaaaaaaaaaaaaaaaaaaaaaaaaaaaaaaa

SEQ ID NO: 126049 - DNA, 1167 bp, Artificial Sequence
  derived and/or modified sequence
attctgagccaagtccggtgccaagcgcagctagctcagcaggccgcagcggtggcctgagcttcaggacagccagctccctcccggtctcgccttcctcgcggtcagcatgaaagccttcagtcccgtgaggtccattaggaaaaacagcctgttggaccaccgcctgggcatctcccagagcaaaaccccggtggatgacctgatgagcctgctgtaaaacatgaatgactgctactccaagctcaaggagctggtgcccagcatcccccagaacaagaagtggagcaagatggaaatcctgcagcacgtcatcgactacatcttggacctgcagatcaccctggacttgcatcccactattgtcagcctgcatcaccagagacccgggcagaaccaggcgtccaggacgccgctgaccaccctcaacacggatatcagcatcctgtccttgcaggcttctgaattcccttcggagttaatgtcaaatgacaggaaagcactgtgtggctgaataatcatgacttcttttttttctttgcacaacaacgacaacaacaaattcacagaaccttttcagcgctgaacttatttttcaaccatttcacaaggaggcagttgcatgacttttaaaagcaaaaaaggagaaactagatgaaaaagacttttaaatgccctttctgcagttggaaggtttttttcatatactattcccaccatggggagcagaaacgttaaaatcacaaggaattgcccaatctaagcagactttgccttttttcaaaggtggagtgtcaataccagaaggatccagtatcagtctcttaaatgaagtcttttcggtcagaaattacctttttgacacaagcctactgaatgccgtgtatatatttatatataaatatatcttatttaagtgaaaccttgttaactctttaattagagttttcttgtatagtggcagagatgtctatttctgcattaaaaagtgtaatgatgtacttattcatgatgaactttttataaaagtttaaacttttagttgtaaacgtaacccttttatacaaaataaatcagtgtgtttattgaatggtgattgcctcgtttatttcagaggaccagtgctttgattttttattatgctatgttataactgaaccaaataaa

SEQ ID NO: 126050 - DNA, 405 bp, Artificial Sequence
  derived and/or modified sequence
atgaaggcattttcaccagtacgaagtgttaggaagaattccctctctgatcacagcttggggatctcgagatccaagacccccgtcgatgatcctatgtccctcctctacaacatgaacgactgttattccaaacttaaggaactcgttccatcgatccctcagaacaagaaagtgagcaagatggagattcttcaacacgtcattgattatattctcgatctgcagatagcattggatagccatcccacaatcgtcagcttgcaccatcagcgacccggtcagaaccaagcaagcagaaccccacttacaacactaaataccgatatcagtatcctctctctccaggcctctgaattccctagcgagctgatgtctaacgattcaaaagccctgtgtggctag

SEQ ID NO: 126051 - DNA, 405 bp, Artificial Sequence
  derived and/or modified sequence
atgaaggccttcagtcccgtccgctctgtccggaagaacagcctcagcgatcattcccttggaatttctcggtctaaaacacctgtcgatgacccgatgtcgttgctctataacatgaatgattgctactcaaagctaaaggagctcgtgccaagtattcctcagaacaagaaggtgtctaagatggaaatattgcagcatgtgatcgactatattttggacctgcagattgccctggatagtcacccaaccattgtcagtcttcatcaccagaggccgggacagaaccaggcctcacgaacacccctcacaactctaaataccgatatttccatcttgtctcttcaggcatcagaattcccctccgagttaatgtcaaacgattccaaggctctgtgtgggtag

SEQ ID NO: 126052 - DNA, 405 bp, Artificial Sequence
  derived and/or modified sequence
atgaaagccttctcacccgttagatcagtccgcaagaacagcctgtccgaccactcactcgggataagccgtagcaaaacaccagtggacgacccgatgagcctgctatataatatgaacgattgttattcaaagctcaaggagctcgtcccaagcattccccagaataagaaggtgtctaagatggagattctgcagcacgtcattgattatatcctggatttgcagatcgcattagacagtcaccccactatcgtctccctccaccaccagcgccccggccaaaaccaagcgtcacggacacccttgaccaccttgaacaccgacatctccattcttagtctgcaggcctctgagttcccgagcgagcttatgtccaacgatagcaaagccctgtgcggctag

SEQ ID NO: 126053 - DNA, 2041 bp, Artificial Sequence
  derived and/or modified sequence
gcgcgctgagtgacggcgcggttgccatggcagccgcctgagcggcgccgcgaggacaaggctgcagggcggcgtgaatgggcggcgtcacgcgcctggcgccagagagtctgctccggggctccggctccggccccgccgcggcctggcccgcgcgccgccgccgccgccaccgccgccgccaattcatcacctgtcagggatcactcgcggggtcacgggcggaatggacacagctgtgagaacaaaacccgggaaagaaaggcgaacgctccccattgcgccagatgtgcagggaggaccttgagacgcgccccccgcccccgcaggctcctcccgccccccggcgcatcacgcgggggtggcaaaggcggcctggccagcgcggagctcccggcccggagctgcttctgattaccgcgaggggcccggacgcgagagccgccgcggggcctgccctagaggcggagtgatgaactgtggcttcccccctgcggtgctgaactcgcccgtgtagctgtgattttagagctgccgacagctctaagctgggctcgcgccccgcccaccccgcggggattggctgcgaacgcggaagaaccaagcccacgccccgcgcccgcgcccaccaatggaagcgcccgctcgtcttgatagacgtgccaccttccgccaatggggacgaagggaagctccagcgtgtggccccggcgagtgcggataaaagccgccccgccgggctcgggcttcattctgagccgagcccggtgccaagcgcagctagctcagcaggcggcagcggcggcctgagcttcagggcagccagctccctcccggtctcgccttccctcgcggtcagcatgaaagccttcagtcccgtgaggtccgttaggaaaaacagcctgtcggaccacagcctgggcatctcccggagcaaaacccctgtggacgacccgatgagcctgctatacaacatgaacgactgctactccaagctcaaggagctggtgcccagcatcccccagaacaagaaggtgagcaagatggaaatcctgcagcacgtcatcgactacatcttggacctgcagatcgccctggactcgcatcccactattgtcagcctgcatcaccagagacccgggcagaaccaggcgtccaggacgccgctgaccaccctcaacacggatatcagcatcctgtccttgcaggcttctgaattcccttctgagttaatgtcaaatgacagcaaagcactgtgtggctgaataagcggtgttcatgatttcttttattctttgcacaacaacaacaacaacaaattcacggaatcttttaagtgctgaacttatttttcaaccatttcacaaggaggacaagttgaatggacctttttaaaaagaaaaaaaaaatggaaggaaaactaagaatgatcatcttcccagggtgttctcttacttggactgtgatattcgttatttatgaaaaagacttttaaatgccctttctgcagttggaaggttttctttatatactattcccaccatggggagcgaaaacgttaaaatcacaaggaattgcccaatctaagcagactttgccttttttcaaaggtggagcgtgaataccagaaggatccagtattcagtcacttaaatgaagtcttttggtcagaaattacctttttgacacaagcctactgaatgctgtgtatatatttatatataaatatatctatttgagtgaaaccttgtgaactctttaattagagttttcttgtatagtggcagagatgtctatttctgcattcaaaagtgtaatgatgtacttattcatgctaaactttttataaaagtttagttgtaaacttaacccttttatacaaaataaatcaagtgtgtttattgaatggtgattgcctgctttatttcagaggaccagtgctttgatttttattatgctatgttataactgaacccaaataaatacaagttcaaatttatgtagactgtataagattataataaaacatgtctgaagtcaa

SEQ ID NO: 126054 - DNA, 623 bp, Artificial Sequence
  derived and/or modified sequence
attctgagccgagcccggtgccaagcgcagctagctcagcaggcggcagcggcggcctgagcttcagggcagccagctccctcccggtctcgccttccctcgcggtcagcatgaaagccttcagtcccgtgaggtccgttaggaaaaacagcctgtcggaccacagcctgggcatctcccggagcaaaacccctgtggacgacccgatgagcctgctatacaacatgaacgactgctactccaagctcaaggagctggtgcccagcatcccccagaacaagaaggtgagcaagatggaaatcctgcagcacgtcatcgactacatcttggacctgcagatcgccctggactcgcatcccactattgtcagcctgcatcaccagagacccgggcagaaccaggcgtccaggacgccgctgaccaccctcaacacggatatcagcatcctgtccttgcaggcttctgaattcccttctgagttaatgtcaaatgacagcaaagcactgtgtggctgaataagcggtgagtgtttgcttgtgccacccgtgggtaaactgcccctcggtgtgtgtgcgcgcgcgcgcatgtgtttttgcttgtgtatctataaaatgtctgatttg

SEQ ID NO: 126055 - DNA, 1362 bp, Artificial Sequence
  derived and/or modified sequence
ggggacgaagggaagctccagcgtgtggccccggcgagtgcggataaaagccgccccgccgggctcgggcttcattctgagccgagcccggtgccaagcgcagctagctcagcaggcggcagcggcggcctgagcttcagggcagccagctccctcccggtctcgccttccctcgcggtcagcatgaaagccttcagtcccgtgaggtccgttaggaaaaacagcctgtcggaccacagcctgggcatctcccggagcaaaacccctgtggacgacccgatgagcctgctatacaacatgaacgactgctactccaagctcaaggagctggtgcccagcatcccccagaacaagaaggtgagcaagatggaaatcctgcagcacgtcatcgactacatcttggacctgcagatcgccctggactcgcatcccactattgtcagcctgcatcaccagagacccgggcagaaccaggcgtccaggacgccgctgaccaccctcaacacggatatcagcatcctgtccttgcaggcttctgaattcccttctgagttaatgtcaaatgacagcaaagcactgtgtggctgaataagcggtgttcatgatttcttttattctttgcacaacaacaacaacaacaaattcacggaatcttttaagtgctgaacttatttttcaaccatttcacaaggaggacaagttgaatggacctttttaaaaagaaaaaaaaaatggaaggaaaactaagaatgatcatcttcccagggtgttctcttacttggactgtgatattcgttatttatgaaaaagacttttaaatgccctttctgcagttggaaggttttctttatatactattcccaccatggggagcgaaaacgttaaaatcacaaggaattgcccaatctaagcagactttgccttttttcaaaggtggagcgtgaataccagaaggatccagtattcagtcacttaaatgaagtcttttggtcagaaattacctttttgacacaagcctactgaatgctgtgtatatatttatatataaatatatctatttgagtgaaaccttgtgaactctttaattagagttttcttgtatagtggcagagatgtctatttctgcattcaaaagtgtaatgatgtacttattcatgctaaactttttataaaagtttagttgtaaacttaacccttttatacaaaataaatcaagtgtgtttattgaatggtgattgcctgctttatttcagaggaccagtgctttgatttttattatgctatgttataactgaacccaaataaatacaagttcaaatttatgtagactgtataagattataataaaacatgtctgaagtc

SEQ ID NO: 126056 - DNA, 405 bp, Artificial Sequence
  derived and/or modified sequence
atgaaggccttcagccctgtgcgctctgtgaggaagaacagcctgagtgaccacagcctgggcatcagccgcagcaagacccctgtggatgaccccatgagcctgctgtacaacatgaatgactgctacagcaagctgaaggagctggtgcccagcatcccccagaacaagaaggtgtccaagatggagatcctgcagcacgtgattgactacatcctggacctgcagatcgccctggacagccaccccaccatcgtgtccctgcaccaccagaggcctggccagaaccaggccagcaggacccccctgaccaccctgaacacagacatcagcatcctgagcctgcaggccagcgagttccccagcgagctgatgagcaatgacagcaaggccctgtgtggctag

SEQ ID NO: 126057 - DNA, 405 bp, Artificial Sequence
  derived and/or modified sequence
atgaaggccttcagccccgtgcggagcgtgcggaagaacagcctgagcgatcacagtttgggcatatctcgctccaaaacaccggtggacgatccaatgagtttactgtacaacatgaatgactgctattcgaaacttaaggaactggtgcctagtatcccccagaataagaaggtcagtaaaatggaaatcctacagcatgtcatcgattacatccttgacttgcaaattgccttggactcccacccaactatcgtcagcctgcaccaccagcggccaggccagaatcaagcaagccggactcccttaacgacgctaaacactgacattagtatactcagccttcaggccagtgaatttccatccgagttaatgagtaacgactccaaagctctttgcggttag

SEQ ID NO: 126058 - DNA, 405 bp, Artificial Sequence
  derived and/or modified sequence
atgaaggccttcagccccgtgcggagcgtgcggaagaacagcctgagcgaccacagcttaggaatttcaaggtccaaaactcccgtggacgaccctatgagtctcttatataacatgaacgattgttattctaagctgaaggagctggtacccagcataccacagaataagaaggtatcaaagatggaaatactgcaacacgtgatcgattacatcttggatctccagatcgcattggacagtcacccgaccattgtcagcctccatcatcagaggcctggtcaaaatcaggcctcgagaaccccccttactactcttaataccgacatcagcatcttaagccttcaggcgagcgaattcccaagtgaactaatgagtaacgactcaaaagcgttatgcggctag

SEQ ID NO: 126059 - DNA, 405 bp, Artificial Sequence
  derived and/or modified sequence
atgaaggccttcagccccgtgcggagcgtgcggaagaacagcctgtcagatcattcattagggataagccgctctaaaactcctgttgatgacccaatgagcctcctttacaacatgaatgattgctattcaaagctgaaagaattagtgcctagtattccacagaataaaaaggttagtaaaatggagatcctgcaacatgtcattgattacatactggaccttcagattgctttagactcacatccaacgatagtatccttgcaccatcagcgtccaggccagaatcaggcatccagaaccccattaacaaccttaaacactgatattagcatccttagtctacaggcctccgaatttccaagcgaacttatgagcaatgactccaaagcattgtgtggttag

SEQ ID NO: 126060 - DNA, 405 bp, Artificial Sequence
  derived and/or modified sequence
atgaaggcttttagccctgtgcggtccgtccggaaaaacagtttgagcgaccactcactgggcatttcaaggtctaaaactcctgtcgacgatccaatgagtctcctatacaatatgaatgattgttactcaaaactcaaagagctggtgccgagcatccctcagaacaagaaggtttcaaaaatggagattctccagcacgtaatcgactacattctcgacctgcagatcgccctggactcccacccgaccattgtgagtcttcatcatcagaggcccggacaaaaccaggcgagccgcactcctctgaccactctcaacaccgacatctccatcctctccctccaggcctcagagtttccctctgaactgatgtcaaatgatagcaaggccctctgtggctag

SEQ ID NO: 126061 - DNA, 405 bp, Artificial Sequence
  derived and/or modified sequence
atgaaggcctttagcccggttcgcagtgtgagaaagaattcgctgagcgaccattctttaggaattagtaggagcaaaacgccagttgacgacccaatgtccttgctctacaacatgaatgactgctattcgaagctcaaggagctggtgcctagcattccccaaaacaaaaaagtctccaagatggaaatattacagcatgtgatcgactatattctcgatctgcaaatcgccctggatagtcacccgaccattgtgagccttcatcatcaacggccaggtcaaaatcaggcatccagaacgccattaaccactctgaatactgatatttctattcttagcctacaagctagcgagtttccaagcgagctaatgtctaatgatagtaaggctctatgtggctag

SEQ ID NO: 126062 - DNA, 405 bp, Artificial Sequence
  derived and/or modified sequence
atgaaggcttttagcccagttcgaagcgtccggaaaaactccctgtcagatcactctctcggaatcagtaggtctaagacccccgtcgacgatccgatgtcactgctgtataacatgaacgattgttattccaagctgaaggagttggtcccatccatcccacagaacaagaaggtgtccaagatggaaatcctgcagcacgttatcgattatatcttagatcttcaaatcgctctggattcccaccctaccatcgtaagccttcatcatcagagacccggacaaaaccaggcctcccgtacacccttgaccaccctgaacaccgatatcagcattctttcgctccaggcgtctgaattcccttctgagctgatgtcgaatgattcaaaagctctgtgcgggtag

SEQ ID NO: 126063 - DNA, 405 bp, Artificial Sequence
  derived and/or modified sequence
atgaaggccttcagccccgtgagaagcgtgagaaagaacagcctgagcgaccacagcctgggcatcagcagaagcaagacccccgtggacgaccccatgagcctgctgtacaacatgaacgactgctacagcaagctgaaggagctggtgcccagcatcccccagaacaagaaggtgagcaagatggagatcctgcagcacgtgatcgactacatcctggacctgcagatcgccctggacagccaccccaccatcgtgagcctgcaccaccagagacccggccagaaccaggccagcagaacccccctgaccaccctgaacaccgacatcagcatcctgagcctgcaggccagcgagttccccagcgagctgatgagcaacgacagcaaggccctgtgcggctag

SEQ ID NO: 126064 - protein, 452 aa, Artificial Sequence
  derived and/or modified sequence
MAGYLRVVRSLCRASGSRPAWAPAALTAPTSQEQPRRHYADKRIKVAKPVVEMDGDEMTRIIWQFIKEKLILPHVDIQLKYFDLGLPNRDQTDDQVTIDSALATQKYSVAVKCATITPDEARVEEFKLKKMWKSPNGTIRNILGGTVFREPIICKNIPRLVPGWTKPITIGRHAHGDQYKATDFVADRAGTFKMVFTPKDGSGVKEWEVYNFPAGGVGMGMYNTDESISGFAHSCFQYAIQKKWPLYMSTKNTILKAYDGRFKDIFQEIFDKHYKTDFDKNKIWYEHRLIDDMVAQVLKSSGGFVWACKNYDGDVQSDILAQGFGSLGLMTSVLVCPDGKTIEAEAAHGTVTRHYREHQKGRPTSTNPIASIFAWTRGLEHRGKLDGNQDLIRFAQMLEKVCVETVESGAMTKDLAGCIHGLSNVKLNEHFLNTTDFLDTIKSNLDRALGRQ

SEQ ID NO: 126065 - protein, 322 aa, Artificial Sequence
  derived and/or modified sequence
MWKSPNGTIRNILGGTVFREPIICKNIPRLVPGWTKPITIGRHAHGDQYKATDFVADRAGTFKMVFTPKDGSGVKEWEVYNFPAGGVGMGMYNTDESISGFAHSCFQYAIQKKWPLYMSTKNTILKAYDGRFKDIFQEIFDKHYKTDFDKNKIWYEHRLIDDMVAQVLKSSGGFVWACKNYDGDVQSDILAQGFGSLGLMTSVLVCPDGKTIEAEAAHGTVTRHYREHQKGRPTSTNPIASIFAWTRGLEHRGKLDGNQDLIRFAQMLEKVCVETVESGAMTKDLAGCIHGLSNVKLNEHFLNTTDFLDTIKSNLDRALGRQ

SEQ ID NO: 126066 - protein, 400 aa, Artificial Sequence
  derived and/or modified sequence
MDGDEMTRIIWQFIKEKLILPHVDIQLKYFDLGLPNRDQTDDQVTIDSALATQKYSVAVKCATITPDEARVEEFKLKKMWKSPNGTIRNILGGTVFREPIICKNIPRLVPGWTKPITIGRHAHGDQYKATDFVADRAGTFKMVFTPKDGSGVKEWEVYNFPAGGVGMGMYNTDESISGFAHSCFQYAIQKKWPLYMSTKNTILKAYDGRFKDIFQEIFDKHYKTDFDKNKIWYEHRLIDDMVAQVLKSSGGFVWACKNYDGDVQSDILAQGFGSLGLMTSVLVCPDGKTIEAEAAHGTVTRHYREHQKGRPTSTNPIASIFAWTRGLEHRGKLDGNQDLIRFAQMLEKVCVETVESGAMTKDLAGCIHGLSNVKLNEHFLNTTDFLDTIKSNLDRALGRQ

SEQ ID NO: 126067 - DNA, 1359 bp, Artificial Sequence
  derived and/or modified sequence
atggccggctacctgagagtggtgagaagcctgtgcagagccagcggcagcagacccgcctgggcccccgccgccctgaccgcccccaccagccaggagcagcccagaagacactacgccgacaagagaatcaaggtggccaagcccgtggtggagatggacggcgacgagatgaccagaatcatctggcagttcatcaaggagaagctgatcctgccccacgtggacatccagctgaagtacttcgacctgggcctgcccaacagagaccagaccgacgaccaggtgaccatcgacagcgccctggccacccagaagtacagcgtggccgtgaagtgcgccaccatcacccccgacgaggccagagtggaggagttcaagctgaagaagatgtggaagagccccaacggcaccatcagaaacatcctgggcggcaccgtgttcagagagcccatcatctgcaagaacatccccagactggtgcccggctggaccaagcccatcaccatcggcagacacgcccacggcgaccagtacaaggccaccgacttcgtggccgacagagccggcaccttcaagatggtgttcacccccaaggacggcagcggcgtgaaggagtgggaggtgtacaacttccccgccggcggcgtgggcatgggcatgtacaacaccgacgagagcatcagcggcttcgcccacagctgcttccagtacgccatccagaagaagtggcccctgtacatgagcaccaagaacaccatcctgaaggcctacgacggcagattcaaggacatcttccaggagatcttcgacaagcactacaagaccgacttcgacaagaacaagatctggtacgagcacagactgatcgacgacatggtggcccaggtgctgaagagcagcggcggcttcgtgtgggcctgcaagaactacgacggcgacgtgcagagcgacatcctggcccagggcttcggcagcctgggcctgatgaccagcgtgctggtgtgccccgacggcaagaccatcgaggccgaggccgcccacggcaccgtgaccagacactacagagagcaccagaagggcagacccaccagcaccaaccccatcgccagcatcttcgcctggaccagaggcctggagcacagaggcaagctggacggcaaccaggacctgatcagattcgcccagatgctggagaaggtgtgcgtggagaccgtggagagcggcgccatgaccaaggacctggccggctgcatccacggcctgagcaacgtgaagctgaacgagcacttcctgaacaccaccgacttcctggacaccatcaagagcaacctggacagagccctgggcagacagtag

SEQ ID NO: 126068 - DNA, 1359 bp, Artificial Sequence
  derived and/or modified sequence
atggcgggttatctacgagtagtccggtcactgtgccgagcttcaggatctagacccgcctgggccccagccgctctcacggccccaactagtcaggagcagccacggaggcattatgctgacaaaagaattaaagtggccaaacccgtggtggaaatggatggcgatgagatgacacgaataatatggcagtttatcaaagagaagcttattctgccccacgtagacattcagctgaaatacttcgatctggggctacctaatcgcgatcagaccgacgaccaggtgactatcgattctgccctggcgacccagaaatatagtgtggcagtaaaatgtgctactatcacccctgatgaggctagggtcgaagaatttaaactgaaaaagatgtggaagtccccgaatggcacaatcagaaacattttgggcggcacagttttcagggagccaatcatatgcaagaatattccacgcctggttcccggatggactaaaccaatcaccattggtagacacgcccacggggaccagtacaaagccaccgatttcgttgctgaccgggccggaacctttaagatggtgtttacccctaaggacgggtctggagtaaaggaatgggaggtttataatttccccgctgggggagtgggaatgggtatgtacaatacagatgaaagcatttctggctttgcacatagttgttttcagtatgctatacagaaaaaatggcccctctatatgagcactaaaaatactattctgaaggcctacgacggccgcttcaaagatatctttcaagaaatttttgacaaacactacaaaacagacttcgacaaaaacaaaatctggtatgaacacagactcatcgacgacatggtggctcaggtcctgaagtcctccggcggttttgtgtgggcttgcaagaactatgatggagacgtgcagtctgatattctcgctcaagggtttggcagcctcggactgatgacttcggtgcttgtatgtcctgacgggaagacaattgaggctgaggctgcccacggaactgtcactaggcactaccgggaacaccagaagggtcgcccaacgtccacgaatccaatcgcttctatctttgcctggacgaggggtttagagcaccgggggaagctcgacggtaaccaggacttgatcaggttcgcacaaatgctggaaaaggtttgcgtcgaaactgttgagtccggtgctatgaccaaggacctggctggatgcatccacggtcttagcaacgtgaagcttaatgagcacttcctaaacaccaccgattttctggatacaattaaaagcaacctggaccgggctctgggccggcagtag

SEQ ID NO: 126069 - DNA, 1359 bp, Artificial Sequence
  derived and/or modified sequence
atggccggctacctgcgggtggtgcgcagcctgtgccgggccagcggcagcaggcctgcctgggccccagctgccctgacagcccccaccagccaggagcagccccggcggcactacgccgacaagaggatcaaggtggccaagcctgtggtggagatggatggagatgagatgacccgcatcatctggcagttcatcaaggagaagctgatcctgccccacgtggacatccagctgaagtactttgacctgggcctgcccaacagagaccagacagatgaccaggtgaccatcgacagcgccctggccacccagaagtacagcgtggccgtgaagtgtgccaccatcaccccagatgaggcccgggtggaggagttcaagctgaagaagatgtggaagagccccaacggcaccatccggaacatcctgggcggcaccgtcttccgggagcccatcatctgcaagaacatcccccggctggtgcccggctggaccaagcccatcaccatcggcagacatgcccatggagaccagtacaaggccacagactttgtggccgacagagctggcaccttcaagatggtgttcacccccaaggatggcagcggcgtgaaggagtgggaggtgtacaacttccctgctgggggcgtgggcatgggcatgtacaacacagatgagagcatcagcggctttgcccacagctgcttccagtatgccatccagaagaagtggcccctgtacatgagcaccaagaacaccatcctgaaggcctatgatggccgcttcaaggacatcttccaggagatctttgacaagcactacaagacagactttgacaagaacaagatctggtatgagcaccggctgattgatgacatggtggcccaggtgctgaagagcagcggcggctttgtgtgggcctgcaagaactatgatggagatgtgcagagcgacatcctggcccagggcttcggcagcctgggcctgatgacctctgtgctggtgtgcccagatggcaagaccatcgaggccgaggccgcccacggcaccgtgaccaggcactaccgggagcaccagaagggccggcccaccagcaccaaccccatcgccagcatctttgcctggacccggggcctggagcaccggggcaagctggatggcaaccaggacctgatccgctttgcccagatgctggagaaggtgtgtgtggagaccgtggagagcggggccatgaccaaggacctggccggctgcatccacggcctgagcaatgtgaagctgaatgagcacttcctgaacaccacagacttcctggacaccatcaagagcaacctggaccgggccctgggccggcagtag

SEQ ID NO: 126070 - DNA, 2694 bp, Artificial Sequence
  derived and/or modified sequence
gtgcccgcgcggccagcgcccgccaggcccagcgttagcccgcggccaggcagccgggaggagcggcgcgcgctcggacctctcccgccctgctcgttcgctctccagcttgggatggccggctacctgcgggtcgtgcgctcgctctgcagagcctcaggctcgcggccggcctgggcgccggcggccctgacagcccccacctcgcaagagcagccgcggcgccactatgccgacaaaaggatcaaggtggcgaagcccgtggtggagatggatggtgatgagatgacccgtattatctggcagttcatcaaggagaagctcatcctgccccacgtggacatccagctaaagtattttgacctcgggctcccaaaccgtgaccagactgatgaccaggtcaccattgactctgcactggccacccagaagtacagtgtggctgtcaagtgtgccaccatcacccctgatgaggcccgtgtggaagagttcaagctgaagaagatgtggaaaagtcccaatggaactatccggaacatcctgggggggactgtcttccgggagcccatcatctgcaaaaacatcccacgcctagtccctggctggaccaagcccatcaccattggcaggcacgcccatggcgaccagtacaaggccacagactttgtggcagaccgggccggcactttcaaaatggtcttcaccccaaaagatggcagtggtgtcaaggagtgggaagtgtacaacttccccgcaggcggcgtgggcatgggcatgtacaacaccgacgagtccatctcaggttttgcgcacagctgcttccagtatgccatccagaagaaatggccgctgtacatgagcaccaagaacaccatactgaaagcctacgatgggcgtttcaaggacatcttccaggagatctttgacaagcactataagaccgacttcgacaagaataagatctggtatgagcaccggctcattgatgacatggtggctcaggtcctcaagtcttcgggtggctttgtgtgggcctgcaagaactatgacggagatgtgcagtcagacatcctggcccagggctttggctcccttggcctgatgacgtccgtcctggtctgccctgatgggaagacgattgaggctgaggccgctcatgggaccgtcacccgccactatcgggagcaccagaagggccggcccaccagcaccaaccccatcgccagcatctttgcctggacacgtggcctggagcaccgggggaagctggatgggaaccaagacctcatcaggtttgcccagatgctggagaaggtgtgcgtggagacggtggagagtggagccatgaccaaggacctggcgggctgcattcacggcctcagcaatgtgaagctgaacgagcacttcctgaacaccacggacttcctcgacaccatcaagagcaacctggacagagccctgggcaggcagtagggggaggcgccacccatggctgcagtggaggggccagggctgagccggcgggtcctcctgagcgcggcagagggtgagcctcacagcccctctctggaggcctttctaggggatgtttttttataagccagatgtttttaaaagcatatgtgtgtttcccctcatggtgacgtgaggcaggagcagtgcgttttacctcagccagtcagtatgttttgcatactgtaatttatattgcccttggaacacatggtgccatatttagctactaaaaagctcttcacaaaattgtctgctgtgtttgtccctgaggggaggaggtagtgggaccctgaggcagaggccctgctagagctggcaggttcccctggggcagaccagagcacctcaggaaggggctgccacggcagggaagggaccaggcagccctgggagcccgcattccacaggggcccactgcggagttctcggacactcagggcacaggcctgtgggttccctggaattttctagcatgatccagtttctgtgtccagttctccattctgagagtcaatcagttcctgataggttgtcattgatttttttcttcgttggttttaaccttctaaacatctccaggccactttcttagcctttttctaggtactaaaaagaggtcctacccacacctgcctcacacttctcctttccaaggctgcctgagtttggaggggcttgggtgtgtgtgaacaagggccctgcattgtctaggcctgcagttcccaggcttgggttcactttcaccatgcattggcaaaactagaaaagtaagcttgtgacaaattgttctcggccgggcacagtggcgcacgcctataatccctgtactttgggaggctgaggtgggtggatcacttgaggccaggagttcgagaccagcctggccaacatggtgaaaccccatctctactcaaaatacaaaaattagccaggcgtggtgatgcgcacctgcagtcccagctactcgggaggctgaggcaggaaaatggcttgaacctgggaggcagaggttgcagtgagccgagactgcaccactgcactccagcctgggtgacagagcaagactctgtctcaaaaaaaaaaaaaaaaaaaaaaaaaaaaaaattgctctatgcaagttttttagccccatgtaaaaaggaaaaataaaagttgctctaaagctacatataatcaaaa

SEQ ID NO: 126071 - DNA, 1453 bp, Artificial Sequence
  derived and/or modified sequence
aaggaaagaatattttggggctaaaagagccccgtgtctttgctgcctggtaattcctgcacgcatcttttcctattttgcaacgccataggcttccagcgactgctggtgatgtttctgatgccgacaaaaggatcaaggtggcgaagcccgtggtggagatggatggtgatgagatgacccgtattatctggcagttcatcaaggagaagctcatcctgccccacgtggacatccagctaaagtattttgacctcgggctcccaaaccgtgaccagactgatgaccaggtcaccattgactctgcactggccacccagaagtacagtgtggctgtcaagtgtgccaccatcacccctgatgaggcccgtgtggaagagttcaagctgaagaagatgtggaaaagtcccaatggaactatccggaacatcctgggggggactgtcttccgggagcccatcatctgcaaaaacatcccacgcctagtccctggctggaccaagcccatcaccattggcaggcacgcccatggcgaccagtacaaggccacagactttgtggcagaccgggccggcactttcaaaatggtcttcaccccaaaagatggcagtggtgtcaaggagtgggaagtgtacaacttccccgcaggcggcgtgggcatgggcatgtacaacaccgacgagtccatctcaggttttgcgcacagctgcttccagtatgccatccagaagaaatggccgctgtacatgagcaccaagaacaccatactgaaagcctacgatgggcgtttcaaggacatcttccaggagatctttgacaagcactataagaccgacttcgacaagaataagatctggtatgagcaccggctcattgatgacatggtggctcaggtcctcaagtcttcgggtggctttgtgtgggcctgcaagaactatgacggagatgtgcagtcagacatcctggcccagggctttggctcccttggcctgatgacgtccgtcctggtctgccctgatgggaagacgattgaggctgaggccgctcatgggaccgtcacccgccactatcgggagcaccagaagggccggcccaccagcaccaaccccatcgccagcatctttgcctggacacgtggcctggagcaccgggggaagctggatgggaaccaagacctcatcaggtttgcccagatgctggagaaggtgtgcgtggagacggtggagagtggagccatgaccaaggacctggcgggctgcattcacggcctcagcaatgtgaagctgaacgagcacttcctgaacaccacggacttcctcgacaccatcaagagcaacctggacagagccctgggcaggcagtagggggaggcgccacccatggctgcagtggaggggccagggctgagccggcgggtcctcctgagcgcggcagagggtgagcctcacagccc

SEQ ID NO: 126072 - DNA, 1359 bp, Artificial Sequence
  derived and/or modified sequence
atggccggctacctgcgggtggtgcggagcctgtgccgggccagcggaagccggccagcctgggcccccgctgcactaaccgcaccaacaagtcaggagcaacctcgaagacactatgcggataaaagaatcaaagtcgccaagccagtggtggagatggatggcgatgagatgacgagaatcatttggcagttcatcaaggagaagttaatactgcctcacgttgacattcagctgaaatatttcgacctcggcctgccaaatcgtgaccagaccgatgaccaagtaacaatcgattcagcgctggccacgcagaaatactcagtcgccgtgaagtgcgcaaccattaccccagatgaagcacgggttgaagagtttaaattaaagaaaatgtggaaatcacccaacggaaccattcgcaatatactcggcggaaccgtgttcagggagcctatcatctgcaagaacattccacgccttgtccctggatggactaagccaatcactatcgggcgccacgcacacggtgaccaatacaaagccaccgacttcgtagcggatagggctggcactttcaaaatggtgttcacaccaaaagacgggtcaggtgtcaaagagtgggaggtttataacttccccgccggcggcgttgggatgggcatgtataacactgacgagtccatctctggattcgcccattcttgttttcaatacgcaatccagaagaaatggccactgtacatgtctacgaagaataccatcctgaaagcatacgatggccggttcaaggacatcttccaggagatctttgataaacactataagacggactttgataagaacaagatctggtatgaacaccggttaatcgacgatatggtggctcaggttctgaaatcctctggcggcttcgtttgggcttgcaagaattacgacggggacgtccaatccgatattctcgcccaggggtttggctcacttggcctgatgacaagtgtcttagtgtgccctgacggcaaaaccattgaagctgaggctgcccacggaactgtcactagacactatcgtgaacaccaaaagggtcgccctacttccacgaatcccatagctagtatttttgcctggacccgcggattggagcacagaggcaaacttgatgggaatcaggatctgatcagatttgcacagatgctggaaaaagtttgcgtcgaaacagtcgagagtggagccatgaccaaggatctggctggctgcatccacggcctttccaacgtcaagttaaacgaacactttctgaatacaactgactttctagataccattaaatcaaatctggaccgagcgttggggcgccagtag

SEQ ID NO: 126073 - DNA, 1359 bp, Artificial Sequence
  derived and/or modified sequence
atggccggttacctgcgcgtggtgagatctctttgtcgcgcaagcggttcccggccagcttgggcccctgcagccttaaccgccccaaccagtcaagaacagcccagacgccattacgctgacaaacggatcaaggtagctaagcccgtggtggagatggatggagatgaaatgacgcgaatcatttggcagtttataaaagaaaaactaattctgcctcacgtggatattcagcttaaatattttgacttaggactcccgaatcgcgaccagacagacgaccaggtaaccatagactccgccctcgctacacagaagtattctgtggctgtaaagtgtgccacaatcacccctgacgaggctcgtgtagaagaatttaagcttaagaagatgtggaaaagtccaaatgggaccatccggaatatactggggggtaccgtgttccgggaacctatcatatgtaagaatatacctaggctcgtccccggttggactaaacctatcacgatcgggagacatgcccacggcgaccagtataaagccacagatttcgtcgctgatcgggctggaacatttaagatggtgttcactcccaaggacggttccggggttaaggagtgggaggtctataattttcccgctggcggagtggggatgggaatgtataacacagacgaaagcatctctggctttgcacacagctgcttccagtacgcaattcagaaaaagtggcctctctacatgtccacaaagaatactattctcaaggcatacgatgggaggttcaaagatatctttcaggaaatctttgataaacactacaaaactgattttgacaaaaataaaatttggtatgagcaccggctaatcgatgacatggtggcccaggtgctcaagagctccggagggtttgtttgggcttgcaaaaattatgatggggatgtgcagtctgatatcctggctcaagggtttggatccttgggactgatgacgagcgtgctggtgtgtcctgacggcaagacaattgaggcagaggctgcccatggaacggtgaccagacactatagagaacatcagaagggcagaccaacctctacaaatcccattgcctcaatctttgcctggactcgcggtctggaacataggggaaaactggacggaaatcaagacctcattcggtttgctcagatgctagagaaagtctgtgttgagaccgtcgagtccggagcgatgactaaagaccttgccggatgcatccacgggctctcaaatgtgaagctcaacgaacattttctgaacactactgattttctggacacaattaaatcaaacctggacagagctctggggagacagtag

SEQ ID NO: 126074 - protein, 189 aa, Artificial Sequence
  derived and/or modified sequence
MALPFVLLMALVVLNCKSICSLGCDLPQTHSLSNRRTLMIMAQMGRISPFSCLKDRHDFGFPQEEFDGNQFQKAQAISVLHEMIQQTFNLFSTKDSSATWDETLLDKFYTELYQQLNDLEACMMQEVGVEDTPLMNVDSILTVRKYFQRITLYLTEKKYSPCAWEVVRAEIMRSFSLSANLQERLRRKE

SEQ ID NO: 126075 - DNA, 570 bp, Artificial Sequence
  derived and/or modified sequence
atggccctgcccttcgtgctgctgatggccctggtggtgctgaactgcaagagcatctgcagcctgggctgcgacctgccccagacccacagcctgagcaacagaagaaccctgatgatcatggcccagatgggcagaatcagccccttcagctgcctgaaggacagacacgacttcggcttcccccaggaggagttcgacggcaaccagttccagaaggcccaggccatcagcgtgctgcacgagatgatccagcagaccttcaacctgttcagcaccaaggacagcagcgccacctgggacgagaccctgctggacaagttctacaccgagctgtaccagcagctgaacgacctggaggcctgcatgatgcaggaggtgggcgtggaggacacccccctgatgaacgtggacagcatcctgaccgtgagaaagtacttccagagaatcaccctgtacctgaccgagaagaagtacagcccctgcgcctgggaggtggtgagagccgagatcatgagaagcttcagcctgagcgccaacctgcaggagagactgagaagaaaggagtag

SEQ ID NO: 126076 - DNA, 570 bp, Artificial Sequence
  derived and/or modified sequence
atggcgctgccattcgtgcttcttatggcactggtggtcctgaactgtaagtcaatctgctcactaggatgcgatctgccacagactcattccctcagcaaccgcagaacccttatgattatggcacagatgggccgtatcagcccattcagctgtcttaaagaccggcacgactttggtttcccccaggaagaattcgacggcaaccaattccagaaggcacaagcaatttccgtacttcatgaaatgatccaacagacattcaatcttttctctaccaaggattcctctgccacctgggacgagactcttctggacaagttctatacggagctgtaccagcagcttaacgatctcgaagcttgtatgatgcaggaggtcggtgtggaggacacccctctgatgaacgtggactccatcctgaccgtaaggaagtacttccagcgcatcaccttgtatctcaccgagaagaaatattcaccatgtgcttgggaggtagtcagggcagagatcatgagatctttctccctcagcgcgaacctgcaggaaaggttgagaaggaaggagtag

SEQ ID NO: 126077 - DNA, 570 bp, Artificial Sequence
  derived and/or modified sequence
atggccctgccctttgtgctgctgatggccctggtggtgctgaactgcaagagcatctgcagcctgggctgtgacctgccccagacccacagcctgagcaacagaaggaccctgatgatcatggcccagatgggccgcatcagccccttcagctgcctgaaggacagacatgactttggcttcccccaggaggagtttgatggcaaccagttccagaaggcccaggccatctctgtgctgcacgagatgatccagcagaccttcaacctcttcagcaccaaggacagcagcgccacctgggatgagaccctgctggacaagttctacacagagctgtaccagcagctgaatgacctggaggcctgcatgatgcaggaggtgggcgtggaggacacccccctgatgaatgtggacagcatcctgactgtgaggaagtacttccagaggatcaccctgtacctgacagagaagaagtacagcccctgtgcctgggaggtggtgcgggcagagatcatgaggagcttcagcctgagcgccaacctgcaggagcggctgcggaggaaggagtag

SEQ ID NO: 126078 - DNA, 570 bp, Artificial Sequence
  derived and/or modified sequence
atggccctgcccttcgtgctgctgatggccctggtggtgctgaactgcaagagcatttgcagcctgggctgcgacctcccacagactcattcactttctaaccggcgtacattgatgatcatggcccagatgggccgcatctcacctttctcttgcttaaaagacagacacgactttggcttcccccaggaggagttcgatggcaaccagttccagaaggctcaggccatctctgtgttgcatgagatgatccagcaaaccttcaacctattctccaccaaggattcttctgccacatgggatgaaaccctgctggacaagttttatacagagctgtatcaacagttaaacgatctggaggcttgcatgatgcaggaggtcggcgtggaggatacccccctcatgaatgtggacagcattctgacagtgcggaagtattttcagcgtattactctgtacctcacagaaaagaagtactcaccttgcgcgtgggaagtggtaagagctgaaattatgagaagcttttcgttatctgctaacttgcaggagcgattaagacggaaagaatag

SEQ ID NO: 126079 - DNA, 570 bp, Artificial Sequence
  derived and/or modified sequence
atggcattaccttttgtgttattgatggcactggtagtcctgaactgtaagtcaatctgtagccttgggtgcgatcttcctcagactcattccctttctaaccggagaaccctgatgattatggcccagatggggcgaatcagcccattctcctgtctcaaggacaggcacgatttcgggttcccacaggaagaattcgacggcaaccaatttcagaaagctcaggccatcagtgtcctgcacgagatgattcagcaaaccttcaacttgttcagcacaaaggactcaagcgccacttgggacgagacactcctcgataaattctacacggagctctatcagcagctaaacgacctggaggcttgcatgatgcaggaagttggagtcgaagatacccccctcatgaatgttgacagtatcctcaccgtcaggaagtactttcagagaattacactgtacctgactgaaaaaaaatattcgccttgtgcctgggaggtggtacgcgcagagatcatgagaagctttagtctgtctgcaaacctgcaggaacggctgcggaggaaggagtag

SEQ ID NO: 126080 - DNA, 700 bp, Artificial Sequence
  derived and/or modified sequence
gcccaaggttcagggtcactcaatctcaacagcccagaagcatctgcaacctccccaatggccttgccctttgttttactgatggccctggtggtgctcaactgcaagtcaatctgttctctgggctgtgatctgcctcagacccacagcctgagtaacaggaggactttgatgataatggcacaaatgggaagaatctctcctttctcctgcctgaaggacagacatgactttggatttcctcaggaggagtttgatggcaaccagttccagaaggctcaagccatctctgtcctccatgagatgatccagcagaccttcaatctcttcagcacaaaggactcatctgctacttgggatgagacacttctagacaaattctacactgaactttaccagcagctgaatgacctggaagcctgtatgatgcaggaggttggagtggaagacactcctctgatgaatgtggactctatcctgactgtgagaaaatactttcaaagaatcaccctctatctgacagagaagaaatacagcccttgtgcatgggaggttgtcagagcagaaatcatgagatccttctctttatcagcaaacttgcaagaaagattaaggaggaaggaatgaaaactggttcaacatcgaaatgattctcattgactagtacaccatttcacacttcttgagttctgccgtttca

SEQ ID NO: 126081 - DNA, 570 bp, Artificial Sequence
  derived and/or modified sequence
atggccttacctttcgtgcttctgatggcgctagtggtgctcaattgtaagtcgatatgctcacttggctgcgacttgccgcagacccattctctctccaaccgacggactttaatgatcatggcacagatggggaggattagccctttcagctgcctgaaagacagacacgacttcggcttcccacaggaggagttcgacggcaatcagttccaaaaagcacaggccatttccgtcctccatgaaatgatccaacaaactttcaacctgttcagcactaaagacagcagcgctacatgggatgaaactcttctggataaattctacaccgaactatatcaacagctcaatgacctggaggcctgcatgatgcaggaggtcggtgtcgaagatactccgcttatgaacgttgactccatcttaactgtgagaaagtactttcagcgaatcaccctgtatttaaccgagaagaaatactcaccatgcgcctgggaggtagtccgtgccgaaattatgaggagctttagtctgagcgccaatttacaggaaagattgagacggaaagaatag

SEQ ID NO: 126082 - DNA, 570 bp, Artificial Sequence
  derived and/or modified sequence
atggcattgccctttgtgttactcatggccctggtggtgcttaactgtaagagcatttgttcattgggatgcgacctgccccaaacacactctctctcaaacaggcgtacacttatgattatggcacagatgggccgtatcagcccatttagctgtctcaaagaccggcatgactttggatttccccaagaagaattcgatggtaaccaatttcagaaagctcaggccatctccgttctacacgaaatgatacaacaaactttcaatcttttcagcaccaaagattcttctgctacatgggatgaaactcttctggataaattctacaccgaactatatcaacagctcaatgacctggaggcctgcatgatgcaggaggtcggtgtcgaagatactccgcttatgaacgttgactccatcttaactgtgagaaagtactttcagcgaatcaccctgtatttaaccgagaagaaatactcaccatgcgcctgggaggtagtccgtgccgaaattatgaggagctttagtctgagcgccaatttacaggaaagattgagacggaaagaatag

SEQ ID NO: 126083 - RNA, 570 nt, Artificial Sequence
  derived and/or modified sequence
auggccuuaccuuucgugcuucugauggcgcuaguggugcucaauuguaagucgauaugcucacuuggcugcgacuugccgcagacccauucucucuccaaccgacggacuuuaaugaucauggcacagauggggaggauuagcccuuucagcugccugaaagacagacacgacuucggcuucccacaggaggaguucgacggcaaucaguuccaaaaagcacaggccauuuccguccuccaugaaaugauccaacaaacuuucaaccuguucagcacuaaagacagcagcgcuacaugggaugaaacucuucuggauaaauucuacaccgaacuauaucaacagcucaaugaccuggaggccugcaugaugcaggaggucggugucgaagauacuccgcuuaugaacguugacuccaucuuaacugugagaaaguacuuucagcgaaucacccuguauuuaaccgagaagaaauacucaccaugcgccugggagguaguccgugccgaaauuaugaggagcuuuagucugagcgccaauuuacaggaaagauugagacggaaagaauag

SEQ ID NO: 126084 - RNA, 570 nt, Artificial Sequence
  derived and/or modified sequence
auggcauugcccuuuguguuacucauggcccugguggugcuuaacuguaagagcauuuguucauugggaugcgaccugccccaaacacacucucucucaaacaggcguacacuuaugauuauggcacagaugggccguaucagcccauuuagcugucucaaagaccggcaugacuuuggauuuccccaagaagaauucgaugguaaccaauuucagaaagcucaggccaucuccguucuacacgaaaugauacaacaaacuuucaaucuuuucagcaccaaagauucuucugcuacaugggaugaaacucuucuggauaaauucuacaccgaacuauaucaacagcucaaugaccuggaggccugcaugaugcaggaggucggugucgaagauacuccgcuuaugaacguugacuccaucuuaacugugagaaaguacuuucagcgaaucacccuguauuuaaccgagaagaaauacucaccaugcgccugggagguaguccgugccgaaauuaugaggagcuuuagucugagcgccaauuuacaggaaagauugagacggaaagaauag

SEQ ID NO: 126085 - protein, 189 aa, Artificial Sequence
  derived and/or modified sequence
MALTFYLLVALVVLSYKSFSSLGCDLPQTHSLGNRRALILLAQMRRISPFSCLKDRHDFEFPQEEFDDKQFQKAQAISVLHEMIQQTFNLFSTKDSSAALDETLLDEFYIELDQQLNDLESCVMQEVGVIESPLMYEDSILAVRKYFQRITLYLTEKKYSSCAWEVVRAEIMRSFSLSINLQKRLKSKE

SEQ ID NO: 126086 - DNA, 570 bp, Artificial Sequence
  derived and/or modified sequence
atggccctgaccttctacctgctggtggccctggtggtgctgagctacaagagcttcagcagcctgggctgcgacctgccccagacccacagcctgggcaacagaagagccctgatcctgctggcccagatgagaagaatcagccccttcagctgcctgaaggacagacacgacttcgagttcccccaggaggagttcgacgacaagcagttccagaaggcccaggccatcagcgtgctgcacgagatgatccagcagaccttcaacctgttcagcaccaaggacagcagcgccgccctggacgagaccctgctggacgagttctacatcgagctggaccagcagctgaacgacctggagagctgcgtgatgcaggaggtgggcgtgatcgagagccccctgatgtacgaggacagcatcctggccgtgagaaagtacttccagagaatcaccctgtacctgaccgagaagaagtacagcagctgcgcctgggaggtggtgagagccgagatcatgagaagcttcagcctgagcatcaacctgcagaagagactgaagagcaaggagtag

SEQ ID NO: 126087 - DNA, 570 bp, Artificial Sequence
  derived and/or modified sequence
atggcactgacattctaccttctcgttgccctggtggtcctctcctacaagtccttttcctccctgggatgtgacctgccacagacgcacagcctgggcaaccgaagggccctgattctgctcgctcagatgaggcgcatttctccattctcctgcctgaaagatagacatgattttgagtttccccaggaggagtttgacgacaagcagttccagaaggcccaggcaatctctgtcctgcacgaaatgattcaacagacattcaatctcttctcgacaaaggattctagcgccgccctcgacgagaccttgcttgacgagttttatattgagctggaccaacagttgaacgatttggaatcttgtgtcatgcaggaggtgggagtcatcgagagtcctctgatgtacgaggacagcattttggctgtgcgaaagtatttccagcgtatcaccctgtatctgacagagaagaaatattccagttgtgcctgggaggtggttcgggcagaaattatgcgaagcttctccctgtcaattaacctgcaaaagagactgaaatcgaaggaatag

SEQ ID NO: 126088 - DNA, 570 bp, Artificial Sequence
  derived and/or modified sequence
atggccctgaccttctacctgctggtggccctggtggtgctgagctacaagagcttcagcagcctgggctgtgacctgccccagacccacagcctgggcaacagaagagccctgatcctgctggcccagatgaggcgcatcagccccttcagctgcctgaaggacagacatgactttgagttcccccaggaggagtttgatgacaagcagttccagaaggcccaggccatctctgtgctgcacgagatgatccagcagaccttcaacctcttcagcaccaaggacagcagcgctgccctggatgagaccctgctggatgagttctacatcgagctggaccagcagctgaatgacctggagagctgtgtgatgcaggaggtgggcgtcatcgagagccccctgatgtatgaagattccatcctggccgtgaggaagtacttccagaggatcaccctgtacctgacagagaagaagtacagcagctgtgcctgggaggtggtgcgggcagagatcatgaggagcttcagcctgagcatcaacctgcagaagaggctgaagagcaaggagtag

SEQ ID NO: 126089 - DNA, 570 bp, Artificial Sequence
  derived and/or modified sequence
atggccctgaccttctacctgctggtggccctggtggtgctgagctataaatcgttctcctcgcttggctgcgacttacctcagactcattcactcggcaaccgacgcgccctcatcctgctcgcccagatgcggagaatatccccgtttagctgtctgaaggaccggcatgactttgaatttcctcaggaggagttcgatgacaagcagttccagaaggcacaagccatctctgtcctccatgaaatgatccagcagacttttaacttgttttctactaaggactccagtgcggccctggacgagactctcttagatgaattttatatcgaactagaccagcagctaaacgacttagaatcttgcgtgatgcaagaagtgggggtcattgaatctccgctaatgtatgaggactccattctggcggtgcgcaagtacttccaacgcatcactctctacctgacggaaaagaaatacagctcttgcgcctgggaagtcgtaagggccgaaatcatgcggagttttagtcttagcattaatctgcagaagcgtctgaagtccaaagagtag

SEQ ID NO: 126090 - DNA, 570 bp, Artificial Sequence
  derived and/or modified sequence
atggccctgacattctacctgcttgtggcacttgttgtgctctcttataagtcattctcctcattaggctgcgacttgcctcagacccactcactaggaaatcgaagagccctgatcttgttagcccaaatgaggagaattagcccttttagttgtctgaaggaccgacacgacttcgagttcccccaggaggaattcgatgacaagcaattccagaaagctcaggccattagcgtgttgcacgagatgattcaacagacttttaatctctttagcactaaggattcatccgcagcactcgatgagactttgctggacgagttttacatagagttggatcagcagttaaatgatttagagagttgcgtgatgcaggaagtgggggtcatagaaagtccactgatgtacgaggatagtattttggcggttaggaaatattttcaacgtatcacattgtatctgactgaaaagaagtattctagctgcgcctgggaagtggtccgcgctgaaataatgaggtccttttctttgagcattaatctccagaaaaggctaaaatcaaaggagtag

SEQ ID NO: 126091 - DNA, 1039 bp, Artificial Sequence
  derived and/or modified sequence
accagctcagcagcatccacaacatctacaatggccttgactttttatttactggtggccctagtggtgctcagctacaagtcattcagctctctgggctgtgatctgcctcagactcacagcctgggtaacaggagggccttgatactcctggcacaaatgcgaagaatctctcctttctcctgcctgaaggacagacatgactttgaattcccccaggaggagtttgatgataaacagttccagaaggctcaagccatctctgtcctccatgagatgatccagcagaccttcaacctcttcagcacaaaggactcatctgctgctttggatgagacccttctagatgaattctacatcgaacttgaccagcagctgaatgacctggagtcctgtgtgatgcaggaagtgggggtgatagagtctcccctgatgtacgaggactccatcctggctgtgaggaaatacttccaaagaatcactctatatctgacagagaagaaatacagctcttgtgcctgggaggttgtcagagcagaaatcatgagatccttctctttatcaatcaacttgcaaaaaagattgaagagtaaggaatgagacctggtacaacacggaaatgattcttatagactaatacagcagctcacacttcgacaagttgtgctctttcaaagacccttgtttctgccaaaaccatgctatgaattgaatcaaatgtgtcaagtgttttcaggagtgttaagcaacatcctgttcagctgtatgggcactagtcccttacagatgaccatgctgatggatctattcatctatttatttaaatctttatttagttaactatctatagggcttaaattagttttgttcatattatattatgtgaacttttacattgtgaattgtgtaacaaaaacatgttctttatatttattattttgccttgtttattaaatttttactatagaaaaattctttatttattctttaaaattgaactccaaccctgattgtgcaaactgattaaagaatggatggt

SEQ ID NO: 126092 - DNA, 570 bp, Artificial Sequence
  derived and/or modified sequence
atggctttgaccttctaccttctcgtcgccctggtagtcctgtcttacaaaagctttagtagtttgggttgtgacctgccacaaacacactcccttgggaacaggcgcgccttgattttgctagcccagatgcggcgtatatccccattctcttgcttaaaggatcggcacgactttgagttcccacaagaggaattcgatgacaagcagttccaaaaggcccaggctatttccgtcttgcacgaaatgattcagcagactttcaatctcttctccaccaaggattctagcgcagccttagacgagaccctgcttgacgagttttatatcgagcttgaccaacagcttaatgatctcgaatcctgtgttatgcaggaagttggagtgatcgagtcacccctaatgtacgaagattcaatcttagccgtcagaaaatattttcaacgcataacactctacctgaccgaaaaaaaatacagctcatgcgcatgggaagtcgtccgtgcagaaatcatgcgaagttttagcctgagtatcaacctgcaaaagaggctgaagtccaaggaatag

SEQ ID NO: 126093 - DNA, 570 bp, Artificial Sequence
  derived and/or modified sequence
atggctctcaccttctatctactggtggctttggtcgtgctctcctacaaaagctttagttccttaggctgtgacctgccccagacacactcacttgggaaccgtcgcgccctgatccttctcgcccagatgagacgtatctctccttttagttgtctgaaagaccgacacgacttcgaatttcctcaagaagagttcgacgataaacagttccaaaaggcccaggccatctcagttttacatgaaatgattcagcagacttttaatcttttttctaccaaagactccagtgccgcactcgacgagaccctgcttgacgagttttatatcgagcttgaccaacagcttaatgatctcgaatcctgtgttatgcaggaagttggagtgatcgagtcacccctaatgtacgaagattcaatcttagccgtcagaaaatattttcaacgcataacactctacctgaccgaaaaaaaatacagctcatgcgcatgggaagtcgtccgtgcagaaatcatgcgaagttttagcctgagtatcaacctgcaaaagaggctgaagtccaaggaatag

SEQ ID NO: 126094 - RNA, 570 nt, Artificial Sequence
  derived and/or modified sequence
auggcuuugaccuucuaccuucucgucgcccugguaguccugucuuacaaaagcuuuaguaguuuggguugugaccugccacaaacacacucccuugggaacaggcgcgccuugauuuugcuagcccagaugcggcguauauccccauucucuugcuuaaaggaucggcacgacuuugaguucccacaagaggaauucgaugacaagcaguuccaaaaggcccaggcuauuuccgucuugcacgaaaugauucagcagacuuucaaucucuucuccaccaaggauucuagcgcagccuuagacgagacccugcuugacgaguuuuauaucgagcuugaccaacagcuuaaugaucucgaauccuguguuaugcaggaaguuggagugaucgagucaccccuaauguacgaagauucaaucuuagccgucagaaaauauuuucaacgcauaacacucuaccugaccgaaaaaaaauacagcucaugcgcaugggaagucguccgugcagaaaucaugcgaaguuuuagccugaguaucaaccugcaaaagaggcugaaguccaaggaauag

SEQ ID NO: 126095 - RNA, 570 nt, Artificial Sequence
  derived and/or modified sequence
auggcucucaccuucuaucuacugguggcuuuggucgugcucuccuacaaaagcuuuaguuccuuaggcugugaccugccccagacacacucacuugggaaccgucgcgcccugauccuucucgcccagaugagacguaucucuccuuuuaguugucugaaagaccgacacgacuucgaauuuccucaagaagaguucgacgauaaacaguuccaaaaggcccaggccaucucaguuuuacaugaaaugauucagcagacuuuuaaucuuuuuucuaccaaagacuccagugccgcacucgacgagacccugcuugacgaguuuuauaucgagcuugaccaacagcuuaaugaucucgaauccuguguuaugcaggaaguuggagugaucgagucaccccuaauguacgaagauucaaucuuagccgucagaaaauauuuucaacgcauaacacucuaccugaccgaaaaaaaauacagcucaugcgcaugggaagucguccgugcagaaaucaugcgaaguuuuagccugaguaucaaccugcaaaagaggcugaaguccaaggaauag

SEQ ID NO: 126096 - protein, 189 aa, Artificial Sequence
  derived and/or modified sequence
MALSFSLLMAVLVLSYKSICSLGCDLPQTHSLGNRRALILLGQMGRISPFSCLKDRHDFRIPQEEFDGNQFQKAQAISVLHEMIQQTFNLFSTEDSSAAWEQSLLEKFSTELYQQLNDLEACVIQEVGVEETPLMNEDSILAVRKYFQRITLYLIERKYSPCAWEVVRAEIMRSLSFSTNLQKRLRRKD

SEQ ID NO: 126097 - DNA, 570 bp, Artificial Sequence
  derived and/or modified sequence
atggccctgagcttcagcctgctgatggccgtgctggtgctgagctacaagagcatctgcagcctgggctgcgacctgccccagacccacagcctgggcaacagaagagccctgatcctgctgggccagatgggcagaatcagccccttcagctgcctgaaggacagacacgacttcagaatcccccaggaggagttcgacggcaaccagttccagaaggcccaggccatcagcgtgctgcacgagatgatccagcagaccttcaacctgttcagcaccgaggacagcagcgccgcctgggagcagagcctgctggagaagttcagcaccgagctgtaccagcagctgaacgacctggaggcctgcgtgatccaggaggtgggcgtggaggagacccccctgatgaacgaggacagcatcctggccgtgagaaagtacttccagagaatcaccctgtacctgatcgagagaaagtacagcccctgcgcctgggaggtggtgagagccgagatcatgagaagcctgagcttcagcaccaacctgcagaagagactgagaagaaaggactag

SEQ ID NO: 126098 - DNA, 570 bp, Artificial Sequence
  derived and/or modified sequence
atggctctcagcttcagccttctgatggccgtgttggttctctcatacaagtcaatttgctctctaggctgcgacctgccccaaacacatagcctgggcaatcgccgcgccctaattctcctgggacagatgggacggataagccccttctcctgcctgaaagatagacacgactttaggattccgcaagaggaatttgacgggaatcagttccaaaaggcacaggcaatatcagtgctgcacgagatgatccaacagacattcaatttgttcagcacagaagatagcagcgcagcatgggagcaatccctactagagaagttttctaccgaactgtatcagcagctcaacgatttggaagcttgtgttattcaggaggtcggggttgaggagacacccttgatgaatgaagatagtatccttgcagtgcggaagtactttcagcgcattaccctgtatcttatcgagcgaaagtacagcccttgcgcgtgggaagtagtaagagcagaaattatgcggtctctgtcattcagtaccaacctgcaaaagagactgcgacgcaaggattag

SEQ ID NO: 126099 - DNA, 570 bp, Artificial Sequence
  derived and/or modified sequence
atggccctgtccttcagcctgctgatggctgtgctggtgctgagctacaagagcatctgcagcctgggctgtgacctgccccagacccacagcctgggcaacagaagagccctgatcctgctgggccagatgggccgcatcagccccttcagctgcctgaaggacagacatgacttccgcatcccccaggaggagtttgatggcaaccagttccagaaggcccaggccatctctgtgctgcacgagatgatccagcagaccttcaacctcttcagcacagaggacagcagcgctgcctgggagcagagcctgctggagaagttcagcacagagctgtaccagcagctgaatgacctggaggcctgcgtcatccaggaggtgggcgtggaggagacccccctgatgaatgaagattccatcctggccgtgaggaagtacttccagaggatcaccctgtacctgattgaaaggaagtacagcccctgtgcctgggaggtggtgcgggcagagatcatgaggagcctgtccttcagcaccaacctgcagaagaggctgcggaggaaggactag

SEQ ID NO: 126100 - DNA, 570 bp, Artificial Sequence
  derived and/or modified sequence
atggccctgagcttcagcctgctgatggccgtgctggtgctgagctataagtcaatctgttcactcgggtgcgacctgccccagacacactccctgggcaaccgcagggctctgattctgctcggccagatgggcaggatttccccattctcttgtttgaaagaccggcatgacttccggattccacaagaggagttcgacggaaaccaattccagaaggcccaggcaatcagcgtgctccacgagatgatccaacaaacttttaacctgtttagcacggaggacagcagtgctgcctgggaacagagcctgctggaaaagttcagcacggaactttaccagcaacttaatgacctcgaggcttgcgtgatacaggaagtaggggttgaagaaacccccctgatgaacgaggacagtatactggccgtgaggaagtattttcagagaataacgctctacctgatagagcggaagtattctccatgcgcctgggaggtagtcagagctgagattatgcggtccctgagctttagtaccaatttgcagaaaagactccgccgcaaagattag

SEQ ID NO: 126101 - DNA, 570 bp, Artificial Sequence
  derived and/or modified sequence
atggctttaagttttagtctcctcatggccgttttggtgctctcatataagagcatttgcagcttgggctgcgatctcccacaaactcatagtctggggaacaggagagccctcattttgctaggacagatgggaagaatttcacctttctcttgcctgaaagacagacacgacttcagaatacctcaggaagaattcgatggaaatcagttccagaaagcacaagctatctctgtgctgcatgaaatgattcagcagacatttaatctgtttagtacagaagactcctcagccgcttgggagcagagtctgctcgagaaattctctactgagctatatcaacagctcaacgatctagaagcgtgcgtcatccaggaggttggggtggaagagaccccgcttatgaatgaggacagcattctggctgtacgcaaatacttccagaggatcaccctgtacctcattgagcgcaaatatagcccgtgtgcctgggaggtcgtgagagccgagattatgcggtcattgagtttctcaaccaacttgcagaaaagactgaggaggaaagattag

SEQ ID NO: 126102 - DNA, 963 bp, Artificial Sequence
  derived and/or modified sequence
caaggttatccatctcaagtagcctagcaatatttgcaacatcccaatggccctgtccttttctttacttatggccgtgctggtgctcagctacaaatccatctgttctctaggctgtgatctgcctcagacccacagcctgggtaataggagggccttgatactcctgggacaaatgggaagaatctctcctttctcctgcctgaaggacagacatgatttccgaatcccccaggaggagtttgatggcaaccagttccagaaggctcaagccatctctgtcctccatgagatgatccagcagaccttcaatctcttcagcacagaggactcatctgctgcttgggaacagagcctcctagaaaaattttccactgaactttaccagcaactgaatgacctggaagcatgtgtgatacaggaggttggggtggaagagactcccctgatgaatgaggactccatcctggctgtgaggaaatacttccaaagaatcactctttatctaatagagaggaaatacagcccttgtgcctgggaggttgtcagagcagaaatcatgagatccctctcgttttcaacaaacttgcaaaaaagattaaggaggaaggattgaaaactggttcaacatggcaatgatcctgattgactaatacattatctcacactttcatgagttcttccatttcaaagactcacttctataaccacgacgcgttgaatcaaaattttcaaatgttttcagcagtgtaaagaagtgtcgtgtatacctgtgcaggcactagtcctttacagatgaccattctgatgtctctgttcatcttttgtttaaatatttatttaattatttttaaaatttatgtaatatcatgagtcgctttacattgtggttaatgtaacaatatatgttcttcatatttagccaatatattaatttcctttttcattaaatttttactatac

SEQ ID NO: 126103 - DNA, 570 bp, Artificial Sequence
  derived and/or modified sequence
atggcactgagcttcagcctgctgatggccgttctcgttttatcgtataagtctatttgtagcctcggctgcgatttgccccagacccatagcctgggtaacagacgggctctaatattgctgggtcagatgggtcggatctccccttttagctgcttgaaagaccggcacgatttccgcattccacaggaagaattcgacgggaaccagtttcagaaggcacaagctattagtgttctacatgagatgattcagcaaacattcaatctgttctcgactgaagatagctctgctgcctgggaacagagtctgctagagaaattctcaacagaactgtatcaacagctgaacgatttggaagcttgcgtgatacaggaggtgggcgtagaagagacacctcttatgaacgaagacagtatactcgccgtcagaaagtatttccagaggatcaccctatatctgatcgagaggaaatattcaccgtgtgcttgggaagtggtcagagcggagataatgcggtccttgtctttttctaccaatctacagaagcgtctccgacggaaggattag

SEQ ID NO: 126104 - DNA, 570 bp, Artificial Sequence
  derived and/or modified sequence
atggccttatctttctcactactaatggccgtgctggtgctttcttacaagtctatttgctccctcggatgtgacctcccacagacgcactcccttggtaatcgacgagcactgatcttattgggacaaatgggccggatcagccccttttcctgtcttaaagaccgccatgatttcagaatcccacaggaagagttcgacggtaaccaattccagaaggcccaggcgatctctgtacttcatgaaatgatacagcaaaccttcaatcttttctccacagaggattcgtctgctgcatgggagcagagtctcctggagaaattcagcactgagctttaccagcagcttaatgaccttgaagcatgtgtcatccaagaggttggcgttgaagagacccctcttatgaacgaggatagtatattggctgtgagaaagtacttccaacggatcaccctgtatctcatcgagaggaaatatagcccatgtgcctgggaagtggtacgagccgaaatcatgcgtagtctctcattttctacgaacctgcaaaaacggcttcgcagaaaggattag

SEQ ID NO: 126105 - RNA, 570 nt, Artificial Sequence
  derived and/or modified sequence
auggcacugagcuucagccugcugauggccguucucguuuuaucguauaagucuauuuguagccucggcugcgauuugccccagacccauagccuggguaacagacgggcucuaauauugcugggucagaugggucggaucuccccuuuuagcugcuugaaagaccggcacgauuuccgcauuccacaggaagaauucgacgggaaccaguuucagaaggcacaagcuauuaguguucuacaugagaugauucagcaaacauucaaucuguucucgacugaagauagcucugcugccugggaacagagucugcuagagaaauucucaacagaacuguaucaacagcugaacgauuuggaagcuugcgugauacaggaggugggcguagaagagacaccucuuaugaacgaagacaguauacucgccgucagaaaguauuuccagaggaucacccuauaucugaucgagaggaaauauucaccgugugcuugggaaguggucagagcggagauaaugcgguccuugucuuuuucuaccaaucuacagaagcgucuccgacggaaggauuag

SEQ ID NO: 126106 - RNA, 570 nt, Artificial Sequence
  derived and/or modified sequence
auggccuuaucuuucucacuacuaauggccgugcuggugcuuucuuacaagucuauuugcucccucggaugugaccucccacagacgcacucccuugguaaucgacgagcacugaucuuauugggacaaaugggccggaucagccccuuuuccugucuuaaagaccgccaugauuucagaaucccacaggaagaguucgacgguaaccaauuccagaaggcccaggcgaucucuguacuucaugaaaugauacagcaaaccuucaaucuuuucuccacagaggauucgucugcugcaugggagcagagucuccuggagaaauucagcacugagcuuuaccagcagcuuaaugaccuugaagcaugugucauccaagagguuggcguugaagagaccccucuuaugaacgaggauaguauauuggcugugagaaaguacuuccaacggaucacccuguaucucaucgagaggaaauauagcccaugugccugggaagugguacgagccgaaaucaugcguagucucucauuuucuacgaaccugcaaaaacggcuucgcagaaaggauuag

SEQ ID NO: 126107 - protein, 189 aa, Artificial Sequence
  derived and/or modified sequence
MALPFALMMALVVLSCKSSCSLGCNLSQTHSLNNRRTLMLMAQMRRISPFSCLKDRHDFEFPQEEFDGNQFQKAQAISVLHEMMQQTFNLFSTKNSSAAWDETLLEKFYIELFQQMNDLEACVIQEVGVEETPLMNEDSILAVKKYFQRITLYLMEKKYSPCAWEVVRAEIMRSLSFSTNLQKRLRRKD

SEQ ID NO: 126108 - DNA, 570 bp, Artificial Sequence
  derived and/or modified sequence
atggccctgcccttcgccctgatgatggccctggtggtgctgagctgcaagagcagctgcagcctgggctgcaacctgagccagacccacagcctgaacaacagaagaaccctgatgctgatggcccagatgagaagaatcagccccttcagctgcctgaaggacagacacgacttcgagttcccccaggaggagttcgacggcaaccagttccagaaggcccaggccatcagcgtgctgcacgagatgatgcagcagaccttcaacctgttcagcaccaagaacagcagcgccgcctgggacgagaccctgctggagaagttctacatcgagctgttccagcagatgaacgacctggaggcctgcgtgatccaggaggtgggcgtggaggagacccccctgatgaacgaggacagcatcctggccgtgaagaagtacttccagagaatcaccctgtacctgatggagaagaagtacagcccctgcgcctgggaggtggtgagagccgagatcatgagaagcctgagcttcagcaccaacctgcagaagagactgagaagaaaggactag

SEQ ID NO: 126109 - DNA, 570 bp, Artificial Sequence
  derived and/or modified sequence
atggcactgccgttcgcacttatgatggccttagtcgtcctgtcctgtaagtccagctgcagcctcggttgtaatctgagtcagactcatagcttgaataaccgaagaacactgatgctgatggcacagatgagacgaatttcccccttttcttgcctgaaagaccgacatgacttcgaattcccgcaggaagagttcgacggaaaccagttccagaaggcacaggccatctctgtcctgcacgagatgatgcaacagactttcaatttattttcaactaagaatagctctgctgcatgggatgagaccctcttagaaaagttctacatcgagctgttccagcagatgaacgatctcgaagcctgtgtgatccaggaagtcggcgtcgaagaaactcctctaatgaatgaggactctatcttggcggtcaaaaagtacttccaacgaattaccctgtatctgatggagaagaaatacagtccgtgtgcctgggaagtagtgagagcagagattatgcgtagcctgagttttagcaccaatttgcaaaaaagactcaggaggaaagattag

SEQ ID NO: 126110 - DNA, 570 bp, Artificial Sequence
  derived and/or modified sequence
atggccctgccctttgccctgatgatggccctggtggtgctgagctgcaagagcagctgcagcctgggctgcaacctgagccagacccacagcctgaacaacagaaggaccctgatgctgatggcccagatgaggcgcatcagccccttcagctgcctgaaggacagacatgactttgagttcccccaggaggagtttgatggcaaccagttccagaaggcccaggccatctctgtgctgcacgagatgatgcagcagaccttcaacctcttcagcaccaagaacagcagcgctgcctgggatgagaccctgctggagaagttctacatcgagctgttccagcagatgaatgacctggaggcctgcgtcatccaggaggtgggcgtggaggagacccccctgatgaatgaagattccatcctggccgtgaagaagtacttccagaggatcaccctgtacctgatggagaagaagtacagcccctgtgcctgggaggtggtgcgggcagagatcatgaggagcctgtccttcagcaccaacctgcagaagaggctgcggaggaaggactag

SEQ ID NO: 126111 - DNA, 570 bp, Artificial Sequence
  derived and/or modified sequence
atggccctgcccttcgccctgatgatggccctggtggtgctgagctgcaagtccagttgcagccttggatgtaacctgtcccaaacccactctctaaacaatcgtagaactcttatgttgatggcgcagatgcggagaatcagtccctttagctgcctgaaggaccggcacgatttcgagttcccgcaggaggagttcgacggcaaccagtttcagaaagctcaggccataagtgtgctgcacgagatgatgcaacagacctttaatctgttttctactaaaaactccagcgccgcatgggacgagaccctgctggagaagttttatattgagttgttccagcagatgaatgacctggaagcttgtgtgatacaggaagtgggagtggaagagacccctctcatgaatgaagacagcatccttgccgtaaagaagtatttccaacggatcactttataccttatggagaaaaaatatagtccgtgcgcttgggaagtggtcagagctgaaataatgaggtctctgtcattcagtaccaatctacaaaaaaggctgcggcgcaaggattag

SEQ ID NO: 126112 - DNA, 570 bp, Artificial Sequence
  derived and/or modified sequence
atggctctgccttttgccttaatgatggccctggtcgtcctctcttgcaagtcgagctgctcactgggctgcaatttgagccagacgcattctttaaataatcggcgtacactgatgttgatggcacagatgagacggattagccctttctcttgcttgaaggaccgccatgattttgagttcccccaggaagagtttgacggaaaccagttccagaaagctcaggccatcagcgtgctgcatgagatgatgcagcagacgttcaatctgttttccacaaaaaactctagcgctgcttgggacgagaccctgcttgagaaattttatattgaactgtttcagcaaatgaacgacttggaagcttgtgtgattcaagaggtcggcgtggaggagacaccattgatgaatgaagactctattcttgcagtgaagaaatactttcagcgaataaccttgtatctgatggaaaaaaaatattctccctgcgcatgggaagttgtcagagctgagatcatgcgttccctatctttcagcacaaatctccagaagaggctaaggcggaaagattag

SEQ ID NO: 126113 - DNA, 778 bp, Artificial Sequence
  derived and/or modified sequence
gttacccctcatcaaccagcccagcagcatcttcgggattcccaatggcattgccctttgctttaatgatggccctggtggtgctcagctgcaagtcaagctgctctctgggctgtaatctgtctcaaacccacagcctgaataacaggaggactttgatgctcatggcacaaatgaggagaatctctcctttctcctgcctgaaggacagacatgactttgaatttccccaggaggaatttgatggcaaccagttccagaaagctcaagccatctctgtcctccatgagatgatgcagcagaccttcaatctcttcagcacaaagaactcatctgctgcttgggatgagaccctcctagaaaaattctacattgaacttttccagcaaatgaatgacctggaagcctgtgtgatacaggaggttggggtggaagagactcccctgatgaatgaggactccatcctggctgtgaagaaatacttccaaagaatcactctttatctgatggagaagaaatacagcccttgtgcctgggaggttgtcagagcagaaatcatgagatccctctctttttcaacaaacttgcaaaaaagattaaggaggaaggattgaaaactggttcatcatggaaatgattctcattgactaatacatcatctcacactttcatgagttcttccatttcaaagactcacttctcctataaccaccacaagttgaatcaaaattttcaaatgttttcaggagtgtaaagaagcatcatgtatacctgtgca

SEQ ID NO: 126114 - DNA, 570 bp, Artificial Sequence
  derived and/or modified sequence
atggctcttccctttgcgctcatgatggccctcgtggtgctgagttgtaaaagcagctgttcactgggctgcaatttaagccagacccattcactcaataatcggcgcaccctcatgctcatggctcagatgcgccggatctcgcccttttcctgcttaaaagatcgtcacgacttcgagttcccccaggaagagtttgacggaaatcaattccagaaagcacaagctatttccgtactccacgagatgatgcagcagacattcaacctgttcagtaccaagaactcatcagctgcctgggacgaaacactccttgaaaaattttacattgaactgttccaacaaatgaacgacctggaggcttgcgtaattcaagaggtaggcgtagaagaaaccccccttatgaatgaggacagtatcctagcagttaaaaaatactttcaaaggatcaccctctaccttatggaaaaaaaatactcaccctgtgcctgggaggttgtgcgggctgagatcatgagatcccttagtttctctaccaacctgcagaagcgactaaggcgaaaggactag

SEQ ID NO: 126115 - DNA, 570 bp, Artificial Sequence
  derived and/or modified sequence
atggctctgccctttgccctcatgatggccctggttgtactgagttgtaaaagttcatgttccttgggatgtaatttaagccagacgcactctctcaataatagaaggaccttgatgctcatggcacagatgcgcaggatctcccctttttcctgtcttaaagaccgccatgacttcgaatttccacaagaagagtttgacgggaatcaatttcagaaagctcaggccatttcagtattacatgaaatgatgcaacagactttcaacctgttcagtaccaagaactcctcagcagcttgggatgaaacactgcttgagaaattttatatcgagctcttccagcagatgaatgaccttgaggcttgcgtgatccaagaggttggagttgaggagaccccactcatgaatgaagactccatcctggccgtcaaaaagtactttcagcgaattaccctgtatctgatggaaaaaaaatattctccatgcgcctgggaagttgttcgggcagaaatcatgagatccctgtctttctctaccaaccttcaaaaaagactaagacgcaaagactag

SEQ ID NO: 126116 - RNA, 570 nt, Artificial Sequence
  derived and/or modified sequence
auggcucuucccuuugcgcucaugauggcccucguggugcugaguuguaaaagcagcuguucacugggcugcaauuuaagccagacccauucacucaauaaucggcgcacccucaugcucauggcucagaugcgccggaucucgcccuuuuccugcuuaaaagaucgucacgacuucgaguucccccaggaagaguuugacggaaaucaauuccagaaagcacaagcuauuuccguacuccacgagaugaugcagcagacauucaaccuguucaguaccaagaacucaucagcugccugggacgaaacacuccuugaaaaauuuuacauugaacuguuccaacaaaugaacgaccuggaggcuugcguaauucaagagguaggcguagaagaaaccccccuuaugaaugaggacaguauccuagcaguuaaaaaauacuuucaaaggaucacccucuaccuuauggaaaaaaaauacucacccugugccugggagguugugcgggcugagaucaugagaucccuuaguuucucuaccaaccugcagaagcgacuaaggcgaaaggacuag

SEQ ID NO: 126117 - RNA, 570 nt, Artificial Sequence
  derived and/or modified sequence
auggcucugcccuuugcccucaugauggcccugguuguacugaguuguaaaaguucauguuccuugggauguaauuuaagccagacgcacucucucaauaauagaaggaccuugaugcucauggcacagaugcgcaggaucuccccuuuuuccugucuuaaagaccgccaugacuucgaauuuccacaagaagaguuugacgggaaucaauuucagaaagcucaggccauuucaguauuacaugaaaugaugcaacagacuuucaaccuguucaguaccaagaacuccucagcagcuugggaugaaacacugcuugagaaauuuuauaucgagcucuuccagcagaugaaugaccuugaggcuugcgugauccaagagguuggaguugaggagaccccacucaugaaugaagacuccauccuggccgucaaaaaguacuuucagcgaauuacccuguaucugauggaaaaaaaauauucuccaugcgccugggaaguuguucgggcagaaaucaugagaucccugucuuucucuaccaaccuucaaaaaagacuaagacgcaaagacuag

SEQ ID NO: 126118 - protein, 189 aa, Artificial Sequence
  derived and/or modified sequence
MALSFSLLMAVLVLSYKSICSLGCDLPQTHSLGNRRALILLAQMGRISHFSCLKDRYDFGFPQEVFDGNQFQKAQAISAFHEMIQQTFNLFSTKDSSAAWDETLLDKFYIELFQQLNDLEACVTQEVGVEEIALMNEDSILAVRKYFQRITLYLMGKKYSPCAWEVVRAEIMRSFSFSTNLQKGLRRKD

SEQ ID NO: 126119 - DNA, 570 bp, Artificial Sequence
  derived and/or modified sequence
atggccctgagcttcagcctgctgatggccgtgctggtgctgagctacaagagcatctgcagcctgggctgcgacctgccccagacccacagcctgggcaacagaagagccctgatcctgctggcccagatgggcagaatcagccacttcagctgcctgaaggacagatacgacttcggcttcccccaggaggtgttcgacggcaaccagttccagaaggcccaggccatcagcgccttccacgagatgatccagcagaccttcaacctgttcagcaccaaggacagcagcgccgcctgggacgagaccctgctggacaagttctacatcgagctgttccagcagctgaacgacctggaggcctgcgtgacccaggaggtgggcgtggaggagatcgccctgatgaacgaggacagcatcctggccgtgagaaagtacttccagagaatcaccctgtacctgatgggcaagaagtacagcccctgcgcctgggaggtggtgagagccgagatcatgagaagcttcagcttcagcaccaacctgcagaagggcctgagaagaaaggactag

SEQ ID NO: 126120 - DNA, 570 bp, Artificial Sequence
  derived and/or modified sequence
atggctttatcattcagtttactgatggcggtgctggtgctgagctacaaatccatttgcagccttggttgtgatctgcctcagactcactctttgggaaatcggcgggccttgatcctccttgcccagatgggccgcataagccactttagttgcctcaaggataggtatgatttcggcttcccccaggaggtgtttgacgggaatcaattccagaaagctcaagcaatctcagcatttcacgagatgattcagcagacattcaatctgttcagcacaaaagattccagtgctgcctgggatgagaccttgttggacaaattctatatcgaattatttcagcagcttaatgacctcgaggcctgtgtcacccaagaagtcggcgtagaggagatagccttaatgaatgaagactctatccttgcagtgcgcaagtacttccagaggatcaccttgtacttaatgggcaaaaagtattccccatgtgcttgggaagtggttcgggccgagatcatgcggtcgttttcattttccacaaatctccagaagggactaaggaggaaagactag

SEQ ID NO: 126121 - DNA, 570 bp, Artificial Sequence
  derived and/or modified sequence
atggccctgtccttcagcctgctgatggctgtgctggtgctgagctacaagagcatctgcagcctgggctgtgacctgccccagacccacagcctgggcaacagaagagccctgatcctgctggcccagatgggccgcatcagccacttcagctgcctgaaggacagatatgactttggcttcccccaggaggtgtttgatggcaaccagttccagaaggcccaggccatcagcgccttccacgagatgatccagcagaccttcaacctcttcagcaccaaggacagcagcgctgcctgggatgagaccctgctggacaagttctacatcgagctgttccagcagctgaatgacctggaggcctgtgtgacccaggaggtgggcgtggaggagatcgccctgatgaatgaagattccatcctggccgtgaggaagtacttccagaggatcaccctgtacctgatgggcaagaagtacagcccctgtgcctgggaggtggtgcgggcagagatcatgaggagcttctccttcagcaccaacctgcagaagggcctgcggaggaaggactag

SEQ ID NO: 126122 - DNA, 570 bp, Artificial Sequence
  derived and/or modified sequence
atggccctgagcttcagcctgctgatggccgtgctggtgctgagctacaaaagtatatgtagcctcggctgtgatctgccacagactcactctctgggaaaccggcgcgccctgatcttgctggcacagatgggcagaatctcccacttttcttgtctgaaggaccggtacgatttcggtttcccccaggaggtctttgatggaaatcagtttcagaaggcccaagctataagtgcgtttcacgagatgatccagcagacctttaacctctttagcactaaggacagcagcgcggcctgggacgaaacccttctcgacaagttttatatcgagctctttcagcagcttaatgacctcgaggcctgtgttacccaggaagtgggagtagaggagatcgcactgatgaacgaggacagtatcctcgccgtccggaagtacttccagcgaataacgctgtacttgatgggcaaaaagtactctccatgcgcctgggaggtggtgcgcgcagaaataatgcgtagtttctcattttccaccaatctgcagaaaggtttgcgccgcaaagactag

SEQ ID NO: 126123 - DNA, 570 bp, Artificial Sequence
  derived and/or modified sequence
atggccctgtccttcagcctcctgatggctgtgctggtcctatcctacaagagcatctgctcgctcggatgcgacctgcctcagactcattctctgggaaacagaagagctctcattttgctagcacagatgggcaggatcagccattttagctgtttgaaggacagatatgacttcggcttcccccaagaggtgttcgatgggaatcagtttcaaaaggcgcaagctatctctgcatttcacgaaatgattcagcaaaccttcaacctcttcagcacaaaagactcaagcgcggcttgggacgagactctgctggacaaattttacattgaattgttccagcagctgaatgacctggaggcttgcgtgactcaagaagtgggcgtagaagagatcgccctcatgaacgaagattccattctcgctgtgcgaaagtattttcagcgtatcacactctacctgatggggaagaaatattccccgtgtgcctgggaagttgtccgggcagaaattatgcgaagcttttccttttccacaaacttacaaaaaggactccgacggaaggactag

SEQ ID NO: 126124 - DNA, 939 bp, Artificial Sequence
  derived and/or modified sequence
atcccaatggccctgtccttttctttactgatggccgtgctggtgctcagctacaaatccatctgttctctgggctgtgatctgcctcagactcacagcctgggtaataggagggccttgatactcctggcacaaatgggaagaatctctcatttctcctgcctgaaggacagatatgatttcggattcccccaggaggtgtttgatggcaaccagttccagaaggctcaagccatctctgccttccatgagatgatccagcagaccttcaatctcttcagcacaaaggattcatctgctgcttgggatgagaccctcctagacaaattctacattgaacttttccagcaactgaatgacctagaagcctgtgtgacacaggaggttggggtggaagagattgccctgatgaatgaggactccatcctggctgtgaggaaatactttcaaagaatcactctttatctgatggggaagaaatacagcccttgtgcctgggaggttgtcagagcagaaatcatgagatccttctctttttcaacaaacttgcaaaaaggattaagaaggaaggattgaaaactcattcaacatggaaatgatcctcattgattaatacatcatctcacactttcatgagttcttccatttcaaagactcacttctataaccaccacaagttgaatcaaaattttcaaatgttttcaggagtgtaaagaagcatcgtgtttacctgtgcaggcactagtcctttacagatgaccatgctgatgtctctattcatctatttatttaaatatttatttatttaactatttttaaggtttaaatcatgttttatgtaatatcatgtgtacctttacattttgcttaatgtaacaatatatgttcttcatatttagttaatatattaacttccttttcattaaatttttactatac

SEQ ID NO: 126125 - DNA, 570 bp, Artificial Sequence
  derived and/or modified sequence
atggccctgtcattcagcctattaatggcagtgctcgtactttcttacaagtctatctgctctctcggctgcgatctgcctcagactcattccctgggcaacagaagagcgctgattctcttggcgcaaatgggacggatctctcacttttcttgcttgaaagaccgctacgattttggtttcccacaggaagtatttgatggcaaccagttccagaaggctcaagctatttctgcgtttcacgaaatgattcagcagacatttaatctgttcagcacaaaagatagctcagctgcttgggatgaaaccctgctcgataagttctacattgaactttttcagcaactgaacgatctggaggcctgcgtcactcaggaggttggcgtggaggagatagcgttaatgaacgaggactcgattctcgctgttcgaaaatactttcagaggattaccctttacttgatgggcaaaaagtattctccttgcgcttgggaagttgtgcgcgcagagattatgcgatcattcagcttcagcaccaacctgcagaaagggttaaggcgtaaagattag

SEQ ID NO: 126126 - DNA, 570 bp, Artificial Sequence
  derived and/or modified sequence
atggccctctcattttctctgctcatggccgtactggtactctcatacaagtccatttgttctctaggttgtgacctgcctcaaacccattctctgggcaatcgacgcgctctgattctgctcgcccagatgggtcgcatttctcacttctcttgcctgaaagaccgttatgattttgggtttccacaggaggttttcgacggaaaccagttccaaaaggcacaggcaatatccgccttccatgaaatgatccagcaaacttttaatctgttctcaaccaaggactcttcggcagcttgggatgaaacattgttagataagttttacattgagctctttcaacaattaaacgacctggaagcgtgtgtgacacaagaagtaggagtggaagagattgctttgatgaacgaagacagcattctggcagtccgcaaatactttcaaagaatcaccctgtacttgatgggaaaaaaatactcgccatgtgcctgggaggtcgtgcgggccgaaattatgagatctttcagttttagcacaaaccttcaaaaaggcctgaggagaaaggattag

SEQ ID NO: 126127 - RNA, 570 nt, Artificial Sequence
  derived and/or modified sequence
auggcccugucauucagccuauuaauggcagugcucguacuuucuuacaagucuaucugcucucucggcugcgaucugccucagacucauucccugggcaacagaagagcgcugauucucuuggcgcaaaugggacggaucucucacuuuucuugcuugaaagaccgcuacgauuuugguuucccacaggaaguauuugauggcaaccaguuccagaaggcucaagcuauuucugcguuucacgaaaugauucagcagacauuuaaucuguucagcacaaaagauagcucagcugcuugggaugaaacccugcucgauaaguucuacauugaacuuuuucagcaacugaacgaucuggaggccugcgucacucaggagguuggcguggaggagauagcguuaaugaacgaggacucgauucucgcuguucgaaaauacuuucagaggauuacccuuuacuugaugggcaaaaaguauucuccuugcgcuugggaaguugugcgcgcagagauuaugcgaucauucagcuucagcaccaaccugcagaaaggguuaaggcguaaagauuag

SEQ ID NO: 126128 - RNA, 570 nt, Artificial Sequence
  derived and/or modified sequence
auggcccucucauuuucucugcucauggccguacugguacucucauacaaguccauuuguucucuagguugugaccugccucaaacccauucucugggcaaucgacgcgcucugauucugcucgcccagaugggucgcauuucucacuucucuugccugaaagaccguuaugauuuuggguuuccacaggagguuuucgacggaaaccaguuccaaaaggcacaggcaauauccgccuuccaugaaaugauccagcaaacuuuuaaucuguucucaaccaaggacucuucggcagcuugggaugaaacauuguuagauaaguuuuacauugagcucuuucaacaauuaaacgaccuggaagcgugugugacacaagaaguaggaguggaagagauugcuuugaugaacgaagacagcauucuggcaguccgcaaauacuuucaaagaaucacccuguacuugaugggaaaaaaauacucgccaugugccugggaggucgugcgggccgaaauuaugagaucuuucaguuuuagcacaaaccuucaaaaaggccugaggagaaaggauuag

SEQ ID NO: 126129 - protein, 189 aa, Artificial Sequence
  derived and/or modified sequence
MALSFSLLMAVLVLSYKSICSLGCDLPQTHSLGNRRALILLAQMGRISPFSCLKDRHDFGFPQEEFDGNQFQKAQAISVLHEMIQQTFNLFSTKDSSATWEQSLLEKFSTELNQQLNDLEACVIQEVGVEETPLMNVDSILAVKKYFQRITLYLTEKKYSPCAWEVVRAEIMRSFSLSKIFQERLRRKE

SEQ ID NO: 126130 - DNA, 570 bp, Artificial Sequence
  derived and/or modified sequence
atggccctgagcttcagcctgctgatggccgtgctggtgctgagctacaagagcatctgcagcctgggctgcgacctgccccagacccacagcctgggcaacagaagagccctgatcctgctggcccagatgggcagaatcagccccttcagctgcctgaaggacagacacgacttcggcttcccccaggaggagttcgacggcaaccagttccagaaggcccaggccatcagcgtgctgcacgagatgatccagcagaccttcaacctgttcagcaccaaggacagcagcgccacctgggagcagagcctgctggagaagttcagcaccgagctgaaccagcagctgaacgacctggaggcctgcgtgatccaggaggtgggcgtggaggagacccccctgatgaacgtggacagcatcctggccgtgaagaagtacttccagagaatcaccctgtacctgaccgagaagaagtacagcccctgcgcctgggaggtggtgagagccgagatcatgagaagcttcagcctgagcaagatcttccaggagagactgagaagaaaggagtag

SEQ ID NO: 126131 - DNA, 570 bp, Artificial Sequence
  derived and/or modified sequence
atggctctgagcttcagtttactgatggccgtgcttgtcctgagttataaaagtatatgctctcttggatgcgatctgccacaaacccatagcctcgggaaccgccgagccctgatcctcttagcgcaaatgggacgcatctctccattcagctgtctcaaggacagacacgacttcggattcccccaggaggagttcgatggcaaccaatttcagaaagcccaggccatctccgtattacatgaaatgattcaacaaacgttcaatctcttcagtaccaaggattccagcgccacctgggagcaatccttgctggagaagttttccaccgaacttaatcaacagctaaacgacctggaggcctgcgtcatccaggaggtgggagttgaggaaaccccacttatgaatgtggattctatcctggcggtcaaaaagtactttcaaagaataaccttgtacctgaccgagaaaaaatattcgccttgtgcttgggaggtggtccgcgcagagatcatgcgctccttcagcctgagcaaaatatttcaggagcgcctccggcggaaagaatag

SEQ ID NO: 126132 - DNA, 570 bp, Artificial Sequence
  derived and/or modified sequence
atggccctgtccttcagcctgctgatggctgtgctggtgctgagctacaagagcatctgcagcctgggctgtgacctgccccagacccacagcctgggcaacagaagagccctgatcctgctggcccagatgggccgcatcagccccttcagctgcctgaaggacagacatgactttggcttcccccaggaggagtttgatggcaaccagttccagaaggcccaggccatctctgtgctgcacgagatgatccagcagaccttcaacctcttcagcaccaaggacagcagcgccacctgggagcagagcctgctggagaagttcagcacagagctgaaccagcagctgaatgacctggaggcctgcgtcatccaggaggtgggcgtggaggagacccccctgatgaatgtggacagcatcctggccgtgaagaagtacttccagaggatcaccctgtacctgacagagaagaagtacagcccctgtgcctgggaggtggtgcgggcagagatcatgaggagcttcagcctgagcaagatcttccaggagcggctgcggaggaaggagtag

SEQ ID NO: 126133 - DNA, 570 bp, Artificial Sequence
  derived and/or modified sequence
atggccctgagcttcagcctgctgatggccgtgctggtgctgagctataaatctatctgctctctgggttgcgacctgccccagacacacagtttggggaacaggagggcccttattctgcttgcccaaatgggccgaatatccccattcagctgccttaaagaccgtcacgattttggatttccccaggaggagttcgacggtaaccagttccagaaagcccaggcaatcagcgtcctgcacgagatgattcagcagacatttaacctgttttcaaccaaggactccagcgcgacctgggagcagtcactcttagagaagttttccaccgaattgaaccagcagttgaatgacctggaagcctgtgtgattcaggaggtgggcgtcgaagagacccccctgatgaatgttgattctatcctagcagtgaaaaaatatttccagagaatcacgctgtatctgaccgaaaagaagtattcaccatgcgcatgggaagtagtccgggccgagattatgcgttctttcagtctctccaaaattttccaagagagattaagaagaaaagaatag

SEQ ID NO: 126134 - DNA, 570 bp, Artificial Sequence
  derived and/or modified sequence
atggctctttccttttctcttttgatggccgtgctggtgctgagctataaaagcatttgcagcctgggatgtgacttaccacagactcatagtctcggcaataggcgggctctgattctcctcgctcagatgggtcgcatcagtcccttttcctgcttgaaggatcggcacgactttggctttccccaggaagagtttgacggcaatcagttccagaaagcacaagcaatatccgtgctacacgagatgattcagcagacatttaatctcttcagtacaaaagattctagcgccacgtgggagcaaagtctccttgagaaatttagtacggaactcaaccagcagctgaacgatctggaggcctgcgtcatccaagaggttggtgtggaagaaaccccattaatgaatgttgatagtattcttgcagtgaaaaaatatttccagcgcattaccctatatttgactgagaaaaaatattccccatgcgcttgggaagtcgtgagggccgagattatgcggagcttttcactctctaaaatttttcaggagcggcttcgacgcaaagagtag

SEQ ID NO: 126135 - DNA, 1024 bp, Artificial Sequence
  derived and/or modified sequence
ttcaaggttacccatctcaagtagcctagcaatattggcaacatcccaatggccctgtccttttctttactgatggccgtgctggtgctcagctacaaatccatctgttctctgggctgtgatctgcctcagacccacagcctgggtaataggagggccttgatactcctggcacaaatgggaagaatctctcctttctcctgcctgaaggacagacatgactttggattcccccaggaggagtttgatggcaaccagttccagaaggctcaagccatctctgtcctccatgagatgatccagcagaccttcaatctcttcagcacaaaggactcatctgctacttgggaacagagcctcctagaaaaattttccactgaacttaaccagcagctgaatgacctggaagcctgcgtgatacaggaggttggggtggaagagactcccctgatgaatgtggactccatcctggctgtgaagaaatacttccaaagaatcactctttatctgacagagaagaaatacagcccttgtgcctgggaggttgtcagagcagaaatcatgagatccttctctttatcaaaaatttttcaagaaagattaaggaggaaggaatgaaacctgtttcaacatggaaatgatctgtattgactaatacaccagtccacacttctatgacttctgccatttcaaagactcatttctcctataaccaccgcatgagttgaatcaaaattttcagatcttttcaggagtgtaaggaaacatcatgtttacctgtgcaggcactagtcctttacagatgaccatgctgatagatctaattatctatctattgaaatatttatttatttattagatttaaattatttttgtccatgtaatattatgtgtacttttacattgtgttatatcaaaatatgttatttatatttagtcaatatattattttctttttattaatttttactattaaaacttcttatattatttgtttattctttaataaagaaataccaagccc

SEQ ID NO: 126136 - DNA, 570 bp, Artificial Sequence
  derived and/or modified sequence
atggcattatctttttcccttctgatggccgttctcgtgctctcctataaatctatctgctctttaggttgcgaccttccccaaacgcatagccttggaaatagacgcgcactgatcctcttagcacagatgggcaggattagtccattcagctgcctgaaggaccggcacgatttcgggtttcctcaggaggagttcgacggcaatcagtttcagaaagcccaagcaataagtgttctccatgaaatgattcagcagacctttaacctctttagcacgaaggacagtagtgctacgtgggaacagtcactgctggaaaagttctccacagaactcaaccaacaactgaatgatttggaagcttgcgtgatccaagaagtaggagtggaggagaccccccttatgaatgtggactcaatactggcggtcaaaaaatactttcaacgcatcactctgtatctcacagaaaagaaatacagtccttgtgcctgggaggtcgtccgcgccgagatcatgaggtcatttagtctctccaaaatatttcaggaacgactgcgtcgcaaagaatag

SEQ ID NO: 126137 - DNA, 570 bp, Artificial Sequence
  derived and/or modified sequence
atggcccttagtttttctctcttaatggccgtgttggtgctcagctacaaaagtatctgctccctaggctgcgacctgccccaaactcattcgctcgggaaccggcgcgcattgattttactggctcaaatgggccgcatcagccctttctcttgcttgaaagaccggcatgatttcggatttccccaagaggaattcgacggaaaccaatttcagaaagctcaggccatttctgttcttcacgagatgatccaacaaacttttaaccttttcagtacgaaagactctagcgctacgtgggagcaaagcctcctggagaagttttccaccgaactgaaccaacaacttaacgacctcgaagcttgcgtaatccaggaagtgggtgttgaagagactccgctaatgaatgttgactcaatactggcagtaaaaaaatactttcagaggatcactttgtacctgaccgaaaaaaaatattccccctgcgcttgggaagtcgtcagagcagaaataatgcggagctttagtctgtccaagatattccaagagagacttaggcgcaaagaatag

SEQ ID NO: 126138 - RNA, 570 nt, Artificial Sequence
  derived and/or modified sequence
auggcauuaucuuuuucccuucugauggccguucucgugcucuccuauaaaucuaucugcucuuuagguugcgaccuuccccaaacgcauagccuuggaaauagacgcgcacugauccucuuagcacagaugggcaggauuaguccauucagcugccugaaggaccggcacgauuucggguuuccucaggaggaguucgacggcaaucaguuucagaaagcccaagcaauaaguguucuccaugaaaugauucagcagaccuuuaaccucuuuagcacgaaggacaguagugcuacgugggaacagucacugcuggaaaaguucuccacagaacucaaccaacaacugaaugauuuggaagcuugcgugauccaagaaguaggaguggaggagaccccccuuaugaauguggacucaauacuggcggucaaaaaauacuuucaacgcaucacucuguaucucacagaaaagaaauacaguccuugugccugggaggucguccgcgccgagaucaugaggucauuuagucucuccaaaauauuucaggaacgacugcgucgcaaagaauag

SEQ ID NO: 126139 - RNA, 570 nt, Artificial Sequence
  derived and/or modified sequence
auggcccuuaguuuuucucucuuaauggccguguuggugcucagcuacaaaaguaucugcucccuaggcugcgaccugccccaaacucauucgcucgggaaccggcgcgcauugauuuuacuggcucaaaugggccgcaucagcccuuucucuugcuugaaagaccggcaugauuucggauuuccccaagaggaauucgacggaaaccaauuucagaaagcucaggccauuucuguucuucacgagaugauccaacaaacuuuuaaccuuuucaguacgaaagacucuagcgcuacgugggagcaaagccuccuggagaaguuuuccaccgaacugaaccaacaacuuaacgaccucgaagcuugcguaauccaggaaguggguguugaagagacuccgcuaaugaauguugacucaauacuggcaguaaaaaaauacuuucagaggaucacuuuguaccugaccgaaaaaaaauauucccccugcgcuugggaagucgucagagcagaaauaaugcggagcuuuagucuguccaagauauuccaagagagacuuaggcgcaaagaauag

SEQ ID NO: 126140 - protein, 187 aa, Artificial Sequence
  derived and/or modified sequence
MTNKCLLQIALLLCFSTTALSMSYNLLGFLQRSSNFQCQKLLWQLNGRLEYCLKDRMNFDIPEEIKQLQQFQKEDAALTIYEMLQNIFAIFRQDSSSTGWNETIVENLLANVYHQINHLKTVLEEKLEKEDFTRGKLMSSLHLKRYYGRILHYLKAKEYSHCAWTIVRVEILRNFYFINRLTGYLRN

SEQ ID NO: 126141 - DNA, 561 bp, Artificial Sequence
  derived and/or modified sequence
atgaccaataagtgcttgctccagatcgccctcctgctctgcttttccactactgcactgagcatgtcgtacaatctcctgggcttcctccagcgttcatcgaacttccagtgtcagaagctgctgtggcaactgaatggtcgacttgaatactgccttaaagatcgcatgaacttcgacatcccggaggagatcaagcaattgcagcagttccaaaaggaggatgcggccttgacgatctatgaaatgttgcaaaacatctttgcaatcttccgccaggactcatctagcaccggatggaacgagactatagtcgaaaatcttctggctaacgtgtaccatcagatcaatcatctgaaaactgtccttgaggaaaagctggagaaggaagatttcactcgcggaaaactcatgtccagcttgcacctcaaacggtactacgggcgcattttgcactacctcaaggccaaggaatactcgcactgcgcgtggaccatcgtgcgggtggaaatcctgcgtaacttctactttatcaataggttgaccggttatctgcgcaac

SEQ ID NO: 126142 - DNA, 561 bp, Artificial Sequence
  derived and/or modified sequence
atgaccaataagtgccttctacagattgcactcttactgtgcttttccacaacagccctgtcaatgtcctataatctgctggggtttctacagcggagcagcaatttccagtgccagaaattgctgtggcagctcaatggccgcttggaatattgtttaaaggataggatgaactttgacattccagaggagataaagcagctgcaacagttccagaaagaagacgccgccttaacaatatacgaaatgcttcagaatatttttgctatattcaggcaggactcaagctccacgggttggaacgagacgatcgtggaaaacctacttgccaacgtatatcatcaaatcaatcacctgaagaccgtacttgaggaaaagctggagaaggaggattttactcggggaaaactcatgagttcactgcatctgaaacggtactatggacggatcctgcattacctgaaggctaaggagtacagccattgcgcttggactatcgttcgggtggagatccttagaaacttctacttcattaatcgcctgaccgggtacttgcggaat

SEQ ID NO: 126143 - DNA, 561 bp, Artificial Sequence
  derived and/or modified sequence
atgactaacaagtgccttcttcaaattgcactcttgctgtgcttctcaaccaccgcgctgtccatgtcctacaaccttcttggatttctccagaggtcgagcaactttcaatgtcagaaattgctttggcaactcaatggacggctggaatactgtcttaaggatcgtatgaactttgatatcccggaagagattaaacaactgcaacagtttcagaaggaggacgcagcacttactatctacgaaatgcttcagaatatcttcgcaatctttcggcaggacagcagctcaacggggtggaacgagactatagttgagaacctcctggccaatgtgtaccaccagattaaccacctcaagacggtgcttgaagagaagctggaaaaggaggactttactcgaggtaaacttatgtcatcgctgcatcttaagcggtattacggaagaatccttcactaccttaaggctaaagaatacagccactgtgcatggactatcgtgagagtggaaatactgcggaatttctacttcatcaaccgcctcactggctacctgcgtaat

SEQ ID NO: 126144 - DNA, 561 bp, Artificial Sequence
  derived and/or modified sequence
atgaccaacaaatgcctgctgcagattgccttactcttatgtttcagcacaaccgctctatccatgtcctataacctcctgggcttcctacagcgctcaagcaatttccagtgccagaagttactctggcagctcaatggaagattggaatactgtctgaaagaccgaatgaactttgacatcccagaggagatcaagcagttacagcagttccagaaggaggacgctgcactcactatctatgaaatgctccagaacattttcgccatctttcgccaggacagctctagcaccgggtggaatgagacaatcgtagaaaatttgctggcgaatgtgtaccaccagattaaccacctgaagaccgtgctcgaagaaaaactggaaaaggaggacttcacacgcggtaagttgatgagttccctgcatctgaagaggtactacggccgcattttgcactatctgaaggcaaaagagtattctcattgcgcttggaccatcgtgcgagttgaaatactgcgaaatttttatttcataaaccggctgactggttatctgcgcaat

SEQ ID NO: 126145 - DNA, 561 bp, Artificial Sequence
  derived and/or modified sequence
atgaccaacaagtgtctgcttcagatcgccttgcttttgtgtttttcaaccactgcgctgtccatgtcatacaatctcctgggttttctgcagagatcttcgaactttcaatgccaaaaacttctctggcagctgaacggtagacttgagtactgccttaaggataggatgaatttcgatatccccgaggagataaagcaacttcagcagttccaaaaggaagatgcagctctgaccatatacgagatgctccaaaacatctttgccatttttcgccaggactcgtcatccactggatggaatgaaaccattgtcgaaaacctgcttgctaatgtctaccatcagataaaccatcttaaaaccgttcttgaagaaaaactcgaaaaggaggatttcacccgcggaaagttgatgtcctccctgcatcttaagcggtactatggaaggattttgcactaccttaaggccaaggaatactcccactgtgcatggactatcgtgcgcgtcgaaatactgcggaacttctacttcatcaacagacttaccggatatcttcggaac

SEQ ID NO: 126146 - DNA, 561 bp, Artificial Sequence
  derived and/or modified sequence
atgacgaacaagtgccttcttcagattgctctgcttctgtgcttttcaaccactgccctctcgatgtcctacaatctccttgggtttctgcaacggtcaagtaactttcaatgtcagaaacttctctggcaactgaatggccggcttgaatactgtctgaaggatcggatgaatttcgacattcccgaagagattaagcagctccagcagtttcagaaggaagatgcggcactgactatttacgagatgcttcagaacatcttcgccatttttcgccaagatagctcctctactgggtggaacgaaaccattgtcgagaacctgcttgcaaacgtgtaccatcagattaaccatcttaagactgtgttggaagagaagctggagaaagaagatttcaccagaggaaagctcatgtcatcgttgcaccttaagaggtactacggcagaattcttcattaccttaaggcaaaagaatactcgcactgtgcctggacgattgtgagagtggagattcttaggaacttttacttcataaaccgactgaccgggtatctccgcaac

SEQ ID NO: 126147 - DNA, 561 bp, Artificial Sequence
  derived and/or modified sequence
atgaccaacaaatgtctgctccaaattgcactgctgctgtgtttcagcactaccgcactgtccatgtcctacaacttgcttggattccttcaacgctcgagcaacttccaatgtcagaaactgctctggcaacttaatggtcgactggagtactgcctgaaagaccgaatgaacttcgatattccagaggagattaagcaactgcagcaatttcagaaggaggacgcagcactcaccatttacgagatgctgcagaacatattcgcaatctttcggcaagattcgtcatccactggatggaacgaaaccatcgtggaaaaccttctcgcaaacgtctaccatcagattaaccaccttaagacggtgctggaggaaaagctggaaaaagaggattttacgcgcggaaagttgatgtcgagcctgcacctgaagcgatactacggccgcatcctccattacctcaaggcaaaggagtactcacattgcgcatggactatcgtgagggtggaaattctgagaaatttctatttcattaatcgcctgactggataccttaggaac

SEQ ID NO: 126148 - DNA, 561 bp, Artificial Sequence
  derived and/or modified sequence
atgaccaacaagtgtcttctccagattgctctgttgctctgcttctctacaaccgcattaagcatgtcctataatctcctgggcttccttcagcggtcttctaactttcagtgccaaaaactgctctggcaattgaacgggcgacttgagtactgtctcaaggataggatgaatttcgacattcccgaagagattaaacaattgcaacagtttcagaaagaagatgctgctctgaccatatacgagatgttgcagaacatcttcgctatctttcgccaagacagtagctccaccggctggaatgagaccattgtggagaatctgttggccaacgtctaccaccagatcaaccacttgaaaactgtgctcgaagagaagctggaaaaggaggactttacacggggcaagctcatgagttcactgcacctgaaaagatactacgggcggatccttcattacctgaaagccaaagagtactctcactgtgcttggaccattgtccgcgtagaaattttgagaaacttctacttcatcaatcgcctcacaggctaccttagaaac

SEQ ID NO: 126149 - DNA, 561 bp, Artificial Sequence
  derived and/or modified sequence
atgacgaataagtgcctgcttcagattgcactgctgctttgcttttccaccactgcactttcgatgagctacaacttgttggggtttctgcagaggagttctaacttccagtgccagaaactgctttggcagcttaacggacgcctcgaatactgcttgaaggacagaatgaacttcgatattccagaggagattaagcaactccagcagttccaaaaagaagatgccgccctcactatctatgagatgctgcaaaacattttcgcgatctttcggcaagacagctcctcgacgggctggaacgaaaccatcgtggaaaatctgctcgccaacgtgtatcaccagatcaatcatcttaagaccgtcctcgaagaaaagctggagaaggaggatttcaccagaggtaaattgatgtcctcgctgcatctgaaacgctattacggacgcatcctgcactaccttaaagctaaggagtacagccactgtgcatggaccatagtgcgcgtggaaatcctgcggaacttctactttatcaataggttgaccggatacctgcgcaat

SEQ ID NO: 126150 - DNA, 561 bp, Artificial Sequence
  derived and/or modified sequence
atgaccaacaaatgcctgctgcaaatcgccctgctgctgtgcttctccactaccgcactttcgatgtcgtacaatttgctggggttcctgcagcgcagcagcaacttccagtgccagaagttgttgtggcagctgaatggtcggctggagtactgcctcaaggacaggatgaacttcgatatccctgaagaaatcaaacagctgcaacagttccagaaggaggacgccgctctgaccatctacgaaatgctgcagaacatctttgcgatctttcgacaggactcgtcctcgacgggctggaacgaaaccatcgtggaaaacctcctcgccaatgtttaccaccaaatcaatcacctcaaaaccgtgctcgaagagaagctcgagaaagaagatttcacgcggggaaaactgatgtcctcgctccacctgaagcgatactacggacgcatcttgcactaccttaaggccaaggagtacagccattgcgcctggactatcgtccgggtggagattctgcgcaacttctacttcatcaaccgtctgaccggatacctgaggaac

SEQ ID NO: 126151 - DNA, 561 bp, Artificial Sequence
  derived and/or modified sequence
atgacaaataaatgcttgttgcaaattgctttattactgtgtttttcaacaacggctttgagtatgagttacaatttgctaggatttctacaacgatcctctaatttccaatgtcaaaagttactctggcagctcaatggacgactggaatattgtctaaaagaccggatgaattttgacattcccgaagaaatcaagcagttacaacagtttcaaaaagaggacgctgccctcacaatttatgaaatgttacagaatatctttgccatttttcggcaggactcatcttcaaccggatggaatgagactattgtcgagaatcttttggctaatgtctaccatcaaattaatcatcttaaaactgttcttgaagaaaaattggagaaagaggattttacaagaggaaaactgatgtcaagcttacatttgaagagatactacggccgtatcttacattacctcaaagccaaagaatattctcattgtgcatggactatagtgagagtagagatcctccgcaacttctattttataaaccgactgacggggtacttacgcaat

SEQ ID NO: 126152 - DNA, 561 bp, Artificial Sequence
  derived and/or modified sequence
atgaccaacaaatgtctcctccagatcgccctgctgctgtgcttcagcactaccgcactttccatgtcatataaccttcttggattcctgcaacgttcatcaaacttccagtgccagaagttgctctggcagctgaatggacgactggaatactgcctgaaggaccgcatgaacttcgatataccagaagaaatcaagcagctccaacagtttcagaaggaggacgccgctttgaccatttacgagatgctccaaaacatctttgcaatctttaggcaagactcgtcgtcgacgggctggaacgagactattgtggaaaaccttttggcaaacgtctaccatcagattaatcatttgaaaaccgtcttggaggaaaaacttgaaaaggaggattttacccgtggaaaacttatgtcgtccctgcacctcaaacggtactacggcagaatcctgcactaccttaaagccaaagaatactctcattgcgcttggaccatcgtgcgcgtggagattcttcgcaacttttacttcattaaccgccttacggggtacctccgtaat

SEQ ID NO: 126153 - DNA, 561 bp, Artificial Sequence
  derived and/or modified sequence
atgactaacaagtgtctactgcagatagctcttctgctctgtttcagcaccaccgccttgagcatgagctacaatttactgggcttcctgcaacgtagctccaattttcagtgccagaagctgctttggcagctgaacggccggctggagtattgtctgaaggacagaatgaatttcgatattcctgaagaaatcaagcagttacagcagttccagaaagaagacgcagctctgaccatctatgagatgctccaaaacatttttgcaattttccggcaggactcttctagcactgggtggaacgagactattgtggaaaacctgctggccaacgtatatcaccaaataaaccatctgaaaacagtgctagaggaaaaacttgaaaaagaggacttcacaaggggcaaattaatgtcttccctccacctgaagcgctactacggccgaattctccactatctgaaggctaaggagtactctcactgcgcctggacaattgtgcgggtggagatcctgagaaacttctattttatcaaccgcttaacagggtacctgagaaac

SEQ ID NO: 126154 - DNA, 561 bp, Artificial Sequence
  derived and/or modified sequence
atgaccaacaagtgtctcctccagatcgccctgctgttatgcttctccacgaccgcactctccatgtcctacaacctgttggggtttttgcagagatcctccaatttccagtgtcagaagctgctgtggcagctgaacgggcgcctcgaatactgtctgaaagacagaatgaatttcgatatacccgaagagattaagcagttgcagcaattccagaaggaggacgcagctttgacgatctatgagatgctgcagaacatcttcgctatcttccgacaggatagctccagcaccgggtggaatgaaacaatcgtggaaaatctcctggcaaatgtctaccatcagataaaccacctaaagacggtgctcgaagagaagctggaaaaggaggactttacgaggggcaaactgatgagctcccttcacctgaaacggtactacgggagaattctgcactacctgaaggccaaggagtactcccattgcgcctggacgattgtgcgcgtggaaatcctgcgaaatttttatttcatcaatcgcctgactggctacctgaggaat

SEQ ID NO: 126155 - DNA, 561 bp, Artificial Sequence
  derived and/or modified sequence
atgactaataagtgtctcctacagattgccttgcttctttgtttcagtactactgccctgtcaatgtcgtataatctcctaggctttcttcaaaggagttccaacttccagtgccagaagctgttgtggcagctgaatggtaggctggaatactgcctgaaggaccggatgaattttgacattccagaggagatcaagcagctgcagcaattccagaaggaggacgccgccctgactatctacgagatgctacagaacatcttcgctatattcaggcaggactcctcaagcaccggctggaatgaaacaatcgtggaaaacctgctggcaaatgtataccatcagatcaaccatctgaagacagtccttgaggagaaacttgagaaggaggacttcacgcgcggtaagctgatgtcctcccttcacctgaagagatattatggccggattctgcattacttgaaggctaaggagtactcacactgcgcctggacaatcgtgagagtggagatattgcgcaatttttacttcatcaatcgcctgaccggttacctccgtaac

SEQ ID NO: 126156 - DNA, 561 bp, Artificial Sequence
  derived and/or modified sequence
atgactaataaatgtctcctccagatagctttgctcttatgcttctctactacagcactcagtatgagttacaatctcctcgggttcctccagagatcatctaatttccaatgtcagaaactgctctggcagctcaatggacggctcgaatactgtcttaaagatcggatgaattttgatattcctgaagaaataaaacagctccagcagttccagaaagaagatgctgctctcactatttacgaaatgttacagaacattttcgctattttcaggcaggactcttctagtacgggatggaatgagacgatcgtggaaaaccttttggccaacgtgtatcaccagataaatcatctcaaaacagtgctcgaggaaaaacttgaaaaagaagattttacacgagggaaactcatgtcttcactccacctaaagaggtattatgggcgaatattgcactacctcaaagctaaagaatattctcattgcgcctggactatagtgagagtagaaattctccgaaatttttattttataaataggttaactgggtatctccgaaat

SEQ ID NO: 126157 - DNA, 561 bp, Artificial Sequence
  derived and/or modified sequence
atgacgaacaagtgcttgctgcagatcgccctcctcctgtgcttctctaccactgccctgagcatgtcctataatttgctgggttttctgcagagatcttctaatttccagtgccagaagttgctgtggcaattgaacggacggttggagtattgcttgaaggaccgcatgaactttgatattcctgaggagatcaaacagctccagcagtttcagaaggaggatgccgcattgacaatctatgagatgctacaaaatatttttgctatttttcgacaggactctagctccactggatggaacgagacgatagttgagaacctgctggccaatgtataccaccaaatcaaccacctgaaaacggttttagaagagaaactagagaaggaagatttcacccgtggcaaactcatgtcgtccctgcacctgaagcggtactatgggcgaatccttcattacctcaaagcgaaggagtattcgcactgcgcctggacaatcgttcgagtggaaatcctgagaaacttctactttatcaaccggctcactggctatttacgcaat

SEQ ID NO: 126158 - DNA, 561 bp, Artificial Sequence
  derived and/or modified sequence
atgacaaataaatgtcttttacagatcgctctgttgctttgcttctcgacaacagcactgtccatgtcgtacaacctgttggggttcctccagagatctagtaattttcagtgtcaaaaactattatggcagctgaatgggcggcttgaatattgtttgaaagatagaatgaatttcgatatacctgaagaaatcaaacagttacagcagtttcagaaggaagatgccgccctgactatctatgagatgttgcagaacatctttgcgattttccgccaggattcctcttctacagggtggaatgagacaatagtagaaaatctcttagccaacgtgtatcaccagataaaccacttaaaaacagtgctggaagaaaaacttgaaaaagaagatttcacacgaggaaaactcatgtcctctctccatctgaaaaggtattatggacgcatacttcactatcttaaagcaaaggaatattcgcattgtgcctggacgatcgtgagagtagaaatactcaggaatttctattttatcaatcgactaacagggtatcttcgcaac

SEQ ID NO: 126159 - DNA, 561 bp, Artificial Sequence
  derived and/or modified sequence
atgactaataagtgtctgctgcaaatcgcactcctgctgtgcttctcgaccacggcgctgtccatgtcctacaatctgcttggcttcttgcagcgcagctccaattttcagtgccagaagttgttgtggcagctcaacggacgcctggagtactgtctgaaagaccgcatgaattttgatatcccagaagagattaagcagttgcagcaattccagaaggaggacgctgctctcacgatctacgagatgcttcaaaacatcttcgcaatcttccgccaagactccagcagcactggttggaacgagactatcgtggagaatctcctcgccaacgtgtatcaccaaatcaaccatctgaaaaccgtgcttgaggaaaaactggaaaaggaggatttcacccggggaaaactcatgtcaagcctccacctgaagagatactacggccggattctccactacttgaaggcgaaggaatactcccactgcgcatggactattgtgagagtcgaaatcctgcggaacttctacttcattaatcgcctgaccggatacctccgcaat

SEQ ID NO: 126160 - DNA, 561 bp, Artificial Sequence
  derived and/or modified sequence
atgactaacaaatgccttctgcagatcgcactgctcctttgtttttctaccaccgcactctcaatgagctacaatctgctgggctttcttcaaagatcctccaatttccagtgtcaaaaacttctttggcagcttaacggacgcctggaatactgcctcaaggatcgcatgaacttcgacattcctgaagagatcaagcagctccagcaattccaaaaggaggacgcggcactcaccatctacgaaatgctgcaaaacatcttcgcaatcttcaggcaagattcgtccagcacgggatggaatgaaaccatcgtcgagaaccttcttgctaacgtgtatcaccagattaatcatcttaagacggtgcttgaggaaaagctcgaaaaggaagatttcacccgtggtaagctgatgtcatcccttcacctgaagaggtactacggccgcattttgcactatcttaaggcaaaggaatactcgcactgcgcctggactattgtgcgggtggaaatcctccgcaacttctacttcatcaatagactgaccggataccttagaaac

SEQ ID NO: 126161 - DNA, 561 bp, Artificial Sequence
  derived and/or modified sequence
atgaccaacaagtgtctgctccaaatcgcactcctcctgtgtttttccactaccgcgctgtccatgtcgtacaacctcttgggctttttgcaacggtcgagcaatttccaatgccagaaactgctgtggcagcttaacgggcgactcgaatactgtctcaaggatagaatgaactttgatattcctgaagagattaagcaactgcagcaatttcagaaggaggacgcagcactcacgatttacgaaatgcttcaaaacatatttgccatcttccgccaagactcctcatcgactggttggaacgaaaccattgtcgagaaccttttggcaaatgtttaccatcagattaatcatctcaaaactgtgctggaagaaaagctggagaaggaagattttaccaggggaaaattgatgtcaagcctgcaccttaaacgttactacggacgaattttgcattatcttaaggccaaggaatacagtcactgcgcctggaccatcgtaagagtggagatactgaggaatttctacttcattaatcggcttactggttacctgaggaac

SEQ ID NO: 126162 - DNA, 561 bp, Artificial Sequence
  derived and/or modified sequence
atgaccaataagtgcctcttgcagatcgcccttctgctctgtttctcaacgaccgccttgtcgatgtcttataacctcctgggatttctgcaaaggagctcaaatttccagtgtcagaagctgctgtggcagttgaacggcagattggaatactgcctcaaagacaggatgaatttcgacatcccagaggaaatcaagcagctgcaacaattccaaaaggaggacgctgcactgaccatttacgaaatgctgcagaacatctttgcgatcttccgccaggactcctcctccaccggttggaatgaaactatcgtggaaaacctgcttgccaatgtctaccaccagatcaaccatctcaagaccgtcctcgaggaaaagctggagaaggaggacttcactcgcggcaaattgatgtcctcgctgcaccttaagaggtactacggacgtatcctgcattacctgaaggcgaaggaatattcccattgtgcgtggactatcgtgcgggtcgagatcctgcggaacttttacttcatcaatcgcctgaccgggtacctccggaac

SEQ ID NO: 126163 - DNA, 561 bp, Artificial Sequence
  derived and/or modified sequence
atgactaataaatgtcttcttcaaattgctttattattatgtttttcaactacagcacttagtatgtcatataatcttttaggttttttacaaagatcatctaattttcaatgtcaaaagttattatggcaattaaatggaagacttgaatattgccttaaggatagaatgaattttgatatacctgaagaaataaaacaacttcaacaattccaaaaagaagatgcagctttaacaatttatgaaatgttacaaaatatttttgctattttcagacaagatagttctagtacaggatggaatgaaactattgtagaaaacttactagcaaatgtatatcatcaaattaatcatcttaaaactgttcttgaagaaaaattagaaaaagaagatttcactagaggtaaattaatgtcttcattacatttaaaaagatattacggaagaatcttacattatttaaaggcaaaagagtattcacattgtgcctggactatcgtaagagttgaaattctaagaaatttttattttattaatagattgacaggatatttaaggaat

SEQ ID NO: 126164 - DNA, 561 bp, Artificial Sequence
  derived and/or modified sequence
atgacgaataagtgcttattgcagattgccttgcttctctgcttttctacgaccgccttatcgatgtcatataatctgttgggctttctccagcgttccagcaactttcagtgccagaagctcttgtggcagcttaacgggagactggaatactgtctgaaagatagaatgaattttgacatcccagaggagattaagcagctgcaacagttccagaaggaggatgccgcattaacaatttacgaaatgttacagaatatttttgctatttttaggcaggactcctcaagtactggatggaatgaaaccattgtggagaatctcttagccaacgtctatcatcagattaaccacctaaagacggtactcgaggaaaaattggagaaagaggacttcacacgtggaaaactgatgagctctttacaccttaaaaggtattacggaaggatactgcactacctcaaggcaaaagaatatagccactgcgcctggaccatcgtgagagtggaaatcctgcgcaacttttattttataaatcgcctgacaggctatttgcgcaat

SEQ ID NO: 126165 - DNA, 561 bp, Artificial Sequence
  derived and/or modified sequence
atgaccaataaatgccttcttcagatcgcccttctgctctgttttagcacaaccgcactgagcatgtcctacaatctgctgggtttcttacaaaggagcagcaacttccaatgccagaagctgctctggcaactcaatggtagacttgaatactgcctgaaggataggatgaattttgatattcccgaggaaattaagcaattgcagcagttccaaaaagaagatgcagcacttaccatctacgagatgctgcaaaacatatttgcgatctttagacaagattcctccagtacaggatggaatgaaactatcgttgaaaatcttcttgcaaacgtctaccaccaaattaaccatctcaagacagtgctggaggagaaactggagaaagaggattttactcgggggaagctgatgagttcactccatctgaaaagatactatgggcggatcttgcactatctgaaggcaaaggaatatagccattgtgcctggaccattgtccgcgtggaaatcctcagaaacttctacttcatcaacaggctgacagggtacctgcgcaac

SEQ ID NO: 126166 - DNA, 561 bp, Artificial Sequence
  derived and/or modified sequence
atgaccaataagtgcctgctgcagatcgccctgcttctgtgcttttctaccactgctctctcaatgtcctataatctgctcggattcctgcaacggtcgtccaatttccagtgccagaaactgctttggcaacttaacgggcgcctggaatactgcctcaaggataggatgaactttgacattccagaggagatcaaacagttgcagcagtttcaaaaggaggacgcggctcttaccatctacgaaatgctccagaacatcttcgcgatcttccggcaagactcgagctccaccggatggaacgagactatagtggagaatctgttggcaaacgtgtaccaccagattaaccatctgaaaaccgtcttggaagaaaagctcgagaaggaagatttcactagaggcaagctcatgtcatcgctccaccttaaacgctactacggtagaatcttgcattacctcaaggccaaggaatacagccactgtgcctggactatcgtgagagtcgaaatccttcgcaatttctacttcataaaccgactgacgggatacctccgaaac

SEQ ID NO: 126167 - DNA, 561 bp, Artificial Sequence
  derived and/or modified sequence
atgacgaataagtgccttttgcaaatcgccctgttgctatgctttagtaccacggccctgagtatgagctacaacctgctcgggttcctgcagcgcagttcgaacttccagtgccagaagctgctgtggcaactaaatggccgattggaatactgtctgaaggatagaatgaattttgatatccccgaagagatcaaacaactgcagcaattccagaaggaggacgctgctttaaccatctacgagatgctgcaaaatatctttgcaattttcaggcaggatagttccagcaccggatggaatgagacaattgtggagaatctgctcgcgaacgtgtaccaccagatcaaccaccttaagacagtactggaggagaaactagagaaggaggactttacacggggcaaactgatgtcgtcccttcatcttaaacggtactacggacgcatactccactatttgaaggctaaggaatacagtcactgcgcctggaccatcgtgcgtgtggaaatccttcgtaatttttactttataaacaggcttacaggatacctccggaac

SEQ ID NO: 126168 - DNA, 561 bp, Artificial Sequence
  derived and/or modified sequence
atgacaaacaagtgtctgctgcagattgccctcttgctgtgcttcagcactacggccttgtccatgtcttataatcttctggggtttctgcaaaggtcaagtaatttccagtgtcagaagctgctctggcagctgaatggaagactcgagtactgtctcaaagacagaatgaatttcgatattccagaagaaatcaagcagttgcagcaattccagaaggaggacgccgcacttaccatttatgaaatgcttcagaatatcttcgctatctttaggcaggactcttcctctaccggatggaacgaaacaattgtcgaaaatctgctggctaacgtctaccaccagatcaatcacctgaaaaccgtgcttgaggagaaactcgagaaggaggacttcacgagggggaaactgatgtcttcactccacctgaagcggtactacggccgcatactgcattacctcaaggctaaagagtactcacactgtgcttggacaattgtgcgggtagaaatactcaggaacttctacttcatcaaccggcttacaggatacctgcgcaac

SEQ ID NO: 126169 - DNA, 561 bp, Artificial Sequence
  derived and/or modified sequence
atgaccaataagtgtctgctccagatcgcactcctcctgtgcttttccactactgcactgtctatgagctacaacttgctgggattcctgcagcgctcgagcaattttcaatgtcagaagctcctttggcagctgaatggacgcctggaatattgtctgaaggaccgcatgaacttcgatatcccggaagaaatcaagcaattgcaacagtttcaaaaggaagatgctgccctgactatctacgagatgctgcaaaacatctttgctatctttcgacaggactcctcctccacggggtggaacgaaactattgtggaaaatctgctggccaatgtgtaccatcaaatcaaccacctcaagacggtgctggaagaaaaactggaaaaggaggatttcaccaggggaaaacttatgagctcactccatctgaaacggtactacggacggatcctgcattacctcaaagctaaagaatactcccattgcgcctggactatcgtccgcgtcgagatcctccgcaacttctacttcatcaacagactgaccggatacctccgcaac

SEQ ID NO: 126170 - DNA, 561 bp, Artificial Sequence
  derived and/or modified sequence
atgactaacaagtgtctgctgcagatagcacttctcctctgcttctctactacagcactcagtatgtcatacaatctgcttggctttctgcagcgatctagtaattttcagtgccagaaactgctctggcagttgaacggtcggctcgagtactgtctcaaagacagaatgaatttcgacatacccgaagagataaagcagttgcagcagtttcagaaggaagacgccgccctcaccatctacgaaatgctgcagaatatctttgcaatcttcagacaagattcttccagcaccggatggaatgagacaatagtggagaaccttctcgccaacgtctatcatcagataaaccacctcaaaaccgtgctggaggaaaaacttgagaaagaagacttcaccaggggtaaactcatgagcagtctgcatcttaaaagatattatggacggatactgcactatctgaaagcaaaagaatatagtcattgcgcatggaccattgttagagttgagattctgcgcaatttttattttattaatagactgaccggctacttgcgaaat

SEQ ID NO: 126171 - DNA, 561 bp, Artificial Sequence
  derived and/or modified sequence
atgacaaacaaatgcctgttgcagatcgctctgctgctatgttttagtactacagctttatccatgtcctacaatctcctcggcttcttacagcggtcttcaaattttcagtgccagaaactcctttggcaactgaatgggagacttgagtactgtcttaaagatcggatgaattttgatattccggaggagattaagcagctgcagcagttccaaaaagaggacgccgctcttacaatctacgaaatgctccaaaacatctttgccatcttccggcaggacagttccagcaccggttggaatgagacgatcgtagagaatttacttgccaatgtgtatcaccagattaatcacttgaaaaccgttttagaggaaaaactcgaaaaggaggacttcacgaggggcaagctcatgtcgagcctccacctcaagcgatattacggaagaatcctgcactacctgaaagccaaggagtatagccattgtgcgtggaccatcgtgcgggtggagattctcaggaacttttactttatcaaccggctcactggctatctgcgcaat

SEQ ID NO: 126172 - DNA, 561 bp, Artificial Sequence
  derived and/or modified sequence
atgactaataaatgtctattacagattgcgctgctgctatgcttttctaccacagcattgagtatgtcctataatctcttagggttcctacagcggtcctctaatttccagtgtcagaagctgctctggcagctgaacggccgccttgagtactgcctgaaagaccggatgaactttgacatacccgaagaaatcaagcagttacagcaattccagaaggaggacgctgccctgaccatctatgaaatgctacaaaatattttcgcgatcttccgccaggattctagctccaccggctggaatgaaaccatcgtggaaaaccttttggcaaacgtgtatcatcagatcaaccatctaaagactgtccttgaagaaaagcttgagaaggaggacttcactcggggaaaactaatgtcatcgctgcatctgaaacgatactacggtaggatcctgcattacctgaaagctaaggagtactcccactgtgcgtggacaattgttcgggtcgagatacttcgaaatttttactttatcaaccgtttgacaggctacctaagaaac

SEQ ID NO: 126173 - DNA, 561 bp, Artificial Sequence
  derived and/or modified sequence
atgacgaacaagtgtctgctccagatcgccctgctgctttgcttctccactacggcactcagcatgtcgtacaacttgctgggcttccttcagaggagctccaactttcaatgtcagaagctcctctggcaactcaacggtcggctggagtactgtctcaaggatcggatgaattttgacatccctgaagagataaaacagcttcagcagttccagaaggaagatgcggcccttaccatctacgaaatgcttcagaacatctttgcaattttccgacaggactcgtcatccaccggttggaatgaaactattgtggaaaaccttcttgcaaacgtgtaccatcaaatcaatcacctcaaaactgtgctcgaggaaaagttggaaaaagaagattttaccagagggaaactgatgagctcgctccatcttaaaaggtactacggaagaatccttcattacctgaaggccaaagaatacagccattgtgcatggactattgtgcgcgtggagattctccgaaacttctactttatcaataggctgaccggttacctgaggaac

SEQ ID NO: 126174 - DNA, 561 bp, Artificial Sequence
  derived and/or modified sequence
atgactaataagtgtctgctgcagatcgccttgctgctgtgcttctcgaccaccgccctcagcatgagctacaacctgctggggttcctgcaacgctcgtcgaatttccagtgtcaaaagttgctttggcagctcaatggccgcctcgaatactgcctgaaggatcggatgaactttgatatcccggaggaaatcaaacagctgcagcaatttcaaaaggaggatgccgcacttactatctatgagatgcttcagaacatcttcgctatcttcagacaggattcgtcgtcgactggatggaacgaaaccattgtggagaacctgcttgccaatgtctaccatcagatcaaccacctcaaaaccgtgctggaagagaaactggagaaggaagattttacgcgcggtaagctgatgtcgtccctgcacctcaagcggtactacggccgcatcctgcattacctgaaggccaaggagtactctcactgcgcctggaccattgtgagggtcgaaattctcagaaacttctacttcatcaatcgcctcacgggatacctgcgcaac

SEQ ID NO: 126175 - DNA, 561 bp, Artificial Sequence
  derived and/or modified sequence
atgactaataagtgcctgctccagatcgcgctcctgctgtgtttctcaaccactgcgctgtccatgtcctacaatctgctcggattcctgcagcgcagctcgaattttcaatgccagaagctgttgtggcaactgaacgggcgcctggaatactgcctgaaggacagaatgaattttgatattccggaagagattaagcaattgcagcaattccaaaaggaggatgccgccctgaccatctacgagatgctgcagaacatcttcgccatcttccgccaggatagctcctccacgggatggaacgaaactatcgtcgaaaatctcctcgccaatgtgtaccaccagatcaaccatctcaagactgtgctcgaggagaaactcgagaaggaagatttcacccggggcaaactgatgagcagtctccatctcaagcggtactacggacgcatcctgcactatctcaaggcgaaggaatactcgcactgcgcatggactatcgtgcgcgtggaaatcctgagaaatttctacttcatcaaccggctgaccggctacctgcggaac

SEQ ID NO: 126176 - DNA, 561 bp, Artificial Sequence
  derived and/or modified sequence
atgaccaataagtgcctgcttcagattgcgctgctcctctgtttctccactaccgcgctctcaatgagctacaacctgcttggatttctgcagcggtcatccaactttcagtgccaaaagctgctgtggcagctgaacgggcgcctcgagtactgcctgaaagatcggatgaatttcgacattcccgaagagataaagcaactccagcaatttcaaaaagaggacgccgccctgaccatttacgaaatgctccagaacatttttgcaatctttaggcaagattcgagctcaactggatggaacgaaactatcgtggaaaaccttctcgcaaatgtgtaccaccagataaatcatcttaagactgttcttgaagaaaagctggaaaaggaggacttcacgcggggtaagctgatgtcgtcccttcatctgaagcggtactacggacgcattttgcactacctgaaggcaaaagaatactcccattgtgcgtggactattgtgcgggtcgagattctgcgaaacttttacttcatcaacagacttaccggatatctgcggaac

SEQ ID NO: 126177 - DNA, 561 bp, Artificial Sequence
  derived and/or modified sequence
atgaccaataagtgcctactacagatcgccttgctgctatgtttttctacaacggcactgagcatgtcttataacctactcggtttcctgcaacgaagttctaatttccaatgccagaagttactgtggcagctgaacggacgcttggaatactgccttaaagacagaatgaattttgacatccctgaggagatcaaacagctgcagcagtttcagaaagaagatgcggcgttgacaatctacgagatgctgcagaatatttttgccatctttcgacaggattcttcctccaccggttggaatgaaaccatcgtggagaacttgttggctaatgtgtaccaccaaattaatcacctaaagacagtgttagaggaaaagctggagaaggaagattttacgcggggtaagttaatgtcaagcctgcatctcaagcgatattacggccgcattctgcattacctcaaagcgaaagagtactcccattgtgcttggacaattgtcagagttgagatcttgcgaaatttttacttcattaacagactgacaggatatctccgcaat

SEQ ID NO: 126178 - DNA, 561 bp, Artificial Sequence
  derived and/or modified sequence
atgaccaataaatgtcttctgcaaatcgcgctgctgctgtgtttcagcactactgcattgagtatgagctacaatttattaggcttccttcagaggtcttccaattttcagtgccagaaactgctttggcagctcaatggtcggctcgagtactgtctcaaggatcgtatgaactttgacatccccgaggagatcaagcaattacagcagtttcaaaaggaggatgccgcgctcaccatctatgagatgttgcagaatatcttcgccattttccgccaggactcgagttccacaggctggaatgagacaattgttgagaatcttctggcgaacgtgtaccaccaaatcaatcatcttaaaactgtgctggaggagaagctggagaaggaggacttcacgcgcggcaagctgatgagctcattgcacctgaaaagatactacggaaggatactgcactacctaaaggctaaagagtatagccactgtgcatggaccatagttcgcgtggagatcctgagaaatttctattttatcaaccggctgaccgggtatctgaggaat

SEQ ID NO: 126179 - DNA, 561 bp, Artificial Sequence
  derived and/or modified sequence
atgacaaacaagtgcctgctccaaattgccttactgttgtgctttagtaccacagccttgagcatgagttacaatctgctcggattcctgcagagatcttctaacttccagtgtcagaaactgctgtggcagttgaacggcagactggagtactgtcttaaggatcgtatgaactttgatatccccgaagaaattaaacagcttcaacaattccagaaagaagacgccgcccttacaatatatgagatgctgcagaatattttcgctatcttcaggcaggattcctcttctaccggctggaatgagaccatcgtcgaaaacctgcttgctaatgtctaccaccagatcaatcatctcaaaacggtcttagaggaaaagctggagaaagaagatttcaccaggggcaaactgatgagcagcctccacctgaagcgctactacgggagaattcttcactatctcaaagctaaagagtattcccattgcgcctggaccattgttagggtggaaatcttgagaaacttctactttattaaccgactaactggataccttcgaaat

SEQ ID NO: 126180 - DNA, 561 bp, Artificial Sequence
  derived and/or modified sequence
atgactaacaagtgcttgctgcaaattgcccttcttctctgcttttcaacaacggcactgtctatgagctataacctgctgggatttttacaaaggtccagcaacttccagtgccaaaaattactttggcagcttaatggaagattagaatactgcttgaaagacagaatgaattttgacattccagaggaaataaaacagctgcaacagttccaaaaggaggatgcggctttaacgatatacgaaatgcttcagaatatcttcgcgatcttcagacaggatagttcatcgacaggctggaacgagacaatcgttgaaaatctcttagcaaacgtttatcatcagattaatcaccttaaaacggtccttgaggagaaattagaaaaagaagatttcacccgtggcaaactgatgagctcgttgcatcttaaacgctattatggccggattcttcattatttgaaagctaaagaatattcacattgcgcatggacaattgttcgagttgagatcttacgcaacttttattttataaatcgtctgacaggctatttaagaaat

SEQ ID NO: 126181 - DNA, 561 bp, Artificial Sequence
  derived and/or modified sequence
atgacaaataaatgtctgctgcagattgcattgctgctgtgtttctctactaccgctttatcaatgtcctacaacttactcgggtttctgcagcggtcgtccaacttccagtgtcagaagttgctctggcagctgaacggaagattggagtactgtctgaaagatcgcatgaacttcgacattcctgaggaaattaagcagctgcagcagtttcagaaagaggacgcagctctgactatctacgaaatgttacagaacattttcgcgatcttccgtcaggactcaagctccactggttggaatgaaaccatcgtcgagaacctgctggctaacgtttatcaccagatcaatcacctgaagactgtactcgaggagaaactggagaaagaggattttaccagaggcaaactgatgtcatcactgcatctgaagcggtattacgggcggatattgcactatctcaaggcaaaggagtatagtcactgcgcttggacaattgtacgggttgagattctcagaaatttctatttcattaacaggctgaccggatatcttagaaat

SEQ ID NO: 126182 - DNA, 561 bp, Artificial Sequence
  derived and/or modified sequence
atgactaataagtgtctgctccagatcgccctgctactctgtttttccactacagcactcagcatgtcatacaatctcttaggattcctgcagagatctagcaatttccagtgtcaaaagctcttgtggcagttgaatgggcgactggagtattgcctgaaagacagaatgaacttcgatatcccagaagagatcaagcagctgcagcagtttcaaaaagaagacgctgccctgaccatttacgaaatgctgcagaacatctttgccatattcaggcaagactcctcatcaaccggttggaacgagaccattgttgaaaatcttctggccaatgtctatcaccagattaaccaccttaaaacagtgttggaagaaaagctggagaaggaggactttacacgaggcaagctcatgagctctctgcatctgaagagatattatggcaggatcttgcattatctgaaagctaaagagtattcacactgcgcatggacaattgtgagagtggaaatcctgcggaacttctacttcatcaatagactgaccggttatttgcgaaat

SEQ ID NO: 126183 - DNA, 561 bp, Artificial Sequence
  derived and/or modified sequence
atgactaacaagtgtctgctacaaatcgccctgctgctctgtttttccacaaccgcgctgagcatgagctacaacctcctggggtttctgcagcggagttccaatttccagtgtcaaaagttgctatggcaattgaatggcagactggagtattgtttgaaggacagaatgaacttcgatatcccagaggaaataaagcaactccagcagttccagaaagaagatgcagcccttacgatctacgagatgctgcagaacatctttgccatttttaggcaagactcctcctcaactgggtggaacgagaccattgttgagaacctgctggcaaacgtttaccaccagatcaatcacctaaaaactgtattggaggaaaagctagagaaggaagatttcacaaggggtaagctgatgtctagcctacatctcaaacgatattacggcaggatccttcattatcttaaggcaaaggaatacagccactgtgcgtggaccattgtgagagtggagatcctgcggaatttttacttcataaacaggctgactggttaccttaggaac

SEQ ID NO: 126184 - DNA, 561 bp, Artificial Sequence
  derived and/or modified sequence
atgactaataagtgccttcttcagattgctctcctgctttgtttttcgactactgcgctctcaatgtcttataacctgctggggtttttgcagcgcagcagcaattttcaatgccaaaaactgctttggcagcttaatggacgattggaatactgtctcaaggatcggatgaactttgacattccagaggaaatcaagcagttgcagcagtttcagaaagaggatgcagcattgaccatatacgagatgctgcaaaacatatttgcgattttccgacaagattcctcttcgaccggctggaacgagacgatcgtcgaaaaccttctcgctaatgtctaccaccaaatcaatcatcttaagaccgttcttgaagagaagctggaaaaggaggacttcacccggggcaaactgatgtcaagcctgcatcttaaacgctactatggtcgcatcttgcactacctcaaagccaaggaatactcgcattgtgcatggaccattgtgagggtggagattctgagaaatttctacttcataaacagactgacgggatacctccgtaac

SEQ ID NO: 126185 - DNA, 561 bp, Artificial Sequence
  derived and/or modified sequence
atgaccaacaaatgtctgctgcagatagccctcctgctgtgcttctctactactgcactgagcatgtcttacaaccttctgggtttcttgcagaggtccagtaacttccaatgccaaaagctgttgtggcagctgaatgggaggctcgagtattgtttgaaagataggatgaacttcgacatcccagaggagataaagcagcttcagcagtttcagaaagaggacgctgccctgacaatttacgagatgctgcagaatatcttcgctatcttccggcaagactcctcaagtacaggatggaacgagacaattgtggagaatctgctggcaaatgtgtatcaccaaattaatcatctgaaaacggtgctggaggagaagctggagaaggaggattttactcgcggtaaactcatgtccagtctccatttgaagcggtactacggccgcattctgcactacctcaaagctaaggagtactcccactgtgcctggacaatcgtgcgagtggagatactgaggaatttttattttataaaccggctgacagggtacctgagaaac

SEQ ID NO: 126186 - DNA, 561 bp, Artificial Sequence
  derived and/or modified sequence
atgacgaataaatgcctcctgcagattgctctcctgctgtgtttctcaacaactgccctgtcaatgagctacaatctgttggggttcctccagagatctagcaacttccagtgccagaagctgctttggcagctgaacggccgcctggagtattgtcttaaggatagaatgaatttcgacatccccgaggagatcaagcagctgcagcagttccaaaaagaggacgctgccctcaccatatatgagatgctgcaaaatatctttgcaatctttagacaggactcatcttctacggggtggaatgaaactatcgtggaaaatctgctcgccaatgtctatcaccagatcaatcatctcaaaactgtgttggaagagaagctcgaaaaggaggactttaccaggggcaagctgatgtcatctcttcacctcaagagatactacggccgtatcctgcactatctgaaggctaaagaatacagtcattgtgcttggactatcgtgcgagtggaaatcctgaggaatttctactttatcaatcgcctgaccggctacttgcggaac

SEQ ID NO: 126187 - DNA, 561 bp, Artificial Sequence
  derived and/or modified sequence
atgactaacaaatgtttgcttcaaatcgccctccttctttgtttcagcaccaccgccctttcgatgtcgtacaatctgctgggctttctgcaaaggagcagcaactttcagtgccagaagttgctttggcagctgaacggacgactcgagtactgcctgaaagaccggatgaacttcgacatccccgaagagattaaacaactgcaacaatttcaaaaggaggatgcggcactgactatttacgaaatgcttcagaacatttttgccatcttcagacaggactcctcctcaactgggtggaacgagactattgtcgaaaacctgctggcaaatgtgtatcatcagatcaaccacctcaagacggtgctcgaggaaaagctggaaaaggaagattttactcggggaaaactgatgagctccctgcatcttaagagatactacggtcgtatcttgcactacctcaaagcgaaggaatactcacattgtgcatggaccattgttcgcgtggagatactccggaacttttacttcataaatcgactgaccggttacctgcgcaac

SEQ ID NO: 126188 - DNA, 561 bp, Artificial Sequence
  derived and/or modified sequence
atgactaacaagtgtctcctgcagatcgccctgctgttgtgcttctcgactacggcactctccatgtcgtacaatctgctgggctttctgcagaggtcgagcaacttccagtgccagaagctcttgtggcaactgaatggacgcctggagtactgcctgaaggatcgcatgaactttgatatccctgaagaaatcaagcagctgcagcaatttcaaaaggaagatgctgcgctgaccatctacgaaatgctgcagaatatcttcgcgattttccgccaggactcttcatcaaccggatggaacgagactatagttgaaaatctcctcgcgaatgtctaccaccaaatcaaccatcttaaaaccgtgctcgaagaaaaacttgaaaaggaggattttactcgcggcaaactgatgagctcgctgcacctcaaacgctactacggccggatcctccactacctgaaagccaaggagtactcacactgcgcatggaccatcgtgcgcgtcgagattctgaggaacttctacttcatcaacaggctcaccggataccttcggaac

SEQ ID NO: 126189 - DNA, 561 bp, Artificial Sequence
  derived and/or modified sequence
atgacgaataagtgcctcctgcagattgctctgctgttgtgcttcagtaccaccgctctgtccatgtcctacaacttgctgggattcctccagaggtcctcgaacttccaatgtcaaaagttgctgtggcaactcaacggacgtttggagtactgccttaaggacaggatgaactttgatataccggaggaaatcaagcagcttcaacagttccagaaagaagatgcagccctcacgatctatgaaatgctccagaatatcttcgcaatcttccggcaggactcctcatcaactggctggaatgaaactattgtcgagaacctcctggcgaatgtttatcaccaaatcaaccatctgaaaactgtgctcgaagaaaagttggaaaaagaggactttacccggggcaaattgatgagtagccttcacctgaagcgctactacgggagaattctgcactaccttaaagcgaaggagtactcgcattgcgcctggactatcgtgcgggtggagatcctgagaaacttctactttatcaatcggctgaccggatacctgagaaac

SEQ ID NO: 126190 - DNA, 561 bp, Artificial Sequence
  derived and/or modified sequence
atgaccaataaatgtctactgcagatcgccttgctcctgtgtttctctacaactgccctctccatgtcttacaacctcttgggattcttgcaaaggagtagcaacttccagtgtcagaaactgctgtggcagctgaatggaaggctggagtactgtctgaaagatcgaatgaactttgatatacctgaggagatcaaacaattgcaacagtttcagaaggaggatgcagcacttacaatctacgagatgttacagaacatcttcgctatatttcggcaggactcctcctccacaggatggaacgaaacgattgtcgagaacctactcgctaacgtgtaccaccagatcaaccatctgaagaccgtccttgaagagaagttggagaaggaggactttacgcgcggtaaactgatgtctagccttcacttgaagcggtattatgggagaatcctgcactatctcaaggctaaagaatacagccactgtgcctggaccatagtgcgggtggaaattctccggaatttctatttcattaacagactcacaggctacttgagaaat

SEQ ID NO: 126191 - DNA, 561 bp, Artificial Sequence
  derived and/or modified sequence
atgacgaacaagtgcctgttgcaaatcgcccttttgctctgcttctccaccaccgcgctttcgatgtcctataacctgctgggattcctccagcggagcagcaacttccaatgccagaagctgctttggcagcttaatggacggctggaatactgtctcaaagatcggatgaattttgacatccctgaagagatcaagcagctccaacagttccagaaggaggacgcagctctgaccatctacgagatgttgcagaacatctttgccatctttcggcaggactcctcaagcaccggatggaacgaaacgatcgtggagaatttgctggcaaatgtgtatcaccaaatcaaccacctgaaaaccgtgctggaagagaagctggaaaaggaagattttactcgcggcaagctgatgagctcccttcatctcaaacggtactacggacgcatcctgcattacctcaaggctaaggaatacagccactgcgcctggaccatcgtcagagtggaaatcctgaggaacttctacttcatcaacagactgaccggctaccttcggaac

SEQ ID NO: 126192 - DNA, 561 bp, Artificial Sequence
  derived and/or modified sequence
atgacaaacaaatgcctgcttcaaatcgctctgctgctctgcttttccacaactgcactgagtatgtcatataacctcctggggttccttcagcgaagctccaacttccaatgccagaagctgctttggcagctcaacgggcggctggagtactgcctcaaagataggatgaacttcgacatccctgaggaaataaaacagctccagcagtttcaaaaggaggacgccgccttgactatctacgagatgctccagaacatcttcgctatatttcgccaggactcctccagcaccggctggaacgagactattgtcgaaaatctgcttgcaaatgtgtaccatcagattaaccacctgaagacagtgctcgaagaaaaactggagaaggaggattttaccagggggaaacttatgtcctctctacatctcaagaggtattacggtcggatcctgcattaccttaaggctaaagaatacagccactgtgcttggactatagtgcgcgtcgaaattctccgtaatttctacttcatcaaccgactgacaggatacctgaggaat

SEQ ID NO: 126193 - DNA, 561 bp, Artificial Sequence
  derived and/or modified sequence
atgactaataagtgcctattacaaatagcattactgctgtgcttttcgaccacagcgctgtccatgagctacaacctgctcggattccttcaacgctcctcaaatttccagtgccagaagctcctctggcagttgaacggacgactggagtattgtcttaaggatcgcatgaacttcgatatccccgaagagattaaacaacttcagcagtttcagaaagaggacgccgcactgacgatttacgagatgctgcagaacatctttgcgatatttagacaagatagttcatctactggatggaacgaaacgatcgtcgagaaccttctggcgaacgtgtatcatcagatcaatcacctcaagacagtcctggaggagaagctagagaaggaagatttcactaggggaaagctcatgtcctcgctacaccttaaaagatattacggacgaatcctccactacctgaaggctaaagaatacagtcactgtgcctggaccatcgtccgagtagagattctaaggaatttctacttcattaacaggctgacagggtatctgcggaat

SEQ ID NO: 126194 - DNA, 561 bp, Artificial Sequence
  derived and/or modified sequence
atgactaacaaatgtctgctccaaattgcgctcctcttgtgtttctcgactaccgcactgtcgatgagctacaacctgctgggattcctgcaacgatcaagcaatttccagtgccaaaagctgctttggcagcttaacggcagacttgaatactgtcttaaggacaggatgaactttgatattccagaggaaatcaagcagttgcagcagtttcaaaaggaagatgcggcattgacgatctatgaaatgttgcagaacatctttgccatattcagacaagattcctcctccaccggctggaacgaaaccatcgtggaaaacctgctggcaaatgtgtatcaccagattaatcatctgaaaaccgtcttggaggaaaagttggagaaggaagatttcactcgtggtaaactcatgtcctcgcttcatctcaaacgttactacggaagaatcctccactaccttaaagccaaagagtacagccattgcgcatggactattgtgcgagtcgaaattctgagaaacttttactttatcaatcggcttaccgggtacctccggaac

SEQ ID NO: 126195 - DNA, 561 bp, Artificial Sequence
  derived and/or modified sequence
atgacgaacaagtgcctgctacagattgccttgctcctgtgctttagcaccacagctctcagtatgtcttacaatttgctgggattcctgcagcggagtagcaactttcagtgccagaaacttctttggcagctgaatggccggcttgaatattgtttgaaggacagaatgaactttgatatacccgaggagatcaaacagctgcagcaatttcagaaggaggatgcggctctgaccatatacgagatgctgcagaatatttttgccatctttcgacaggatagttcctcaaccggctggaatgaaaccatcgtcgagaatctactggctaatgtatatcatcagatcaaccatctcaaaacagtgctggaggagaaattagaaaaggaggatttcacaagaggcaagcttatgtcttctctacacttaaagagatactacggtcgcatcctgcactatctcaaggccaaagagtactcgcactgtgcttggactatagtgcgagtggagatcctgcgaaatttctacttcattaataggctgacagggtacttacggaat

SEQ ID NO: 126196 - DNA, 561 bp, Artificial Sequence
  derived and/or modified sequence
atgaccaacaagtgcttgctgcaaattgccctgctgctctgcttctcgactaccgctctctcgatgtcctacaaccttttgggctttctgcagcggtcctccaacttccagtgccagaagctgctgtggcagctgaatggaagattggagtactgcctgaaagatcgcatgaacttcgacatcccagaagagatcaagcagctgcagcagtttcagaaggaggacgcggccctcactatctacgaaatgctccaaaacatcttcgccatcttccggcaagactcgtcgagcaccgggtggaacgaaactatcgtggaaaatctgctggccaatgtctaccaccagattaaccacctgaaaaccgtcttggaagaaaaactggaaaaagaggacttcactagaggaaaactcatgtcgagcctgcatctgaagcggtactacgggaggattcttcactacctcaaggcgaaggaatactcccattgcgcatggaccattgtcagggtggagatactgcgcaatttctatttcatcaaccgcctcactgggtacctgcgcaac

SEQ ID NO: 126197 - DNA, 561 bp, Artificial Sequence
  derived and/or modified sequence
atgaccaacaaatgtctactgcagatcgcccttctgctctgcttcagcaccactgctctaagcatgtcttataatcttctcggctttctgcagagatcttccaacttccagtgtcagaagctgctttggcaattaaatggcagattagaatattgtcttaaggatagaatgaatttcgatattcctgaggagattaagcagctgcagcagttccagaaagaggatgccgccctgacaatttatgagatgctacagaacatcttcgctatatttcggcaggactcttctagtaccggatggaatgaaaccatcgtggagaatctcctagccaacgtgtaccaccagattaaccacctgaagacagtactcgaagaaaaactggagaaagaggacttcacgcgcggcaaactcatgtcatccctacatttgaaaagatattacggtaggatccttcactatctcaaagcgaaggagtatagccattgcgcctggactattgtcagagttgaaattctcaggaacttctacttcatcaatcgcttgaccgggtatctccggaat

SEQ ID NO: 126198 - DNA, 561 bp, Artificial Sequence
  derived and/or modified sequence
atgactaataaatgtcttctgcagattgcgctcctgctttgtttctctactactgcactgagtatgagctacaatcttcttgggttcctgcagagatccagcaatttccagtgtcagaaacttttgtggcagctcaatggcagactggaatattgcttgaaagatcgcatgaactttgatattccagaggagattaagcaactccagcagtttcagaaagaagatgcagctctgacaatatatgagatgcttcaaaatatcttcgccatctttcgtcaggatagctccagtactggatggaatgagactatcgttgaaaatctcctggcaaatgtttaccaccagatcaatcatctgaaaaccgttttagaggaaaaacttgagaaggaggatttcactcgcggaaagctgatgtctagcctgcacctcaagaggtattatggcaggatcctgcactaccttaaagcgaaagagtactcccattgcgcttggaccatcgtcagagtggaaatcttacggaatttttacttcatcaatagacttacaggttacctgagaaat

SEQ ID NO: 126199 - DNA, 561 bp, Artificial Sequence
  derived and/or modified sequence
atgacaaataaatgcctcctccagatagctcttttgctatgtttcagcactactgccctcagcatgtcctataatctcctcgggtttttacagagatcaagcaatttccaatgtcagaaactgctgtggcagctgaatggccgcctcgagtattgtcttaaggatcgaatgaactttgacatcccagaagagataaagcagctgcagcagttccagaaagaagatgctgcactgacaatctatgagatgctgcagaacattttcgctatcttcagacaggattccagctcaactggctggaatgagacaatcgtggaaaacctgctcgctaacgtctaccaccagataaaccatctaaagactgttttggaggagaagttggagaaggaggactttacccgaggaaagctgatgagcagtttacacctgaaaaggtactacgggcggatcctgcattatttgaaggcgaaggagtacagccattgtgcatggactatagtccgcgtcgagattctgcggaacttttacttcatcaaccgacttactggctacctgcggaac

SEQ ID NO: 126200 - DNA, 561 bp, Artificial Sequence
  derived and/or modified sequence
atgacgaacaagtgtctcctgcagatcgccctcctcttgtgcttctcaactaccgcgctgagcatgtcgtacaatctgctgggattcctccagagatccagcaactttcaatgccaaaaactcctgtggcagttgaatgggcgcctcgagtactgcctcaaggaccggatgaacttcgatatcccggaggaaatcaagcaactgcaacagttccagaaagaggacgcggctcttactatctacgaaatgctgcagaatatttttgcaatcttccggcaggattcgtccagcaccggttggaacgagactatcgtggaaaacctcctggcaaacgtctaccaccagattaaccatctgaaaactgttcttgaggaaaagctcgaaaaggaggactttacccgaggaaagctgatgtcatccctgcatctgaagcgctactacggaaggattcttcactacctgaaggccaaagaatactcgcactgcgcctggaccatcgtgagagtggaaatcttgcggaatttctatttcatcaatcgcctgaccggctacctgcgtaac

SEQ ID NO: 126201 - DNA, 561 bp, Artificial Sequence
  derived and/or modified sequence
atgaccaacaaatgcttactccagatagcgctcttactgtgttttagcaccacggcgcttagcatgagctataacttactgggtttcctgcagaggtcttccaacttccagtgtcagaaactgctctggcagctgaatggtcgcctcgagtactgcctgaaggaccgcatgaactttgatatccccgaggaaattaaacagcttcaacagttccagaaagaagatgccgcactgactatctacgaaatgctgcaaaacatcttcgcaatcttcaggcaagacagcagctctaccggttggaacgagaccatagtggaaaatttgctggcaaatgtttaccatcaaatcaatcatctaaagacagtcctggaggaaaaactggagaaagaggattttacccgtggtaagctgatgagcagccttcatctgaagcgctactatgggcgcatcctgcactatctgaaagcaaaagagtacagccattgtgcatggactattgtcagagttgagatcctgcgaaacttttacttcattaatcgtctgaccgggtacctgcgcaat

SEQ ID NO: 126202 - DNA, 561 bp, Artificial Sequence
  derived and/or modified sequence
atgacgaacaaatgtctcctccagatcgccctgctgctctgttttagtacaactgccttgtccatgagctataatctgttgggttttcttcagagaagcagtaatttccagtgccaaaagttactgtggcagctgaacggccggctggaatactgcctgaaggacaggatgaacttcgatattccggaagagattaaacagctccaacaattccagaaagaagacgcagccctgactatctacgagatgctgcagaatattttcgccatttttagacaggacagtagctccactggctggaacgagacaattgtggagaacctgctggccaacgtctaccaccagattaaccacctcaaaacagtactggaggagaaattggaaaaagaggattttacacgaggtaagctgatgtcatcattacaccttaagcgctattatggccgcattctgcactatttgaaggccaaggaatattcacattgcgcatggaccatcgtgagagtcgaaatcctgcgaaatttctactttattaataggttgactggctaccttcgtaat

SEQ ID NO: 126203 - DNA, 561 bp, Artificial Sequence
  derived and/or modified sequence
atgactaataaatgtctgcttcagattgcgttgctgctgtgcttctcaacaaccgcgctgagtatgtcctataacctactcggttttcttcagcgctcctccaattttcagtgtcagaagctgctttggcagttgaacggaagattagagtattgcctgaaggaccgcatgaatttcgatattccggaggaaatcaagcagttgcagcagtttcaaaaggaggatgccgccctgaccatctacgaaatgcttcagaatatatttgctatcttccgacaagatagcagctccacagggtggaatgaaacgattgttgagaacctgctcgcaaatgtctatcatcaaatcaaccacctgaaaaccgttttggaggagaagctggagaaagaagacttcacacgtggaaagctcatgagcagtctccatctgaaacgttactatggccggattcttcattacctcaaggcaaaggagtacagtcactgcgcctggacaattgttcgggtagaaatcctacggaacttttacttcattaacaggttgacagggtacttacggaat

SEQ ID NO: 126204 - DNA, 561 bp, Artificial Sequence
  derived and/or modified sequence
atgactaataagtgtctccttcagattgcgctgctcctgtgcttttcaactactgcgctttcgatgtcttataacctgctgggatttctccaaagatcgtccaactttcagtgtcaaaagctgctctggcaactgaacggcagactggagtactgcctgaaggacaggatgaactttgatattccggaggaaatcaagcagcttcagcaattccagaaggaggacgcagcccttacgatctacgaaatgcttcaaaacatttttgcaatctttagacaagattcctcctcaaccggctggaatgaaaccatcgtggaaaatctgctggcaaacgtctaccatcaaatcaaccatctgaaaaccgtgcttgaagaaaagctggaaaaagaggattttacgcgcggtaaactgatgagctcactgcacctcaaaagatactacggtcgcatcctgcattacctcaaggccaaggagtattcgcattgcgcatggaccattgtcagagttgagattcttagaaacttttacttcataaacagactcaccgggtacctgcggaat

SEQ ID NO: 126205 - DNA, 561 bp, Artificial Sequence
  derived and/or modified sequence
atgactaacaagtgtctgcttcagatcgcactccttctgtgtttttccaccactgcactgtccatgtcatacaacctgcttggttttctccagcggagctctaactttcagtgtcagaaactcctttggcagttgaacgggagactcgaatactgtctcaaagatcgcatgaactttgacattccagaggagataaagcaattgcagcaatttcaaaaggaagatgcggcgcttacgatttacgaaatgcttcagaatatcttcgcaatattccgccaggattccagctcgacgggctggaatgaaaccatcgtggagaatctgcttgcaaacgtgtatcatcagattaatcatcttaaaactgtccttgaagaaaagctcgaaaaggaagattttaccagaggcaagttgatgtcgtcgcttcatctgaaacggtattacgggagaatcctccattacctcaaggcaaaggagtactcgcactgcgcctggaccattgtgagagtggaaatcctccggaacttctacttcatcaatcggcttactggttacttgagaaac

SEQ ID NO: 126206 - DNA, 561 bp, Artificial Sequence
  derived and/or modified sequence
atgactaacaaatgcctgctgcaaattgcactgctcttgtgcttttccacgaccgccctttctatgagctacaatctgctcggctttttgcaacgcagctcaaatttccagtgccaaaaactgctgtggcagttgaacggcagactggagtactgcttgaaggacaggatgaacttcgatattcccgaggagatcaagcagctgcaacagttccagaaggaagatgccgcgcttaccatatatgagatgttgcagaacatcttcgctatctttaggcaggacagctctagtacaggatggaacgaaaccatcgttgagaacctgctggcaaatgtgtaccaccagatcaaccatttgaagacagtgctggaggagaaactcgagaaagaggacttcactcgcggaaagctgatgagctcacttcaccttaagcgctattatggcagaatcttgcattatcttaaggccaaggaatacagccactgcgcatggactatcgtgcgcgttgaaatcctcaggaacttctacttcattaatcgcttgacaggatatctgagaaac

SEQ ID NO: 126207 - DNA, 561 bp, Artificial Sequence
  derived and/or modified sequence
atgaccaacaaatgtctcctgcagatagcactcctcctgtgcttctcaactactgccctgagcatgtcgtacaacttgctgggatttttgcaacggtcatcgaatttccagtgccagaaactgctctggcagctgaatggcagactggaatactgcctcaaggaccggatgaactttgacatcccggaagagatcaagcaactgcagcaattccagaaggaggacgccgccctgactatctatgaaatgctccagaatatcttcgccatcttccgccaggacagctcgtccactggatggaacgaaaccatcgtcgagaacctcctggccaacgtgtaccaccagatcaaccacctcaagaccgtcctggaggagaaactcgagaaggaggacttcactcgcggcaaacttatgagctcgttgcacctgaaacgctactacggcagaatccttcattacctgaaagcgaaggaatactcccactgcgcgtggaccatcgtgcgcgttgaaattctccggaatttctacttcatcaaccggctgaccgggtacctgcggaac

SEQ ID NO: 126208 - DNA, 561 bp, Artificial Sequence
  derived and/or modified sequence
atgaccaacaagtgcctgctccagattgctcttttgctgtgcttctctactacggctctttcgatgagctacaacttgctcggattcttgcaaagaagctctaacttccagtgccaaaagctcctctggcaattgaacggacgccttgaatactgcctcaaggatcgtatgaactttgatatccctgaggaaattaagcagctgcagcagttccagaaggaggatgcagccctgaccatctatgagatgctccaaaacatctttgccatcttccgccaggacagctcctcgacggggtggaatgaaactatcgtcgagaacctcttggcgaacgtataccatcagatcaaccacctgaaaactgtgctcgaagagaagcttgagaaggaagacttcactcgaggcaaactcatgagctccctccacctcaagcggtactacggccgcatcttgcactatctgaaggccaaggagtactcgcactgtgcgtggactattgtccgtgtcgagatcctcagaaatttctacttcatcaatcgtctgacaggctaccttcgcaac

SEQ ID NO: 126209 - DNA, 561 bp, Artificial Sequence
  derived and/or modified sequence
atgaccaacaagtgccttctccagatcgccctgctcctgtgcttctccaccaccgctctgtcgatgtcgtacaatctgttgggcttcctccaaagatcttcaaacttccagtgtcagaaactgctgtggcagcttaatggaaggctggagtactgcctgaaggatcgcatgaattttgacatcccagaagagatcaagcagctccaacagttccaaaaggaggacgcagcactcacgatctacgagatgctgcagaacatctttgccatcttccggcaggactcatccagcaccggctggaacgagactatcgtcgaaaatctcctggcgaatgtgtatcatcagatcaatcatctgaaaacggtgttggaggaaaagctggagaaagaagatttcactagaggaaagctgatgtcatcgctgcacctcaaaagatactacggtcggatcctgcattaccttaaggcgaaggagtactcgcactgcgcttggaccattgttagagtggaaattctgcggaatttctatttcattaaccggctcactggctacctgagaaac

SEQ ID NO: 126210 - DNA, 561 bp, Artificial Sequence
  derived and/or modified sequence
atgaccaataagtgcttgcttcaaatcgccctgctgctctgcttttcaactactgccctctccatgtcgtacaatctgctcggcttcctgcaaagatcatcgaactttcagtgtcagaagctgctgtggcagctcaacggccgcctggagtactgcttgaaggatagaatgaacttcgacatcccagaggagatcaagcagctgcagcagtttcaaaaagaggacgccgccctgaccatctacgaaatgctgcagaatatcttcgcgatcttcaggcaggattcctcatcgactggctggaacgaaactattgtggagaacttgctcgctaacgtgtaccatcaaatcaatcaccttaagacggttcttgaggaaaagctggaaaaggaggactttaccagaggaaaactgatgagtagcctgcatctgaagagatactacggacgcatactccattacctgaaggcgaaagagtactcacactgcgcctggaccatcgtgcgtgtggaaattctgcgcaacttttacttcatcaatagactgacgggttacctgcgcaac

SEQ ID NO: 126211 - DNA, 561 bp, Artificial Sequence
  derived and/or modified sequence
atgaccaacaagtgcctgctgcagattgcccttctgctgtgcttcagcacgactgccctctcgatgtcctacaacctgctgggattcctccaacgctcctcgaatttccagtgtcaaaagctgctgtggcaacttaacggcagactggaatactgcctcaaggaccggatgaacttcgacatcccggaggaaatcaaacaactgcagcagttccagaaggaagatgccgccctgactatctatgaaatgctgcagaatatcttcgcgatcttccgccaggactcgtcgtccacgggatggaacgaaaccatcgtggagaatctgctggcgaacgtctaccaccagatcaaccacctcaaaaccgtccttgaggagaagttggaaaaggaagattttactaggggaaaactcatgtcctctctgcacctgaaacggtactacggccgcatcctgcattacctgaaggccaaagaatactcgcactgcgcttggacgatcgtgcgcgttgaaatcctccgcaacttttacttcatcaaccggctgaccggttacctccggaac

SEQ ID NO: 126212 - DNA, 561 bp, Artificial Sequence
  derived and/or modified sequence
atgaccaacaagtgccttctgcaaatcgcccttctcctttgtttttcaaccactgcgctctcaatgtcctacaatctgctgggctttctccagaggagcagcaatttccagtgtcagaaattgctttggcaactcaacggacgcctcgaatactgtctcaaagataggatgaatttcgacatccccgaggagattaagcagctccaacagtttcaaaaggaggacgcagcactgaccatctacgaaatgctgcagaatatctttgcaatctttcgtcaagattcgtcgtcaaccggctggaacgaaaccattgtggagaatctgttggccaacgtgtatcaccaaatcaaccatctcaagactgtcctggaagaaaaacttgagaaggaggattttacccgtggtaaacttatgtcatctcttcatctgaaacggtactacggtagaatccttcattacctgaaggcaaaagagtactcccattgtgcatggactatcgtgagagtggaaattctgagaaacttctactttatcaacagattgaccggttatctccggaat

SEQ ID NO: 126213 - DNA, 561 bp, Artificial Sequence
  derived and/or modified sequence
atgactaacaagtgcctccttcaaattgcactgcttctctgtttttccaccacggccctctcgatgtcctacaaccttcttggttttttgcagcggagctcgaattttcaatgccagaagctgttgtggcagttgaatggacgccttgaatattgcttgaaggatcggatgaactttgatattcccgaggagatcaagcagctgcaacagttccagaaggaggacgcagcgctcactatctatgagatgctgcagaatatcttcgcgatctttcggcaggactctagctcgaccggttggaacgagactatcgtcgaaaatctcttggctaatgtgtaccatcaaatcaaccacctcaagacggtcctcgaagaaaaacttgaaaaggaagattttactagaggcaaacttatgtcgtccctccatctgaaacgttactacgggcgcattctgcattacctgaaggctaaggagtattcccattgtgcctggaccattgttagggtggaaatacttaggaatttctacttcataaaccgacttactggataccttcgtaat

SEQ ID NO: 126214 - DNA, 561 bp, Artificial Sequence
  derived and/or modified sequence
atgaccaacaagtgtctgctccagattgctctgctgctctgcttctctactacagcactctcgatgtcatacaacctgttggggttcctgcagaggtcctcaaactttcaatgccaaaagctgctgtggcagctcaacggcagactcgagtactgccttaaagatagaatgaacttcgatatcccagaggaaatcaagcaattacagcaattccagaaagaggacgctgccctgactatctacgaaatgctgcaaaacatttttgccatcttccgccaagacagctcctcaactggatggaacgagactattgtcgaaaatctgcttgcaaacgtgtaccatcaaatcaatcatctcaaaacagttctggaggagaagctggagaaggaggattttacgagaggtaagctaatgagttctctccacttaaaacgctactacggaagaatcctgcattacctcaaggccaaagagtacagtcactgtgcctggacgatcgtcagagtcgaaatcttgcggaacttctattttatcaaccgtctgacaggctacctaagaaac

SEQ ID NO: 126215 - DNA, 561 bp, Artificial Sequence
  derived and/or modified sequence
atgactaataagtgtcttctgcagatcgctttgctgttgtgcttcagcaccaccgcgctgtccatgtcctacaatctgcttggtttcctgcagcgaagttctaatttccagtgtcaaaaacttctgtggcagcttaatggtcggctagagtactgcctgaaagacagaatgaactttgatatcccagaggagatcaagcagctgcagcagttccagaaagaggatgccgccctgaccatctacgaaatgctgcagaacatctttgcaatctttagacaggatagctcttccacagggtggaacgagacaattgtggagaatctcctggccaatgtgtatcaccagatcaatcatttaaagaccgtcttggaggaaaagctcgagaaagaagactttacaaggggcaagctcatgtccagcctgcacctgaaaaggtattatggccggattctgcactacctaaaagcgaaggagtactctcattgtgcatggacgatcgtgagggtggaaatacttcgcaatttctacttcatcaacagactcacaggttacttacggaat

SEQ ID NO: 126216 - DNA, 561 bp, Artificial Sequence
  derived and/or modified sequence
atgaccaacaaatgccttttgcagatcgccctgctcctttgcttctccaccaccgcactaagtatgtcttataaccttcttggctttctgcaacggagttcgaactttcagtgtcagaagctgctgtggcagctgaatgggagactggagtactgtttgaaggatcgcatgaatttcgacattcccgaggagatcaagcagctccagcagttccagaaagaggatgctgccctgacaatctacgagatgctccagaacatctttgcaatttttcgccaggacagctctagcacgggctggaatgagacaatcgtggagaacttgctcgccaatgtctatcaccagatcaatcacctgaagacagtgctggaggagaaactggaaaaggaggatttcactcgtggaaagctgatgagctctctccacttaaaaaggtactacgggagaatcctgcattacctcaaagccaaggaatacagccattgcgcgtggacaatcgtccgtgtggagatccttcgaaacttttactttatcaatcgactcaccggctacctcaggaat

SEQ ID NO: 126217 - DNA, 561 bp, Artificial Sequence
  derived and/or modified sequence
atgacgaataaatgtctcctgcaaattgccttgcttttgtgtttctccacgacagccctatcaatgtcctataatttgctggggttcctgcaacgtagctccaattttcagtgtcagaaattgctttggcagctcaatggtcggctggagtattgcttaaaggacaggatgaattttgatatacctgaggaaatcaagcaattgcagcaatttcagaaagaagatgccgccctcaccatctacgaaatgttgcaaaacatctttgctatttttcgacaagatagctcgtctactgggtggaatgaaactatcgtcgagaacctgctcgcgaatgtgtaccatcagataaaccaccttaagacggtattggaagagaagctcgaaaaggaggactttacgcgggggaagcttatgtcgtctctgcatctaaagcgatactatggacggattctccactacttgaaggctaaagaatactctcactgtgcctggacaattgtacgagtggagatacttcgtaatttctactttataaaccggttaactggctatctcaggaac

SEQ ID NO: 126218 - DNA, 561 bp, Artificial Sequence
  derived and/or modified sequence
atgactaacaaatgtctgctgcagatagcactgttgctgtgcttttcgacaaccgcgctgtccatgtcatacaacttactcgggttcttgcagcgctcatctaacttccaatgtcagaagcttctgtggcagctaaacgggaggctggagtactgcctaaaagaccggatgaacttcgatataccggaggagatcaaacagttacaacaattccaaaaggaagatgctgcccttactatctacgaaatgctccagaatatctttgcaatattcagacaggatagcagttccaccggctggaacgagaccatcgtggaaaatttgttagcgaacgtgtaccatcagatcaatcacctgaaaactgtgctggaggagaaactggagaaggaagattttaccagggggaagctgatgagctcccttcacttgaaaagatattacggcagaatcctgcattatctaaaagctaaagaatatagccactgcgcttggacgatcgtaagggtggagatcctaagaaatttttacttcattaacaggctgaccggctatctgagaaac

SEQ ID NO: 126219 - DNA, 561 bp, Artificial Sequence
  derived and/or modified sequence
atgacaaataaatgtctcctgcagatcgcactgctgctgtgtttttccacgactgcacttagcatgtcctataatctgctcggcttccttcaacgttcttcgaatttccagtgccagaaactgctgtggcagctcaatgggaggctggagtactgcctcaaggatcggatgaattttgatatcccagaagagattaagcagttgcagcaatttcagaaggaggacgctgcgcttacaatttacgagatgttgcagaacatattcgccatctttaggcaggactcttcctccaccggatggaatgaaaccattgtagagaatcttctggccaatgtctaccatcagatcaatcatctgaaaactgtcctggaggagaagctcgaaaaggaagactttacgcggggaaagcttatgtcctcccttcatctgaagcgatactatggtaggattttgcattatctaaaagcgaaagagtactctcactgtgcatggacgattgtgcgggtcgagatcttgaggaacttttacttcattaataggttgacaggctacttgcggaat

SEQ ID NO: 126220 - DNA, 561 bp, Artificial Sequence
  derived and/or modified sequence
atgacgaacaagtgcctcctgcaaatcgcgctgctgctgtgcttcagcaccaccgccctgagcatgagctacaacctcctgggcttcctccagaggtccagcaactttcaatgtcaaaaactgttgtggcagctgaatggaaggctcgagtactgtctgaaggacagaatgaatttcgacatcccagaggagatcaagcagcttcagcagttccagaaagaagacgccgcgctcaccatttacgagatgcttcagaatatcttcgccatctttagacaggattcctcgtccaccgggtggaatgaaaccatcgtcgaaaacctgctcgccaacgtctaccatcagatcaaccacctcaaaactgtgctcgaagaaaaactcgagaaggaggacttcactcgcggaaagctgatgtcgtctctgcatttgaagcggtactacggaaggatcctgcactacctgaaagccaaggagtacagccattgcgcctggactatcgtgagagtggagatcctgcggaacttctacttcatcaatcggctgaccgggtatctgcgaaac

SEQ ID NO: 126221 - DNA, 561 bp, Artificial Sequence
  derived and/or modified sequence
atgaccaataaatgcctgcttcagattgccctgctgctctgcttctccacgaccgctttgtctatgtcttataatcttcttgggttcttgcaacggagtagtaatttccagtgccagaagctactttggcagctgaatggcaggctggaatactgcctgaaggacagaatgaatttcgatatacccgaggagatcaaacagttgcaacagttccagaaagaggacgccgccctgacaatttacgagatgctgcagaatatttttgcaattttcagacaggactcttcttctacgggctggaatgagaccatcgtggagaaccttctcgcaaatgtttaccaccagattaatcacctgaagaccgtgttggaggagaagctggaaaaggaggacttcaccagggggaagctgatgtcgagtttgcacttgaaacggtactacggaagaattctgcactatctgaaggccaaagagtactcacattgtgcatggacaattgtgagagtggaaatactgaggaacttctacttcattaatcgcttaactggctatctgaggaac

SEQ ID NO: 126222 - DNA, 561 bp, Artificial Sequence
  derived and/or modified sequence
atgacgaataaatgtttactacaaatagcgttactattatgtttttcgacgacggcgttatcgatgtcgtataatttattaggttttctacaacgttcgtcgaattttcaatgtcaaaaattattatggcaactaaatggtcgtttagaatattgtctaaaagatcgaatgaattttgatataccggaagaaataaaacaattacaacaatttcaaaaagaagatgcggcgttaacgatatatgaaatgttacaaaatatatttgcgatatttcgtcaagattcgtcgtcgacgggttggaatgaaacgatagtagaaaatctattagcgaatgtatatcatcaaataaatcatctaaaaacggtattagaagaaaaactagaaaaagaagattttacgcgtggtaaattaatgtcgtcgctacatctaaaacgttattatggtcgaatattacattatctaaaagcgaaagaatattcgcattgtgcgtggacgatagtacgtgtagaaatactacgtaatttttattttataaatcgtctaacgggttatttacgtaat

SEQ ID NO: 126223 - DNA, 561 bp, Artificial Sequence
  derived and/or modified sequence
atgactaacaagtgtctccttcagattgctctgctcctgtgttttagcactaccgctctctctatgagttacaatctgctgggtttcctccaaagatcttcaaactttcaatgtcagaagctgctttggcagctgaacggcagactggagtactgccttaaggacaggatgaacttcgacatcccagaagagattaagcagttgcagcaattccagaaagaagatgcagcccttacaatttatgaaatgttgcagaatatttttgccatctttaggcaagactcctcatcaaccggttggaacgaaactattgtcgaaaacttgctggccaacgtatatcaccagattaaccacctcaagaccgttctggaggagaaactggagaaagaagacttcacccgcggaaaactgatgagttccctccatcttaaacgttactacggtcgtatactgcattatcttaaagccaaggagtattctcattgcgcatggaccattgtcagggtggagattttgcgcaacttctactttattaacaggcttactggctacttgcgtaac

SEQ ID NO: 126224 - DNA, 561 bp, Artificial Sequence
  derived and/or modified sequence
atgacaaataagtgcctactacagatagctttgctcctttgctttagtacaaccgcactttctatgtcatataatttgttgggctttttgcagagaagttctaacttccaatgccaaaagttgttgtggcagttgaacggacgactcgaatattgtttgaaagatagaatgaactttgacataccagaagaaatcaaacaattgcaacagttccagaaagaggatgcagctttaactatctatgaaatgcttcagaatatctttgcaatattcagacaggattcttcttctaccggctggaatgaaacaattgtcgaaaaccttttggctaatgtttatcaccaaattaaccacttaaaaactgtgttagaagagaaactcgaaaaagaagatttcactagaggaaaattgatgtcttcacttcaccttaaacgttattacggacgtattttgcactacttgaaggcgaaggaatattcccattgcgcctggaccatagtcagagtagagattcttagaaatttctatttcatcaataggttgactgggtacctaagaaac

SEQ ID NO: 126225 - DNA, 561 bp, Artificial Sequence
  derived and/or modified sequence
atgacaaacaagtgcctccttcagatcgcactcctgttgtgcttctccacaaccgccctctccatgtcatacaacctgctgggcttcctgcagcgcagtagtaactttcagtgccagaagcttctgtggcagctgaatggacgtctcgagtattgcctgaaggaccgaatgaattttgatatcccagaggagatcaagcagctgcagcagttccagaaggaggacgcggccctgactatctatgagatgttacaaaatatttttgctatcttccgccaggactcctccagcaccggatggaatgaaaccattgttgaaaaccttctggccaacgtgtatcaccagatcaatcatctgaagaccgtcctcgaggaaaaacttgagaaggaggacttcacacgaggaaagctgatgagtagcctgcatttgaaaagatattacggacgtatcctccactatctgaaagcaaaggagtatagtcattgcgcatggactatcgtgagagtggaaattctaaggaatttctactttattaatcgcttgaccggctacctgcgcaat

SEQ ID NO: 126226 - DNA, 561 bp, Artificial Sequence
  derived and/or modified sequence
atgaccaacaagtgtttgctgcaaatcgcccttctgctgtgtttcagcaccactgccctgtcaatgtcatacaacctccttggatttctgcaacgatcgtcgaattttcagtgtcagaaactcctttggcagctcaacggtcgcctggaatactgcctgaaggaccgtatgaattttgatattcccgaagagattaagcaactgcaacaattccaaaaagaggatgcagccctgacgatttacgagatgcttcagaatatctttgccatttttcggcaagattccagctcgactggttggaacgagacgattgtggaaaatctccttgccaatgtgtaccatcagattaaccacctcaaaactgtgcttgaggaaaagctcgagaaggaagattttactagaggtaaacttatgagctcactgcacctgaagcgctactacggacggattctgcattaccttaaggcgaaggaatactcacattgtgcatggaccatcgtgcgagtggaaattctgagaaacttttactttatcaatcggttgactgggtacctgagaaac

SEQ ID NO: 126227 - DNA, 707 bp, Artificial Sequence
  derived and/or modified sequence
gggaaataagagagaaaagaagagtaagaagaaatataagagccaccatgaccaacaagtgtctgctccagatcgcactcttgttgtgcttctcgacgactgccctttcgatgtcatacaatctgctgggattccttcagaggagctcgaattttcagtgtcagaagttgttgtggcaactcaatgggcgactcgagtactgcttgaaagatcggatgaactttgacattcccgaagaaatcaagcaactgcagcaattccagaaagaggacgcggctctgacaatctacgagatgcttcagaacattttcgcgatcttcagacaggacagctcatccacgggctggaacgagacaatcgtagaaaacctgctcgcaaacgtctatcaccagattaatcacctcaagacagtgcttgaggagaagcttgaaaaagaagatttcactcgcgggaaactgatgtcctcgctccatttgaaaaggtactatggaaggattttgcactatctcaaggccaaggagtattcccattgcgcgtggaccatcgtgcgcgtcgagatccttcggaacttttactttatcaatcggttgacgggttacctcagaaattgataagctgccttctgcggggcttgccttctggccatgcccttcttctctcccttgcacctgtacctcttggtctttgaataaagcctgagtaggaag

SEQ ID NO: 126228 - DNA, 564 bp, Artificial Sequence
  derived and/or modified sequence
atgaccaacaagtgcctgctgcagatcgccctgctgctgtgcttcagcaccaccgccctgagcatgagctacaacctgctgggcttcctgcagagaagcagcaacttccagtgccagaagctgctgtggcagctgaacggcagactggagtactgcctgaaggacagaatgaacttcgacatccccgaggagatcaagcagctgcagcagttccagaaggaggacgccgccctgaccatctacgagatgctgcagaacatcttcgccatcttcagacaggacagcagcagcaccggctggaacgagaccatcgtggagaacctgctggccaacgtgtaccaccagatcaaccacctgaagaccgtgctggaggagaagctggagaaggaggacttcaccagaggcaagctgatgagcagcctgcacctgaagagatactacggcagaatcctgcactacctgaaggccaaggagtacagccactgcgcctggaccatcgtgagagtggagatcctgagaaacttctacttcatcaacagactgaccggctacctgagaaactag

SEQ ID NO: 126229 - DNA, 564 bp, Artificial Sequence
  derived and/or modified sequence
atgaccaataaatgtcttctccagattgctctgctgctttgtttctctaccaccgcgctctcgatgtcctacaatctactcggctttctgcagcggtcttcaaactttcagtgccagaaattgctgtggcaactcaatggcaggctcgaatattgtctaaaagaccgcatgaatttcgatatacccgaggagattaagcagctccagcagtttcaaaaggaagatgctgctctgactatctacgaaatgctgcagaacatattcgctatattccgccaggatagctcctctactggctggaacgagaccatcgtcgaaaacctcctggctaacgtgtatcaccagatcaaccatctaaaaacagtgctagaggaaaaattagaaaaggaagacttcactcgagggaagctgatgtcctccctgcacctcaagaggtattacgggcggattcttcactaccttaaggctaaggagtactcccactgtgcctggactattgtcagagtggaaatcttgcgaaatttttattttatcaataggttgaccggatatctcaggaattag

SEQ ID NO: 126230 - DNA, 564 bp, Artificial Sequence
  derived and/or modified sequence
atgaccaacaagtgcctgctgcagatcgccctgctgctgtgcttcagcaccacagccctgtccatgagctacaacctgctgggcttcctgcagaggagcagcaacttccagtgccagaagctgctgtggcagctgaatggccgcctggagtactgcctgaaggacaggatgaactttgacatccctgaggagatcaagcagctgcagcagttccagaaggaggatgctgccctgaccatctatgagatgctgcagaacatctttgccatcttccggcaggacagcagcagcacaggctggaatgagaccatcgtggagaacctgctggccaacgtgtaccaccagatcaaccacctgaagacagtgctggaggagaagctggagaaggaggacttcacccggggcaagctgatgagcagcctgcacctgaagcgctactacggccgcatcctgcactacctgaaggccaaggagtacagccactgtgcctggaccatcgtgcgggtggagatcctgaggaacttctacttcatcaaccggctgaccggctacctgaggaactag

SEQ ID NO: 126231 - DNA, 564 bp, Artificial Sequence
  derived and/or modified sequence
atgaccaacaagtgcctgctgcagatcgccctgctgctgtgcttcagcacgaccgccctgagtatgagctacaacttgctgggcttcctccagcggagttctaattttcagtgccaaaaattgctatggcaactgaacggccgcctcgagtattgtctcaaggatcgcatgaacttcgatattcctgaggaaatcaagcaacttcagcagtttcagaaggaggacgccgccttgaccatctacgagatgcttcagaatatctttgcaatctttaggcaggacagctccagtaccggatggaacgagactattgttgagaacctgcttgctaatgtctatcaccagatcaatcacttgaaaaccgtcctggaggaaaagctggagaaagaggacttcacacgtggcaagctcatgtcctcacttcatctgaagcggtattatggcagaatcctgcattaccttaaggcaaaagagtattctcactgcgcctggactatcgtccgagttgagatcctccggaacttttatttcattaatagactcaccggctatctgcgcaactag

SEQ ID NO: 126232 - DNA, 564 bp, Artificial Sequence
  derived and/or modified sequence
atgacaaataaatgccttctgcagatcgccctcttactgtgcttctccaccacagccctctccatgagttacaacctgctgggcttcctgcagcgctctagcaacttccagtgtcaaaagctgctctggcagcttaacgggaggcttgaatactgcctcaaggatagaatgaacttcgacatcccagaggagataaagcagctgcagcaatttcagaaagaagacgcagcacttaccatttatgagatgttgcagaacatcttcgccattttcagacaggacagcagctctaccggctggaatgagactatcgtagagaatctgcttgccaacgtctatcatcagatcaaccacctgaaaaccgtgctagaagaaaaattggagaaggaggattttacacgcggaaagctcatgtcatcccttcatctcaagcgctattatggtaggattctacactatctgaaagctaaagagtacagccattgcgcctggacgattgtgcgggtggaaatcctgaggaatttttatttcataaatcggctcacgggttatcttcggaactag

SEQ ID NO: 126233 - DNA, 840 bp, Artificial Sequence
  derived and/or modified sequence
acattctaactgcaacctttcgaagcctttgctctggcacaacaggtagtaggcgacactgttcgtgttgtcaacatgaccaacaagtgtctcctccaaattgctctcctgttgtgcttctccactacagctctttccatgagctacaacttgcttggattcctacaaagaagcagcaattttcagtgtcagaagctcctgtggcaattgaatgggaggcttgaatactgcctcaaggacaggatgaactttgacatccctgaggagattaagcagctgcagcagttccagaaggaggacgccgcattgaccatctatgagatgctccagaacatctttgctattttcagacaagattcatctagcactggctggaatgagactattgttgagaacctcctggctaatgtctatcatcagataaaccatctgaagacagtcctggaagaaaaactggagaaagaagatttcaccaggggaaaactcatgagcagtctgcacctgaaaagatattatgggaggattctgcattacctgaaggccaaggagtacagtcactgtgcctggaccatagtcagagtggaaatcctaaggaacttttacttcattaacagacttacaggttacctccgaaactgaagatctcctagcctgtgcctctgggactggacaattgcttcaagcattcttcaaccagcagatgctgtttaagtgactgatggctaatgtactgcatatgaaaggacactagaagattttgaaatttttattaaattatgagttatttttatttatttaaattttattttggaaaataaattatttttggtgcaaaagtca

SEQ ID NO: 126234 - DNA, 564 bp, Artificial Sequence
  derived and/or modified sequence
atgaccaataaatgcttactccaaatagcgcttttgctttgtttctccacaaccgccttatcaatgtcctacaacctgctggggtttctccaaaggagcagcaattttcagtgtcagaagctcttatggcagctcaacggaaggctcgagtactgcttaaaggacagaatgaactttgacatccccgaagagattaagcaactgcagcagtttcaaaaggaggacgcggctctgacaatctatgagatgttacagaatatattcgcaatttttcgacaggacagctctagtaccggatggaatgaaacaatcgttgagaatctgttggccaatgtgtaccatcagatcaaccacctaaagaccgtgttagaggagaagctggagaaagaggactttacaagaggcaagctgatgagtagtctgcacttgaaaaggtattacggacgtattttgcactatttgaaggcaaaggaatatagtcattgtgcttggacgatcgtgagagtcgaaattctgagaaatttctacttcatcaaccgcctgactggatacctccgcaattag

SEQ ID NO: 126235 - DNA, 564 bp, Artificial Sequence
  derived and/or modified sequence
atgaccaataaatgcttactccaaatagcgcttttgctttgtttctccacaaccgccttatcaatgtcctacaacctgctggggtttctccaaaggagcagcaattttcagtgtcagaagctcttatggcagctcaacggaaggctcgagtactgcttaaaggacagaatgaactttgacatccccgaagagattaagcaactgcagcagtttcaaaaggaggacgcggctctgacaatctatgagatgttacagaatatattcgcaatttttcgacaggacagctctagtaccggatggaacgaaaccattgtggaaaatctgctagctaacgtttaccatcagatcaatcatctcaagaccgttctggaggagaaactggaaaaggaagatttcacacggggtaaactgatgtcatccctgcacttgaagagatattacggccgaatcctgcactaccttaaagccaaagagtactctcactgcgcatggacaattgtgagagtggagatcctgaggaacttttacttcatcaatagactgaccggatacctgcgcaactag

SEQ ID NO: 126236 - RNA, 707 nt, Artificial Sequence
  derived and/or modified sequence
gggaaauaagagagaaaagaagaguaagaagaaauauaagagccaccaugaccaacaagugucugcuccagaucgcacucuuguugugcuucucgacgacugcccuuucgaugucauacaaucugcugggauuccuucagaggagcucgaauuuucagugucagaaguuguuguggcaacucaaugggcgacucgaguacugcuugaaagaucggaugaacuuugacauucccgaagaaaucaagcaacugcagcaauuccagaaagaggacgcggcucugacaaucuacgagaugcuucagaacauuuucgcgaucuucagacaggacagcucauccacgggcuggaacgagacaaucguagaaaaccugcucgcaaacgucuaucaccagauuaaucaccucaagacagugcuugaggagaagcuugaaaaagaagauuucacucgcgggaaacugauguccucgcuccauuugaaaagguacuauggaaggauuuugcacuaucucaaggccaaggaguauucccauugcgcguggaccaucgugcgcgucgagauccuucggaacuuuuacuuuaucaaucgguugacggguuaccucagaaauugauaagcugccuucugcggggcuugccuucuggccaugcccuucuucucucccuugcaccuguaccucuuggucuuugaauaaagccugaguaggaag

SEQ ID NO: 126237 - RNA, 564 nt, Artificial Sequence
  derived and/or modified sequence
augaccaauaaaugcuuacuccaaauagcgcuuuugcuuuguuucuccacaaccgccuuaucaauguccuacaaccugcugggguuucuccaaaggagcagcaauuuucagugucagaagcucuuauggcagcucaacggaaggcucgaguacugcuuaaaggacagaaugaacuuugacauccccgaagagauuaagcaacugcagcaguuucaaaaggaggacgcggcucugacaaucuaugagauguuacagaauauauucgcaauuuuucgacaggacagcucuaguaccggauggaaugaaacaaucguugagaaucuguuggccaauguguaccaucagaucaaccaccuaaagaccguguuagaggagaagcuggagaaagaggacuuuacaagaggcaagcugaugaguagucugcacuugaaaagguauuacggacguauuuugcacuauuugaaggcaaaggaauauagucauugugcuuggacgaucgugagagucgaaauucugagaaauuucuacuucaucaaccgccugacuggauaccuccgcaauuag

SEQ ID NO: 126238 - RNA, 564 nt, Artificial Sequence
  derived and/or modified sequence
augaccaauaaaugcuuacuccaaauagcgcuuuugcuuuguuucuccacaaccgccuuaucaauguccuacaaccugcugggguuucuccaaaggagcagcaauuuucagugucagaagcucuuauggcagcucaacggaaggcucgaguacugcuuaaaggacagaaugaacuuugacauccccgaagagauuaagcaacugcagcaguuucaaaaggaggacgcggcucugacaaucuaugagauguuacagaauauauucgcaauuuuucgacaggacagcucuaguaccggauggaacgaaaccauuguggaaaaucugcuagcuaacguuuaccaucagaucaaucaucucaagaccguucuggaggagaaacuggaaaaggaagauuucacacgggguaaacugaugucaucccugcacuugaagagauauuacggccgaauccugcacuaccuuaaagccaaagaguacucucacugcgcauggacaauugugagaguggagauccugaggaacuuuuacuucaucaauagacugaccggauaccugcgcaacuag

SEQ ID NO: 126239 - protein, 195 aa, Artificial Sequence
  derived and/or modified sequence
MALLFPLLAALVMTSYSPVGSLGCDLPQNHGLLSRNTLVLLHQMRRISPFLCLKDRRDFRFPQEMVKGSQLQKAHVMSVLHEMLQQIFSLFHTERSSAAWNMTLLDQLHTGLHQQLQHLETCLLQVVGEGESAGAISSPALTLRRYFQGIRVYLKEKKYSDCAWEVVRMEIMKSLFLSTNMQERLRSKDRDLGSS

SEQ ID NO: 126240 - DNA, 588 bp, Artificial Sequence
  derived and/or modified sequence
atggcactgctgtttccactactggctgccctcgttatgacctcatactctcctgtggggtcactagggtgtgatctgccgcagaatcacggactgctgtcccggaacaccctggtgctgctgcaccagatgagaaggatcagccccttcctgtgtttgaaggacagacgtgacttccgatttccacaggagatggtcaagggatcccaactccagaaggcccacgttatgtctgtactacacgagatgttgcagcagattttctccctgttccacaccgaacgctcctctgccgcatggaacatgacacttctggaccagctgcacacgggcctgcaccagcagctacagcacctggagacttgcttgctgcaggtggttggtgaaggggaatctgccggcgccatttccagtccggctcttactttgagacgatatttccaggggatccgcgtgtatttaaaagagaagaaatatagcgattgtgcatgggaggtcgtgcgcatggagatcatgaaatctttgtttctgtctactaatatgcaggaacgcttgaggtccaaggatcgcgacctgggttcttcatag

SEQ ID NO: 126241 - DNA, 1514 bp, Artificial Sequence
  derived and/or modified sequence
gatctggtaaacctgaagcaaatatagaaacctatagggcctgacttcctacataaagtaaggagggtaaaaatggaggctagaataagggttaaaattttgcttctagaacagagaaaatgatttttttcatatatatatgaatatatattatatatacacatatatacatatattcactatagtgtgtatacataaatatataatatatatattgttagtgtagtgtgtgtctgattatttacatgcatatagtatatacacttatgactttagtacccagacgtttttcatttgattaagcattcatttgtattgacacagctgaagtttactggagtttagctgaagtctaatgcaaaattaatagattgttgtcatcctcttaaggtcatagggagaacacacaaatgaaaacagtaaaagaaactgaaagtacagagaaatgttcagaaaatgaaaaccatgtgtttcctattaaaagccatgcatacaagcaatgtcttcagaaaacctagggtccaaggttaagccatatcccagctcagtaaagccaggagcatcctcatttcccaatggccctcctgttccctctactggcagccctagtgatgaccagctatagccctgttggatctctgggctgtgatctgcctcagaaccatggcctacttagcaggaacaccttggtgcttctgcaccaaatgaggagaatctcccctttcttgtgtctcaaggacagaagagacttcaggttcccccaggagatggtaaaagggagccagttgcagaaggcccatgtcatgtctgtcctccatgagatgctgcagcagatcttcagcctcttccacacagagcgctcctctgctgcctggaacatgaccctcctagaccaactccacactggacttcatcagcaactgcaacacctggagacctgcttgctgcaggtagtgggagaaggagaatctgctggggcaattagcagccctgcactgaccttgaggaggtacttccagggaatccgtgtctacctgaaagagaagaaatacagcgactgtgcctgggaagttgtcagaatggaaatcatgaaatccttgttcttatcaacaaacatgcaagaaagactgagaagtaaagatagagacctgggctcatcttgaaatgattctcattgattaatttgccatataacacttgcacatgtgactctggtcaattcaaaagactcttatttcggctttaatcacagaattgactgaattagttctgcaaatactttgtcggtatattaagccagtatatgttaaaaagacttaggttcaggggcatcagtccctaagatgttatttatttttactcatttatttattcttacattttatcatatttatactatttatattcttatataacaaatgtttgcctttacattgtattaagataacaaaacatgttcagctttccatttggttaaatattgtattttgttatttattaaattattttcaaac

SEQ ID NO: 126242 - DNA, 588 bp, Artificial Sequence
  derived and/or modified sequence
atggccctgctcttccccctgctggccgccctggtgatgaccagctacagccctgtgggcagcctgggctgtgacctgccccagaaccacggcctgctgagcaggaacaccctggtgctgctgcaccagatgaggcgcatcagccccttcctgtgcctgaaggaccggcgggacttccgcttcccccaggagatggtgaagggcagccagctgcagaaggcccacgtgatgtctgtgctgcacgagatgctgcagcagatcttcagcctcttccacacagagaggagcagcgctgcctggaacatgaccctgctggaccagctgcacacaggcctgcaccagcagctgcagcacctggagacctgcctgctgcaggtggtgggggagggggagagcgctggggccatcagcagccctgccctgaccctgcggcgctacttccagggcatccgggtgtacctgaaggagaagaagtacagcgactgtgcctgggaggtggtgaggatggagatcatgaagagcctcttcctgagcaccaacatgcaggagcggctgcggagcaaggaccgggacctgggcagcagctag

SEQ ID NO: 126243 - DNA, 588 bp, Artificial Sequence
  derived and/or modified sequence
atggccctgctgttccccctgctggccgccctggtgatgaccagctactctcccgtcggcagtttagggtgtgacctcccccagaaccatggtctgctcagcagaaatactttggtcctcctgcaccagatgcgcagaatcagtccattcctgtgcctgaaggaccgaagagacttcaggttccctcaagagatggtgaaaggaagtcaacttcaaaaagcccacgtcatgtccgtgttgcacgaaatgctacagcagatattctccctgttccacactgagcgctccagtgcagcctggaacatgaccctcttggatcaactacacacaggcttgcatcagcagctacagcaccttgaaacctgcctcttgcaagtggtgggggagggtgagtccgccggagccataagctcacccgcattaactctgcgccgctattttcaaggcattagggtttatctgaaagagaagaagtacagcgattgtgcttgggaagtggtacgaatggaaattatgaagagtctattcctgagtacaaacatgcaagaaagactgcgttcaaaagatcgagatctagggtctagctag

SEQ ID NO: 126244 - DNA, 588 bp, Artificial Sequence
  derived and/or modified sequence
atggcacttttgttcccactcctcgccgctctggtgatgacctcttacagccctgttggaagccttggctgcgatctaccacagaaccatggattactctctcgtaatacactggtcctccttcaccagatgcgccgaatcagtcctttcttgtgcctgaaggatcgtcgggatttccgctttccccaggagatggttaaaggcagtcagctgcaaaaagcacacgtgatgtcagttctccacgagatgctgcagcagatcttctccttgtttcacacagagcgaagctctgccgcttggaacatgacactgctagaccagttgcataccgggttacaccaacagttacagcacctggagacctgcctactccaggtggtgggcgaaggtgaaagtgccggagcaattagttctcccgcattgacactcagacgatactttcagggcatcagagtctatctgaaggaaaagaaatattctgattgtgcgtgggaggtcgtgcggatggagattatgaagtcactgttcttatccacaaacatgcaggaacggcttagatcgaaagaccgcgatttaggctcgtcttag

SEQ ID NO: 126245 - DNA, 588 bp, Artificial Sequence
  derived and/or modified sequence
atggccctgctgttccccctgctggccgccctggtgatgaccagctacagccccgtgggcagcctgggctgcgacctgccccagaaccacggcctgctgagcagaaacaccctggtgctgctgcaccagatgagaagaatcagccccttcctgtgcctgaaggacagaagagacttcagattcccccaggagatggtgaagggcagccagctgcagaaggcccacgtgatgagcgtgctgcacgagatgctgcagcagatcttcagcctgttccacaccgagagaagcagcgccgcctggaacatgaccctgctggaccagctgcacaccggcctgcaccagcagctgcagcacctggagacctgcctgctgcaggtggtgggcgagggcgagagcgccggcgccatcagcagccccgccctgaccctgagaagatacttccagggcatcagagtgtacctgaaggagaagaagtacagcgactgcgcctgggaggtggtgagaatggagatcatgaagagcctgttcctgagcaccaacatgcaggagagactgagaagcaaggacagagacctgggcagcagctag

SEQ ID NO: 126246 - protein, 240 aa, Artificial Sequence
  derived and/or modified sequence
MTPHRLLPPLLLLLALLLAASPGGALARCPGCGQGVQAGCPGGCVEEEDGGSPAEGCAEAEGCLRREGQECGVYTPNCAPGLQCHPPKDDEAPLRALLLGRGRCLPARAPAVAEENPKESKPQAGTARPQDVNRRDQQRNPGTSTTPSQPNSAGVQDTEMGPCRRHLDSVLQQLQTEVYRGAQTLYVPNCDHRGFYRKRQCRSSQGQRRGPCWCVDRMGKSLPGSPDGNGSSSCPTGSSG

SEQ ID NO: 126247 - protein, 136 aa, Artificial Sequence
  derived and/or modified sequence
MTPHRLLPPLLLLLALLLAASPGGALARCPGCGQGVQAGCPGGCVEEEDGGSPAEGCAEAEGCLRREGQECGVYTPNCAPGLQCHPPKDDEAPLRALLLGRGRCLPARAPAVLSSPRTLRKLSPEPGATCSCRGES

SEQ ID NO: 126248 - protein, 238 aa, Artificial Sequence
  derived and/or modified sequence
MTPHRLLPPLLLLLALLLAASPGGALARCPGCGQGVQAGCPGGCVEEEDGGSPAEGCAEAEGCLRREGQECGVYTPNCAPGLQCHPPKDDEAPLRALLLGRGRCLPARAPAEENPKESKPQAGTARPQDVNRRDQQRNPGTSTTPSQPNSAGVQDTEMGPCRRHLDSVLQQLQTEVYRGAQTLYVPNCDHRGFYRKRQCRSSQGQRRGPCWCVDRMGKSLPGSPDGNGSSSCPTGSSG

SEQ ID NO: 126249 - DNA, 723 bp, Artificial Sequence
  derived and/or modified sequence
atgaccccccacagactgctgccccccctgctgctgctgctggccctgctgctggccgccagccccggcggcgccctggccagatgccccggctgcggccagggcgtgcaggccggctgccccggcggctgcgtggaggaggaggacggcggcagccccgccgagggctgcgccgaggccgagggctgcctgagaagagagggccaggagtgcggcgtgtacacccccaactgcgcccccggcctgcagtgccacccccccaaggacgacgaggcccccctgagagccctgctgctgggcagaggcagatgcctgcccgccagagcccccgccgtggccgaggagaaccccaaggagagcaagccccaggccggcaccgccagaccccaggacgtgaacagaagagaccagcagagaaaccccggcaccagcaccacccccagccagcccaacagcgccggcgtgcaggacaccgagatgggcccctgcagaagacacctggacagcgtgctgcagcagctgcagaccgaggtgtacagaggcgcccagaccctgtacgtgcccaactgcgaccacagaggcttctacagaaagagacagtgcagaagcagccagggccagagaagaggcccctgctggtgcgtggacagaatgggcaagagcctgcccggcagccccgacggcaacggcagcagcagctgccccaccggcagcagcggctag

SEQ ID NO: 126250 - DNA, 411 bp, Artificial Sequence
  derived and/or modified sequence
atgaccccccacagactgctgccccccctgctgctgctgctggccctgctgctggccgccagccccggcggcgccctggccagatgccccggctgcggccagggcgtgcaggccggctgccccggcggctgcgtggaggaggaggacggcggcagccccgccgagggctgcgccgaggccgagggctgcctgagaagagagggccaggagtgcggcgtgtacacccccaactgcgcccccggcctgcagtgccacccccccaaggacgacgaggcccccctgagagccctgctgctgggcagaggcagatgcctgcccgccagagcccccgccgtgctgagcagccccagaaccctgagaaagctgagccccgagcccggcgccacctgcagctgcagaggcgagagctag

SEQ ID NO: 126251 - DNA, 717 bp, Artificial Sequence
  derived and/or modified sequence
atgaccccccacagactgctgccccccctgctgctgctgctggccctgctgctggccgccagccccggcggcgccctggccagatgccccggctgcggccagggcgtgcaggccggctgccccggcggctgcgtggaggaggaggacggcggcagccccgccgagggctgcgccgaggccgagggctgcctgagaagagagggccaggagtgcggcgtgtacacccccaactgcgcccccggcctgcagtgccacccccccaaggacgacgaggcccccctgagagccctgctgctgggcagaggcagatgcctgcccgccagagcccccgccgaggagaaccccaaggagagcaagccccaggccggcaccgccagaccccaggacgtgaacagaagagaccagcagagaaaccccggcaccagcaccacccccagccagcccaacagcgccggcgtgcaggacaccgagatgggcccctgcagaagacacctggacagcgtgctgcagcagctgcagaccgaggtgtacagaggcgcccagaccctgtacgtgcccaactgcgaccacagaggcttctacagaaagagacagtgcagaagcagccagggccagagaagaggcccctgctggtgcgtggacagaatgggcaagagcctgcccggcagccccgacggcaacggcagcagcagctgccccaccggcagcagcggctag

SEQ ID NO: 126252 - DNA, 723 bp, Artificial Sequence
  derived and/or modified sequence
atgaccccccacagactgctaccacctctgctgctgcttttggctctgcttctggcagcatcacctggcggggccctagcccggtgtcccggctgtgggcaaggagtgcaggctgggtgtccaggagggtgtgtggaggaagaggatggcggatccccggccgaaggctgcgccgaggccgaaggatgtctcagacgagaggggcaggagtgcggagtgtacaccccaaattgtgcacccggactacagtgccacccaccgaaggacgacgaggctcccttaagggccctgctgctcgggcgcggcaggtgcctgccagcccgtgcacccgccgtggccgaagagaaccctaaggagagtaaaccacaagccggcaccgccagacctcaagacgtgaataggagagatcagcagaggaatccaggcacgagtaccacgccttcccagcccaactctgctggggttcaggatacagaaatggggccctgtagaaggcatctggacagcgtgctccaacagttgcaaacagaagtgtatcgcggtgctcagacactgtatgtaccaaattgtgaccaccgagggttctacaggaagcgacagtgtcgatcatcccagggccaaaggcgcggcccttgctggtgtgtggaccgaatggggaagtccttaccaggcagccccgatggcaacgggtcttcctcatgtcctacaggctcgagcgggtag

SEQ ID NO: 126253 - DNA, 411 bp, Artificial Sequence
  derived and/or modified sequence
atgacacctcacagactcttgccaccactccttctcctgcttgctcttctcttggccgctagccccgggggcgcgcttgcacgctgcccagggtgcggacagggcgtacaggccggctgtccaggtggttgtgttgaagaggaagacggtggctccccagcagaaggatgtgccgaagctgaaggatgcctgaggcgggaggggcaggagtgcggcgtttatacacccaactgtgctccaggccttcagtgccatcctcctaaagatgatgaagcaccactgcgcgctctccttctcggaaggggacgctgtctgccagcaagagcacctgccgtgctgagctccccaagaaccttgcggaagctcagccccgaaccaggcgccacatgctcctgtagaggtgaaagctag

SEQ ID NO: 126254 - DNA, 717 bp, Artificial Sequence
  derived and/or modified sequence
atgactccccacagactgctccccccactcctgctcttactagcgctgcttctggccgcctctcccggtggcgccctcgcccgatgccccggatgtggtcagggcgtccaggcgggttgtccaggtggttgtgtcgaagaagaggatggcgggtctccagcggagggctgtgctgaagcagagggttgcctgaggagggagggtcaggagtgcggagtttataccccgaattgtgccccaggtttacagtgccaccccccaaaagacgatgaagcccccttaagagccttgctactgggcagggggcgatgcctgccggcaagagcacccgccgaggagaacccaaaagagtcaaagccacaggccggcactgccagaccacaagacgtcaatcgtagggaccagcagcgcaatcccgggacgtcaacaactcccagccagcccaactcagctggagtccaggacaccgagatgggtccttgcaggcgtcacctggacagcgttttgcagcagctccagactgaggtctaccgcggagctcagaccctttatgtgcccaactgtgatcacaggggattctataggaaaagacagtgccgctccagccaggggcagcgacgaggcccatgttggtgtgtagatcggatgggtaaatctctgcctggcagccccgacggaaacggcagcagttcatgcccaaccggtagcagcggctag

SEQ ID NO: 126255 - DNA, 723 bp, Artificial Sequence
  derived and/or modified sequence
atgaccccccaccggctgctgccccccctgctgctgctgctggccctgctgctggccgccagccctgggggcgccctggcccgctgccccggctgcggccagggcgtgcaggccggctgccctgggggctgtgtggaggaggaggatggcggcagccctgctgagggctgtgccgaggccgagggctgcctgcggcgggagggccaggagtgtggggtgtacacccccaactgtgcccctggcctgcagtgccacccccccaaggatgatgaggcccccctgcgggccctgctgctgggccggggccgctgcctgcctgcccgggccccagctgtggccgaggagaaccccaaggagagcaagccccaggccggcacagcccggccccaggatgtgaacagaagagaccagcagagaaatcctggcaccagcaccacccccagccagcccaacagcgctggggtgcaggacacagagatgggcccctgccgccgccacctggacagcgtgctgcagcagctgcagacagaggtgtacagaggagcccagaccctgtatgtgcccaactgtgaccaccggggcttctacaggaagaggcagtgccgcagcagccagggccagaggcggggcccctgctggtgtgtggacaggatgggcaagagcctgcccggcagcccagatggaaatggcagcagcagctgccccaccggcagcagtggatag

SEQ ID NO: 126256 - DNA, 411 bp, Artificial Sequence
  derived and/or modified sequence
atgaccccccaccggctgctgccccccctgctgctgctgctggccctgctgctggccgccagccctgggggcgccctggcccgctgccccggctgcggccagggcgtgcaggccggctgccctgggggctgtgtggaggaggaggatggcggcagccctgctgagggctgtgccgaggccgagggctgcctgcggcgggagggccaggagtgtggggtgtacacccccaactgtgcccctggcctgcagtgccacccccccaaggatgatgaggcccccctgcgggccctgctgctgggccggggccgctgcctgcctgcccgggccccagctgtgctgagcagccccaggaccctgaggaagctgagccctgagcccggggccacctgcagctgccgcggggagagctag

SEQ ID NO: 126257 - DNA, 717 bp, Artificial Sequence
  derived and/or modified sequence
atgaccccccaccggctgctgccccccctgctgctgctgctggccctgctgctggccgccagccctgggggcgccctggcccgctgccccggctgcggccagggcgtgcaggccggctgccctgggggctgtgtggaggaggaggatggcggcagccctgctgagggctgtgccgaggccgagggctgcctgcggcgggagggccaggagtgtggggtgtacacccccaactgtgcccctggcctgcagtgccacccccccaaggatgatgaggcccccctgcgggccctgctgctgggccggggccgctgcctgcctgcccgggccccagctgaggagaaccccaaggagagcaagccccaggccggcacagcccggccccaggatgtgaacagaagagaccagcagagaaatcctggcaccagcaccacccccagccagcccaacagcgctggggtgcaggacacagagatgggcccctgccgccgccacctggacagcgtgctgcagcagctgcagacagaggtgtacagaggagcccagaccctgtatgtgcccaactgtgaccaccggggcttctacaggaagaggcagtgccgcagcagccagggccagaggcggggcccctgctggtgtgtggacaggatgggcaagagcctgcccggcagcccagatggaaatggcagcagcagctgccccaccggcagcagtggatag

SEQ ID NO: 126258 - DNA, 723 bp, Artificial Sequence
  derived and/or modified sequence
atgaccccccaccggctgctgccccccctgctgctgctgctggccctcctgctcgctgcaagcccgggcggggcattggcaaggtgccctggatgcggccagggggtgcaggcagggtgcccaggcgggtgcgtggaagaggaagacggaggctccccggctgaaggctgcgcagaggctgaagggtgtctccgccgcgaagggcaagagtgtggagtgtatacgccgaactgcgctcccggcctgcagtgtcaccccccgaaagacgatgaagcccccttgagggcactgctgttgggacgaggcagatgcctgcccgctagggcacccgcagtggccgaagagaatccgaaggagagtaaaccgcaggctgggaccgcacgcccccaggacgtcaacaggcgtgatcagcagagaaaccctggaacctctaccactccgtctcaacctaactcggcgggagtccaggataccgaaatgggcccatgcaggaggcaccttgattccgtcctccagcagctccagacagaagtttatcgcggagcacagaccctttatgtgccaaactgcgaccatcggggcttctaccgaaaaagacagtgccggtcttcccaggggcagcgacgcggcccatgctggtgtgtggataggatggggaagagcctgcctgggtccccagatggaaatggttctagctcctgtcccactggctcaagcggctag

SEQ ID NO: 126259 - DNA, 411 bp, Artificial Sequence
  derived and/or modified sequence
atgaccccccaccggctgctgccccccctgctgctgctgctggccttgctgctagcagcgtcacccggcggcgccctcgcacggtgtccagggtgcgggcagggggtgcaggcagggtgccccggtggatgcgtggaggaagaggatggtgggtctcccgctgagggatgcgccgaagccgagggctgcctgcgccgcgaaggacaggaatgcggggtgtataccccaaattgcgctcccggcctgcagtgccacccacccaaggacgacgaggcaccactgagagcactactcctgggaaggggcaggtgtttgcctgccagggccccagccgtgctctcctcaccaaggactctcaggaaattgtctcccgaacctggggccacatgtagctgtagaggcgaatcctag

SEQ ID NO: 126260 - DNA, 717 bp, Artificial Sequence
  derived and/or modified sequence
atgaccccccaccggctgctgccccccctgctgctgctgctggccctcctgttggcagccagtcccgggggagcactcgcaaggtgcccgggctgtgggcaaggtgtacaggccggatgccccgggggttgcgtcgaagaggaggacggaggtagtcctgcggagggctgcgccgaggcagaaggttgcttacgtcgtgaggggcaagagtgcggagtctacacccctaactgcgcgccagggctccaatgtcatccaccaaaggacgacgaagcccctctgcgagcactgctactgggcaggggtaggtgtctgcccgctagggcccccgctgaggagaacccgaaagaatcaaagccacaggccggtactgccaggcctcaagatgtgaaccgtcgcgatcagcagcgaaaccctgggacttctaccaccccatcccaaccaaactctgctggcgttcaggacaccgaaatggggccgtgtagacgccatttggacagtgtgctccagcaactgcaaacagaggtttatcgaggagcccagacactctacgttccaaattgcgatcacaggggcttttacagaaaaaggcaatgccgctcatcccagggtcagaggcgtggaccttgttggtgtgtcgaccggatgggtaagagtttgcctggttcaccagacgggaacggctcctccagttgccccacgggaagcagtggctag

SEQ ID NO: 126261 - DNA, 723 bp, Artificial Sequence
  derived and/or modified sequence
atgacaccacatcgcttgcttcctcccctgttgctcctgctcgctttgctccttgccgcaagcccaggcggagcattggcccgatgtccaggttgcggacagggagtgcaggctggttgtccaggtggttgtgttgaggaagaggacgggggatctcccgcagaagggtgtgccgaagctgaaggctgtttacgtcgcgaaggccaagagtgcggcgtgtacacacctaattgcgcaccaggtctacagtgtcatcccccaaaggacgacgaggcccctctccgagcactgctgctgggaagagggaggtgccttccagctcgagccccagccgttgcagaagagaatcctaaggaatccaagcctcaggctggcactgccagacctcaagatgttaatcggagagaccagcaacgaaatcccggaactagtaccactccgagccagccaaatagtgccggagtgcaagatacggaaatggggccatgccggcgacatctggactccgtcttgcagcagctgcagacagaggtgtatcggggtgctcagactctgtatgtccccaattgcgaccaccggggattctatcgcaaacggcagtgtaggagctctcaggggcagcggagaggcccatgctggtgcgttgatagaatgggcaagtctctgcctgggtcacccgatggaaacggcagctcttcctgccccaccggctctagcggttag

SEQ ID NO: 126262 - DNA, 411 bp, Artificial Sequence
  derived and/or modified sequence
atgactccccataggctgctgccacctctgctgctcttactcgccctactgttggcagcttcccccggtggggcattagcccgttgccccggttgcggtcagggggtgcaggccggttgtccagggggttgtgtcgaagaagaggacgggggaagccccgcagaaggatgtgctgaggccgaaggatgtctgcgacgcgagggccaggagtgtggggtttacacccctaattgcgcacctgggctgcagtgccacccgccaaaagatgatgaagcccctttaagggccctgctcttggggaggggacgttgtttacccgcaagggctcctgccgtgctttcctcccctcggaccctacgcaaactttccccggaacccggtgcaacgtgttcatgcagaggcgaatcgtag

SEQ ID NO: 126263 - DNA, 717 bp, Artificial Sequence
  derived and/or modified sequence
atgactccccatcgactgcttcctcccctgctcctcctccttgcactcctattggccgctagtcctgggggtgcactggctcggtgcccaggatgtggacagggcgtgcaggccggatgcccagggggttgtgtcgaggaggaagacggcggttcgccagcagaagggtgtgctgaggcagaaggatgccttcgcagagagggacaagagtgtggagtgtacacgcctaactgtgcccctggcttacagtgccacccgccaaaagacgatgaggcccctttgcgcgcactgctgctaggcaggggcagatgcctgcctgctcgcgctcctgcggaggaaaacccaaaggaaagtaagcctcaggccggaacagcaagaccgcaggatgtaaatcgacgcgaccaacagcggaaccccggaactagcaccaccccaagccagccgaacagtgctggggtccaggacacagagatggggccatgccggcgtcaccttgatagtgtcttacagcagctccagactgaggtatacaggggcgctcagacgctgtatgtgcctaactgtgaccatcgcggtttttatcgaaaacgccagtgtcgaagcagtcagggacaaaggagagggccatgctggtgcgtggaccggatgggcaagagcctgccaggttcccctgacggaaacgggtccagttcctgtcctacagggtccagtggatag

SEQ ID NO: 126264 - DNA, 723 bp, Artificial Sequence
  derived and/or modified sequence
atgacgccccaccgcttactgccccccttactgttgttacttgcgttactacttgccgcctcacctggcggcgctctagctaggtgtcccggatgcggccagggcgtgcaggctggctgccccggcggctgtgtagaggaagaggatggaggatccccagcagaaggctgcgccgaagccgagggctgtctgcggagagaaggccaagagtgtggggtctatacccccaactgcgccccaggactgcaatgtcacccccccaaagacgatgaagccccactcagagcactactgctcggaagaggcagatgtctgccagcccgggctcctgccgtcgcagaagaaaaccctaaggagagtaagccacaggccggtactgcccgcccccaggacgtgaatagaagggaccagcagaggaacccaggaaccagtacaacgcccagtcagcctaattctgccggcgtccaggataccgagatggggccttgtcggcgacatttagacagtgtcctccagcagctgcagacagaagtgtatcgcggcgcacagacactgtatgttccaaattgtgaccatagaggtttctaccggaagcgccagtgccgatcaagccaggggcagcgacgaggcccctgctggtgtgtggacaggatgggcaaatccttacccgggtcgcccgatgggaacgggtcaagctcatgcccgactgggtcatcgggatag

SEQ ID NO: 126265 - DNA, 411 bp, Artificial Sequence
  derived and/or modified sequence
atgacccctcacaggctactccccccactgttgctgctgctggccttgcttctggccgcctctcccggcggggccctggcgagatgtccaggatgcggccagggagtacaggccgggtgtcccgggggatgtgttgaagaagaagacggaggtagtccagcagagggctgtgcagaggctgagggctgtttacgacgcgagggtcaggagtgcggcgtttacactcccaactgtgctcctgggttgcaatgccaccccccaaaagatgatgaagctcccctccgggcgctgctgctaggcagaggccgctgtctacccgccagggcaccagcagtcctgtcaagccccaggaccctcagaaaactgagcccagaaccaggagcaacctgttcctgtcgcggagaatcctag

SEQ ID NO: 126266 - DNA, 717 bp, Artificial Sequence
  derived and/or modified sequence
atgacaccacaccggctgctcccccctctgttgctgctacttgccctcctgttggccgcaagccccggaggagccctcgcccgctgcccaggctgtggacagggagtgcaggccggatgtcccggagggtgcgtggaagaagaggacggaggctcgccagccgaaggatgtgcagaagctgaggggtgtctgcgcagagagggccaggagtgcggcgtatacactccaaattgtgctccagggctgcagtgccaccccccaaaagatgacgaggcgcccctccgggcacttctgttaggaagaggccgatgcctccctgcaagagcgccagcagaagagaacccaaaggaatccaagccccaggccggaacagctcgtccccaggatgttaatcggagagatcagcagagaaacccaggtacctctactacgccctcccagcccaacagcgcaggggtccaagataccgaaatgggaccttgtcgtagacacctggatagcgttctgcaacagttgcagacagaggtttatcgcggtgcccagaccctttacgtccccaattgtgatcatcggggattctaccgcaaaaggcagtgtagatcttcacagggacagcgcagagggccatgttggtgtgtagatcggatggggaaatcactacccgggtcacctgacggaaacggctctagctcttgccctactgggtcatctggctag

SEQ ID NO: 126267 - DNA, 723 bp, Artificial Sequence
  derived and/or modified sequence
atgactccccacaggcttctacctcctctgctcctgctcttggcgctgctgctagccgcgagtcctggcggtgccctggctaggtgccccggctgcggacaaggagtgcaggctggatgtcccggcggctgtgttgaagaagaggacggtggaagtccagccgaaggctgtgctgaagctgaaggatgtctgagacgagaaggtcaggaatgtggggtctacactcctaactgtgctcccggcctacaatgccatccaccaaaagacgacgaggcaccactgcgcgcgttactcttgggcagaggaagatgcctcccagcccgtgccccagcagtagcggaggagaaccctaaagagagtaagccccaagccgggactgcccggcctcaagacgtgaatcggagagatcaacaacggaaccctggcaccagtaccaccccatcccaacccaatagtgccggtgtacaggacacggaaatgggtccatgtcgacgccacctagactcagttctccaacaactccagactgaggtttaccgcggagctcagactctgtacgtgcccaattgtgatcatcgaggattttacaggaagcgccaatgccggtcctcacaggggcaaagacgtggaccatgctggtgtgtcgatagaatggggaagtctctcccaggttctccagatggaaacgggagctcatcttgtccaaccggctctagcggctag

SEQ ID NO: 126268 - DNA, 411 bp, Artificial Sequence
  derived and/or modified sequence
atgactccacacagactcttgcccccactcttgctgttgcttgcactgctcctggctgcgtcacccggtggtgcgctggccagatgtcccggatgtggtcagggagtccaagccggatgtcctggtgggtgtgttgaggaagaagacggtggaagtccagcagaaggctgtgcggaagccgaaggctgtcttagaagggagggacaggagtgcggagtctatacgccaaactgtgcaccaggcctgcagtgccaccctcccaaagacgatgaagccccattgagagctctgctactgggaaggggaagatgtttgccagcccgtgcccccgccgtcctaagttcccccagaaccttacgaaaactgtcccctgagcccggagccacatgcagctgtaggggcgaaagttag

SEQ ID NO: 126269 - DNA, 717 bp, Artificial Sequence
  derived and/or modified sequence
atgaccccccataggctgctcccacccttgttactcctacttgcattgctgctggctgcttctccaggtggagccctcgcgagatgtcctggatgcggacaaggcgtgcaggctggctgtccaggtggatgcgttgaagaggaagacggaggaagtccagctgaagggtgcgccgaagctgaaggatgtcttaggagggagggacaggagtgtggcgtttacactcccaactgcgcacctgggttgcaatgtcaccctcctaaagatgatgaagctcccctgagagcattgcttctgggaagaggccggtgcctacccgcaagagccccagctgaggaaaaccctaaagagtctaagccccaggccggtaccgcaagacctcaggacgtaaaccggcgcgatcaacagcggaatcccggtacatccactacaccgtctcagccgaatagtgcaggtgtgcaggatacagaaatgggcccttgccgacgacatctggactccgttttgcaacaactacagactgaagtgtatcgtggtgcccaaacactttatgtgcccaattgcgaccaccgcggcttctacagaaagaggcagtgcagatcatctcaaggtcagagacgcggaccttgctggtgcgtggatagaatggggaaatcacttcctggcagtccggatggaaacggaagcagctcttgtcccactggctcaagtggctag

SEQ ID NO: 126270 - DNA, 1169 bp, Artificial Sequence
  derived and/or modified sequence
gggaacaaagcaagaaaaatcagagcaatttgggaagtaaacagaaactggaaagggagagggaaagaagagtggggaggacccaggttgggggggccctctccagtcccacccagtttagggaatgcccctgccctctcccccaccccccttcacctggctcttaaagggcccggcccctggccggcggctacttaagacagaggggcggcggcgggcagcagctgcgctgcgactgctctggaaggagaggacggggcacaaaccctgaccatgaccccccacaggctgctgccaccgctgctgctgctgctagctctgctgctcgctgccagcccaggaggcgccttggcgcggtgcccaggctgcgggcaaggggtgcaggcgggttgtccagggggctgcgtggaggaggaggatggggggtcgccagccgagggctgcgcggaagctgagggctgtctcaggagggaggggcaggagtgcggggtctacacccctaactgcgccccaggactgcagtgccatccgcccaaggacgacgaggcgcctttgcgggcgctgctgctcggccgaggccgctgccttccggcccgcgcgcctgctgttgcagaggagaatcctaaggagagtaaaccccaagcaggcactgcccgcccacaggatgtgaaccgcagagaccaacagaggaatccaggcacctctaccacgccctcccagcccaattctgcgggtgtccaagacactgagatgggcccatgccgtagacatctggactcagtgctgcagcaactccagactgaggtctaccgaggggctcaaacactctacgtgcccaattgtgaccatcgaggcttctaccggaagcggcagtgccgctcctcccaggggcagcgccgaggtccctgctggtgtgtggatcggatgggcaagtccctgccagggtctccagatggcaatggaagctcctcctgccccactgggagtagcggctaaagctgggggatagaggggctgcagggccactggaaggaacatggagctgtcatcactcaacaaaaaaccgaggccctcaatccaccttcaggccccgccccatgggcccctcaccgctggttggaaagagtgttggtgttggctggggtgtcaataaagctgtgcttggggtc

SEQ ID NO: 126271 - DNA, 712 bp, Artificial Sequence
  derived and/or modified sequence
agctgcgctgcgactgctctggaaggagaggacggggcacaaaccctgaccatgaccccccacaggctgctgccaccgctgctgctgctgctagctctgctgctcgctgccagcccaggaggcgccttggcgcggtgcccaggctgcgggcaaggggtgcaggcgggttgtccagggggctgcgtggaggaggaggatggggggtcgccagccgagggctgcgcggaagctgagggctgtctcaggagggaggggcaggagtgcggggtctacacccctaactgcgccccaggactgcagtgccatccgcccaaggacgacgaggcgcctttgcgggcgctgctgctcggccgaggccgctgccttccggcccgcgcgcctgctgtcctgagctctccccggaccctccggaaactttctccagagccaggagcaacctgcagttgcagaggagaatcctaaggagagtaaaccccaagcaggcactgcccgcccacaggatgtgaaccgcagagaccaacagaggaatccaggcacctctaccacgccctcccagcccaattctgcgggtgtccaagacactgagatgggcccatgccgtagacatctggactcagtgctgcagcaactccagactgaggtctaccgaggggctcaaacactctacgtgcccaattgtgaccatcgaggcttctaccggaagcggcaggtg

SEQ ID NO: 126272 - DNA, 1177 bp, Artificial Sequence
  derived and/or modified sequence
gagattcccgggaacaaagcaagaaaaatcagagcaatttgggaagtaaacagaaactggaaagggagagggaaagaagagtggggaggacccaggttgggggggccctctccagtcccacccagtttagggaatgcccctgccctctcccccaccccccttcacctggctcttaaagggcccggcccctggccggcggctacttaagacagaggggcggcggcgggcagcagctgcgctgcgactgctctggaaggagaggacggggcacaaaccctgaccatgaccccccacaggctgctgccaccgctgctgctgctgctagctctgctgctcgctgccagcccaggaggcgccttggcgcggtgcccaggctgcgggcaaggggtgcaggcgggttgtccagggggctgcgtggaggaggaggatggggggtcgccagccgagggctgcgcggaagctgagggctgtctcaggagggaggggcaggagtgcggggtctacacccctaactgcgccccaggactgcagtgccatccgcccaaggacgacgaggcgcctttgcgggcgctgctgctcggccgaggccgctgccttccggcccgcgcgcctgctgaggagaatcctaaggagagtaaaccccaagcaggcactgcccgcccacaggatgtgaaccgcagagaccaacagaggaatccaggcacctctaccacgccctcccagcccaattctgcgggtgtccaagacactgagatgggcccatgccgtagacatctggactcagtgctgcagcaactccagactgaggtctaccgaggggctcaaacactctacgtgcccaattgtgaccatcgaggcttctaccggaagcggcagtgccgctcctcccaggggcagcgccgaggtccctgctggtgtgtggatcggatgggcaagtccctgccagggtctccagatggcaatggaagctcctcctgccccactgggagtagcggctaaagctgggggatagaggggctgcagggccactggaaggaacatggagctgtcatcactcaacaaaaaaccgaggccctcaatccaccttcaggccccgccccatgggcccctcaccgctggttggaaagagtgttggtgttggctggggtgtcaataaagctgtgcttggggtcgctgg

SEQ ID NO: 126273 - RNA, 723 nt, Artificial Sequence
  derived and/or modified sequence
augacgccccaccgcuuacugccccccuuacuguuguuacuugcguuacuacuugccgccucaccuggcggcgcucuagcuaggugucccggaugcggccagggcgugcaggcuggcugccccggcggcuguguagaggaagaggauggaggauccccagcagaaggcugcgccgaagccgagggcugucugcggagagaaggccaagaguguggggucuauacccccaacugcgccccaggacugcaaugucacccccccaaagacgaugaagccccacucagagcacuacugcucggaagaggcagaugucugccagcccgggcuccugccgucgcagaagaaaacccuaaggagaguaagccacaggccgguacugcccgcccccaggacgugaauagaagggaccagcagaggaacccaggaaccaguacaacgcccagucagccuaauucugccggcguccaggauaccgagauggggccuugucggcgacauuuagacaguguccuccagcagcugcagacagaaguguaucgcggcgcacagacacuguauguuccaaauugugaccauagagguuucuaccggaagcgccagugccgaucaagccaggggcagcgacgaggccccugcugguguguggacaggaugggcaaauccuuacccgggucgcccgaugggaacgggucaagcucaugcccgacugggucaucgggauag

SEQ ID NO: 126274 - RNA, 411 nt, Artificial Sequence
  derived and/or modified sequence
augaccccucacaggcuacuccccccacuguugcugcugcuggccuugcuucuggccgccucucccggcggggcccuggcgagauguccaggaugcggccagggaguacaggccgggugucccgggggauguguugaagaagaagacggagguaguccagcagagggcugugcagaggcugagggcuguuuacgacgcgagggucaggagugcggcguuuacacucccaacugugcuccuggguugcaaugccaccccccaaaagaugaugaagcuccccuccgggcgcugcugcuaggcagaggccgcugucuacccgccagggcaccagcaguccugucaagccccaggacccucagaaaacugagcccagaaccaggagcaaccuguuccugucgcggagaauccuag

SEQ ID NO: 126275 - RNA, 717 nt, Artificial Sequence
  derived and/or modified sequence
augacaccacaccggcugcuccccccucuguugcugcuacuugcccuccuguuggccgcaagccccggaggagcccucgcccgcugcccaggcuguggacagggagugcaggccggaugucccggagggugcguggaagaagaggacggaggcucgccagccgaaggaugugcagaagcugaggggugucugcgcagagagggccaggagugcggcguauacacuccaaauugugcuccagggcugcagugccaccccccaaaagaugacgaggcgccccuccgggcacuucuguuaggaagaggccgaugccucccugcaagagcgccagcagaagagaacccaaaggaauccaagccccaggccggaacagcucguccccaggauguuaaucggagagaucagcagagaaacccagguaccucuacuacgcccucccagcccaacagcgcagggguccaagauaccgaaaugggaccuugucguagacaccuggauagcguucugcaacaguugcagacagagguuuaucgcggugcccagacccuuuacguccccaauugugaucaucggggauucuaccgcaaaaggcaguguagaucuucacagggacagcgcagagggccauguugguguguagaucggauggggaaaucacuacccgggucaccugacggaaacggcucuagcucuugcccuacugggucaucuggcuag

SEQ ID NO: 126276 - RNA, 723 nt, Artificial Sequence
  derived and/or modified sequence
augacuccccacaggcuucuaccuccucugcuccugcucuuggcgcugcugcuagccgcgaguccuggcggugcccuggcuaggugccccggcugcggacaaggagugcaggcuggaugucccggcggcuguguugaagaagaggacgguggaaguccagccgaaggcugugcugaagcugaaggaugucugagacgagaaggucaggaauguggggucuacacuccuaacugugcucccggccuacaaugccauccaccaaaagacgacgaggcaccacugcgcgcguuacucuugggcagaggaagaugccucccagcccgugccccagcaguagcggaggagaacccuaaagagaguaagccccaagccgggacugcccggccucaagacgugaaucggagagaucaacaacggaacccuggcaccaguaccaccccaucccaacccaauagugccgguguacaggacacggaaauggguccaugucgacgccaccuagacucaguucuccaacaacuccagacugagguuuaccgcggagcucagacucuguacgugcccaauugugaucaucgaggauuuuacaggaagcgccaaugccgguccucacaggggcaaagacguggaccaugcuggugugucgauagaauggggaagucucucccagguucuccagauggaaacgggagcucaucuuguccaaccggcucuagcggcuag

SEQ ID NO: 126277 - RNA, 411 nt, Artificial Sequence
  derived and/or modified sequence
augacuccacacagacucuugcccccacucuugcuguugcuugcacugcuccuggcugcgucacccgguggugcgcuggccagaugucccggauguggucagggaguccaagccggauguccugguggguguguugaggaagaagacgguggaaguccagcagaaggcugugcggaagccgaaggcugucuuagaagggagggacaggagugcggagucuauacgccaaacugugcaccaggccugcagugccacccucccaaagacgaugaagccccauugagagcucugcuacugggaaggggaagauguuugccagcccgugcccccgccguccuaaguucccccagaaccuuacgaaaacuguccccugagcccggagccacaugcagcuguaggggcgaaaguuag

SEQ ID NO: 126278 - RNA, 717 nt, Artificial Sequence
  derived and/or modified sequence
augaccccccauaggcugcucccacccuuguuacuccuacuugcauugcugcuggcugcuucuccagguggagcccucgcgagauguccuggaugcggacaaggcgugcaggcuggcuguccagguggaugcguugaagaggaagacggaggaaguccagcugaagggugcgccgaagcugaaggaugucuuaggagggagggacaggaguguggcguuuacacucccaacugcgcaccuggguugcaaugucacccuccuaaagaugaugaagcuccccugagagcauugcuucugggaagaggccggugccuacccgcaagagccccagcugaggaaaacccuaaagagucuaagccccaggccgguaccgcaagaccucaggacguaaaccggcgcgaucaacagcggaaucccgguacauccacuacaccgucucagccgaauagugcaggugugcaggauacagaaaugggcccuugccgacgacaucuggacuccguuuugcaacaacuacagacugaaguguaucguggugcccaaacacuuuaugugcccaauugcgaccaccgcggcuucuacagaaagaggcagugcagaucaucucaaggucagagacgcggaccuugcuggugcguggauagaauggggaaaucacuuccuggcaguccggauggaaacggaagcagcucuugucccacuggcucaaguggcuag

SEQ ID NO: 126279 - protein, 993 aa, Artificial Sequence
  derived and/or modified sequence
MASAAVESFVTKQLDLLELERDAEVEERRSWQENISLKELQSRGVCLLKLQVSSQRTGLYGRLLVTFEPRRYGSAAALPSNSFTSGDIVGLYDAANEGSQLATGILTRVTQKSVTVAFDESHDFQLSLDRENSYRLLKLANDVTYRRLKKALIALKKYHSGPASSLIEVLFGRSAPSPASEIHPLTFFNTCLDTSQKEAVLFALSQKELAIIHGPPGTGKTTTVVEIILQAVKQGLKVLCCAPSNIAVDNLVERLALCKQRILRLGHPARLLESIQQHSLDAVLARSDSAQIVADIRKDIDQVFVKNKKTQDKREKSNFRNEIKLLRKELKEREEAAMLESLTSANVVLATNTGASADGPLKLLPESYFDVVVIDECAQALEASCWIPLLKARKCILAGDHKQLPPTTVSHKAALAGLSLSLMERLAEEYGARVVRTLTVQYRMHQAIMRWASDTMYLGQLTAHSSVARHLLRDLPGVAATEETGVPLLLVDTAGCGLFELEEEDEQSKGNPGEVRLVSLHIQALVDAGVPARDIAVVSPYNLQVDLLRQSLVHRHPELEIKSVDGFQGREKEAVILSFVRSNRKGEVGFLAEDRRINVAVTRARRHVAVICDSRTVNNHAFLKTLVEYFTQHGEVRTAFEYLDDIVPENYSHENSQGSSHAATKPQGPATSTRTGSQRQEGGQEAAAPARQGRKKPAGKSLASEAPSQPSLNGGSPEGVESQDGVDHFRAMIVEFMASKKMQLEFPPSLNSHDRLRVHQIAEEHGLRHDSSGEGKRRFITVSKRAPRPRAALGPPAGTGGPAPLQPVPPTPAQTEQPPREQRGPDQPDLRTLHLERLQRVRSAQGQPASKEQQASGQQKLPEKKKKKAKGHPATDLPTEEDFEALVSAAVKADNTCGFAKCTAGVTTLGQFCQLCSRRYCLSHHLPEIHGCGERARAHARQRISREGVLYAGSGTKNGSLDPAKRAQLQRRLDKKLSELSNQRTSRRKERGT

SEQ ID NO: 126280 - DNA, 3955 bp, Artificial Sequence
  derived and/or modified sequence
gtgcgtaacgcacgggcccggcggggaacaccggtccgctgtaacaccggcccggcgcagaagcgggacgtcggcttctaggggcccaggccggcggcggcgatggcctcggcagctgtggagagcttcgtgaccaagcaactggacctgctggagcttgagagagacgcggaggtggaggagcgcaggtcctggcaggagaacatctctctgaaagagctccagagccgaggcgtgtgtttgctgaagctgcaggtatccagccagcgcactgggctgtacggacggctgctggtcacctttgagcccaggcgatacgggtccgcggcagctcttcccagtaacagctttacttctggtgatatcgtgggcctgtacgatgctgctaatgagggcagtcagctggccactgggatcttgacccgggtcacccagaagtcggtcacggtggcctttgatgagtcccacgatttccagttgagcttggaccgagagaattcctacagactgttaaaacttgccaatgatgtcacttacaggcgactgaaaaaagccctgattgctctaaagaagtatcattctggcccagcctcctcactcatagaagtgctctttggcagatctgctcccagtcctgccagtgaaatacacccgctgacattcttcaacacctgcctggacacctcccagaaagaagcggttttatttgcgctgtctcagaaagaacttgccatcatccatggacctcctggcactgggaaaaccacgactgtggttgagatcattcttcaagctgtgaaacaaggcttaaaggttctgtgctgcgccccctccaacatcgccgtggacaatctggtggagcgcctggctctgtgtaagcagcggattctgcgcctgggacaccctgcccgcctcctggagtccattcagcagcactccctggatgcggttttagcgcggagcgacagtgcccagattgttgcagatatcaggaaggacatcgaccaggtctttgtgaaaaacaaaaagacccaggataagagagagaaaagtaattttcgaaatgaaattaagctgttaagaaaagaactgaaggagagggaagaagcagctatgctcgagagcctcacttcggcaaacgtggtccttgcaacaaacacaggtgcgtctgccgatggccccctgaagttgctgcccgagagctacttcgacgtggtggtcattgacgagtgtgcccaggccctcgaggcgagctgctggatccccctgctgaaggccagaaagtgcatcctggcgggcgatcacaagcagctgccccccaccacagtctctcacaaggctgcgctggcaggactgtcactcagcctgatggaacgcctggctgaggagtacggcgcgagggtggtgcggacactgacggtgcagtaccgcatgcaccaggctatcatgcgctgggcctcagacaccatgtaccttgggcagctcacagcccactcttccgtggcaaggcacctcctgagggacctcccaggtgtggctgccacagaagagacgggtgtgcccctgctcttggtggacaccgccggctgcgggctgtttgagctggaggaggaggacgaacagtcgaaagggaaccctggcgaagtccgcctcgtcagtttgcacatccaggctctggtggacgctggtgttccagcccgtgacattgctgtggtctcgccatacaacctccaggtggacctgctcagacagagccttgtgcacaggcaccctgagcttgaaatcaagtctgtcgatggcttccaaggccgagagaaggaggccgtgatactgtccttcgtcagatccaacaggaaaggtgaagttggttttcttgctgaggaccggaggatcaacgtggctgtcacccgtgcccgacgccacgtggcggtcatctgtgactcccgtactgtcaacaaccatgcatttttgaagaccctggtggagtatttcacacagcatggggaagtacgcacggcctttgagtatcttgacgatattgtcccagaaaactattcccatgagaactcccagggttccagccacgctgccaccaagccccagggacctgctacgtccaccaggaccggaagccagcggcaggagggaggccaggaggctgcagcacctgccagacagggccggaagaagccggctgggaagtctctggcctctgaagctccatctcagcccagcctcaacggaggcagcccagagggagtggagagccaagatggcgtggaccacttccgggccatgatagtggagttcatggccagcaagaagatgcagttggagtttcctccttccctcaattcccacgacaggctgcgggtccaccaaatagccgaggagcacgggctgaggcacgacagttccggggaagggaagaggaggttcatcactgtgagcaagagggccccgcgaccccgagcagccctgggacccccagcagggaccggtggcccagcccctctccagccagtgccccctacccctgcgcagacagagcagcctcccagggagcagcgtggcccagaccagcctgatctgaggacgctgcacctggagagactgcagagggtcaggagcgcgcaggggcagcccgccagcaaggagcagcaggcctcagggcagcagaaacttccagaaaagaaaaagaaaaaagccaaaggacatccggccacagatctgcccacggaggaggactttgaggccctggtttctgccgccgttaaggctgataacacctgcggctttgccaagtgcacagccggcgtcacaaccctgggccagttctgccagctctgcagccgccgctactgcctcagccaccacctgcccgagatccatggctgcggtgagagggctcgcgcccatgcccggcagagaatcagccgggaaggggtcctctatgccggcagcgggaccaagaacggatccctggacccagccaagagggcccagctgcagaggaggctggataagaagctgagtgagctcagcaaccagaggaccagccggaggaaggagagggggacgtgaccggccgcatccttgcacgccccgcggagctctctccatggtagcccagggcgctggcagaccatgctccgcctccaccagggccacagaggagcggaggggcctatgggggaggagcggagggccctgttggggaaggttgggtttttggaccccagggataagcttttccgatgtcacaatgtggaggaaagcacctgggggacaacagtgctcgtgcaggtggggcttgggaaatgcacgtcccttccccttactccccgccaaaacccacatcccagcctctggatcctggggaaggttccagtccctggagaatacccagggcctcaaacttgaagtcactcctccaatgtctgggacttgccagctcagcccgttaggatgagggtgctgagaggaaacaggaaacaagactgcgaatggcgctcaggcagggagcagggagtggcgtttggcttgcacgttcccatgtggccagatgctggggccactttccttctgtctgctggtgactgcagtgttccccctcctcctcaccacggggctcctgtgagtctggggggcacctctttctggcctgtgcacctctctctggcttataaaggtgcctggcctgtgccagcccctccttgttgcgcctcaccgtggggaccaggtgagccggctctcccacgtggttgtcccgggaaagctgccccacagcctcagcatcttcagcacttaccgatccagagcctcccggccttctccggtgtcctgtaccaactcttctatttaagagaacctcagatgatgtacctgagcctcagggttttgtttcagagggatataaattatttaaaaattaaatgaaaacgttgcacactga

SEQ ID NO: 126281 - DNA, 2982 bp, Artificial Sequence
  derived and/or modified sequence
atggcttctgcggccgtggaatcttttgtcaccaaacagctagatctgttagagttggagagggacgccgaggttgaggaacgaaggtcttggcaggagaacatctctttaaaggagctgcaatcccggggcgtctgtctgctcaaactgcaagtgtcctcccagaggaccgggctctacggtcggttgttagttacatttgagccaaggcggtacggaagtgccgcagccctccccagcaactccttcacatctggtgacatcgtaggactttatgacgctgccaatgaagggtcccagctggccaccggtattcttacgcgggtaacccaaaaaagcgtgacagtcgcgtttgacgagagccacgatttccagctatctctcgaccgtgagaattcgtacaggttgcttaagttagcaaacgacgttacctataggcgattaaaaaaagccttaattgcgctgaaaaaatatcactctgggcctgcctcgtccttgatcgaggttctgtttggacgctcagcaccctctcctgcctccgagatacacccactgacttttttcaatacatgcctggatacaagccagaaggaagccgtcctgttcgcactttcacagaaggagctggccataatccacggtccgcctggaactgggaaaacaaccacagtggtggaaattatcctccaagccgtgaagcaagggctgaaggtcctgtgctgtgctccctctaacattgcagtggacaatcttgtggagaggctagcattgtgtaaacagcgtatcttacggcttggccaccccgctcgtttgttggaatccatccagcaacacagtctggatgccgtgctggcccgtagtgacagcgcccagatcgtcgccgacattcgtaaagatatcgaccaagtgtttgtaaaaaataaaaaaacccaggataaaagagagaaatctaacttcaggaatgagataaagctgctccggaaagaactgaaggagagagaagaggccgctatgctggaatccctgacatccgcgaatgtggtcctggccaccaacaccggcgcgtcagctgatggacccctgaaactgttacccgaatcttacttcgatgtcgtggtgatcgatgagtgcgctcaggctctcgaagcatcctgctggatcccgcttctcaaggcccggaagtgcatcctggccggcgaccataagcagttaccaccgaccacggtctcccacaaagctgccttggctggtctgtctttgagtctgatggagagactggcggaggaatacggtgccagggttgtgcgaacgctgactgtccaatatcggatgcaccaggcaattatgcgctgggcgtctgacacaatgtacctggggcagctgaccgcccatagctctgttgccagacacttgctccgcgacctccctggtgtggctgccaccgaggaaactggagtaccactgcttcttgtcgatacagcgggctgtgggctgtttgagttggaggaagaggatgagcagtccaaagggaaccctggcgaagtgagattagtctccctccacattcaggcgttggtggatgccggagtgcccgccagagacatagctgtagtcagtccgtacaacttacaagtagacctgctgaggcagagcctcgtgcaccggcaccctgagctggagatcaaatcagtggacggatttcagggtagagagaaggaggcagttatcctttcttttgtacggagcaaccgcaagggagaggtgggcttcctggcggaagatagacgcattaatgttgccgtgacccgcgcgaggagacacgtggcagtgatctgcgactcaagaacagtcaacaaccacgcattccttaagactcttgtcgagtatttcacccaacacggagaggttcgtactgcatttgaataccttgatgatattgtgccagagaattactcgcacgagaacagtcaagggtcttcacacgctgccacaaagccccaggggcccgcgacctccacacgtacaggctctcagcggcaggagggcggccaggaagccgcagctccagcccgacaggggcgaaagaaacctgcgggaaaaagcctggctagtgaagcaccttctcagcctagcctgaatggcggatcacctgagggcgtcgaaagccaggacggcgtcgaccatttccgggccatgattgtggagttcatggcctcaaagaaaatgcagcttgaattccctccaagtttgaactcacatgaccggctcagggtccaccagatagccgaggaacacgggctaagacacgacagctctggcgagggcaagcgccgatttatcactgtgtccaagcgcgccccacgtccaagggccgccctgggcccacctgccggcactggggggcccgcccctttgcaaccagtacctcctactcccgcgcagacagaacagccgccaagagagcagcgaggacctgatcaacccgaccttagaaccctacacttggaacgtctgcaacgagtccgcagcgcccagggacaaccagcgagtaaggagcagcaggcatcaggtcagcagaaactgcctgagaagaaaaagaaaaaggctaaaggccacccagcgaccgatctaccgacagaagaggatttcgaggcactagtgagcgcggccgtgaaggcagataacacctgtggatttgccaagtgtacagccggggttacaacccttggccagttctgccagctttgctctcgtaggtactgcctgtcccaccacctccccgaaatccatgggtgtggtgagcgggcccgtgcccacgcgcgccagcgtatttcaagggagggcgtgctttacgcgggatcaggcaccaagaacgggtccttagatcccgccaagagagcccagcttcagagacgactggataagaaactctcagaactgagtaatcaacggacaagtagaaggaaggaacgcggtacatag

SEQ ID NO: 126282 - DNA, 3961 bp, Artificial Sequence
  derived and/or modified sequence
gcgaaccgcgtgcgtaacgcacgggcccggcggggaacaccggtccgctgtaacaccggcccggcgcagaagcgggacgtcggcttctaggggcccaggccggcggcggcgatggcctcggcagctgtggagagcttcgtgaccaagcaactggacctgctggagcttgagagagacgcggaggtggaggagcgcaggtcctggcaggagaacatctctctgaaagagctccagagccgaggcgtgtgtttgctgaagctgcaggtatccagccagcgcactgggctgtacggacggctgctggtcacctttgagcccaggcgatacgggtccgcggcagctcttcccagtaacagctttacttctggtgatatcgtgggcctgtacgatgctgctaatgagggcagtcagctggccactgggatcttgacccgggtcacccagaagtcggtcacggtggcctttgatgagtcccacgatttccagttgagcttggaccgagagaattcctacagactgttaaaacttgccaatgatgtcacttacaggcgactgaaaaaagccctgattgctctaaagaagtatcattctggcccagcctcctcactcatagaagtgctctttggcagatctgctcccagtcctgccagtgaaatacacccgctgacattcttcaacacctgcctggacacctcccagaaagaagcggttttatttgcgctgtctcagaaagaacttgccatcatccatggacctcctggcactgggaaaaccacgactgtggttgagatcattcttcaagctgtgaaacaaggcttaaaggttctgtgctgcgccccctccaacatcgccgtggacaatctggtggagcgcctggctctgtgtaagcagcggattctgcgcctgggacaccctgcccgcctcctggagtccattcagcagcactccctggatgcggttttagcgcggagcgacagtgcccagattgttgcagatatcaggaaggacatcgaccaggtctttgtgaaaaacaaaaagacccaggataagagagagaaaagtaattttcgaaatgaaattaagctgttaagaaaagaactgaaggagagggaagaagcagctatgctcgagagcctcacttcggcaaacgtggtccttgcaacaaacacaggtgcgtctgccgatggccccctgaagttgctgcccgagagctacttcgacgtggtggtcattgacgagtgtgcccaggccctcgaggcgagctgctggatccccctgctgaaggccagaaagtgcatcctggcgggcgatcacaagcagctgccccccaccacagtctctcacaaggctgcgctggcaggactgtcactcagcctgatggaacgcctggctgaggagtacggcgcgagggtggtgcggacactgacggtgcagtaccgcatgcaccaggctatcatgcgctgggcctcagacaccatgtaccttgggcagctcacagcccactcttccgtggcaaggcacctcctgagggacctcccaggtgtggctgccacagaagagacgggtgtgcccctgctcttggtggacaccgccggctgcgggctgtttgagctggaggaggaggacgaacagtcgaaagggaaccctggcgaagtccgcctcgtcagtttgcacatccaggctctggtggacgctggtgttccagcccgtgacattgctgtggtctcgccatacaacctccaggtggacctgctcagacagagccttgtgcacaggcaccctgagcttgaaatcaagtctgtcgatggcttccaaggccgagagaaggaggccgtgatactgtccttcgtcagatccaacaggaaaggtgaagttggttttcttgctgaggaccggaggatcaacgtggctgtcacccgtgcccgacgccacgtggcggtcatctgtgactcccgtactgtcaacaaccatgcatttttgaagaccctggtggagtatttcacacagcatggggaagtacgcacggcctttgagtatcttgacgatattgtcccagaaaactattcccatgagaactcccagggttccagccacgctgccaccaagccccagggacctgctacgtccaccaggaccggaagccagcggcaggagggaggccaggaggctgcagcacctgccagacagggccggaagaagccggctgggaagtctctggcctctgaagctccatctcagcccagcctcaacggaggcagcccagagggagtggagagccaagatggcgtggaccacttccgggccatgatagtggagttcatggccagcaagaagatgcagttggagtttcctccttccctcaattcccacgacaggctgcgggtccaccaaatagccgaggagcacgggctgaggcacgacagttccggggaagggaagaggaggttcatcactgtgagcaagagggccccgcgaccccgagcagccctgggacccccagcagggaccggtggcccagcccctctccagccagtgccccctacccctgcgcagacagagcagcctcccagggagcagcgtggcccagaccagcctgatctgaggacgctgcacctggagagactgcagagggtcaggagcgcgcaggggcagcccgccagcaaggagcagcaggcctcagggcagcagaaacttccagaaaagaaaaagaaaaaagccaaaggacatccggccacagatctgcccacggaggaggactttgaggccctggtttctgccgccgttaaggctgataacacctgcggctttgccaagtgcacagccggcgtcacaaccctgggccagttctgccagctctgcagccgccgctactgcctcagccaccacctgcccgagatccatggctgcggtgagagggctcgcgcccatgcccggcagagaatcagccgggaaggggtcctctatgccggcagcgggaccaagaacggatccctggacccagccaagagggcccagctgcagaggaggctggataagaagctgagtgagctcagcaaccagaggaccagccggaggaaggagagggggacgtgaccggccgcatccttgcacgccccgcggagctctctccatggtagcccagggcgctggcagaccatgctccgcctccaccagggccacagaggagcggaggggcctatgggggaggagcggagggccctgttggggaaggttgggtttttggaccccagggataagcttttccgatgtcacaatgtggaggaaagcacctgggggacaacagtgctcgtgcaggtggggcttgggaaatgcacgtcccttccccttactccccgccaaaacccacatcccagcctctggatcctggggaaggttccagtccctggagaatacccagggcctcaaacttgaagtcactcctccaatgtctgggacttgccagctcagcccgttaggatgagggtgctgagaggaaacaggaaacaagactgcgaatggcgctcaggcagggagcagggagtggcgtttggcttgcacgttcccatgtggccagatgctggggccactttccttctgtctgctggtgactgcagtgttccccctcctcctcaccacggggctcctgtgagtctggggggcacctctttctggcctgtgcacctctctctggcttataaaggtgcctggcctgtgccagcccctccttgttgcgcctcaccgtggggaccaggtgagccggctctcccacgtggttgtcccgggaaagctgccccacagcctcagcatcttcagcacttaccgatccagagcctcccggccttctccggtgtcctgtaccaactcttctatttaagagaacctcagatgatgtacctgagcctcagggttttgtttcagagggatataaattatttaaaaattaaatgaaaacgttgcacac

SEQ ID NO: 126283 - DNA, 2982 bp, Artificial Sequence
  derived and/or modified sequence
atggccagcgctgctgtggagagctttgtgaccaagcagctggacctgctggagctggagagagatgctgaggtggaggagcggcgctcctggcaggagaacatcagcctgaaggagctgcagagccggggcgtgtgcctgctgaagctgcaggtgagcagccagaggacaggcctgtatggccgcctgctggtgacctttgagccccggcgctatggcagcgctgctgccctgcccagcaacagcttcaccagcggggacatcgtgggcctgtatgatgctgccaatgaaggcagccagctggccaccggcatcctgaccagggtgacccagaagtctgtgacagtggcctttgatgagagccatgacttccagctgagcctggacagagaaaattcctaccgcctgctgaagctggccaatgatgtgacctaccgccgcctgaagaaggccctgattgccctgaagaagtaccacagcggccctgccagcagcctgattgaggtgctgtttggccgcagcgcccccagccctgccagcgagatccaccccctgaccttcttcaacacctgcctggacaccagccagaaggaggccgtgctgtttgccctgagccagaaggagctggccatcatccacggccccccaggcaccgggaagaccaccaccgtggtggagatcatcctgcaggccgtgaagcagggcctgaaggtgctgtgctgtgcccccagcaacattgctgtggacaacctggtggagcggctggccctgtgcaagcagaggatcctgcggctgggccacccagcccggctgctggagagcatccagcagcacagcctggatgctgtgctggcccggagtgacagcgcccagatcgtggccgacatcaggaaggacatcgaccaggtgtttgtgaagaacaagaagacccaggacaagcgggagaagagcaacttcagaaatgagatcaagctgctgaggaaggagctgaaggagcgggaggaggccgccatgctggagagcctgaccagcgccaacgtggtgctggccaccaacacaggagccagcgcagatggccccctgaagctgctgcctgagagctactttgatgtggtggtgattgatgaatgtgcccaggccctggaggccagctgctggatccccctgctgaaggccaggaagtgcatcctggccggggaccacaagcagctgccccccaccaccgtgagccacaaggccgccctggccggcctgagcctgagcctgatggagcggctggccgaggagtatggagcccgggtggtgaggaccctgactgtgcagtacaggatgcaccaggccatcatgcgctgggccagtgacaccatgtacctgggccagctgacagcccacagctctgtggcccggcacctgctgcgggacctgcccggggtggccgccacagaggagaccggggtgcccctgctgctggtggacacagctggctgcggcctgtttgagctggaggaggaggatgagcagagcaaaggaaatcctggagaggtgcggctggtgtccctgcacatccaggccctggtggatgctggggtgcctgcccgggacattgctgtggtgagcccctacaacctgcaggtggacctgctgcggcagagcctggtgcaccgccaccctgagctggagatcaagtctgtggatggcttccagggccgggagaaggaggccgtcatcctgagctttgtgcgcagcaacagaaaaggagaggtgggcttcctggctgaagatcggcgcatcaacgtggccgtgacccgggccaggagacatgtggccgtcatctgtgacagcaggacagtgaacaaccacgccttcctgaagaccctggtggagtacttcacccagcacggggaggtgaggacagcctttgagtacctggatgacatcgtgcctgagaactacagccatgagaacagccagggcagcagccacgccgccaccaagccccagggccctgccaccagcaccaggacaggcagccagaggcaggagggcggccaggaggccgccgccccagcccggcagggcaggaagaagccagctgggaagagcctggccagcgaggcccccagccagcccagcctgaatggaggcagccctgagggcgtggagagccaggatggagtggaccacttccgggccatgattgtggagttcatggccagcaagaagatgcagctggagttcccccccagcctgaacagccatgaccggctgcgggtgcaccagattgctgaggagcacggcctgcggcatgacagcagcggggagggcaagaggcgcttcatcaccgtgtccaagagggccccccggcccagggctgccctgggccccccagctggcactggaggccctgcccccctgcagcctgtgccccccaccccagcccagacagagcagcccccccgggagcagaggggccctgaccagcctgacctgcggaccctgcacctggagcggctgcagagggtgcgcagcgcccagggccagcctgccagcaaggagcagcaggccagcggccagcagaagctgcctgagaagaagaagaagaaggccaagggccacccagccacagacctgcccacagaagaagattttgaggccctggtgtctgctgctgtgaaggctgacaacacctgtggctttgccaagtgcacagctggggtgaccaccctgggccagttctgccagctgtgcagccgccgctactgcctgagccaccacctgcctgagatccacggctgtggggagcgggcccgggcccacgcccggcagaggatcagccgggagggcgtgctgtatgccggcagcggcaccaagaatggcagcctggaccctgccaagagggcccagctgcagaggcggctggacaagaagctgtctgagctgagcaaccagaggaccagcaggaggaaggagcggggcacctag

SEQ ID NO: 126284 - DNA, 2982 bp, Artificial Sequence
  derived and/or modified sequence
atggccagcgccgccgtggagagcttcgtgaccaagcagctggacctcttggaactcgagcgagacgctgaggtagaagaaaggagaagctggcaggaaaacatcagcctaaaggagctccaaagtcggggtgtgtgcctgctaaaactgcaagtttcctcacagcggacaggactctacggtcggctattagtcacttttgagcccagacggtacggctcggccgccgcgctgccgtcaaacagctttactagtggtgacatagtgggactgtatgatgccgctaatgaagggtcccagttagcaacaggtattctgactagagtgactcagaaatcagtcacggtggcattcgatgagagccacgattttcagctctctctggatagagagaattcttatcggctcctgaagctggctaacgatgttacctataggaggctgaaaaaggcactcattgcccttaagaaatatcatagcggtcccgcatcaagccttatcgaagtgctctttgggagatctgctccatctccagcctctgagatacatccactcactttcttcaatacctgcctggacacatctcagaaggaggccgttcttttcgcactcagccagaaagagctggcaatcatccatggtcccccggggaccggaaagaccacaaccgtggtagagattatcctccaggccgtaaaacaaggcctcaaggtactctgctgtgcaccctcaaacatcgccgtcgataatctcgtggagcgtctggctctgtgcaagcagaggatcctgaggctcgggcacccagcacgcctcctggagtcaattcagcaacacagtctcgacgccgtgctggcacggtcagattcagcccagattgttgcagatataaggaaggatatagaccaggtgttcgtgaagaataagaagacacaggacaaaagagaaaaatctaactttcgaaacgaaatcaaactgttaagaaaggagctaaaagagcgagaagaagctgcgatgcttgagagccttacctcagctaatgttgttcttgctactaatactggggccagcgccgacgggccactgaaactgctgccagaatcttattttgatgtcgtcgtgatcgacgaatgtgcccaggccctcgaggccagttgttggatccccctgctaaaggctaggaaatgcattctcgccggcgatcacaagcagctccctcctactacggtcagccacaaagccgcgctggctgggctcagcttgagcctgatggagagactggccgaggaatatggcgctcgagtggtgaggaccctgactgtccagtataggatgcaccaggccattatgcggtgggcaagcgataccatgtacttggggcagttgacagctcacagctccgtggcgcggcacctgcttagggatctgcctggcgtggcggctaccgaggaaactggggttcccctgctgctggtggacacagctgggtgtggcttgttcgaattggaagaagaagacgaacagtcaaaaggaaaccctggggaagtaagactcgtttccctccatatacaggcactcgtagacgccggcgttcctgcaagagacatcgccgtagtgagtccttataacctgcaggtggatttgctgagacaaagcctggtacacagacatccggagctggagattaaaagcgtggacgggttccaggggcgtgagaaggaggcagtgattctaagtttcgtgaggagcaacagaaaaggcgaagtgggcttcttggctgaagaccgcaggatcaatgttgctgtgacacgagcacgcaggcacgtggccgtgatatgtgattcacgaacagtaaataaccatgcctttctgaagacactcgtcgagtattttacgcaacacggtgaagtgcggactgcgttcgaatacttggacgacattgtgccggagaattatagtcatgaaaatagtcaaggctcgagccacgcagcaaccaagcctcagggtcctgctacgagcacccgaaccggctcccagaggcaggagggcggacaggaggcagcggctccagctagacaaggacgaaagaagcccgcaggcaaatctttagcctcagaagcaccctcccaaccaagtttaaatggtggatcccccgagggcgtcgagtcccaggacggcgttgatcatttcagggcaatgatcgtcgaattcatggctagcaaaaagatgcaactagagttcccaccatccctgaattcccatgacagactgcgggtccaccagattgccgaggaacacggccttcggcacgattcgtcaggcgaaggtaaacgacggttcatcacagtgtccaagagggcgccccggcctagagcagctcttggacctccagccggcacgggtgggcccgctcctttacagcccgttcctcccactcccgcccagacagaacagccccctcgtgagcaaagaggacctgaccagcccgatctgaggacgctgcatctagaaagattgcagagggtaaggagcgcacaagggcagcccgcctcaaaagagcaacaggcttcaggccagcaaaagctgccagaaaagaaaaagaaaaaggctaagggccaccccgctacggacttgccaactgaagaagattttgaggctttagtgtccgctgcagtgaaagcagataatacatgcggattcgcaaagtgcacagccggcgtcaccaccctgggccagttctgtcaactctgttcccgacgatattgcttgtcccatcacctgcccgaaatacacggttgcggagaaagggcccgcgcacatgcgagacaacgaattagccgggaaggggttctctatgccgggagtggcacgaaaaatggatctttagatccagcgaaacgggctcagttgcagcgcagactggacaagaagctgtctgaactgagtaatcagcggacatcacggcgtaaggagcggggcacctag

SEQ ID NO: 126285 - DNA, 2982 bp, Artificial Sequence
  derived and/or modified sequence
atggcgtcagctgctgtggagtcttttgtgaccaagcagcttgatttgctggaactcgaacgcgatgcggaggtcgaagagcggagatcttggcaggagaatatcagtctgaaggaacttcagagccgaggcgtctgtttgctgaagctccaggtaagttcccagagaactggactctatggcaggcttcttgtgaccttcgaacccagacgatacggatccgctgccgctctgcctagcaactcctttacctcaggagacatcgtgggtttgtacgacgctgcaaatgagggctcacagctggccactggcattctgacccgcgtcacccagaagtctgtcacagtggcctttgacgagtcccacgatttccaattgtcattggaccgtgagaatagctaccgactcttaaagttggctaacgacgtcacatatcggaggctgaaaaaagctctgatcgccctgaagaagtatcacagcggcccagcctcaagcttgatcgaggtgttgtttggcagaagtgccccatcacccgcaagcgagatacatccactcacatttttcaacacttgtctggatacaagccagaaggaagctgttctcttcgctttgagccagaaggaattggccatcatccacgggcctcccggaaccgggaaaaccacaacagtggtggagattattctgcaggctgtgaaacagggcctcaaggttttatgttgtgctcccagcaatatcgccgttgataacctggtggagcgtctggcgctatgcaaacagagaattctgaggctcggccatcctgccagactcctcgaatctatccagcagcactccctcgacgctgttctggccaggagtgactctgcccagattgtcgccgacatccggaaagatatagatcaggtgttcgttaaaaacaaaaaaactcaggataagcgggagaagtctaactttcggaatgagatcaaactcctccgcaaggagctcaaagaacgagaggaggccgcaatgcttgaaagtctgacttctgctaacgtagtgctagctactaacactggggcatcagcagatggacctctgaagctcctgcctgagtcctacttcgatgtggtggtcattgatgagtgtgcccaagcactggaagccagctgctggattcctctccttaaagctcgcaagtgcatccttgcaggagatcacaaacagctgcccccaactacggtcagccacaaagctgccttggccggactttcactgagtctgatggagagactggcagaggagtacggggcacgcgtggtgaggactctcaccgtgcagtataggatgcaccaggccatcatgagatgggcctccgacacaatgtacctgggacaactgacggcccactcaagtgtggcgcgtcatcttctccgggatctccccggagtagcggcaacagaggagactggggtcccactgttgctagtggacaccgccggatgcgggctgttcgagctggaggaggaggacgagcagtcaaagggcaatccaggggaagttcgactggtgtcgttgcacattcaggctcttgtcgatgccggagtgcctgcacgggacattgcagtggtcagtccatacaacttacaggttgatctcctccgccaaagccttgtgcaccggcacccagagctggaaatcaaatcagtcgacggcttccagggacgggaaaaagaggcggttatactcagttttgtgaggagcaatcgcaaaggagaggtgggcttcttagcggaagataggcgaatcaatgtggccgtgacaagggcaaggcgacacgtggctgttatttgcgatagcagaaccgtaaacaaccatgctttcctgaagacattggtggaatacttcacacagcacggggaggttcgtaccgcatttgagtacctagatgacatcgtccctgagaactatagtcatgagaattcccagggatcatcccacgccgcaactaagccgcagggcccagctacctccacccggacgggaagccaacgccaagagggcggacaggaagctgctgctccggctcggcaagggaggaagaagcccgcaggaaaatctcttgcttcagaggcgccatcgcaaccaagtctcaacgggggtagccctgaaggcgtcgaatcacaggatggtgtcgatcattttagggcaatgatcgttgagtttatggcctctaaaaagatgcagctcgaattcccgccttcactgaactcccacgaccggctacgtgtgcaccagatcgctgaagaacacgggcttaggcatgatagtagtggggagggtaagcgacgcttcattacagtatctaaaagggcacccaggcctcgcgctgctctgggaccgcctgcaggaaccgggggtcccgctccccttcagcctgtgccccctaccccagctcagacagaacagccacccagagaacaacgtggccctgaccagccagatctgcgcacactgcatctcgagcgcctgcagcgagtaagatctgcccagggtcagccagctagcaaggagcagcaggcttctgggcagcagaagctgccagagaaaaaaaaaaaaaaggctaagggtcatcctgccactgatcttcctaccgaggaagattttgaggcactggtctcagcagcagtgaaggctgacaacacctgcgggttcgcaaagtgcaccgctggggtgaccaccctaggacagttttgccagctttgcagtcgtaggtattgcctgtcccaccacttgccagaaattcacggttgtggcgagagggcgagagcccatgccagacagcgcatctcccgcgaaggtgttctttatgccggatcagggacaaaaaatggctcactcgaccccgctaaacgggcacagctgcaacggagactcgacaaaaaactctctgaattgagcaaccaacgaacttctagacggaaggagaggggaacttag

SEQ ID NO: 126286 - DNA, 2982 bp, Artificial Sequence
  derived and/or modified sequence
atggccagcgccgccgtggagagcttcgtgaccaagcagctggacctgctggagctggagagagacgccgaggtggaggagagaagaagctggcaggagaacatcagcctgaaggagctgcagagcagaggcgtgtgcctgctgaagctgcaggtgagcagccagagaaccggcctgtacggcagactgctggtgaccttcgagcccagaagatacggcagcgccgccgccctgcccagcaacagcttcaccagcggcgacatcgtgggcctgtacgacgccgccaacgagggcagccagctggccaccggcatcctgaccagagtgacccagaagagcgtgaccgtggccttcgacgagagccacgacttccagctgagcctggacagagagaacagctacagactgctgaagctggccaacgacgtgacctacagaagactgaagaaggccctgatcgccctgaagaagtaccacagcggccccgccagcagcctgatcgaggtgctgttcggcagaagcgcccccagccccgccagcgagatccaccccctgaccttcttcaacacctgcctggacaccagccagaaggaggccgtgctgttcgccctgagccagaaggagctggccatcatccacggcccccccggcaccggcaagaccaccaccgtggtggagatcatcctgcaggccgtgaagcagggcctgaaggtgctgtgctgcgcccccagcaacatcgccgtggacaacctggtggagagactggccctgtgcaagcagagaatcctgagactgggccaccccgccagactgctggagagcatccagcagcacagcctggacgccgtgctggccagaagcgacagcgcccagatcgtggccgacatcagaaaggacatcgaccaggtgttcgtgaagaacaagaagacccaggacaagagagagaagagcaacttcagaaacgagatcaagctgctgagaaaggagctgaaggagagagaggaggccgccatgctggagagcctgaccagcgccaacgtggtgctggccaccaacaccggcgccagcgccgacggccccctgaagctgctgcccgagagctacttcgacgtggtggtgatcgacgagtgcgcccaggccctggaggccagctgctggatccccctgctgaaggccagaaagtgcatcctggccggcgaccacaagcagctgccccccaccaccgtgagccacaaggccgccctggccggcctgagcctgagcctgatggagagactggccgaggagtacggcgccagagtggtgagaaccctgaccgtgcagtacagaatgcaccaggccatcatgagatgggccagcgacaccatgtacctgggccagctgaccgcccacagcagcgtggccagacacctgctgagagacctgcccggcgtggccgccaccgaggagaccggcgtgcccctgctgctggtggacaccgccggctgcggcctgttcgagctggaggaggaggacgagcagagcaagggcaaccccggcgaggtgagactggtgagcctgcacatccaggccctggtggacgccggcgtgcccgccagagacatcgccgtggtgagcccctacaacctgcaggtggacctgctgagacagagcctggtgcacagacaccccgagctggagatcaagagcgtggacggcttccagggcagagagaaggaggccgtgatcctgagcttcgtgagaagcaacagaaagggcgaggtgggcttcctggccgaggacagaagaatcaacgtggccgtgaccagagccagaagacacgtggccgtgatctgcgacagcagaaccgtgaacaaccacgccttcctgaagaccctggtggagtacttcacccagcacggcgaggtgagaaccgccttcgagtacctggacgacatcgtgcccgagaactacagccacgagaacagccagggcagcagccacgccgccaccaagccccagggccccgccaccagcaccagaaccggcagccagagacaggagggcggccaggaggccgccgcccccgccagacagggcagaaagaagcccgccggcaagagcctggccagcgaggcccccagccagcccagcctgaacggcggcagccccgagggcgtggagagccaggacggcgtggaccacttcagagccatgatcgtggagttcatggccagcaagaagatgcagctggagttcccccccagcctgaacagccacgacagactgagagtgcaccagatcgccgaggagcacggcctgagacacgacagcagcggcgagggcaagagaagattcatcaccgtgagcaagagagcccccagacccagagccgccctgggcccccccgccggcaccggcggccccgcccccctgcagcccgtgccccccacccccgcccagaccgagcagccccccagagagcagagaggccccgaccagcccgacctgagaaccctgcacctggagagactgcagagagtgagaagcgcccagggccagcccgccagcaaggagcagcaggccagcggccagcagaagctgcccgagaagaagaagaagaaggccaagggccaccccgccaccgacctgcccaccgaggaggacttcgaggccctggtgagcgccgccgtgaaggccgacaacacctgcggcttcgccaagtgcaccgccggcgtgaccaccctgggccagttctgccagctgtgcagcagaagatactgcctgagccaccacctgcccgagatccacggctgcggcgagagagccagagcccacgccagacagagaatcagcagagagggcgtgctgtacgccggcagcggcaccaagaacggcagcctggaccccgccaagagagcccagctgcagagaagactggacaagaagctgagcgagctgagcaaccagagaaccagcagaagaaaggagagaggcacctag

SEQ ID NO: 126287 - protein, 411 aa, Artificial Sequence
  derived and/or modified sequence
MSPARLRPRLHFCLVLLLLLVVPAAWGCGPGRVVGSRRRPPRKLVPLAYKQFSPNVPEKTLGASGRYEGKIARSSERFKELTPNYNPDIIFKDEENTGADRLMTQRCKDRLNSLAISVMNQWPGVKLRVTEGWDEDGHHSEESLHYEGRAVDITTSDRDRNKYGLLARLAVEAGFDWVYYESKAHVHCSVKSEHSAAAKTGGCFPAGAQVRLESGARVALSAVRPGDRVLAMGEDGSPTFSDVLIFLDREPHRLRAFQVIETQDPPRRLALTPAHLLFTADNHTEPAARFRATFASHVQPGQYVLVAGVPGLQPARVAAVSTHVALGAYAPLTKHGTLVVEDVVASCFAAVADHHLAQLAFWPLRLFHSLAWGSWTPGEGVHWYPQLLYRLGRLLLEEGSFHPLGMSGAGS

SEQ ID NO: 126288 - DNA, 1236 bp, Artificial Sequence
  derived and/or modified sequence
atgagccccgctaggcttcggcctcggttgcacttctgtctggtgctgttgttactactggttgttccagccgcctggggatgtggaccaggccgagtcgtgggatcccggcggcgaccacctcggaagctggtgcccctggcctacaagcagttcagccctaacgtgcccgagaaaacccttggggccagtgggaggtacgagggaaagatcgcccggagcagtgaacggttcaaggaattaacacctaactataaccctgacatcatttttaaagacgaggagaatactggagcagataggctgatgacccagaggtgtaaggacaggctgaactccctagccatcagcgtcatgaaccagtggccaggagtgaagttacgcgtaacggagggatgggatgaggatggccaccattctgaggaaagcttgcattacgagggtcgggcggtcgatatcacgacctcagaccgggacaggaataagtatggcctactggcccgacttgccgtggaagctggatttgactgggtctattacgaaagcaaggcccacgtgcactgttcagttaagtctgaacatagtgcggccgcaaagaccggtggatgttttcctgctggcgcacaggtgagactggaatccggggctagagtggctctgtctgctgttagaccgggagaccgtgttctggccatgggcgaggatgggagtcccaccttcagcgatgtccttattttcctggaccgtgaaccccaccgcctgcgggcattccaggtgattgagacccaggatccccccagacggctggccctgacccccgcccacctactgttcacggctgacaatcacactgagccggctgcccggtttcgggctactttcgcctctcatgtccagcccggacagtacgtgttggtagccggagtgcctggccttcagccggctagggtagcagccgtcagtacacatgttgctctgggggcctatgccccactgacaaagcatggtaccctggtggtggaagacgttgtcgcatcatgcttcgcggcagtagccgaccaccacttggcacaattggccttctggcccctgaggctgtttcactctctggcttgggggagctggacccccggagaaggcgtgcactggtatccccagctgctctacaggctgggacggctgctgctcgaagaggggtctttccaccctctgggaatgtccggtgccgggtcttag

SEQ ID NO: 126289 - DNA, 2019 bp, Artificial Sequence
  derived and/or modified sequence
atgtctcccgcccggctccggccccgactgcacttctgcctggtcctgttgctgctgctggtggtgccggcggcatggggctgcgggccgggtcgggtggtgggcagccgccggcgaccgccacgcaaactcgtgccgctcgcctacaagcagttcagccccaatgtgcccgagaagaccctgggcgccagcggacgctatgaaggcaagatcgctcgcagctccgagcgcttcaaggagctcacccccaattacaatccagacatcatcttcaaggacgaggagaacacaggcgccgaccgcctcatgacccagcgctgcaaggaccgcctgaactcgctggctatctcggtgatgaaccagtggcccggtgtgaagctgcgggtgaccgagggctgggacgaggacggccaccactcagaggagtccctgcattatgagggccgcgcggtggacatcaccacatcagaccgcgaccgcaataagtatggactgctggcgcgcttggcagtggaggccggctttgactgggtgtattacgagtcaaaggcccacgtgcattgctccgtcaagtccgagcactcggccgcagccaagacgggcggctgcttccctgccggagcccaggtacgcctggagagtggggcgcgtgtggccttgtcagccgtgaggccgggagaccgtgtgctggccatgggggaggatgggagccccaccttcagcgatgtgctcattttcctggaccgcgagcctcacaggctgagagccttccaggtcatcgagactcaggaccccccacgccgcctggcactcacacccgctcacctgctctttacggctgacaatcacacggagccggcagcccgcttccgggccacatttgccagccacgtgcagcctggccagtacgtgctggtggctggggtgccaggcctgcagcctgcccgcgtggcagctgtctctacacacgtggccctcggggcctacgccccgctcacaaagcatgggacactggtggtggaggatgtggtggcatcctgcttcgcggccgtggctgaccaccacctggctcagttggccttctggcccctgagactctttcacagcttggcatggggcagctggactccgggggagggtgtgcattggtacccccagctgctctaccgcctggggcgtctcctgctagaagagggcagcttccacccactgggcatgtccggggcagggagctgaaaggactccaccgctgccctcctggaactgctgtactgggtccagaagcctctcagccaggagggagctggccctggaagggacctgagctgggggacactggctcctgccatctcctctgccatgaagatacaccattgagacttgactgggcaacaccagcgtcccccacccccgtcgtggtgtagtcatagagctgcaagctgagctggcgaggggatggttgttgacccctctctcctagagaccttgaggctggcacggcgactcccaactcagcctgctctcactacgagttttcatactctgcctcccccattggggagggcccattccatccatcttaggcccctttgggtgggcttgcgcctcagttgatgctgctaaattccctgggagccagcatggatctggctggacccgatgctgtccagaactgggaaggccacaggggtggggcagccatcccggccattctgaggtatgacattcctccccggccacactcctcaagacacatccagagactgttgctgtctgtgggcagagttctgtgttctggccaatgtgaccgtagtgccggggactgggggaggtgggttggatgtgcttgccacccccccggctaagctcccccttctgctgaaccatgatccccaccccctccgccggtcagtctcccataccttatttattggagtggagggggaagcccatgggagaattttggggatgttttggtcttttcttccttttgtaataaaaattatttaagttgttaga

SEQ ID NO: 126290 - DNA, 1236 bp, Artificial Sequence
  derived and/or modified sequence
atgagccctgcccggctgcggccccggctgcacttctgcctggtgctgctgctgctgctggtggtgcctgctgcctggggctgcggccctggccgggtggtgggcagcagaagaagaccacccaggaagctggtgcccctggcctacaagcagttcagccccaacgtgcctgagaagaccctgggcgccagcggccgctatgagggcaagatcgcccggagcagcgagcgcttcaaggagctgacccccaactacaacccagacatcatcttcaaggatgaagaaaatactggagctgaccggctgatgacccagcgctgcaaggaccggctgaacagcctggccatctctgtgatgaaccagtggccaggagtgaagctgcgggtgacagagggctgggatgaagatggccaccacagcgaggagagcctgcactatgagggccgggctgtggacatcaccaccagtgaccgggacaggaacaagtatggcctgctggcccggctggccgtggaggccggctttgactgggtgtactatgagagcaaggcccacgtgcactgcagcgtgaagtctgagcacagcgctgctgccaagacaggaggctgcttccctgctggggcccaggtgcggctggagagcggggcccgggtggccctgtctgctgtgcggcctggggacagagtgctggccatgggagaagatggcagccccaccttcagtgatgtgctgatcttcctggaccgggagccccaccggctgcgggccttccaggtgattgagacccaggaccccccccggcggctggccctgaccccagcccacctgctcttcaccgctgacaaccacacagagcctgctgcccgcttccgggccacctttgccagccacgtgcagcccggccagtatgtgctggtggccggcgtgcccggcctgcagcctgcccgggtggccgctgtgtccacccacgtggccctgggcgcctatgcccccctgaccaagcacggcaccctggtggtggaggatgtggtggccagctgctttgctgctgtggccgaccaccacctggcccagctggccttctggcccctgcggctcttccacagcctggcctggggctcctggaccccaggagagggcgtgcactggtacccccagctgctgtaccgcctgggccgcctgctgctggaggagggcagcttccaccccctgggcatgtctggagctggcagctag

SEQ ID NO: 126291 - DNA, 1236 bp, Artificial Sequence
  derived and/or modified sequence
atgagccccgcccggctgcggccccggctgcacttctgcctggtgctccttctgcttctcgtcgtgcccgccgcatgggggtgcgggcctggccgcgttgtcggctcccgtcgcaggccaccgaggaagctcgtccccttagcgtataagcagttcagtccgaatgttccagaaaaaaccctgggagcatccgggagatatgaggggaagatagctagatcttctgagcgatttaaagagctgacccccaactacaatcctgacattattttcaaggacgaggaaaacacgggtgcagatcgcctgatgacccagaggtgcaaggataggcttaactcactggctatctctgtgatgaaccagtggcctggcgtcaaactgagggtgaccgaggggtgggacgaggacggacaccattcagaggaaagtctgcactacgagggtagggccgtggatattacaacgagcgacagggacagaaataagtatggactgctcgccaggttggccgtggaagctggcttcgattgggtctactatgagtctaaagcccatgtacactgtagcgtgaagagtgagcatagtgcagccgccaagaccggagggtgtttccccgctggagctcaggttcgactggagagcggtgccagagtcgctctctctgcagtgagaccgggcgaccgcgtccttgccatgggtgaggatgggagcccgacattttccgacgtcctaatcttcctagaccgtgaaccacaccggctgcgggcttttcaggttatcgagactcaggacccaccaaggcgcctagcgctgacacctgcccatctgctgttcacagcagataaccacactgagcccgccgctagattcagggcaaccttcgcctctcacgtgcagcccggccagtatgttctggtggccggggtgccaggtctccaaccggcaagggtggccgcggtgagcacacatgttgcactaggggcttatgcccccctcactaaacacggcaccttggttgttgaagacgtggtggcctcatgcttcgctgccgttgcagaccatcatttggcccagcttgctttctggccgctacgcctgttccacagcctggcatgggggtcttggacccctggcgaaggcgtgcactggtacccccagctcctgtatcgtctggggaggctgctgctcgaagaggggagcttccaccccctggggatgtcaggagcgggctcatag

SEQ ID NO: 126292 - DNA, 1236 bp, Artificial Sequence
  derived and/or modified sequence
atgagccccgcacggttgagacctcggttgcacttttgtctcgtgctcttgcttcttcttgttgtgccagctgcctggggatgcggacccggacgggtcgtgggctctaggagacgcccacctcggaaacttgttccgctagcttacaaacagtttagcccgaacgtaccagagaaaacactgggagcctcgggcaggtatgaggggaaaatagcccgtagtagcgagcgcttcaaagagctcacccctaactacaatcccgacattattttcaaagatgaggaaaatactggagcggacaggctgatgacacagaggtgtaaagaccgcctcaactcccttgccataagcgtaatgaatcagtggccaggcgtgaagctgagggtcaccgaagggtgggatgaagatggtcaccattccgaagagagcctacattacgaaggcagagcagtcgacattactacctctgaccgcgacaggaacaaatatggactgttggccaggctggccgtcgaggccggattcgattgggtgtactacgaaagcaaggctcacgtgcattgtagtgtgaaaagtgagcattctgccgcagcaaaaacagggggatgcttccccgcaggcgctcaggtgcgcctggagtccggtgcacgagttgctctttctgctgttcgacctggcgacagagtgttagccatgggcgaagatggaagcccgaccttctcagatgttctgatcttcttggaccgggaaccccacagactgcgagcctttcaggttatcgaaacacaggacccccctaggcggctggctctgacgcccgctcacctattattcactgccgataaccatactgaaccggcagcacgttttcgcgcaaccttcgccagccacgtccagccaggacagtatgtgctggtagcaggagttcctggcctgcaaccggctcgggtggcggctgtgtccacacacgtggctctcggcgcttacgcacccctaaccaaacacggcaccctggttgtagaagacgttgtggcttcctgtttcgctgccgtagccgaccatcacttagcccagctcgcattttggcccttgagattgttccattcgttggcatgggggtcttggaccccgggtgagggggttcactggtacccacaactgctctatagacttgggaggcttcttctggaggagggctcattccatcccctcggcatgagcggcgctgggtcttag

SEQ ID NO: 126293 - DNA, 1236 bp, Artificial Sequence
  derived and/or modified sequence
atgagccccgccagactgagacccagactgcacttctgcctggtgctgctgctgctgctggtggtgcccgccgcctggggctgcggccccggcagagtggtgggcagcagaagaagaccccccagaaagctggtgcccctggcctacaagcagttcagccccaacgtgcccgagaagaccctgggcgccagcggcagatacgagggcaagatcgccagaagcagcgagagattcaaggagctgacccccaactacaaccccgacatcatcttcaaggacgaggagaacaccggcgccgacagactgatgacccagagatgcaaggacagactgaacagcctggccatcagcgtgatgaaccagtggcccggcgtgaagctgagagtgaccgagggctgggacgaggacggccaccacagcgaggagagcctgcactacgagggcagagccgtggacatcaccaccagcgacagagacagaaacaagtacggcctgctggccagactggccgtggaggccggcttcgactgggtgtactacgagagcaaggcccacgtgcactgcagcgtgaagagcgagcacagcgccgccgccaagaccggcggctgcttccccgccggcgcccaggtgagactggagagcggcgccagagtggccctgagcgccgtgagacccggcgacagagtgctggccatgggcgaggacggcagccccaccttcagcgacgtgctgatcttcctggacagagagccccacagactgagagccttccaggtgatcgagacccaggacccccccagaagactggccctgacccccgcccacctgctgttcaccgccgacaaccacaccgagcccgccgccagattcagagccaccttcgccagccacgtgcagcccggccagtacgtgctggtggccggcgtgcccggcctgcagcccgccagagtggccgccgtgagcacccacgtggccctgggcgcctacgcccccctgaccaagcacggcaccctggtggtggaggacgtggtggccagctgcttcgccgccgtggccgaccaccacctggcccagctggccttctggcccctgagactgttccacagcctggcctggggcagctggacccccggcgagggcgtgcactggtacccccagctgctgtacagactgggcagactgctgctggaggagggcagcttccaccccctgggcatgagcggcgccggcagctag

SEQ ID NO: 126294 - protein, 378 aa, Artificial Sequence
  derived and/or modified sequence
MVLLWLTLLLIALPCLLQTKEDPNPPITNLRMKAKAQQLTWDLNRNVTDIECVKDADYSMPAVNNSYCQFGAISLCEVTNYTVRVANPPFSTWILFPENSGKPWAGAENLTCWIHDVDFLSCSWAVGPGAPADVQYDLYLNVANRRQQYECLHYKTDAQGTRIGCRFDDISRLSSGSQSSHILVRGRSAAFGIPCTDKFVVFSQIEILTPPNMTAKCNKTHSFMHWKMRSHFNRKFRYELQIQKRMQPVITEQVRDRTSFQLLNPGTYTVQIRARERVYEFLSAWSTPQRFECDQEEGANTRAWRTSLLIALGTLLALVCVFVICRRYLVMQRLFPRIPHMKDPIGDSFQNDKLVVWEAGKAGLEECLVTEVQVVQKT

SEQ ID NO: 126295 - DNA, 1137 bp, Artificial Sequence
  derived and/or modified sequence
atggtgctactatggctgacactgctgctgatagcgctcccttgcctgcttcagacaaaagaggacccaaatccccccatcacaaacctccgtatgaaggctaaagcccagcagttgacctgggacctgaaccgcaacgtgacagatattgaatgcgtcaaagatgctgattacagcatgcccgccgttaataactcttattgtcagtttggggccattagcttatgtgaggtaaccaattataccgtcagagtcgcgaatccgcctttcagcacttggatcctttttcccgagaacagcgggaagccatgggccggtgcagagaatctgacatgctggattcacgatgttgatttcctatcgtgttcctgggccgtgggccccggggcccctgccgacgtccagtacgatctgtacctgaatgtcgcgaataggcggcaacaatacgagtgcctgcattataagaccgatgcacaaggcactcgcattgggtgtagattcgatgatatctctcggctctcctcgggaagccagtcctcccacatcctagtcagaggtaggtcagctgcatttgggatcccttgcactgacaagttcgtcgtgttcagccagatcgaaatcctgacgcctccgaacatgactgctaagtgtaataaaacacattcttttatgcactggaaaatgcgctcccattttaacagaaagtttagatacgagctgcaaatccaaaagcgaatgcagccagtcataaccgagcaagtgcgcgaccggaccagctttcaactcctgaatccggggacgtatactgtccagatccgagcacgagaaagagtgtatgaatttctgtccgcctggtccactcctcaacggtttgagtgtgaccaggaggagggcgcaaacacccgtgcctggcgaacatcccttctcatagcattggggactctcctcgccctggtttgcgtgttcgtaatctgtaggagatatcttgtgatgcagcgcctgttcccccgtatccctcacatgaaggatcccatcggggactccttccagaacgataaactcgttgtttgggaggctggcaaagcgggattggaggagtgtctggtaaccgaagtgcaggtggtacagaagacatag

SEQ ID NO: 126296 - DNA, 1706 bp, Artificial Sequence
  derived and/or modified sequence
gtcaggttcatggttacgaagctgctgaccccaggatcccagcccgtgggagagaagggggtctctgacagcccccacccctccccactgccagatccttattgggtctgagtttcaggggtggggccccagctggaggttataaaacagctcaatcggggagtacaaccttcggtttctcttcggggaaagctgctttcagcgcacacgggaagatatcagaaacatcctaggatcaggacaccccagatcttctcaactggaaccacgaaggctgtttcttccacacagtactttgatctccatttaagcaggcacctctgtcctgcgttccggagctgcgttcccgatggtcctcctttggctcacgctgctcctgatcgccctgccctgtctcctgcaaacgaaggaagatccaaacccaccaatcacgaacctaaggatgaaagcaaaggctcagcagttgacctgggaccttaacagaaatgtgaccgatatcgagtgtgttaaagacgccgactattctatgccggcagtgaacaatagctattgccagtttggagcaatttccttatgtgaagtgaccaactacaccgtccgagtggccaacccaccattctccacgtggatcctcttccctgagaacagtgggaagccttgggcaggtgcggagaatctgacctgctggattcatgacgtggatttcttgagctgcagctgggcggtaggcccgggggcccccgcggacgtccagtacgacctgtacttgaacgttgccaacaggcgtcaacagtacgagtgtcttcactacaaaacggatgctcagggaacacgtatcgggtgtcgtttcgatgacatctctcgactctccagcggttctcaaagttcccacatcctggtgcggggcaggagcgcagccttcggtatcccctgcacagataagtttgtcgtcttttcacagattgagatattaactccacccaacatgactgcaaagtgtaataagacacattcctttatgcactggaaaatgagaagtcatttcaatcgcaaatttcgctatgagcttcagatacaaaagagaatgcagcctgtaatcacagaacaggtcagagacagaacctccttccagctactcaatcctggaacgtacacagtacaaataagagcccgggaaagagtgtatgaattcttgagcgcctggagcaccccccagcgcttcgagtgcgaccaggaggagggcgcaaacacacgtgcctggcggacgtcgctgctgatcgcgctggggacgctgctggccctggtctgtgtcttcgtgatctgcagaaggtatctggtgatgcagagactctttccccgcatccctcacatgaaagaccccatcggtgacagcttccaaaacgacaagctggtggtctgggaggcgggcaaagccggcctggaggagtgtctggtgactgaagtacaggtcgtgcagaaaacttgagactggggttcagggcttgtgggggtctgcctcaatctccctggccgggccaggcgcctgcacagactggctgctggacctgcgcacgcagcccaggaatggacattcctaacgggtggtgggcatgggagatgcctgtgtaatttcgtccgaagctgccaggaagaagaacagaactttgtgtgtttatttcatgataaagtgatttttttttttttaa

SEQ ID NO: 126297 - DNA, 1137 bp, Artificial Sequence
  derived and/or modified sequence
atggtgctgctgtggctgaccctgctgctgattgccctgccctgcctgctgcagaccaaggaggaccccaacccccccatcaccaacctgaggatgaaggccaaggcccagcagctgacctgggacctgaacagaaatgtgacagacattgaatgtgtgaaggatgctgactacagcatgcctgctgtgaacaacagctactgccagtttggagccatcagcctgtgtgaggtgaccaactacacagtgcgggtggccaacccccccttcagcacctggatcctcttccctgagaacagcggcaagccctgggccggggctgagaacctgacctgctggattcatgatgtggacttcctgagctgctcctgggccgtgggccctggggccccagcagatgtgcagtatgacctgtacctgaatgtggccaacagacggcagcagtatgagtgcctgcactacaagacagatgcccagggcaccagaattggctgccgctttgatgacatcagccggctgagcagcggcagccagagcagccacatcctggtgcggggccgctctgctgccttcggcatcccctgcacagacaagtttgtggtgttcagccagatcgagatcctgaccccacccaacatgacagccaagtgcaacaagacccacagcttcatgcactggaagatgaggagccacttcaacaggaagttccgctatgagctgcagatccagaagaggatgcagcccgtcatcacagagcaggtgcgggacaggaccagcttccagctgctgaaccctggcacctacacagtgcagatccgggcccgggagcgggtgtatgagttcctgagcgcctggagcaccccccagagatttgaatgtgaccaggaggagggcgccaacacccgggcctggaggaccagcctgctgattgccctgggcaccctgctggccctggtgtgtgtgtttgtgatctgccgccgctacctggtgatgcagaggctcttcccccgcatcccccacatgaaggaccccatcggggacagcttccagaatgacaagctggtggtgtgggaggccggcaaggccggcctggaggagtgcctggtgacagaggtgcaggtggtgcagaagacctag

SEQ ID NO: 126298 - DNA, 1137 bp, Artificial Sequence
  derived and/or modified sequence
atggtgctgctgtggctgaccctgctgctgatcgccctgccctgcttactgcaaactaaggaagatccaaacccacctatcacaaaccttagaatgaaggccaaggcccagcaactgacatgggacctcaacaggaacgtcacagatattgagtgtgttaaggacgcagattactctatgcctgccgttaacaatagctactgtcaattcggggccatcagcctgtgcgaggtgacaaactacacagtgcgtgtagccaacccacctttctctacctggattctttttcccgagaactctggcaagccttgggccggagcagagaacctcacttgctggattcacgatgtagactttttaagctgttcttgggcagtgggaccgggcgcacccgctgacgtgcagtatgacctgtatctcaatgttgccaaccgccggcaacagtatgaatgcctgcactataagactgacgcccagggcacgcgcatcggctgccggtttgacgacatctcacgtttatcaagcggctcccagtcctctcatatcctcgttcgggggagatccgccgcctttggcattccatgtacagacaagttcgtggtgttcagtcagatcgagatcctgaccccgccaaatatgacagccaagtgtaacaagactcactcatttatgcactggaaaatgcgctcgcacttcaatcggaaatttcgctacgagttgcagatccagaagagaatgcagcccgttattactgagcaggttcgggacagaaccagttttcagctactgaatccaggcacgtatacagtacaaattcgcgccagagagagggtatacgagtttctctccgcgtggtctacaccacagcggttcgaatgtgatcaggaagagggcgccaacaccagggcatggcgcacgtcccttctgatcgccctaggcactctgttggctctcgtgtgtgtgttcgttatctgcagacgctatttggtgatgcagcgactttttcctaggatcccccacatgaaagaccccatcggggattcttttcagaatgacaagctcgtcgtctgggaagccggaaaggccggcttagaagaatgcctggtcacagaagtccaggtggtgcagaaaacatag

SEQ ID NO: 126299 - DNA, 1137 bp, Artificial Sequence
  derived and/or modified sequence
atggtgttgctctggttgacgcttctattgatcgcgcttccatgtttgcttcagaccaaggaggacccgaatccacctatcactaatctcaggatgaaagccaaagcacaacagcttacatgggacctaaatcggaatgtgaccgatatcgagtgtgtaaaagatgcggactactcaatgcctgctgtgaacaattcatactgtcagttcggcgctatctccctgtgcgaggtgaccaattatactgtgagggtggctaaccccccatttagcacgtggatcttgttccctgaaaactctgggaaaccatgggccggtgcggagaacttaacctgctggatccacgatgtggacttcctgagttgctcatgggcagtgggacctggcgctcctgcagatgttcagtatgacttgtacttgaacgtggctaatagaaggcagcagtacgaatgtctgcattacaagaccgatgcccagggaacccggatcgggtgccgattcgacgatatttcaagactatcttccggctcacaatcttcacacatcctggtcagaggacggtctgcagccttcgggatcccgtgcaccgacaagtttgttgtgttttcacagatcgaaatccttacccctcctaacatgaccgccaagtgcaataagacgcactcgttcatgcattggaagatgaggtcccatttcaataggaagttccgctatgagctccagatccagaaacggatgcagcctgttattactgaacaggtgagggaccgcaccagctttcaattgctgaatcccggaacatacactgtacagattcgcgcacgagaaagggtttacgagttcctgagtgcttggagtaccccccagagatttgaatgcgaccaggaggagggggctaacacacgggcatggcggacgtctctgttgatagcccttggcaccctgctcgccctggtgtgcgtgttcgttatctgccggcgatatctggtcatgcagaggcttttcccgagaatccctcacatgaaggaccctatcggcgattcatttcagaacgataagctggtcgtttgggaagccggaaaggctggtctggaggaatgtttagttaccgaagtacaggtcgttcagaagacttag

SEQ ID NO: 126300 - DNA, 1137 bp, Artificial Sequence
  derived and/or modified sequence
atggtgctgctgtggctgaccctgctgctgatcgccctgccctgcctgctgcagaccaaggaggaccccaacccccccatcaccaacctgagaatgaaggccaaggcccagcagctgacctgggacctgaacagaaacgtgaccgacatcgagtgcgtgaaggacgccgactacagcatgcccgccgtgaacaacagctactgccagttcggcgccatcagcctgtgcgaggtgaccaactacaccgtgagagtggccaacccccccttcagcacctggatcctgttccccgagaacagcggcaagccctgggccggcgccgagaacctgacctgctggatccacgacgtggacttcctgagctgcagctgggccgtgggccccggcgcccccgccgacgtgcagtacgacctgtacctgaacgtggccaacagaagacagcagtacgagtgcctgcactacaagaccgacgcccagggcaccagaatcggctgcagattcgacgacatcagcagactgagcagcggcagccagagcagccacatcctggtgagaggcagaagcgccgccttcggcatcccctgcaccgacaagttcgtggtgttcagccagatcgagatcctgaccccccccaacatgaccgccaagtgcaacaagacccacagcttcatgcactggaagatgagaagccacttcaacagaaagttcagatacgagctgcagatccagaagagaatgcagcccgtgatcaccgagcaggtgagagacagaaccagcttccagctgctgaaccccggcacctacaccgtgcagatcagagccagagagagagtgtacgagttcctgagcgcctggagcaccccccagagattcgagtgcgaccaggaggagggcgccaacaccagagcctggagaaccagcctgctgatcgccctgggcaccctgctggccctggtgtgcgtgttcgtgatctgcagaagatacctggtgatgcagagactgttccccagaatcccccacatgaaggaccccatcggcgacagcttccagaacgacaagctggtggtgtgggaggccggcaaggccggcctggaggagtgcctggtgaccgaggtgcaggtggtgcagaagacctag

SEQ ID NO: 126301 - protein, 918 aa, Artificial Sequence
  derived and/or modified sequence
MLTLQTWLVQALFIFLTTESTGELLDPCGYISPESPVVQLHSNFTAVCVLKEKCMDYFHVNANYIVWKTNHFTIPKEQYTIINRTASSVTFTDIASLNIQLTCNILTFGQLEQNVYGITIISGLPPEKPKNLSCIVNEGKKMRCEWDGGRETHLETNFTLKSEWATHKFADCKAKRDTPTSCTVDYSTVYFVNIEVWVEAENALGKVTSDHINFDPVYKVKPNPPHNLSVINSEELSSILKLTWTNPSIKSVIILKYNIQYRTKDASTWSQIPPEDTASTRSSFTVQDLKPFTEYVFRIRCMKEDGKGYWSDWSEEASGITYEDRPSKAPSFWYKIDPSHTQGYRTVQLVWKTLPPFEANGKILDYEVTLTRWKSHLQNYTVNATKLTVNLTNDRYLATLTVRNLVGKSDAAVLTIPACDFQATHPVMDLKAFPKDNMLWVEWTTPRESVKKYILEWCVLSDKAPCITDWQQEDGTVHRTYLRGNLAESKCYLITVTPVYADGPGSPESIKAYLKQAPPSKGPTVRTKKVGKNEAVLEWDQLPVDVQNGFIRNYTIFYRTIIGNETAVNVDSSHTEYTLSSLTSDTLYMVRMAAYTDEGGKDGPEFTFTTPKFAQGEIEAIVVPVCLAFLLTTLLGVLFCFNKRDLIKKHIWPNVPDPSKSHIAQWSPHTPPRHNFNSKDQMYSDGNFTDVSVVEIEANDKKPFPEDLKSLDLFKKEKINTEGHSSGIGGSSCMSSSRPSISSSDENESSQNTSSTVQYSTVVHSGYRHQVPSVQVFSRSESTQPLLDSEERPEDLQLVDHVDGGDGILPRQQYFKQNCSQHESSPDISHFERSKQVSSVNEEDFVRLKQQISDHISQSCGSGQMKMFQEVSAADAFGPGTEGQVERFETVGMEAATDEGMPKSYLPQTVRQGGYMPQ

SEQ ID NO: 126302 - DNA, 2757 bp, Artificial Sequence
  derived and/or modified sequence
atgttgacccttcagacctggctggttcaagccctctttatatttctgacaacagaatctactggggagttgctcgacccctgtggatacattagtcctgagtctccagttgtgcaactgcacagtaatttcaccgctgtgtgtgtcttgaaggaaaaatgcatggactatttccatgtgaatgccaactacattgtctggaaaactaaccatttcaccatccccaaagagcagtacaccatcatcaatcggacagccagttctgtgactttcacggatattgcgagtttaaatatccagctgacatgcaatatcctgaccttcgggcagctggaacagaacgtgtacgggattactatcatatccggtttaccccccgagaaacccaagaatctgagttgtatcgttaacgagggaaagaaaatgagatgtgagtgggatgggggccgcgaaacgcaccttgaaaccaattttacgctaaagagcgagtgggctacccacaaattcgctgactgtaaagctaaacgggatacccctacctcttgtacagttgattacagtaccgtgtattttgtcaatatagaggtgtgggttgaagcagagaatgccctcgggaaagtaaccagcgatcatattaattttgaccccgtctacaaggtgaagcccaatccaccccataatctgagcgtgatcaacagcgaagagctgtcgtccatcctgaaattgacatggactaatcccagcatcaagtcagtgatcatcctgaagtacaatattcagtatcggactaaggacgcttcaacctggagtcagattcctcctgaagacactgcctctacgaggtcctcgttcacagtccaggacctgaaaccctttacagaatatgttttcaggatacgctgcatgaaagaggacggtaagggctattggagcgactggtctgaagaggcatccggtatcacttatgaggaccgtccttccaaggctccgagtttttggtataaaatcgatccctcccacactcagggctatcggactgttcaactggtttggaaaacactacctcccttcgaggccaacgggaaaatactggactatgaggttacgttaacccgatggaagtcacacctgcaaaactacactgtaaacgcgaccaagttgaccgtgaatctgacaaacgaccgttatctcgccaccctcactgtgcgaaacctcgtgggcaaatccgacgcagcagtcctgacaatccctgcttgcgatttccaggccacacaccctgtgatggacctaaaggcgttccccaaggacaatatgttatgggttgaatggacaacccctcgagagagtgtgaaaaagtacatcttggagtggtgcgtgctcagcgataaggccccctgcattacagattggcaacaggaggacggtactgttcatcgtacatatcttcggggaaacttagcagagagtaagtgctacttaattacagtgacacccgtgtatgccgatgggccagggagccccgagagtatcaaagcttatctaaaacaagctccaccatcaaaaggcccaaccgtgaggacgaagaaggtcggcaagaatgaggctgtgctggaatgggaccagctgccagtcgatgtgcaaaacggcttcataagaaactataccattttttacaggacaatcatcgggaacgagactgccgtcaacgtcgattccagccataccgagtacacgctatcctcgctgaccagcgacacgctctacatggtgagaatggccgcctatacagatgagggcggtaaggatgggcccgagttcacattcaccacacccaaatttgcacagggcgaaattgaagcaatcgtggtgccggtgtgtctggctttccttctgacgaccttattgggcgtcctcttttgcttcaacaaacgggaccttatcaagaagcacatctggccaaacgtccctgacccctctaagtctcacattgcccagtggtcaccccatacaccaccacggcataacttcaatagtaaagatcagatgtactccgatgggaattttaccgatgtgtctgtggtggaaatcgaggcgaatgacaagaagccctttcctgaagatctgaagagtctggatttatttaagaaagagaaaatcaatacagaaggccactcgtctggaatcgggggctctagctgtatgagttctagccggccttcaattagctctagcgatgaaaacgagtcatctcaaaacactagcagcactgtgcagtactcaacagtggtgcacagcgggtatcgccaccaagtcccttccgtgcaggtgtttagtcgttcagagtctacccagcccctgcttgacagcgaggagagaccagaggatctgcaactggtggatcacgtggacggcggcgacggaattctcccccgccagcagtatttcaaacagaattgctcccaacacgaatctagcccagatatttcacatttcgaacgttccaaacaagtgtcttcggtgaatgaggaagattttgtgcggcttaaacagcagatttccgatcatatttctcagagctgtggctctggacagatgaagatgttccaggaggtgtcagccgccgacgcattcggccctggtactgagggccaggtcgagcgttttgagacagtaggcatggaagctgcaactgacgaggggatgccgaagtcttacctgccacagacagtgcgccaaggaggctacatgccccagtag

SEQ ID NO: 126303 - DNA, 2757 bp, Artificial Sequence
  derived and/or modified sequence
atgctgaccctacagacctggctggtccaagccttgttcatttttctcacaactgaatctactggcgagcttcttgatccttgtgggtacatcagtccagagtccccggtcgtccagctgcattccaatttcaccgctgtctgcgtcctcaaagagaaatgcatggattactttcacgtaaatgctaactatatcgtgtggaagactaaccatttcaccatcccaaaagagcaatatacaatcataaatcgtactgccagctctgtaacttttactgacattgccagcctcaacattcagctgacctgtaacattttaacgtttggacagttagaacagaatgtgtatgggattaccatcatttcaggactaccaccagagaaacccaagaatctctcgtgtattgtcaacgagggcaagaagatgaggtgcgagtgggacggaggtcgtgaaacccatctggaaactaattttacactcaagtccgagtgggccacacacaagtttgccgactgtaaggccaagagggatacgcccacttcctgtacggttgattactccacagtgtatttcgtgaacatcgaggtttgggtcgaggccgagaacgcactgggcaaagtgaccagcgatcatataaatttcgaccctgtgtataaggtgaaacccaatccaccgcacaatctgagtgtcatcaacagcgaagaactgtcttctattctcaagctaacgtggacgaatccgtcgattaagtctgtcattatcttgaagtataatattcagtaccgtactaaggacgcctctacgtggagtcagattccaccggaagatactgcatcaaccaggagttcattcactgtgcaggacctgaagccctttaccgagtatgtctttagaatcaggtgtatgaaggaagatggaaagggttactggtcagactggtcggaagaggcatccggaatcacttatgaggacagaccttctaaggctcccagcttctggtataagatcgaccctagtcacacccaggggtatcggactgtccagctcgtctggaaaactttgcccccatttgaagcaaatggcaaaatccttgactacgaagtcaccctgactcggtggaaatctcacttacagaattatactgtgaacgctacgaaacttaccgtgaatcttaccaacgaccgctatctggccactctgacagtacgaaatctcgtcggtaaaagcgacgccgccgtgctgactattcccgcatgcgattttcaggctacgcaccccgtcatggacctcaaggccttcccgaaagataatatgctctgggtcgaatggacaacaccccgggagagcgtaaaaaagtatatcctggagtggtgcgtgctgagcgacaaagctccctgcattacagattggcagcaagaggacggtaccgtgcatcgcacatatctgcgaggcaatcttgccgagtcgaagtgctatctgattacagtcactcctgtttatgccgatggaccaggatctccagagtccatcaaggcatacctgaagcaggccccgccatccaaggggccaaccgtgagaaccaagaaggtcgggaagaacgaggccgtgttagaatgggatcagttgccagtagatgtgcaaaacggcttcattaggaattataccatattttaccgcactatcataggtaacgagactgctgtgaacgtggactcgtcacacacagagtataccctttccagcctgaccagcgacaccctgtacatggtgaggatggccgcatataccgacgagggcggcaaggatggcccagagttcacctttacaacccccaagtttgcccaaggagaaatcgaagctattgtggttccagtttgtttggcctttttgctgaccacactgctgggagtgctgttctgtttcaacaaaagggacttgataaagaagcacatctggcccaacgtccctgatccgtctaaatctcacattgcccaatggagcccccataccccacctagacataactttaactctaaggaccagatgtatagcgatggtaatttcacagatgtgtcggtggtcgagatcgaggctaatgataagaagcctttccctgaggacttgaagagcctggacctattcaagaaagaaaagattaatactgagggccattcttccggcatcgggggcagcagttgcatgtcctccagtcgtccgagcatttcatcctccgacgagaacgaaagctcccaaaatacgagctccaccgttcagtatagcaccgttgtccattccggctatcgccaccaggttccctccgtgcaggtctttagtcgaagtgaatccacacagccacttctggatagtgaggagcggcccgaggaccttcaacttgttgaccacgtggatggaggagatggtatactacctcgtcagcagtacttcaagcagaattgttcccagcacgaatccagcccggacatttcccattttgagagatcaaaacaggtgtctagtgtcaacgaagaggattttgtgcgccttaagcagcagatctctgatcacatctcccaatcttgtgggtcaggccagatgaaaatgttccaagaggtgtcggccgccgacgcttttggacccggaacggagggacaggtggagcgctttgagaccgtgggcatggaggctgcaaccgacgaaggcatgcccaaatcatacctgccacaaactgtgcgccaaggagggtatatgcctcagtag

SEQ ID NO: 126304 - DNA, 8750 bp, Artificial Sequence
  derived and/or modified sequence
tattacatgtgtctgttgcagaaatatccgcgcaagatgttgacgttgcagacttggctagtgcaagccttgtttattttcctcaccactgaatctacaggtgaacttctagatccatgtggttatatcagtcctgaatctccagttgtacaacttcattctaatttcactgcagtttgtgtgctaaaggaaaaatgtatggattattttcatgtaaatgctaattacattgtctggaaaacaaaccattttactattcctaaggagcaatatactatcataaacagaacagcatccagtgtcacctttacagatatagcttcattaaatattcagctcacttgcaacattcttacattcggacagcttgaacagaatgtttatggaatcacaataatttcaggcttgcctccagaaaaacctaaaaatttgagttgcattgtgaacgaggggaagaaaatgaggtgtgagtgggatggtggaagggaaacacacttggagacaaacttcactttaaaatctgaatgggcaacacacaagtttgctgattgcaaagcaaaacgtgacacccccacctcatgcactgttgattattctactgtgtattttgtcaacattgaagtctgggtagaagcagagaatgcccttgggaaggttacatcagatcatatcaattttgatcctgtatataaagtgaagcccaatccgccacataatttatcagtgatcaactcagaggaactgtctagtatcttaaaattgacatggaccaacccaagtattaagagtgttataatactaaaatataacattcaatataggaccaaagatgcctcaacttggagccagattcctcctgaagacacagcatccacccgatcttcattcactgtccaagaccttaaaccttttacagaatatgtgtttaggattcgctgtatgaaggaagatggtaagggatactggagtgactggagtgaagaagcaagtgggatcacctatgaagatagaccatctaaagcaccaagtttctggtataaaatagatccatcccatactcaaggctacagaactgtacaactcgtgtggaagacattgcctccttttgaagccaatggaaaaatcttggattatgaagtgactctcacaagatggaaatcacatttacaaaattacacagttaatgccacaaaactgacagtaaatctcacaaatgatcgctatctagcaaccctaacagtaagaaatcttgttggcaaatcagatgcagctgttttaactatccctgcctgtgactttcaagctactcaccctgtaatggatcttaaagcattccccaaagataacatgctttgggtggaatggactactccaagggaatctgtaaagaaatatatacttgagtggtgtgtgttatcagataaagcaccctgtatcacagactggcaacaagaagatggtaccgtgcatcgcacctatttaagagggaacttagcagagagcaaatgctatttgataacagttactccagtatatgctgatggaccaggaagccctgaatccataaaggcataccttaaacaagctccaccttccaaaggacctactgttcggacaaaaaaagtagggaaaaacgaagctgtcttagagtgggaccaacttcctgttgatgttcagaatggatttatcagaaattatactatattttatagaaccatcattggaaatgaaactgctgtgaatgtggattcttcccacacagaatatacattgtcctctttgactagtgacacattgtacatggtacgaatggcagcatacacagatgaaggtgggaaggatggtccagaattcacttttactaccccaaagtttgctcaaggagaaattgaagccatagtcgtgcctgtttgcttagcattcctattgacaactcttctgggagtgctgttctgctttaataagcgagacctaattaaaaaacacatctggcctaatgttccagatccttcaaagagtcatattgcccagtggtcacctcacactcctccaaggcacaattttaattcaaaagatcaaatgtattcagatggcaatttcactgatgtaagtgttgtggaaatagaagcaaatgacaaaaagccttttccagaagatctgaaatcattggacctgttcaaaaaggaaaaaattaatactgaaggacacagcagtggtattggggggtcttcatgcatgtcatcttctaggccaagcatttctagcagtgatgaaaatgaatcttcacaaaacacttcgagcactgtccagtattctaccgtggtacacagtggctacagacaccaagttccgtcagtccaagtcttctcaagatccgagtctacccagcccttgttagattcagaggagcggccagaagatctacaattagtagatcatgtagatggcggtgatggtattttgcccaggcaacagtacttcaaacagaactgcagtcagcatgaatccagtccagatatttcacattttgaaaggtcaaagcaagtttcatcagtcaatgaggaagattttgttagacttaaacagcagatttcagatcatatttcacaatcctgtggatctgggcaaatgaaaatgtttcaggaagtttctgcagcagatgcttttggtccaggtactgagggacaagtagaaagatttgaaacagttggcatggaggctgcgactgatgaaggcatgcctaaaagttacttaccacagactgtacggcaaggcggctacatgcctcagtgaaggactagtagttcctgctacaacttcagcagtacctataaagtaaagctaaaatgattttatctgtgaattcagattttaaaaagtcttcactctctgaagatgatcatttgcccttaaggacaaaaatgaactgaagtttcacatgagctatttccattccagaatatctgggattctactttaagcactacataaactgactttatcctcagactagctgaatgattttgtgctgtttcaggatgtttgcactgaagaaaaacagaaagcttatctgaaatttataaaactttttgttttgctacatagaaaacagaaggtatttgaataataagcagtgatatgcttagtgagcacagctatactgattttgattagaatagtcatcagagtggcttagggacagttaatataaaagaggagcaaggtgtagaccatcatctacttctgctaaaataacttaaaaagaggtccataggccataactacatgagcccagcttttgtaatctgacaaaaaaatgaggagcagcttcgtgtatatcagtgtacacggtattccttaggtcccttccattggtagtgatgctgcgagttattactggagaaaaggaattctagagctttaacttggcagattaaaagtactcattttttattcatcaataattagtaatctcactagttttcaaaaatttgcatattattgacaacctctttgaagatgcatttcacaaactcaacagagtgccatgataagagctagggatcccccaaactatctcaagcatctaaaaaattgccatttttaaaggcttaaattgtagtagtaaaggggaaaacaggaagtagtagtaaaggggaaaaaaaaccaataaagcatctaaaaaattggcatgttaaaaggcttaaattgctaatgtgtgtatatatatatatatatatacacacacatatcattgacttttcttaagacttcagagtactgggtagatgaacactttatacagtatatatcttcagcttaaatttgttttgagtattttttttatttttaaataagtaggcaaagatttaaatttttttatttttagtaaatgtttgaggcacactaagacaacttgggcaatatttgccaaaacaaaacagaaccccaaaaaatgtacatcttgttcttagcaaatatcattattgtagagacacttaataaagagatggtattttaatgtctgcagttctgaggtagggtggaacttagttctacattgtgatttaggaatttttaaaaccttttttcttcaagggagaagtgacccaggcctcgagtttagtgctaaagccgctagtgtacttatgctgtcccctaaccaccacgtgcgatatggaagcagatgctaaatataggggttttcttagaaagtaagaggaaattagcaagcgttattagtgattgactactgctatcaagtgaattcaaaggaaacaggtttttatgccatatttaagttacagaaaccaggcatgcttagaatagtttctagaggttattggagaatagaaagctaagaaaacttggtatacatttacaatggaaatataattacactttttactctcagaatattgttcacattagacttcctgtttatcttttatattcttgcatttatataatgcctcatcctttcaaagttctttcacatattatatgatcttctttatgaaaaaaatagatgtttcattctgatatattcagtttcccactttaggcaaaagtagattaatagaatgacgaattcaaagtagatgaggaaaatcaggcacagagaagtaaaggtagggatagacccaaatttacacaacaagataatgacatctccagcttttaagttgatcatcaaaggctgggctggatttgtcttgctgtatgtgtcaggaaatttatacctattacattttccattttctcaaaatttaagtcacatgactaatatttagctgcaactttcctcataacaaatagtgtcatgaagaatgttgtagtgtgaagtttgtacatttcagggtcagatatacaatatgaactcttaatctacaggaatgagaatggaggatcattgaaggccatgatataaacaaatttgcatgttgaagcctgtataaaacatggtacagtgagtgaatatacccccatccccaagaacactttatacatattaaatggatatatgattactgtgcaaaaattcattctggaaatgaacatatatttgagcactaatatgtaatgtacacctgccctaaggagaaaataaattataaaactttttacattcaaaattactttcccaagcatgtcttagaataatctatgtgttgatgcatgtaaattgtactttaggtaggcaaagaaatctggttatttatgtaaaaactagtctaataaagttagttagtggctttatcactttaaatctttagtgtccaaaagtggtgtttaaagtaatagcacatcagaaaaccttgtctggacaaaactagttcactcactgcttctgcacctgcagttgctccctttagggttataaaataatgacccaaatgttacatgtgttgatattataacttgtcagttactgatgtctgtggtatcctaccctcatctctgaaagggataatactgaataattattagaaaactataaaacttcacactttgtaccattaaaacctaaaattttaatcttgtccttttttactatggatcagtcggcactcgggaacagcagcaaggaaaaaaagcaaatttcattcacatgttctgtgttcatacctcttctctacctaattgttcatttaaatttcagccttattccttgataagggattttaccacatgaagtcatccagtgaccctagctcttattgtgaagttagtggagtatacttagaaatgttacaactttaaaatgttacaaaacattcattaaagctcatatttaaagtagagcatctagtttgagaaatagaaatcaattattaaagatgtcttttttctacccatttaactagttaaaaccatgacatgtaaatgtagaagtagaataatcatagaattccctaaaatatttctgtttactaacatatattgaccaagtacatcaagcaggagagatcttccttcattctgttatagtccacatcattctaattttgctcagttgttattaagagcatattcctaaaccatacacttttgtttcaataaagttttattttgttgagatgaataaaataacaaagttataagctgcataagacaaaagttcaattgttcaaaaaaaatttactgggatagctttctattacaggtattgttagattatattgtgctgataagattactttctaaaaaatttgtacttttctgtaaattaaaagaatatggagtcataaaatggcaagtgttttaggattagcctaaaattggacattgtcattgatttcaaagaaggtatgaactagcagtcttacagcctaattcttctttggactggtccttggcagcagttccttttcagactcgataaacagaattcagatgatgtaagtcaaaacaaaactttacaaagccaagcgtattatcttttgcattaacctatttttttccatcatacatgctactagtatgtgcattagcatgatattctcatatacattgcattaaaaattaaaaggtggcagctcagggtgagctcttctgttgctcatttgttcctaaatttttaagggctttttctcagtcaatagtttgtacaaactggttagtttaacttcattacccatttcattaaagttgatgggtcgtgtgatgagatgcatttaaggccgatagtgatagatgttttttttatttcttgaacacaggctttgtctgaatgatgttcttttatctcttgaacacaagctttgaatgataactacaggttttaagtgctgttacattaataccataatgtgatgtgttagaaacaaagggatatttcaaaggtagatatttgaaaattctctagtctcaatatgtatgtgtattgaatatactctaaaaataaatgtgcaatttgctagtaggacaatgcagtgactgactagcattaggtatgtttcttttatatcctagctatgtcccactttcttctaagtgcaatcctttcatgttcacttgctgttttaccccatctactctaacttcatttggaaggcttgtctagagtatagcatgtatttttacctttgcagtgaattgcatgtgctaattgtaaccacagctatttttatgttgacataactccaaatgttatattaaatgttctattatatattagctctaatcccttaagtaaattttaagaaataaatacttgttcaaattttttttctgtatgtggttactatcatctgactatgcatatttgtaacagcatttatcattagtggtgttagctaaataagcatcttagtgtaaatgagatgcttcgtgtgggttttgtgacattttaaatgacataatggaatgtgatttaaaagaaaaccagtacactatcttggtcttaataacatagaatggagatggcaaatttatccactagttttccagatttactatttaatagctgaggtctgaaatcgtagcatcctccctcctagtggacattaaaaaaaaaaaaaaaaaaaaaaacctacttggttgtcaagagcccaagtatggaggtgctgcgccatcttgtggcctgtctgtgcccaccctgcactctgctggagtctccatccttgttgcagtgagacttgaagttcaagattgatacatggcatcctcctgctacttcttgaggttactaagtagtatatgaaactaatcagtcagcaagtccacctggaaggaaaagaaaatctcaactattaatgtgccttcacattgtgattttgtctaaaaaaatgtagtgagtcaaaaaacccacaagccagccaacagtaactccttcacatatataccagagtttatagaaataacatgtcagctttgggctatgtgctcctttgtttaaaatcttctatttggttatggcttgtataggctcaagcctgatttctttaaggtgtggtggctcatcttatcctaatgtgtatgatagatacagtccatcctgctttggaaaagattatgtaactccttgagagcatactctttctctagcccaaaggcagtgagagagttttcttgttcaggattgcttaactttccatttaagctttttctttttaaattaatacaaacttctacactttcaaaatacgaaatatattacaactgcgtataggctcttccatacttaagtccagtgcttgggcaagttaatggagtgaaagactacaagcaaagaggaactgaggtagaaaaagaagaatgtgtgaaagcagcaggaagctcagccaactcgaaagcagggtgaacagcttgagtcctgttgctgctgatcggggttggctcttggacaacttagtaagatcatggaaaggctgcttgggttctccatagaaaagttctgtctccatcaagggaggaaaatgtacctttcaactcaaaattcaatatttgtttttaaatatagctattttccccaaccgctaaagattttcaacagatacgaagccagagcttagttttagaaacctgtggacattcaaacctgattctttattccctgtgactatggttatgtcattttacatgtcaaaaaagtgtatctagaattgtcatttcttatttttgagctttttttagtgagaattatcccctcacttaaatggctttttatttaaacatctgtgcattctgtatgaaattgtagtctttctgggataacatggtgagctatatggtggtaatccacacac

SEQ ID NO: 126305 - DNA, 8667 bp, Artificial Sequence
  derived and/or modified sequence
tattacatgtgtctgttgcagaaatatccgcgcaagatgttgacgttgcagacttggctagtgcaagccttgtttattttcctcaccactgaatctacaggtgaacttctagatccatgtggttatatcagtcctgaatctccagttgtacaacttcattctaatttcactgcagtttgtgtgctaaaggaaaaatgtatggattattttcatgtaaatgctaattacattgtctggaaaacaaaccattttactattcctaaggagcaatatactatcataaacagaacagcatccagtgtcacctttacagatatagcttcattaaatattcagctcacttgcaacattcttacattcggacagcttgaacagaatgtttatggaatcacaataatttcaggcttgcctccagaaaaacctaaaaatttgagttgcattgtgaacgaggggaagaaaatgaggtgtgagtgggatggtggaagggaaacacacttggagacaaacttcactttaaaatctgaatgggcaacacacaagtttgctgattgcaaagcaaaacgtgacacccccacctcatgcactgttgattattctactgtgtattttgtcaacattgaagtctgggtagaagcagagaatgcccttgggaaggttacatcagatcatatcaattttgatcctgtatataaagtgaagcccaatccgccacataatttatcagtgatcaactcagaggaactgtctagtatcttaaaattgacatggaccaacccaagtattaagagtgttataatactaaaatataacattcaatataggaccaaagatgcctcaacttggagccagattcctcctgaagacacagcatccacccgatcttcattcactgtccaagaccttaaaccttttacagaatatgtgtttaggattcgctgtatgaaggaagatggtaagggatactggagtgactggagtgaagaagcaagtgggatcacctatgaagataacattgcctccttttgaagccaatggaaaaatcttggattatgaagtgactctcacaagatggaaatcacatttacaaaattacacagttaatgccacaaaactgacagtaaatctcacaaatgatcgctatctagcaaccctaacagtaagaaatcttgttggcaaatcagatgcagctgttttaactatccctgcctgtgactttcaagctactcaccctgtaatggatcttaaagcattccccaaagataacatgctttgggtggaatggactactccaagggaatctgtaaagaaatatatacttgagtggtgtgtgttatcagataaagcaccctgtatcacagactggcaacaagaagatggtaccgtgcatcgcacctatttaagagggaacttagcagagagcaaatgctatttgataacagttactccagtatatgctgatggaccaggaagccctgaatccataaaggcataccttaaacaagctccaccttccaaaggacctactgttcggacaaaaaaagtagggaaaaacgaagctgtcttagagtgggaccaacttcctgttgatgttcagaatggatttatcagaaattatactatattttatagaaccatcattggaaatgaaactgctgtgaatgtggattcttcccacacagaatatacattgtcctctttgactagtgacacattgtacatggtacgaatggcagcatacacagatgaaggtgggaaggatggtccagaattcacttttactaccccaaagtttgctcaaggagaaattgaagccatagtcgtgcctgtttgcttagcattcctattgacaactcttctgggagtgctgttctgctttaataagcgagacctaattaaaaaacacatctggcctaatgttccagatccttcaaagagtcatattgcccagtggtcacctcacactcctccaaggcacaattttaattcaaaagatcaaatgtattcagatggcaatttcactgatgtaagtgttgtggaaatagaagcaaatgacaaaaagccttttccagaagatctgaaatcattggacctgttcaaaaaggaaaaaattaatactgaaggacacagcagtggtattggggggtcttcatgcatgtcatcttctaggccaagcatttctagcagtgatgaaaatgaatcttcacaaaacacttcgagcactgtccagtattctaccgtggtacacagtggctacagacaccaagttccgtcagtccaagtcttctcaagatccgagtctacccagcccttgttagattcagaggagcggccagaagatctacaattagtagatcatgtagatggcggtgatggtattttgcccaggcaacagtacttcaaacagaactgcagtcagcatgaatccagtccagatatttcacattttgaaaggtcaaagcaagtttcatcagtcaatgaggaagattttgttagacttaaacagcagatttcagatcatatttcacaatcctgtggatctgggcaaatgaaaatgtttcaggaagtttctgcagcagatgcttttggtccaggtactgagggacaagtagaaagatttgaaacagttggcatggaggctgcgactgatgaaggcatgcctaaaagttacttaccacagactgtacggcaaggcggctacatgcctcagtgaaggactagtagttcctgctacaacttcagcagtacctataaagtaaagctaaaatgattttatctgtgaattcagattttaaaaagtcttcactctctgaagatgatcatttgcccttaaggacaaaaatgaactgaagtttcacatgagctatttccattccagaatatctgggattctactttaagcactacataaactgactttatcctcagactagctgaatgattttgtgctgtttcaggatgtttgcactgaagaaaaacagaaagcttatctgaaatttataaaactttttgttttgctacatagaaaacagaaggtatttgaataataagcagtgatatgcttagtgagcacagctatactgattttgattagaatagtcatcagagtggcttagggacagttaatataaaagaggagcaaggtgtagaccatcatctacttctgctaaaataacttaaaaagaggtccataggccataactacatgagcccagcttttgtaatctgacaaaaaaatgaggagcagcttcgtgtatatcagtgtacacggtattccttaggtcccttccattggtagtgatgctgcgagttattactggagaaaaggaattctagagctttaacttggcagattaaaagtactcattttttattcatcaataattagtaatctcactagttttcaaaaatttgcatattattgacaacctctttgaagatgcatttcacaaactcaacagagtgccatgataagagctagggatcccccaaactatctcaagcatctaaaaaattgccatttttaaaggcttaaattgtagtagtaaaggggaaaacaggaagtagtagtaaaggggaaaaaaaaccaataaagcatctaaaaaattggcatgttaaaaggcttaaattgctaatgtgtgtatatatatatatatatatacacacacatatcattgacttttcttaagacttcagagtactgggtagatgaacactttatacagtatatatcttcagcttaaatttgttttgagtattttttttatttttaaataagtaggcaaagatttaaatttttttatttttagtaaatgtttgaggcacactaagacaacttgggcaatatttgccaaaacaaaacagaaccccaaaaaatgtacatcttgttcttagcaaatatcattattgtagagacacttaataaagagatggtattttaatgtctgcagttctgaggtagggtggaacttagttctacattgtgatttaggaatttttaaaaccttttttcttcaagggagaagtgacccaggcctcgagtttagtgctaaagccgctagtgtacttatgctgtcccctaaccaccacgtgcgatatggaagcagatgctaaatataggggttttcttagaaagtaagaggaaattagcaagcgttattagtgattgactactgctatcaagtgaattcaaaggaaacaggtttttatgccatatttaagttacagaaaccaggcatgcttagaatagtttctagaggttattggagaatagaaagctaagaaaacttggtatacatttacaatggaaatataattacactttttactctcagaatattgttcacattagacttcctgtttatcttttatattcttgcatttatataatgcctcatcctttcaaagttctttcacatattatatgatcttctttatgaaaaaaatagatgtttcattctgatatattcagtttcccactttaggcaaaagtagattaatagaatgacgaattcaaagtagatgaggaaaatcaggcacagagaagtaaaggtagggatagacccaaatttacacaacaagataatgacatctccagcttttaagttgatcatcaaaggctgggctggatttgtcttgctgtatgtgtcaggaaatttatacctattacattttccattttctcaaaatttaagtcacatgactaatatttagctgcaactttcctcataacaaatagtgtcatgaagaatgttgtagtgtgaagtttgtacatttcagggtcagatatacaatatgaactcttaatctacaggaatgagaatggaggatcattgaaggccatgatataaacaaatttgcatgttgaagcctgtataaaacatggtacagtgagtgaatatacccccatccccaagaacactttatacatattaaatggatatatgattactgtgcaaaaattcattctggaaatgaacatatatttgagcactaatatgtaatgtacacctgccctaaggagaaaataaattataaaactttttacattcaaaattactttcccaagcatgtcttagaataatctatgtgttgatgcatgtaaattgtactttaggtaggcaaagaaatctggttatttatgtaaaaactagtctaataaagttagttagtggctttatcactttaaatctttagtgtccaaaagtggtgtttaaagtaatagcacatcagaaaaccttgtctggacaaaactagttcactcactgcttctgcacctgcagttgctccctttagggttataaaataatgacccaaatgttacatgtgttgatattataacttgtcagttactgatgtctgtggtatcctaccctcatctctgaaagggataatactgaataattattagaaaactataaaacttcacactttgtaccattaaaacctaaaattttaatcttgtccttttttactatggatcagtcggcactcgggaacagcagcaaggaaaaaaagcaaatttcattcacatgttctgtgttcatacctcttctctacctaattgttcatttaaatttcagccttattccttgataagggattttaccacatgaagtcatccagtgaccctagctcttattgtgaagttagtggagtatacttagaaatgttacaactttaaaatgttacaaaacattcattaaagctcatatttaaagtagagcatctagtttgagaaatagaaatcaattattaaagatgtcttttttctacccatttaactagttaaaaccatgacatgtaaatgtagaagtagaataatcatagaattccctaaaatatttctgtttactaacatatattgaccaagtacatcaagcaggagagatcttccttcattctgttatagtccacatcattctaattttgctcagttgttattaagagcatattcctaaaccatacacttttgtttcaataaagttttattttgttgagatgaataaaataacaaagttataagctgcataagacaaaagttcaattgttcaaaaaaaatttactgggatagctttctattacaggtattgttagattatattgtgctgataagattactttctaaaaaatttgtacttttctgtaaattaaaagaatatggagtcataaaatggcaagtgttttaggattagcctaaaattggacattgtcattgatttcaaagaaggtatgaactagcagtcttacagcctaattcttctttggactggtccttggcagcagttccttttcagactcgataaacagaattcagatgatgtaagtcaaaacaaaactttacaaagccaagcgtattatcttttgcattaacctatttttttccatcatacatgctactagtatgtgcattagcatgatattctcatatacattgcattaaaaattaaaaggtggcagctcagggtgagctcttctgttgctcatttgttcctaaatttttaagggctttttctcagtcaatagtttgtacaaactggttagtttaacttcattacccatttcattaaagttgatgggtcgtgtgatgagatgcatttaaggccgatagtgatagatgttttttttatttcttgaacacaggctttgtctgaatgatgttcttttatctcttgaacacaagctttgaatgataactacaggttttaagtgctgttacattaataccataatgtgatgtgttagaaacaaagggatatttcaaaggtagatatttgaaaattctctagtctcaatatgtatgtgtattgaatatactctaaaaataaatgtgcaatttgctagtaggacaatgcagtgactgactagcattaggtatgtttcttttatatcctagctatgtcccactttcttctaagtgcaatcctttcatgttcacttgctgttttaccccatctactctaacttcatttggaaggcttgtctagagtatagcatgtatttttacctttgcagtgaattgcatgtgctaattgtaaccacagctatttttatgttgacataactccaaatgttatattaaatgttctattatatattagctctaatcccttaagtaaattttaagaaataaatacttgttcaaattttttttctgtatgtggttactatcatctgactatgcatatttgtaacagcatttatcattagtggtgttagctaaataagcatcttagtgtaaatgagatgcttcgtgtgggttttgtgacattttaaatgacataatggaatgtgatttaaaagaaaaccagtacactatcttggtcttaataacatagaatggagatggcaaatttatccactagttttccagatttactatttaatagctgaggtctgaaatcgtagcatcctccctcctagtggacattaaaaaaaaaaaaaaaaaaaaaaacctacttggttgtcaagagcccaagtatggaggtgctgcgccatcttgtggcctgtctgtgcccaccctgcactctgctggagtctccatccttgttgcagtgagacttgaagttcaagattgatacatggcatcctcctgctacttcttgaggttactaagtagtatatgaaactaatcagtcagcaagtccacctggaaggaaaagaaaatctcaactattaatgtgccttcacattgtgattttgtctaaaaaaatgtagtgagtcaaaaaacccacaagccagccaacagtaactccttcacatatataccagagtttatagaaataacatgtcagctttgggctatgtgctcctttgtttaaaatcttctatttggttatggcttgtataggctcaagcctgatttctttaaggtgtggtggctcatcttatcctaatgtgtatgatagatacagtccatcctgctttggaaaagattatgtaactccttgagagcatactctttctctagcccaaaggcagtgagagagttttcttgttcaggattgcttaactttccatttaagctttttctttttaaattaatacaaacttctacactttcaaaatacgaaatatattacaactgcgtataggctcttccatacttaagtccagtgcttgggcaagttaatggagtgaaagactacaagcaaagaggaactgaggtagaaaaagaagaatgtgtgaaagcagcaggaagctcagccaactcgaaagcagggtgaacagcttgagtcctgttgctgctgatcggggttggctcttggacaacttagtaagatcatggaaaggctgcttgggttctccatagaaaagttctgtctccatcaagggaggaaaatgtacctttcaactcaaaattcaatatttgtttttaaatatagctattttccccaaccgctaaagattttcaacagatacgaagccagagcttagttttagaaacctgtggacattcaaacctgattctttattccctgtgactatggttatgtcattttacatgtcaaaaaagtgtatctagaattgtcatttcttatttttgagctttttttagtgagaattatcccctcacttaaatggctttttatttaaacatctgtgcattctgtatgaaattgtagtctttctgggataacatggtgagctatatggtggtaatccacacac

SEQ ID NO: 126306 - DNA, 9008 bp, Artificial Sequence
  derived and/or modified sequence
agccggggcgagcagccaaaaggcccgcggagtcgcgctgggccgccccggcgcagctgaaccgggggccgcgcctgccaggccgacgggtctggcccagcctggcgccaaggggttcgtgcgctgtggagacgcggagggtcgaggcggcgcggcctgagtgaaacccaatggaaaaagcatgacatttagaagtagaagacttagcttcaaatccctactccttcacttactaattttgtgatttggaaatatccgcgcaagatgttgacgttgcagacttggctagtgcaagccttgtttattttcctcaccactgaatctacaggtgaacttctagatccatgtggttatatcagtcctgaatctccagttgtacaacttcattctaatttcactgcagtttgtgtgctaaaggaaaaatgtatggattattttcatgtaaatgctaattacattgtctggaaaacaaaccattttactattcctaaggagcaatatactatcataaacagaacagcatccagtgtcacctttacagatatagcttcattaaatattcagctcacttgcaacattcttacattcggacagcttgaacagaatgtttatggaatcacaataatttcaggcttgcctccagaaaaacctaaaaatttgagttgcattgtgaacgaggggaagaaaatgaggtgtgagtgggatggtggaagggaaacacacttggagacaaacttcactttaaaatctgaatgggcaacacacaagtttgctgattgcaaagcaaaacgtgacacccccacctcatgcactgttgattattctactgtgtattttgtcaacattgaagtctgggtagaagcagagaatgcccttgggaaggttacatcagatcatatcaattttgatcctgtatataaagtgaagcccaatccgccacataatttatcagtgatcaactcagaggaactgtctagtatcttaaaattgacatggaccaacccaagtattaagagtgttataatactaaaatataacattcaatataggaccaaagatgcctcaacttggagccagattcctcctgaagacacagcatccacccgatcttcattcactgtccaagaccttaaaccttttacagaatatgtgtttaggattcgctgtatgaaggaagatggtaagggatactggagtgactggagtgaagaagcaagtgggatcacctatgaagatagaccatctaaagcaccaagtttctggtataaaatagatccatcccatactcaaggctacagaactgtacaactcgtgtggaagacattgcctccttttgaagccaatggaaaaatcttggattatgaagtgactctcacaagatggaaatcacatttacaaaattacacagttaatgccacaaaactgacagtaaatctcacaaatgatcgctatctagcaaccctaacagtaagaaatcttgttggcaaatcagatgcagctgttttaactatccctgcctgtgactttcaagctactcaccctgtaatggatcttaaagcattccccaaagataacatgctttgggtggaatggactactccaagggaatctgtaaagaaatatatacttgagtggtgtgtgttatcagataaagcaccctgtatcacagactggcaacaagaagatggtaccgtgcatcgcacctatttaagagggaacttagcagagagcaaatgctatttgataacagttactccagtatatgctgatggaccaggaagccctgaatccataaaggcataccttaaacaagctccaccttccaaaggacctactgttcggacaaaaaaagtagggaaaaacgaagctgtcttagagtgggaccaacttcctgttgatgttcagaatggatttatcagaaattatactatattttatagaaccatcattggaaatgaaactgctgtgaatgtggattcttcccacacagaatatacattgtcctctttgactagtgacacattgtacatggtacgaatggcagcatacacagatgaaggtgggaaggatggtccagaattcacttttactaccccaaagtttgctcaaggagaaattgaagccatagtcgtgcctgtttgcttagcattcctattgacaactcttctgggagtgctgttctgctttaataagcgagacctaattaaaaaacacatctggcctaatgttccagatccttcaaagagtcatattgcccagtggtcacctcacactcctccaaggcacaattttaattcaaaagatcaaatgtattcagatggcaatttcactgatgtaagtgttgtggaaatagaagcaaatgacaaaaagccttttccagaagatctgaaatcattggacctgttcaaaaaggaaaaaattaatactgaaggacacagcagtggtattggggggtcttcatgcatgtcatcttctaggccaagcatttctagcagtgatgaaaatgaatcttcacaaaacacttcgagcactgtccagtattctaccgtggtacacagtggctacagacaccaagttccgtcagtccaagtcttctcaagatccgagtctacccagcccttgttagattcagaggagcggccagaagatctacaattagtagatcatgtagatggcggtgatggtattttgcccaggcaacagtacttcaaacagaactgcagtcagcatgaatccagtccagatatttcacattttgaaaggtcaaagcaagtttcatcagtcaatgaggaagattttgttagacttaaacagcagatttcagatcatatttcacaatcctgtggatctgggcaaatgaaaatgtttcaggaagtttctgcagcagatgcttttggtccaggtactgagggacaagtagaaagatttgaaacagttggcatggaggctgcgactgatgaaggcatgcctaaaagttacttaccacagactgtacggcaaggcggctacatgcctcagtgaaggactagtagttcctgctacaacttcagcagtacctataaagtaaagctaaaatgattttatctgtgaattcagattttaaaaagtcttcactctctgaagatgatcatttgcccttaaggacaaaaatgaactgaagtttcacatgagctatttccattccagaatatctgggattctactttaagcactacataaactgactttatcctcagactagctgaatgattttgtgctgtttcaggatgtttgcactgaagaaaaacagaaagcttatctgaaatttataaaactttttgttttgctacatagaaaacagaaggtatttgaataataagcagtgatatgcttagtgagcacagctatactgattttgattagaatagtcatcagagtggcttagggacagttaatataaaagaggagcaaggtgtagaccatcatctacttctgctaaaataacttaaaaagaggtccataggccataactacatgagcccagcttttgtaatctgacaaaaaaatgaggagcagcttcgtgtatatcagtgtacacggtattccttaggtcccttccattggtagtgatgctgcgagttattactggagaaaaggaattctagagctttaacttggcagattaaaagtactcattttttattcatcaataattagtaatctcactagttttcaaaaatttgcatattattgacaacctctttgaagatgcatttcacaaactcaacagagtgccatgataagagctagggatcccccaaactatctcaagcatctaaaaaattgccatttttaaaggcttaaattgtagtagtaaaggggaaaacaggaagtagtagtaaaggggaaaaaaaaccaataaagcatctaaaaaattggcatgttaaaaggcttaaattgctaatgtgtgtatatatatatatatatatacacacacatatcattgacttttcttaagacttcagagtactgggtagatgaacactttatacagtatatatcttcagcttaaatttgttttgagtattttttttatttttaaataagtaggcaaagatttaaatttttttatttttagtaaatgtttgaggcacactaagacaacttgggcaatatttgccaaaacaaaacagaaccccaaaaaatgtacatcttgttcttagcaaatatcattattgtagagacacttaataaagagatggtattttaatgtctgcagttctgaggtagggtggaacttagttctacattgtgatttaggaatttttaaaaccttttttcttcaagggagaagtgacccaggcctcgagtttagtgctaaagccgctagtgtacttatgctgtcccctaaccaccacgtgcgatatggaagcagatgctaaatataggggttttcttagaaagtaagaggaaattagcaagcgttattagtgattgactactgctatcaagtgaattcaaaggaaacaggtttttatgccatatttaagttacagaaaccaggcatgcttagaatagtttctagaggttattggagaatagaaagctaagaaaacttggtatacatttacaatggaaatataattacactttttactctcagaatattgttcacattagacttcctgtttatcttttatattcttgcatttatataatgcctcatcctttcaaagttctttcacatattatatgatcttctttatgaaaaaaatagatgtttcattctgatatattcagtttcccactttaggcaaaagtagattaatagaatgacgaattcaaagtagatgaggaaaatcaggcacagagaagtaaaggtagggatagacccaaatttacacaacaagataatgacatctccagcttttaagttgatcatcaaaggctgggctggatttgtcttgctgtatgtgtcaggaaatttatacctattacattttccattttctcaaaatttaagtcacatgactaatatttagctgcaactttcctcataacaaatagtgtcatgaagaatgttgtagtgtgaagtttgtacatttcagggtcagatatacaatatgaactcttaatctacaggaatgagaatggaggatcattgaaggccatgatataaacaaatttgcatgttgaagcctgtataaaacatggtacagtgagtgaatatacccccatccccaagaacactttatacatattaaatggatatatgattactgtgcaaaaattcattctggaaatgaacatatatttgagcactaatatgtaatgtacacctgccctaaggagaaaataaattataaaactttttacattcaaaattactttcccaagcatgtcttagaataatctatgtgttgatgcatgtaaattgtactttaggtaggcaaagaaatctggttatttatgtaaaaactagtctaataaagttagttagtggctttatcactttaaatctttagtgtccaaaagtggtgtttaaagtaatagcacatcagaaaaccttgtctggacaaaactagttcactcactgcttctgcacctgcagttgctccctttagggttataaaataatgacccaaatgttacatgtgttgatattataacttgtcagttactgatgtctgtggtatcctaccctcatctctgaaagggataatactgaataattattagaaaactataaaacttcacactttgtaccattaaaacctaaaattttaatcttgtccttttttactatggatcagtcggcactcgggaacagcagcaaggaaaaaaagcaaatttcattcacatgttctgtgttcatacctcttctctacctaattgttcatttaaatttcagccttattccttgataagggattttaccacatgaagtcatccagtgaccctagctcttattgtgaagttagtggagtatacttagaaatgttacaactttaaaatgttacaaaacattcattaaagctcatatttaaagtagagcatctagtttgagaaatagaaatcaattattaaagatgtcttttttctacccatttaactagttaaaaccatgacatgtaaatgtagaagtagaataatcatagaattccctaaaatatttctgtttactaacatatattgaccaagtacatcaagcaggagagatcttccttcattctgttatagtccacatcattctaattttgctcagttgttattaagagcatattcctaaaccatacacttttgtttcaataaagttttattttgttgagatgaataaaataacaaagttataagctgcataagacaaaagttcaattgttcaaaaaaaatttactgggatagctttctattacaggtattgttagattatattgtgctgataagattactttctaaaaaatttgtacttttctgtaaattaaaagaatatggagtcataaaatggcaagtgttttaggattagcctaaaattggacattgtcattgatttcaaagaaggtatgaactagcagtcttacagcctaattcttctttggactggtccttggcagcagttccttttcagactcgataaacagaattcagatgatgtaagtcaaaacaaaactttacaaagccaagcgtattatcttttgcattaacctatttttttccatcatacatgctactagtatgtgcattagcatgatattctcatatacattgcattaaaaattaaaaggtggcagctcagggtgagctcttctgttgctcatttgttcctaaatttttaagggctttttctcagtcaatagtttgtacaaactggttagtttaacttcattacccatttcattaaagttgatgggtcgtgtgatgagatgcatttaaggccgatagtgatagatgttttttttatttcttgaacacaggctttgtctgaatgatgttcttttatctcttgaacacaagctttgaatgataactacaggttttaagtgctgttacattaataccataatgtgatgtgttagaaacaaagggatatttcaaaggtagatatttgaaaattctctagtctcaatatgtatgtgtattgaatatactctaaaaataaatgtgcaatttgctagtaggacaatgcagtgactgactagcattaggtatgtttcttttatatcctagctatgtcccactttcttctaagtgcaatcctttcatgttcacttgctgttttaccccatctactctaacttcatttggaaggcttgtctagagtatagcatgtatttttacctttgcagtgaattgcatgtgctaattgtaaccacagctatttttatgttgacataactccaaatgttatattaaatgttctattatatattagctctaatcccttaagtaaattttaagaaataaatacttgttcaaattttttttctgtatgtggttactatcatctgactatgcatatttgtaacagcatttatcattagtggtgttagctaaataagcatcttagtgtaaatgagatgcttcgtgtgggttttgtgacattttaaatgacataatggaatgtgatttaaaagaaaaccagtacactatcttggtcttaataacatagaatggagatggcaaatttatccactagttttccagatttactatttaatagctgaggtctgaaatcgtagcatcctccctcctagtggacattaaaaaaaaaaaaaaaaaaaaaaacctacttggttgtcaagagcccaagtatggaggtgctgcgccatcttgtggcctgtctgtgcccaccctgcactctgctggagtctccatccttgttgcagtgagacttgaagttcaagattgatacatggcatcctcctgctacttcttgaggttactaagtagtatatgaaactaatcagtcagcaagtccacctggaaggaaaagaaaatctcaactattaatgtgccttcacattgtgattttgtctaaaaaaatgtagtgagtcaaaaaacccacaagccagccaacagtaactccttcacatatataccagagtttatagaaataacatgtcagctttgggctatgtgctcctttgtttaaaatcttctatttggttatggcttgtataggctcaagcctgatttctttaaggtgtggtggctcatcttatcctaatgtgtatgatagatacagtccatcctgctttggaaaagattatgtaactccttgagagcatactctttctctagcccaaaggcagtgagagagttttcttgttcaggattgcttaactttccatttaagctttttctttttaaattaatacaaacttctacactttcaaaatacgaaatatattacaactgcgtataggctcttccatacttaagtccagtgcttgggcaagttaatggagtgaaagactacaagcaaagaggaactgaggtagaaaaagaagaatgtgtgaaagcagcaggaagctcagccaactcgaaagcagggtgaacagcttgagtcctgttgctgctgatcggggttggctcttggacaacttagtaagatcatggaaaggctgcttgggttctccatagaaaagttctgtctccatcaagggaggaaaatgtacctttcaactcaaaattcaatatttgtttttaaatatagctattttccccaaccgctaaagattttcaacagatacgaagccagagcttagttttagaaacctgtggacattcaaacctgattctttattccctgtgactatggttatgtcattttacatgtcaaaaaagtgtatctagaattgtcatttcttatttttgagctttttttagtgagaattatcccctcacttaaatggctttttatttaaacatctgtgcattctgtatgaaattgtagtctttctgggataacatggtgagctatatggtggtaatccacacacacaaaaataaaagccaaaaaaaaaccaaaa

SEQ ID NO: 126307 - DNA, 1878 bp, Artificial Sequence
  derived and/or modified sequence
ggaaaaagcatgacatttagaagtagaagacttagcttcaaatccctactccttcacttactaattttgtgatttggaaatatccgcgcaagatgttgacgttgcagacttggctagtgcaagccttgtttattttcctcaccactgaatctacaggtgaacttctagatccatgtggttatatcagtcctgaatctccagttgtacaacttcattctaatttcactgcagtttgtgtgctaaaggaaaaatgtatggattattttcatgtaaatgctaattacattgtctggaaaacaaaccattttactattcctaaggagcaatatactatcataaacagaacagcatccagtgtcacctttacagatatagcttcattaaatattcagctcacttgcaacattcttacattcggacagcttgaacagaatgtttatggaatcacaataatttcaggcttgcctccagaaaaacctaaaaatttgagttgcattgtgaacgaggggaagaaaatgaggtgtgagtgggatggtggaagggaaacacacttggagacaaacttcactttaaaatctgaatgggcaacacacaagtttgctgattgcaaagcaaaacgtgacacccccacctcatgcactgttgattattctactgtgtattttgtcaacattgaagtctgggtagaagcagagaatgcccttgggaaggttacatcagatcatatcaattttgatcctgtatataaagtgaagcccaatccgccacataatttatcagtgatcaactcagaggaactgtctagtatcttaaaattgacatggaccaacccaagtattaagagtgttataatactaaaatataacattcaatataggaccaaagatgcctcaacttggagccagattcctcctgaagacacagcatccacccgatcttcattcactgtccaagaccttaaaccttttacagaatatgtgtttaggattcgctgtatgaaggaagatggtaagggatactggagtgactggagtgaagaagcaagtgggatcacctatgaagataacattgcctccttttgaagccaatggaaaaatcttggattatgaagtgactctcacaagatggaaatcacatttacaaaattacacagttaatgccacaaaactgacagtaaatctcacaaatgatcgctatctagcaaccctaacagtaagaaatcttgttggcaaatcagatgcagctgttttaactatccctgcctgtgactttcaagctactcaccctgtaatggatcttaaagcattccccaaagataacatgctttgggtggaatggactactccaagggaatctgtaaagaaatatatacttgagtggtgtgtgttatcagataaagcaccctgtatcacagactggcaacaagaagatggtaccgtgcatcgcacctatttaagagggaacttagcagagagcaaatgctatttgataacagttactccagtatatgctgatggaccaggaagccctgaatccataaaggcataccttaaacaagctccaccttccaaaggacctactgttcggacaaaaaaagtagggaaaaacgaagctgtcttagagtgggaccaacttcctgttgatgttcagaatggatttatcagaaattatactatattttatagaaccatcattggaaatgaaactgctgtgaatgtggattcttcccacacagaatatacattgtcctctttgactagtgacacattgtacatggtacgaatggcagcatacacagatgaaggtgggaaggatggtccagaattcacttttactaccccaaagtttgctcaaggagaaattgaagccatagtcgtg

SEQ ID NO: 126308 - DNA, 2757 bp, Artificial Sequence
  derived and/or modified sequence
atgctgaccctgcagacctggctggtgcaggccctcttcatcttcctgaccacagagagcactggagagctgctggacccctgtggctacatcagccctgagagccctgtggtgcagctgcacagcaacttcaccgctgtgtgtgtgctgaaggagaagtgcatggactacttccacgtgaatgccaactacatcgtgtggaagaccaaccacttcaccatccccaaggagcagtacaccatcatcaacagaacagccagctctgtgaccttcacagacatcgccagcctgaacatccagctgacctgcaacatcctgaccttcggccagctggagcagaatgtgtatggcatcaccatcatcagcggcctgcccccagagaagcccaagaacctgagctgcatcgtgaatgaaggcaagaagatgagatgtgagtgggatggcggccgggagacccacctggagaccaacttcaccctgaagtctgagtgggccacccacaagtttgctgactgcaaggccaagagggacacccccaccagctgcaccgtggactacagcacagtgtactttgtgaacatcgaggtgtgggtggaggctgaaaatgccctgggcaaggtgaccagtgaccacatcaactttgatcctgtgtacaaggtgaagcccaaccccccccacaacctgagcgtcatcaacagcgaggagctgagcagcatcctgaagctgacctggaccaaccccagcatcaagagcgtcatcatcctgaagtacaacatccagtaccgcaccaaggatgccagcacctggagccagatccccccagaggacacagccagcaccaggagcagcttcaccgtgcaggacctgaagcccttcacagaatatgtgttccgcatccgctgcatgaaggaggatggcaagggctactggagcgactggagcgaggaggccagcggcatcacctatgaagatcggcccagcaaggcccccagcttctggtacaagattgaccccagccacacccagggctacagaacagtgcagctggtgtggaagaccctgcccccatttgaggccaacgggaagatcctggactatgaggtgaccctgacccgctggaagagccacctgcagaactacacagtgaatgccaccaagctgactgtgaacctgaccaatgaccgctacctggccaccctgactgtgaggaacctggtgggcaagagtgatgctgctgtgctgaccatcccagcctgtgacttccaggccacccaccctgtgatggacctgaaggccttccccaaggacaacatgctgtgggtggagtggaccaccccccgggagagcgtgaagaagtacatcctggagtggtgtgtgctgagtgacaaggccccctgcatcacagactggcagcaggaggatggcaccgtgcacaggacctacctgcggggcaacctggccgagagcaagtgctacctgatcaccgtgacccctgtgtatgcagatggccctggcagccctgagagcatcaaggcctacctgaagcaggccccacccagcaagggccccaccgtgaggaccaagaaggtgggcaagaatgaagctgtgctggagtgggaccagctgcctgtggatgtgcagaatggcttcatccggaactacaccatcttctaccgcaccatcattggaaatgaaacagctgtgaatgtggacagcagccacacagagtacaccctgagcagcctgaccagtgacaccctgtacatggtgaggatggccgcctacacagatgaaggaggcaaggatggccctgagttcaccttcaccacccccaagtttgcccagggcgagattgaggccatcgtggtgcctgtgtgcctggccttcctgctgaccaccctgctgggcgtgctcttctgcttcaacaagagggacctgatcaagaagcacatctggcccaacgtgcctgaccccagcaagagccacatcgcccagtggagcccccacaccccacccaggcacaacttcaacagcaaggaccagatgtacagtgatggcaacttcacagatgtgtctgtggtggagattgaggccaatgacaagaagcccttccctgaggacctgaagagcctggacctcttcaagaaggagaagatcaacacagagggccacagcagcggcatcggcggcagcagctgcatgagcagcagccggcccagcatcagcagcagtgatgaaaatgaaagcagccagaacaccagcagcacagtgcagtacagcacagtggtgcacagcggctaccgccaccaggtgcccagcgtgcaggtgttcagccgctctgagagcacccagcccctgctggacagcgaggagaggcctgaggacctgcagctggtggaccacgtggatggaggagatggcatcctgccccggcagcagtacttcaagcagaactgcagccagcacgagagcagcccagacatcagccactttgagaggagcaagcaggtgtcctctgtgaatgaagaagattttgtgcggctgaagcagcagatcagtgaccacatcagccagagctgtggcagcggccagatgaagatgttccaggaggtgtctgctgctgatgcctttggacctggaacagagggccaggtggagagatttgagaccgtgggcatggaggccgccacagatgagggcatgcccaagagctacctgccccagacagtgcggcagggcggctacatgccccagtag

SEQ ID NO: 126309 - DNA, 2757 bp, Artificial Sequence
  derived and/or modified sequence
atgctgaccctgcagacctggctggtgcaggccctgttcatcttcctcaccacagaatccaccggcgagctgttagatccttgcggttatatcagccccgagtctcctgtggtgcagttacatagtaacttcaccgctgtgtgtgtgctgaaggaaaaatgcatggactattttcacgtcaatgctaattacattgtgtggaagactaaccatttcactatcccaaaagagcaatatactattatcaaccggaccgcctcctccgtgacgtttaccgacatcgccagtcttaatatacaactcacatgtaacatcctgacatttggccagcttgaacaaaatgtgtacggtattaccatcataagcgggctgcccccagaaaaaccaaagaacttatcgtgcatcgtcaatgaaggtaaaaaaatgagatgtgagtgggacggcggtagagaaacacatttagagaccaactttacattgaaatccgaatgggcgactcacaagtttgctgactgtaaggccaagcgcgatacacccacttcctgcacggttgactactccacagtttacttcgtgaatatagaggtctgggtagaggctgaaaatgcccttgggaaggtgactagcgaccatatcaatttcgatccagtgtacaaggtgaagcccaatcctccccacaacctcagcgtgatcaactctgaggagttatccagtattctcaaactcacctggacgaacccttcaatcaaaagcgtgatcatcttgaagtacaatatacagtatcgaacaaaggatgctagcacttggtcgcaaatcccacctgaagacacggctagcacacggtcgagcttcacagtgcaggacctgaagccatttacagagtacgtcttccgaattcgctgcatgaaagaagacggaaaaggttattggtccgactggagcgaagaagcttccggtatcacatatgaagacaggccttcaaaggctccctccttctggtataagatcgacccttctcatacccagggttacaggaccgtacagcttgtgtggaaaacattacctcccttcgaagccaacggcaagatccttgattacgaggtgacactgaccagatggaaaagccatctacagaactatacagtcaacgctacaaaactcacagtcaaccttactaatgacaggtatttagctactctgaccgtgaggaatttggtcggcaaatctgacgctgccgttctgactatacccgcttgtgactttcaggctacacacccagtgatggatctcaaagccttccccaaagataacatgctttgggtggaatggacgacgccccgggagtctgtgaaaaagtacattctagaatggtgcgttctgagcgacaaggcaccatgcattaccgattggcaacaggaggatgggacggtgcaccgcacatacctgagaggtaacttggcagaaagtaaatgttacttgatcaccgtaacgcccgtgtacgccgacggtcccggcagcccggaaagcatcaaggcatatcttaagcaggctcctccctcgaaaggccctaccgtcagaaccaagaaagtaggaaaaaatgaagccgtgcttgagtgggatcagctacccgtggacgtacagaacggtttcatccgcaattacactatcttctaccgtaccataatcggcaacgagaccgccgtgaacgttgacagcagccacactgaatatacactgtcctccctgacctccgacaccctctatatggtgcgaatggcagcatacacagatgaaggcggaaaagacggtcccgagttcacgttcactacaccaaagtttgctcagggcgagatagaggccatcgtggtgcctgtatgccttgcctttctcctcacaacactcctcggtgtcttgttctgtttcaacaagagagatttgattaagaaacatatatggcctaacgttccggaccccagcaagtctcatattgctcagtggagtccgcatacaccaccacgccataacttcaatagcaaagatcagatgtatagtgacggtaattttaccgacgtcagtgttgtcgagatcgaggctaatgataaaaagcccttcccagaggacttgaaaagccttgatttattcaaaaaagagaagatcaacaccgaaggccacagctctggaattggaggttctagttgcatgagctccagcagaccttccatctcatcgagtgacgaaaacgagagttcacaaaacacatctagcactgtccagtactcaaccgtcgtgcatagtggctataggcaccaggtccctagcgtgcaggtcttttctagatccgagtccactcagcccctgctggactctgaagagcgtcccgaagacttacagctggtcgatcacgtcgacggcggagatggtattctgcccagacagcagtactttaaacagaattgctctcagcacgaatcatccccagacatttcacacttcgagaggagcaaacaggtttcctctgtgaacgaagaggacttcgtgcgattaaaacaacagataagtgaccacatctcgcagtcatgtggttcaggtcagatgaagatgtttcaagaagtgagcgccgcggacgcatttggccctggcacagaggggcaagtagagaggttcgagacggtgggcatggaggctgccaccgacgaggggatgccaaaaagttacctaccccagaccgtcaggcaaggggggtacatgccccagtag

SEQ ID NO: 126310 - DNA, 2757 bp, Artificial Sequence
  derived and/or modified sequence
atgctgaccctgcagacctggctggtgcaggccctgttcatcttcctcacgacagaaagcactggggagctactagacccctgtggatatatctctcccgagagtccagtcgtgcagttacacagcaacttcactgcagtgtgtgtgttgaaagagaagtgtatggattacttccacgtcaatgccaattatatcgtgtggaagacgaatcacttcactattccaaaggagcagtacaccattatcaacagaactgcgtcatccgtgacctttaccgatattgccagtttaaacattcagctgacatgtaatatccttactttcggtcaattggagcagaatgtttacgggatcactataatctctggcttacctccagagaaaccaaagaacctgtcatgtatagtgaacgaaggaaagaagatgaggtgcgagtgggatggtgggcgggaaacccacctggaaacaaacttcactttaaagagcgagtgggccacccataaattcgcagactgcaaggctaagagggataccccaacctcatgcacagtggactactcaaccgtctactttgtgaatatcgaggtttgggtcgaggcggagaatgccttgggcaaggtaaccagcgaccatatcaattttgaccctgtctataaggtgaagcctaatccacctcacaacctgagcgttatcaatagtgaagaactgtcttccattctgaaactgacatggaccaacccgtccatcaaaagtgtgattattctgaaatacaatatacaatacagaacaaaggacgcatctacctggagccagatccccccagaagacactgcctccacccgatcctcctttaccgtgcaggatcttaagccttttactgaatacgttttcagaatcagatgtatgaaggaagacggaaaggggtattggtccgattggtcggaggaagctagcggaattacatatgaggacaggccgtccaaggcccctagtttttggtacaagattgacccttcacatacccaagggtatcgcactgtccagttggtatggaaaaccctgcccccctttgaagctaacggtaagatcttggactacgaggtcactctgaccagatggaagtcgcatctgcagaactacaccgtgaacgcgacaaaattgactgtcaatctcacaaacgatcgatatctcgcaacactaacagtccggaatctcgttggcaagagcgacgccgcagtactcaccatccctgcatgtgatttccaggctactcaccctgtcatggacctgaaggcttttcccaaagataatatgttatgggtggagtggaccacccctcgggagagtgtcaaaaagtatattctcgaatggtgcgtcctgtctgacaaggcaccttgtattaccgattggcaacaagaggatgggactgtgcaccggacttaccttagaggtaatctggccgagtctaagtgctacctaattacagtgactccagtgtatgccgatggacccggctctccggaatccatcaaagcttatctgaaacaggctccaccaagcaagggccctaccgtccgtaccaaaaaagtgggaaaaaatgaggctgtcctggagtgggaccagctgcccgtagatgtgcagaatggattcatcaggaactatacaattttctataggactataatcggaaatgaaaccgctgtgaatgttgattccagtcataccgaatacacactatccagcctgacttctgataccctttacatggtgcgaatggccgcctacactgacgagggtggcaaggatggacccgagtttacattcacaacgccaaagtttgcccagggcgaaattgaggccatcgtggtgcccgtctgtttagcattcttgttaacaacacttcttggagtcctgttttgttttaacaagagagacctaattaagaaacacatatggccgaacgtgccggatccaagcaagagccatatcgcacagtggagccctcacactcccccccgacacaacttcaattccaaggaccagatgtacagcgatggcaactttaccgacgtgtccgtggttgaaatagaggctaacgacaaaaaaccatttcctgaagatctgaaatctctggatctgttcaaaaaggaaaaaatcaacaccgaagggcattcctcaggaataggcggttctagttgcatgagctcctcgaggcctagcatcagttcatccgacgagaacgagtcatctcagaatacctcaagcaccgtgcagtatagtactgtggtgcatagcgggtatcgacaccaggttccgagtgtgcaggtgttctctagaagcgaaagcacccaacctctcctcgacagcgaggaaaggcccgaggacttacaactggtagaccatgtggatggaggcgatggcatcctgccaaggcaacagtacttcaaacagaactgctcacaacacgaatcatcgccagacatcagccactttgaacgctccaaacaggtaagtagtgtgaatgaggaggacttcgtccgcctgaagcagcagataagcgaccacatctcccagtcctgtggaagcggccagatgaagatgtttcaagaagtttccgcagctgacgctttcggacccggtacagaagggcaggtggagcgcttcgagacagtgggcatggaggccgccaccgatgaaggcatgccaaagtcttacctgcctcagacagtgcgccagggcgggtacatgccgcagtag

SEQ ID NO: 126311 - DNA, 2757 bp, Artificial Sequence
  derived and/or modified sequence
atgctgaccctgcagacatggctggtgcaagccctttttatcttcttaacaacagagtccacgggtgaactgctggacccctgtggctacattagccccgaaagtcccgtggtccaactgcactctaatttcactgcggtctgcgttctgaaggagaaatgcatggattactttcacgtgaacgccaattacattgtttggaagactaatcatttcaccatacccaaagagcagtacaccataataaatcgcaccgccagttcagtaactttcacagacatagcatctttaaatattcaactgacttgcaacatcttaacctttggccaactcgaacagaatgtgtatggaattacaataatctcaggtctgccccctgagaaacctaaaaatctgtcttgcatcgtgaacgaagggaaaaaaatgagatgcgagtgggacggagggcgtgaaactcatctggaaacaaacttcacactgaagtccgagtgggcaactcacaaattcgccgattgtaaggctaagcgcgacactccgacatcatgcacggtggattattcaaccgtctatttcgttaatattgaggtgtgggtggaagctgaaaatgcactaggcaaagtcactagcgatcacattaatttcgaccctgtgtacaaagttaagccaaaccctccacataatcttagcgttatcaattctgaggaattgtcctcaatcctgaaactgacctggactaacccctccatcaagtccgtcatcattttaaagtacaatatccaatacaggaccaaggacgcttctacatggtctcaaattcctccagaggacacagctagcacacgaagtagttttactgtccaggacctgaagcctttcaccgagtacgtattccgaatccgctgcatgaaggaggatgggaaagggtattggagcgattggagcgaggaagcttcaggaatcacctatgaagaccggccttctaaggcacccagcttttggtataagatcgacccttcacatacacaggggtaccgaaccgtgcagctggtctggaagacactgcccccttttgaagcaaacggcaagatcttggactacgaagtgaccctaaccagatggaaaagccacctgcaaaactatacagtcaacgccacaaagctcaccgtgaatctcaccaatgatcgatatctggccacactgactgtgcggaatctggtgggcaaatccgatgcggcagtgctgacaatcccagcttgcgactttcaggctactcacccagtgatggacctgaaggctttcccaaaagataatatgctttgggtcgagtggaccacaccaagagagagcgtgaagaaatacatcctggaatggtgcgtgctttcagacaaagccccttgcatcaccgactggcagcaggaggatggcacagttcatcgcacctacctcagaggtaatctggctgaaagtaagtgttacctgatcaccgtgacacctgtgtacgcagatggtcccggatcacctgagagtataaaggcgtacctcaaacaagcaccgccatcaaaagggcctacagtcaggacgaaaaaggtcgggaagaacgaagccgtcctcgaatgggatcagctgccagtggatgtgcagaacgggttcatccgaaactacactatcttctaccggacaattattggaaacgaaaccgccgtaaacgtcgactccagtcatacagagtacactctgtcttctcttacatctgataccctgtacatggtgaggatggcggcttacacagacgagggcggaaaagatgggccagagttcacctttactacgcccaagttcgcacagggtgaaatcgaagcaatcgtggttcctgtgtgcttagcctttctgttgacaaccctgctgggagtgctgttttgctttaataagcgggacctcattaaaaagcacatctggccaaacgtacctgaccccagtaagtcccatattgctcagtggtctccacacactccccctaggcataatttcaattccaaggatcagatgtattctgacggtaacttcacggatgtgtccgttgtggaaattgaagcaaatgataaaaaacctttccccgaggacctgaagagcctggatctgttcaaaaaagagaaaataaacactgagggtcacagtagtggaatcggaggaagttcgtgtatgtctagctccaggccatccatctcttcctctgatgaaaacgagagctcccaaaatacttcatcaacagtgcagtattcaaccgttgtccatagcgggtacaggcaccaggtgccttccgttcaagtgttctctcgtagtgaaagcacgcagccactgttagattcagaggaaaggccagaggatctgcaactggtcgaccacgtggatgggggagatggtatcctgcccaggcaacagtatttcaaacaaaattgttctcagcacgaatcaagccccgacatctcccattttgagagatccaaacaggtcagctcggttaacgaggaggacttcgtgcgtctcaagcagcagatctctgatcacatcagtcagagttgcgggtctggtcagatgaagatgttccaggaggtatccgcagctgacgcatttggcccagggaccgaggggcaagttgagaggttcgaaacagtcgggatggaagccgctactgacgaggggatgccaaaatcttatctacctcagaccgtgcggcaaggtgggtatatgcctcaatag

SEQ ID NO: 126312 - DNA, 2757 bp, Artificial Sequence
  derived and/or modified sequence
atgctaacactgcagacctggctggtgcaggccctgttcattttcctgaccaccgagtcgacaggagaattgctggacccatgcggttatattagccccgagtcaccggtggtccagctgcactctaatttcacagcggtctgtgtgctgaaggagaagtgcatggactacttccacgtgaatgcgaactacatagtatggaaaaccaaccactttaccatccccaaagaacagtatacgataattaaccgtacggcttcctcggtgactttcacagatatcgccagtctgaacatccagctgacgtgtaacatcctgacctttggccagctggagcagaatgtgtacggcattactataattagcgggcttcctcctgaaaagcctaagaacctcagttgtattgtgaatgagggtaagaagatgcgctgtgagtgggacggagggcgagaaactcacctggaaactaacttcaccttgaagagcgagtgggctactcacaagttcgcggactgtaaggcaaagagggataccccaacctcatgcacagtagattactccaccgtatactttgtgaacatcgaagtgtgggttgaggcagaaaatgctctcggcaaggtcacaagcgatcacattaacttcgatccagtctataaggtgaagccgaatccacctcacaacctgtctgtgatcaacagcgaggagctctcctcaattctgaagcttacgtggaccaatcccagcattaaatccgtgatcattctgaagtataacattcagtatcgtactaaggatgcctcaacctggtcacaaatccccccagaagacaccgcttctactcggtcttcctttaccgtccaggatttgaaaccattcacagaatatgtgttccggatacgctgcatgaaagaggacggtaaaggatattggagcgactggagcgaggaagcctctggcatcacgtatgaggacagaccaagcaaagcgcctagtttctggtataaaatcgacccctcccatacccaaggttatcgcaccgtccagttggtctggaaaacactgcccccattcgaagctaacggtaagatccttgactacgaagtcacactcacacggtggaagagtcacctgcaaaactacactgtcaatgcgaccaaactaaccgtcaacctcaccaacgacaggtacctcgccacattgaccgtgaggaaccttgtgggtaagtccgatgccgctgtgctgacgatcccagcatgtgatttccaagcaacacaccccgtcatggatctcaaggctttcccgaaggacaacatgttatgggtggagtggacaaccccgagagagtctgtcaagaagtacatccttgagtggtgtgtgctgtctgataaggcaccctgcatcacagactggcagcaggaggacggaacagtacaccgcacttatctccgagggaacctggctgagagtaaatgttatctgatcacagtgacgccagtgtatgcggatggcccaggatcccccgagtctattaaagcctacctaaaacaggcaccacctagcaagggaccaacagtacgcactaaaaaggtgggcaaaaatgaagctgtcctggaatgggaccaactgccagtcgacgtgcagaatggatttatcagaaactatacaatcttctatagaacgattatcggaaacgagaccgctgtgaatgttgattcttcacacaccgagtatactctgtcttccctgacgagtgatacactatacatggtaagaatggctgcttataccgatgaaggagggaaagacggacctgaatttacgttcaccaccccaaagttcgcccagggcgagatcgaggccattgtggtgcctgtgtgtcttgcgttcctgttgactaccctgctgggcgtcctgttctgtttcaacaagagagatctaatcaaaaaacatatctggcccaatgtgcccgatccatctaagagtcatatagcgcaatggtctcctcatacgcctccaaggcacaatttcaatagtaaggatcagatgtattccgatggtaatttcactgatgttagtgttgtggaaattgaagctaacgataagaaaccgtttcccgaagatctgaaatcactcgacttatttaagaaagagaagataaacactgaaggccattcttccgggattgggggatcctcgtgtatgagcagttcgaggccatctattagttcaagtgacgagaatgaatcctcccagaatacctcaagcaccgtgcagtacagtaccgtagtccactctggttatcggcaccaggtgccaagtgtccaggtgttctcaagatcagaatccacccagccgctgctagacagcgaggagcgccctgaggatcttcaactcgttgatcatgttgacggtggggatggcatactgcctcggcagcaatacttcaagcagaactgttcccagcacgagtcttctccggacataagtcactttgaacgctccaaacaggtgagctcagttaacgaagaggatttcgtgcggttaaaacaacaaatttccgatcacattagccagagctgtggatcgggccagatgaagatgttccaggaagtctcagccgcagacgcattcgggccaggcaccgagggacaagtggagaggtttgagaccgtcggtatggaggcagcgaccgatgaaggcatgccaaaatcttatttgcctcagaccgtgcgacagggcggttacatgcctcaatag

SEQ ID NO: 126313 - DNA, 2757 bp, Artificial Sequence
  derived and/or modified sequence
atgctgaccctgcagacctggctggtgcaggccctgttcatcttcctgaccaccgagagcaccggcgagctgctggacccctgcggctacatcagccccgagagccccgtggtgcagctgcacagcaacttcaccgccgtgtgcgtgctgaaggagaagtgcatggactacttccacgtgaacgccaactacatcgtgtggaagaccaaccacttcaccatccccaaggagcagtacaccatcatcaacagaaccgccagcagcgtgaccttcaccgacatcgccagcctgaacatccagctgacctgcaacatcctgaccttcggccagctggagcagaacgtgtacggcatcaccatcatcagcggcctgccccccgagaagcccaagaacctgagctgcatcgtgaacgagggcaagaagatgagatgcgagtgggacggcggcagagagacccacctggagaccaacttcaccctgaagagcgagtgggccacccacaagttcgccgactgcaaggccaagagagacacccccaccagctgcaccgtggactacagcaccgtgtacttcgtgaacatcgaggtgtgggtggaggccgagaacgccctgggcaaggtgaccagcgaccacatcaacttcgaccccgtgtacaaggtgaagcccaaccccccccacaacctgagcgtgatcaacagcgaggagctgagcagcatcctgaagctgacctggaccaaccccagcatcaagagcgtgatcatcctgaagtacaacatccagtacagaaccaaggacgccagcacctggagccagatcccccccgaggacaccgccagcaccagaagcagcttcaccgtgcaggacctgaagcccttcaccgagtacgtgttcagaatcagatgcatgaaggaggacggcaagggctactggagcgactggagcgaggaggccagcggcatcacctacgaggacagacccagcaaggcccccagcttctggtacaagatcgaccccagccacacccagggctacagaaccgtgcagctggtgtggaagaccctgccccccttcgaggccaacggcaagatcctggactacgaggtgaccctgaccagatggaagagccacctgcagaactacaccgtgaacgccaccaagctgaccgtgaacctgaccaacgacagatacctggccaccctgaccgtgagaaacctggtgggcaagagcgacgccgccgtgctgaccatccccgcctgcgacttccaggccacccaccccgtgatggacctgaaggccttccccaaggacaacatgctgtgggtggagtggaccacccccagagagagcgtgaagaagtacatcctggagtggtgcgtgctgagcgacaaggccccctgcatcaccgactggcagcaggaggacggcaccgtgcacagaacctacctgagaggcaacctggccgagagcaagtgctacctgatcaccgtgacccccgtgtacgccgacggccccggcagccccgagagcatcaaggcctacctgaagcaggccccccccagcaagggccccaccgtgagaaccaagaaggtgggcaagaacgaggccgtgctggagtgggaccagctgcccgtggacgtgcagaacggcttcatcagaaactacaccatcttctacagaaccatcatcggcaacgagaccgccgtgaacgtggacagcagccacaccgagtacaccctgagcagcctgaccagcgacaccctgtacatggtgagaatggccgcctacaccgacgagggcggcaaggacggccccgagttcaccttcaccacccccaagttcgcccagggcgagatcgaggccatcgtggtgcccgtgtgcctggccttcctgctgaccaccctgctgggcgtgctgttctgcttcaacaagagagacctgatcaagaagcacatctggcccaacgtgcccgaccccagcaagagccacatcgcccagtggagcccccacaccccccccagacacaacttcaacagcaaggaccagatgtacagcgacggcaacttcaccgacgtgagcgtggtggagatcgaggccaacgacaagaagcccttccccgaggacctgaagagcctggacctgttcaagaaggagaagatcaacaccgagggccacagcagcggcatcggcggcagcagctgcatgagcagcagcagacccagcatcagcagcagcgacgagaacgagagcagccagaacaccagcagcaccgtgcagtacagcaccgtggtgcacagcggctacagacaccaggtgcccagcgtgcaggtgttcagcagaagcgagagcacccagcccctgctggacagcgaggagagacccgaggacctgcagctggtggaccacgtggacggcggcgacggcatcctgcccagacagcagtacttcaagcagaactgcagccagcacgagagcagccccgacatcagccacttcgagagaagcaagcaggtgagcagcgtgaacgaggaggacttcgtgagactgaagcagcagatcagcgaccacatcagccagagctgcggcagcggccagatgaagatgttccaggaggtgagcgccgccgacgccttcggccccggcaccgagggccaggtggagagattcgagaccgtgggcatggaggccgccaccgacgagggcatgcccaagagctacctgccccagaccgtgagacagggcggctacatgccccagtag

SEQ ID NO: 126314 - protein, 150 aa, Artificial Sequence
  derived and/or modified sequence
MTILGTTFGMVFSLLQVVSGESGYAQNGDLEDAELDDYSFSCYSQLEVNGSQHSLTCAFEDPDVNITNLEFEICGALVEVKCLNFRKLQEIYFIETKKFLLIGKSNICVKVGEKSLTCKKIDLTTIGKKLYIKVWLSLLGYLKTLCLDIL

SEQ ID NO: 126315 - protein, 180 aa, Artificial Sequence
  derived and/or modified sequence
MTILGTTFGMVFSLLQVVSGESGYAQNGDLEDAELDDYSFSCYSQLEVNGSQHSLTCAFEDPDVNITNLEFEICGALVEVKCLNFRKLQEIYFIETKKFLLIGKSNICVKVGEKSLTCKKIDLTTIVKPEAPFDLSVVYREGANDFVVTFNTSHLQKKYVKVLMHDVAYRQEKDENKWTD

SEQ ID NO: 126316 - protein, 459 aa, Artificial Sequence
  derived and/or modified sequence
MTILGTTFGMVFSLLQVVSGESGYAQNGDLEDAELDDYSFSCYSQLEVNGSQHSLTCAFEDPDVNITNLEFEICGALVEVKCLNFRKLQEIYFIETKKFLLIGKSNICVKVGEKSLTCKKIDLTTIVKPEAPFDLSVVYREGANDFVVTFNTSHLQKKYVKVLMHDVAYRQEKDENKWTHVNLSSTKLTLLQRKLQPAAMYEIKVRSIPDHYFKGFWSEWSPSYYFRTPEINNSSGEMDPILLTISILSFFSVALLVILACVLWKKRIKPIVWPSLPDHKKTLEHLCKKPRKNLNVSFNPESFLDCQIHRVDDIQARDEVEGFLQDTFPQQLEESEKQRLGGDVQSPNCPSEDVVITPESFGRDSSLTCLAGNVSACDAPILSSSRSLDCRESGKNGPHVYQDLLLSLGTTNSTLPPPFSLQSGILTLNPVAQGQPILTSLGSNQEEAYVTMSSFYQNQ

SEQ ID NO: 126317 - DNA, 1380 bp, Artificial Sequence
  derived and/or modified sequence
atgactatcttgggaactaccttcggcatggttttttccctactgcaagtcgttagcggggaaagtggctatgcacagaatggtgatctggaagacgctgagttagacgattacagcttttcatgctatagccagttggaggtgaatggaagtcagcacagtttgacatgcgcattcgaggatcctgatgtcaacattactaatctggagtttgagatatgtggggctctggtggaggtcaaatgcttaaacttcaggaaactccaggaaatctattttatcgagaccaagaagtttcttcttatcggtaagtccaacatctgtgtcaaagtgggggaaaaatctttgacatgcaaaaagatcgatctgacgactattgtgaaacctgaagcacccttcgatctgtcagtggtgtaccgtgaaggagccaacgatttcgtggtcactttcaacaccagccatctgcagaagaaatatgtgaaagtgctgatgcacgacgttgcgtaccgacaggagaaggacgagaataaatggactcacgtcaatctgagcagtacaaagttaacccttcttcagcggaaactgcagccggccgccatgtatgagatcaaggtacgatcgatccctgatcactattttaagggattttggagcgagtggagcccatcatactattttaggacaccagaaattaacaattcatcaggagaaatggatcctatactcttaacaatatccattctgagttttttcagtgttgccctgcttgtgatattagcttgcgtgctgtggaagaagagaatcaaacctatagtttggccatcgctgcctgatcataagaaaacgttagagcatttgtgtaagaagcctcgaaagaaccttaatgtttcattcaatcccgaaagctttctggactgccagatccatagagttgacgacatccaggcgcgtgacgaagtggaaggcttcctgcaggacacgtttccccaacaactagaggagtcagagaagcagcggctcggaggagatgtgcagtcccccaactgccccagcgaggatgtggtgataacacccgaaagttttggtcgtgacagcagtctcacctgtctggctgggaatgtcagcgcctgtgatgccccaattctgtcttcctcacgtagtcttgactgtcgcgaaagtggtaagaatggaccccacgtgtatcaggaccttttgttgtcactgggcaccactaatagcacattacctccccctttcagtctacaatctggcatactgactctgaatcccgtggcacaaggtcagcctattttgacctctctgggtagcaatcaagaagaggcgtacgttactatgagcagcttttaccagaaccagtag

SEQ ID NO: 126318 - DNA, 4626 bp, Artificial Sequence
  derived and/or modified sequence
gtggttagataagtataaagccctagatctaagcttctctgtcttcctccctccctcccttcctcttactctcattcatttcatacacactggctcacacatctactctctctctctatctctctcagaatgacaattctaggtacaacttttggcatggttttttctttacttcaagtcgtttctggagaaagtggctatgctcaaaatggagacttggaagatgcagaactggatgactactcattctcatgctatagccagttggaagtgaatggatcgcagcactcactgacctgtgcttttgaggacccagatgtcaacatcaccaatctggaatttgaaatatgtggggccctcgtggaggtaaagtgcctgaatttcaggaaactacaagagatatatttcatcgagacaaagaaattcttactgattggaaagagcaatatatgtgtgaaggttggagaaaagagtctaacctgcaaaaaaatagacctaaccactatagttaaacctgaggctccttttgacctgagtgtcgtctatcgggaaggagccaatgactttgtggtgacatttaatacatcacacttgcaaaagaagtatgtaaaagttttaatgcacgatgtagcttaccgccaggaaaaggatgaaaacaaatggacgcatgtgaatttatccagcacaaagctgacactcctgcagagaaagctccaaccggcagcaatgtatgagattaaagttcgatccatccctgatcactattttaaaggcttctggagtgaatggagtccaagttattacttcagaactccagagatcaataatagctcaggggagatggatcctatcttactaaccatcagcattttgagttttttctctgtcgctctgttggtcatcttggcctgtgtgttatggaaaaaaaggattaagcctatcgtatggcccagtctccccgatcataagaagactctggaacatctttgtaagaaaccaagaaaaaatttaaatgtgagtttcaatcctgaaagtttcctggactgccagattcatagggtggatgacattcaagctagagatgaagtggaaggttttctgcaagatacgtttcctcagcaactagaagaatctgagaagcagaggcttggaggggatgtgcagagccccaactgcccatctgaggatgtagtcatcactccagaaagctttggaagagattcatccctcacatgcctggctgggaatgtcagtgcatgtgacgcccctattctctcctcttccaggtccctagactgcagggagagtggcaagaatgggcctcatgtgtaccaggacctcctgcttagccttgggactacaaacagcacgctgccccctccattttctctccaatctggaatcctgacattgaacccagttgctcagggtcagcccattcttacttccctgggatcaaatcaagaagaagcatatgtcaccatgtccagcttctaccaaaaccagtgaagtgtaagaaacccagactgaacttaccgtgagcgacaaagatgatttaaaagggaagtctagagttcctagtctccctcacagcacagagaagacaaaattagcaaaaccccactacacagtctgcaagattctgaaacattgctttgaccactcttcctgagttcagtggcactcaacatgagtcaagagcatcctgcttctaccatgtggatttggtcacaaggtttaaggtgacccaatgattcagctatttaaaaaaaaaagaggaaagaatgaaagagtaaaggaaatgattgaggagtgaggaaggcaggaagagagcatgagaggaaagaaagaaaggaaaataaaaaatgatagttgccattattaggatttaatatatatccagtgctttgcaagtgctctgcgcaccttgtctcactccatcctgacaataatcctgggaggtgtgtgcaattactacgactactctcttttttatagatcattaaattcagaactaaggagttaagtaacttgtccaagttgttcacacagtgaagggaggggccaagatatgatggctgggagtctaattgcagttccctgagccatgtgcctttctcttcactgaggactgccccattcttgagtgccaaacgtcactagtaacagggtgtgcctagataatttatgatccaaactgagtcagtttggaaagtgaaagggaaacttacatataatccctccgggacaatgagcaaaaactaggactgtccccagacaaatgtgaacatacatatcatcacttaaattaaaatggctatgagaaagaaagagggggagaaacagtcttgcgggtgtgaagtcccatgaccagccatgtcaaaagaaggtaaagaagtcaagaaaaagccatgaagcccatttggtttcatttttctgaaaataggctcaagagggaataaattagaaactcacaatttctcttgtttgttaccaagacagtgattctcttgctgctaccacccaactgcatccgtccatgatctcagaggaaactgtcgctgaccctggacatgggtacgtttgacgagtgagaggaggcatgacccctcccatgtgtatagacactaccccaacctaaattcatccctaaattgtcccaagttctccagcaatagaggctgccacaaacttcagggagaaagagttacaagtacatgcaatgagtgaactgactgtggctacaatcttgaagatatacggaagagacgtattattaatgcttgacatatatcatcttgcctttcttggtctagactgacttctaatgactaactcaaagtcaaggcaactgagtaatgtcagctcagcaaagtgcagcaaacccatctcccacaggcctccaaaccctggctgttcacagaaccacaaagggcagatgctgcacagaaaactagagaaggggtcataggttcatggttttgtttgagatttgttgctactgtttttctgttttgaattttcttctttgttctgtttttactttatttagggggactaggtgtttctgatattttagttttcttgtttgttttgttttgtgttgtctgtgaatggggttttaactgtggatgaatggaccttatctgttggcttaaaggactggtaagatcagaccatcttattcttcaggtgaatgttttactttccaaagtgctctcctctgcaccagcagtaataaatacaatgccataatcccttaggtttgcctagtgcttttgcaattttcaaagcacttccataagcattccttccacctccttgataggcatttatggaaagcctgctacatgtcaatcatactgttaggcacaggggacctaaagacacataaaaggatggcattctgcctcataaattgcaaaacctaatgaaagtgactgcttggtaaacaaattattattatattataaaatgctataaaagagccatattgaaagtgccctgttggagacagggcaaatgccacaaaaatgatgtaaatttacatggaggaaaagtagaatctgcctggtttgtaggcagcagaagacatttttcatcagtgggcaggtgttctttaccttttgtagaaatgggagtcaagtctcaaataggaggctccacaaaatctcatgccaggtctctgataccttattcacagaagttctttgaagtatttattgttattttctttgacttatgggaaaactgggacacaggaagacaggtaaattacccaacctcacacgttaagtcagaactgggagccataattttgtatccctggtataaatagacaatctcttgaagaaatgaagagatgaccatagaaaaacatcgagatatctccagctctaaaatcctttgtttcaatgttgtttggcatatgttatctttggaatttagtgtctgagcctctgtctgttactgtagtatttaaaatgcatgtattataatcatataatcataactgctgttaattcttgattatatacctagggacaatgtgtaatgtaagattactaattggttctgcccaatctcctttcagattttattaggaaaaaaaaataaacctcctgatcggagacaatgtattaatcagaagtgtaaactgccagttctatatagcatgaaatgaaaagacagctaatttggtccaacaaacatgactgggtctagggcacccaggctgattcagctgatttcctaccagcctttgcctcttccttcaatgtggtttccatgggaatttgcttcagaaaagccaagtatgggctgttcagaggtgcacacctgcattttcttagctcttctagaggggctaagagacttggtacgggccaggaagaatatgtggcagagctcctggaaatgatgcagattaggtggcatttttgtcagctctgtggtttattgttgggactattctttaaaatatccattgttcactacagtgaagatctctgatttaaccgtgtactatccacatgcattacaaacatttcgcagagctgcttagtatataagcgtacaatgtatgtaataaccatctcatatttaattaaatggtatagaagaaca

SEQ ID NO: 126319 - DNA, 1708 bp, Artificial Sequence
  derived and/or modified sequence
gtcttcctccctccctcccttcctcttactctcattcatttcatacacactggctcacacatctactctctctctctatctctctcagaatgacaattctaggtacaacttttggcatggttttttctttacttcaagtcgtttctggagaaagtggctatgctcaaaatggagacttggaagatgcagaactggatgactactcattctcatgctatagccagttggaagtgaatggatcgcagcactcactgacctgtgcttttgaggacccagatgtcaacatcaccaatctggaatttgaaatatgtggggccctcgtggaggtaaagtgcctgaatttcaggaaactacaagagatatatttcatcgagacaaagaaattcttactgattggaaagagcaatatatgtgtgaaggttggagaaaagagtctaacctgcaaaaaaatagacctaaccactatagttaaacctgaggctccttttgacctgagtgtcgtctatcgggaaggagccaatgactttgtggtgacatttaatacatcacacttgcaaaagaagtatgtaaaagttttaatgcacgatgtagcttaccgccaggaaaaggatgaaaacaaatggacgcatgtgaatttatccagcacaaagctgacactcctgcagagaaagctccaaccggcagcaatgtatgagattaaagttcgatccatccctgatcactattttaaaggcttctggagtgaatggagtccaagttattacttcagaactccagagatcaataatagctcaggattaagcctatcgtatggcccagtctccccgatcataagaagactctggaacatctttgtaagaaaccaagaaaaaatttaaatgtgagtttcaatcctgaaagtttcctggactgccagattcatagggtggatgacattcaagctagagatgaagtggaaggttttctgcaagatacgtttcctcagcaactagaagaatctgagaagcagaggcttggaggggatgtgcagagccccaactgcccatctgaggatgtagtcatcactccagaaagctttggaagagattcatccctcacatgcctggctgggaatgtcagtgcatgtgacgcccctattctctcctcttccaggtccctagactgcagggagagtggcaagaatgggcctcatgtgtaccaggacctcctgcttagccttgggactacaaacagcacgctgccccctccattttctctccaatctggaatcctgacattgaacccagttgctcagggtcagcccattcttacttccctgggatcaaatcaagaagaagcatatgtcaccatgtccagcttctaccaaaaccagtgaagtgtaagaaacccagactgaacttaccgtgagcgacaaagatgatttaaaagggaagtctagagttcctagtctccctcacagcacagagaagacaaaattagcaaaaccccactacacagtctgcaagattctgaaacattgctttgaccactcttcctgagttcagtggcactcaacatgagtcaagagcatcctgcttctaccatgtggatttggtcacaaggtttaaggtgacccaatgattcagctatttaaaaaaaaaagaggaaagaatgaaagagtaaaggaaatgattgaggagtgaggaaggcaggaagagagcatgagagg

SEQ ID NO: 126320 - DNA, 1380 bp, Artificial Sequence
  derived and/or modified sequence
atgaccatcctgggcaccaccttcggcatggtgttcagcctgctgcaggtggtgtctggagagagcggctacgcccagaatggagacctggaggatgctgagctggatgactacagcttcagctgctacagccagctggaggtgaatggcagccagcacagcctgacctgtgcctttgaggaccctgatgtgaacatcaccaacctggagtttgagatctgtggggccctggtggaggtgaagtgcctgaacttcaggaagctgcaggagatctacttcatcgagaccaagaagttcctgctgattggcaagagcaacatctgtgtgaaggtgggggagaagagcctgacctgcaagaagattgacctgaccaccatcgtgaagccagaggccccctttgacctgtctgtggtgtaccgggagggcgccaatgactttgtggtgaccttcaacaccagccacctgcagaagaagtatgtgaaggtgctgatgcatgatgtggcctaccggcaggagaaggatgagaacaagtggacccacgtgaacctgagcagcaccaagctgaccctgctgcagaggaagctgcagcctgctgccatgtatgagatcaaggtgcgcagcatcccagaccactacttcaagggcttctggagcgagtggagccccagctactacttccgcaccccagagatcaacaacagcagtggagagatggaccccatcctgctgaccatcagcatcctgtccttcttctctgtggccctgctggtgatcctggcctgtgtgctgtggaagaagaggatcaagcccatcgtgtggcccagcctgcctgaccacaagaagaccctggagcacctgtgcaagaagcccaggaagaacctgaatgtgtccttcaaccctgagagcttcctggactgccagatccaccgggtggatgacatccaggccagagatgaggtggagggcttcctgcaggacaccttcccccagcagctggaggagagcgagaagcagaggctgggcggagatgtgcagagccccaactgccccagtgaagatgtggtgatcaccccagagagctttggccgggacagcagcctgacctgcctggccggaaatgtgtctgcctgtgatgcccccatcctgagcagcagccgcagcctggactgccgggagagcggcaagaatggcccccacgtgtaccaggacctgctgctgagcctgggcaccaccaacagcaccctgcccccacccttcagcctgcagagcggcatcctgaccctgaaccctgtggcccagggccagcccatcctgaccagcctgggcagcaaccaggaggaggcctacgtgaccatgagcagcttctaccagaaccagtag

SEQ ID NO: 126321 - DNA, 1380 bp, Artificial Sequence
  derived and/or modified sequence
atgaccatcctgggcaccaccttcggcatggtgttcagcctgctgcaggtcgtaagcggcgaatctggatacgctcaaaacggtgatctcgaggatgccgagctcgatgattactctttttcatgctactcccaactggaggtcaacggctctcagcactctctcacttgtgcttttgaagacccagacgtgaatatcacaaatttagaatttgaaatctgtggcgctcttgttgaagtgaagtgcctgaatttcaggaagctgcaggagatttatttcattgagaccaaaaaatttctccttatcgggaagagtaatatttgtgttaaggtgggtgagaagtcgcttacttgtaaaaagatcgatctcaccacaatagtaaaaccagaggcccctttcgatctgagcgtggtgtatcgagaaggcgctaacgatttcgtggtaacatttaacacttctcatcttcagaagaaatatgtgaaagtgctcatgcacgacgtggcgtatagacaggaaaaggatgagaacaaatggactcatgtgaacctgtcatccacaaaactgactttgttacaacgaaaattacaacccgctgctatgtacgaaatcaaagttaggtctatccctgaccactacttcaaaggcttttggagcgagtggagcccctcctactatttccgcacacccgagataaacaacagtagtggtgagatggacccaatccttttaaccatttctattttaagtttctttagcgttgcactgttggtgatcctggcctgtgttctgtggaagaagcggattaagccaatcgtctggccttccctgcctgaccacaaaaagactttggagcacctgtgcaagaagccacgcaagaacttaaacgtatctttcaatcccgagtcctttctggattgccagattcatagggtagatgacattcaagcaagggatgaagtcgaaggcttcctgcaagacacatttccccagcaactggaggaatctgagaagcagaggctgggaggtgatgtgcagtctcctaattgtccaagtgaagacgtagtgattacccctgaatcatttgggcgcgactcaagcctgacctgtctggccggtaatgtttccgcctgtgacgccccaatcctatcttcctcaagatccttagattgtcgcgagtcaggcaaaaatggaccacacgtctaccaggacctactcctgtcgctgggcactacaaactctaccctacccccgcccttctctcttcagagcgggatacttaccctgaatccagtggcccagggacagcccattttgacttcactcggttcgaatcaagaggaagcgtatgttaccatgtcctccttctaccagaatcagtag

SEQ ID NO: 126322 - DNA, 1380 bp, Artificial Sequence
  derived and/or modified sequence
atgaccatcttaggcaccaccttcgggatggttttcagcttgctgcaggtcgtcagtggagagagcggctacgctcaaaacggtgatctggaggatgccgagttggacgactatagtttcagttgctatagccagctggaggtcaatggctcgcagcacagtctgacttgcgctttcgaagacccagatgtgaatatcactaatctggagtttgaaatctgcggcgctctcgtggaagtcaagtgcctgaactttcggaagttacaggaaatttatttcattgagaccaagaaatttttgcttattggcaagtctaacatatgtgtgaaggtgggtgagaaatcacttacgtgtaagaaaatagatttaactacaattgtgaaacctgaagcaccatttgatctgagcgtagtttaccgtgagggagcaaacgacttcgtagtaacctttaatacctcacacctccagaagaaatacgttaaagtcttgatgcacgatgtagcctatcgccaggagaaggacgagaacaagtggacccatgtgaacttgagctcaacaaaactgactttgctacagagaaagctccaacctgccgctatgtacgaaattaaggtcagaagcattcccgaccattatttcaaggggttctggagtgagtggtccccctcctactattttagaacgcctgagattaacaacagctcaggtgagatggaccctattctcttaaccatctcaatcttatctttcttctctgtggccctgctcgtgatcctggcttgtgtgttgtggaaaaagagaattaaacccatcgtgtggccaagcctgcctgatcataaaaaaacactcgagcatctgtgtaaaaagccgaggaagaatttgaacgtgagtttcaaccccgagagcttcctcgattgccagattcaccgtgttgacgatatacaagctcgtgacgaagtagagggcttccttcaggatacctttccacagcagttggaggaaagcgaaaagcagaggctgggaggggatgtgcaatcaccgaactgccctagcgaagatgtcgtgattacccccgagagctttggacgggatagctctctcacttgtttagcaggcaacgtttctgcctgtgatgccccaatcctgtcctcttcccgctctctcgattgccgagaaagcggcaagaacgggccacatgtgtatcaggatttgcttctgagcctagggactacaaactcaaccctgccccctccattctcactgcagagcgggatcctcacactgaacccagtcgcacagggccagcctattctgacaagtcttggatcgaaccaggaggaggcctatgtgacgatgagttctttctaccagaaccagtag

SEQ ID NO: 126323 - DNA, 1380 bp, Artificial Sequence
  derived and/or modified sequence
atgaccatcctgggcaccaccttcggcatggtgttcagcctgctgcaggtggtgagcggcgagagcggctacgcccagaacggcgacctggaggacgccgagctggacgactacagcttcagctgctacagccagctggaggtgaacggcagccagcacagcctgacctgcgccttcgaggaccccgacgtgaacatcaccaacctggagttcgagatctgcggcgccctggtggaggtgaagtgcctgaacttcagaaagctgcaggagatctacttcatcgagaccaagaagttcctgctgatcggcaagagcaacatctgcgtgaaggtgggcgagaagagcctgacctgcaagaagatcgacctgaccaccatcgtgaagcccgaggcccccttcgacctgagcgtggtgtacagagagggcgccaacgacttcgtggtgaccttcaacaccagccacctgcagaagaagtacgtgaaggtgctgatgcacgacgtggcctacagacaggagaaggacgagaacaagtggacccacgtgaacctgagcagcaccaagctgaccctgctgcagagaaagctgcagcccgccgccatgtacgagatcaaggtgagaagcatccccgaccactacttcaagggcttctggagcgagtggagccccagctactacttcagaacccccgagatcaacaacagcagcggcgagatggaccccatcctgctgaccatcagcatcctgagcttcttcagcgtggccctgctggtgatcctggcctgcgtgctgtggaagaagagaatcaagcccatcgtgtggcccagcctgcccgaccacaagaagaccctggagcacctgtgcaagaagcccagaaagaacctgaacgtgagcttcaaccccgagagcttcctggactgccagatccacagagtggacgacatccaggccagagacgaggtggagggcttcctgcaggacaccttcccccagcagctggaggagagcgagaagcagagactgggcggcgacgtgcagagccccaactgccccagcgaggacgtggtgatcacccccgagagcttcggcagagacagcagcctgacctgcctggccggcaacgtgagcgcctgcgacgcccccatcctgagcagcagcagaagcctggactgcagagagagcggcaagaacggcccccacgtgtaccaggacctgctgctgagcctgggcaccaccaacagcaccctgcccccccccttcagcctgcagagcggcatcctgaccctgaaccccgtggcccagggccagcccatcctgaccagcctgggcagcaaccaggaggaggcctacgtgaccatgagcagcttctaccagaaccagtag

SEQ ID NO: 126324 - protein, 521 aa, Artificial Sequence
  derived and/or modified sequence
MGLGRCIWEGWTLESEALRRDMGTWLLACICICTCVCLGVSVTGEGQGPRSRTFTCLTNNILRIDCHWSAPELGQGSSPWLLFTSNQAPGGTHKCILRGSECTVVLPPEAVLVPSDNFTITFHHCMSGREQVSLVDPEYLPRRHVKLDPPSDLQSNISSGHCILTWSISPALEPMTTLLSYELAFKKQEEAWEQAQHRDHIVGVTWLILEAFELDPGFIHEARLRVQMATLEDDVVEEERYTGQWSEWSQPVCFQAPQRQGPLIPPWGWPGNTLVAVSIFLLLTGPTYLLFKLSPRVKRIFYQNVPSPAMFFQPLYSVHNGNFQTWMGAHGAGVLLSQDCAGTPQGALEPCVQEATALLTCGPARPWKSVALEEEQEGPGTRLPGNLSSEDVLPAGCTEWRVQTLAYLPQEDWAPTSLTRPAPPDSEGSRSSSSSSSSNNNNYCALGCYGGWHLSALPGNTQSSGPIPALACGLSCDHQGLETQQGVAWVLAGHCQRPGLHEDLQGMLLPSVLSKARSWTF

SEQ ID NO: 126325 - DNA, 1566 bp, Artificial Sequence
  derived and/or modified sequence
atgggactcgggcgctgcatttgggaggggtggacccttgagtcggaggcgctaaggagggatatgggtacatggcttctggcctgtatctgtatttgtacatgtgtgtgcctcggagtttcagtcacgggcgagggacagggcccccggtcccggacattcacttgcctgacaaacaacattcttcgaattgattgccactggagcgcacccgagctgggacagggaagcagcccctggttacttttcactagcaaccaagcacccggtggaacacacaagtgtatcttgcggggctcagagtgcacagtagtacttccacccgaggccgtgctggttccttcagataatttcacgatcacatttcaccattgtatgagtggccgagagcaggtgagcttagtggaccccgaatacttgccccggcggcacgtcaaattggatcctccatccgatctccaatccaatatatcgtcaggtcattgcattctcacttggtcaatctctcctgccctcgagcctatgacaacacttttgagttacgaactagccttcaaaaagcaggaggaggcttgggaacaagcccaacacagagatcacatcgttggcgtgacgtggctgatactcgaggcatttgagttagatcctggcttcattcacgaagcacgtctgcgggttcagatggctaccctggaggacgacgtggtggaagaagaaagatatactgggcagtggtccgagtggtctcagccggtctgcttccaagccccccagcgccaggggcccctaatccctccctggggatggcctggaaacacactcgtggctgtctcaatctttctgttgcttactgggcctacatatctgctgttcaagctgagccctcgggtgaaacgcattttttaccagaatgtcccttccccagcaatgtttttccagcccctgtactccgtacacaatggcaacttccagacctggatgggcgcacatggcgctggcgttctgctctcacaggattgcgccgggacaccacagggggccctggagccctgcgtgcaggaagccacagcattactcacctgcggccctgcgcggccttggaagtcagtagccttggaagaggaacaggaaggcccgggcacacgccttcccgggaatctgtccagcgaggacgtcctgccagccgggtgtaccgagtggcgcgtgcagacactggcttatcttccacaggaggattgggcccctacatctctgactagaccagcaccccctgatagtgagggatcccgcagctcatcaagctcttcaagcagtaataataataattactgtgccttgggttgctatggggggtggcacttgtccgccctgcctgggaacacccagtccagcggcccaataccagccctggcctgtgggttaagttgcgaccaccagggactcgaaacccaacagggggtggcctgggtcctcgcaggacattgccaaaggcctggcctccatgaggacctgcaagggatgctcttaccatcagtactgagcaaggctcgatcatggaccttctag

SEQ ID NO: 126326 - DNA, 1944 bp, Artificial Sequence
  derived and/or modified sequence
agcagctctgtaatgcgcttgtggtttcagatgtgggcggcctgtgtgaacctgtcgtgcaaagctcacgtcaccaactgctgcagttatctcctgaatcaggctgagggtctttgctgtgcacccagagatagttgggtgacaaatcacctccaggttggggatgcctcagacttgtgatgggactgggcagatgcatctgggaaggctggaccttggagagtgaggccctgaggcgagacatgggcacctggctcctggcctgcatctgcatctgcacctgtgtctgcttgggagtctctgtcacaggggaaggacaagggccaaggtctagaaccttcacctgcctcaccaacaacattctcaggatcgattgccactggtctgccccagagctgggacagggctccagcccctggctcctcttcaccagcaaccaggctcctggcggcacacataagtgcatcttgcggggcagtgagtgcaccgtcgtgctgccacctgaggcagtgctcgtgccatctgacaatttcaccatcactttccaccactgcatgtctgggagggagcaggtcagcctggtggacccggagtacctgccccggagacacgttaagctggacccgccctctgacttgcagagcaacatcagttctggccactgcatcctgacctggagcatcagtcctgccttggagccaatgaccacacttctcagctatgagctggccttcaagaagcaggaagaggcctgggagcaggcccagcacagggatcacattgtcggggtgacctggcttatacttgaagcctttgagctggaccctggctttatccatgaggccaggctgcgtgtccagatggccacactggaggatgatgtggtagaggaggagcgttatacaggccagtggagtgagtggagccagcctgtgtgcttccaggctccccagagacaaggccctctgatcccaccctgggggtggccaggcaacacccttgttgctgtgtccatctttctcctgctgactggcccgacctacctcctgttcaagctgtcgcccagggtgaagagaatcttctaccagaacgtgccctctccagcgatgttcttccagcccctctacagtgtacacaatgggaacttccagacttggatgggggcccacggggccggtgtgctgttgagccaggactgtgctggcaccccacagggagccttggagccctgcgtccaggaggccactgcactgctcacttgtggcccagcgcgtccttggaaatctgtggccctggaggaggaacaggagggccctgggaccaggctcccggggaacctgagctcagaggatgtgctgccagcagggtgtacggagtggagggtacagacgcttgcctatctgccacaggaggactgggcccccacgtccctgactaggccggctcccccagactcagagggcagcaggagcagcagcagcagcagcagcagcaacaacaacaactactgtgccttgggctgctatgggggatggcacctctcagccctcccaggaaacacacagagctctgggcccatcccagccctggcctgtggcctttcttgtgaccatcagggcctggagacccagcaaggagttgcctgggtgctggctggtcactgccagaggcctgggctgcatgaggacctccagggcatgttgctcccttctgtcctcagcaaggctcggtcctggacattctaggtccctgactcgccagatgcatcatgtccattttgggaaaatggactgaagtttctggagcccttgtctgagactgaacctcctgagaaggggcccctagcagcggtcagaggtcctgtctggatggaggctggaggctcccccctcaacccctctgctcagtgcctgtggggagcagcctctaccctcagcatcctgg

SEQ ID NO: 126327 - DNA, 1566 bp, Artificial Sequence
  derived and/or modified sequence
atgggcctgggccgctgcatctgggagggctggaccctggagagcgaggccctgcggcgggacatgggcacctggctgctggcctgcatctgcatctgcacctgtgtgtgcctgggcgtgtctgtgactggagagggccagggccccaggagcaggaccttcacctgcctgaccaacaacatcctgagaattgactgccactggagcgcccctgagctgggccagggcagcagcccctggctgctcttcaccagcaaccaggcccctgggggcacccacaagtgcatcctgcggggctctgaatgtactgtggtgctgcccccagaggccgtgctggtgcccagcgacaacttcaccatcaccttccaccactgcatgagcggccgggagcaggtgtccctggtggaccctgagtacctgccccggcggcacgtgaagctggaccccccaagtgacctgcagagcaacatcagcagcggccactgcatcctgacctggagcatcagccctgccctggagcccatgaccaccctgctgtcctatgagctggccttcaagaagcaggaggaggcctgggagcaggcccagcaccgggaccacatcgtgggcgtgacctggctgatcctggaggcctttgagctggaccccggcttcatccacgaggcccggctgcgggtgcagatggccaccctggaggatgatgtggtggaggaggagcgctacacaggccagtggagcgagtggagccagcctgtgtgcttccaggccccccagaggcagggccccctcatccccccctggggctggccaggcaacaccctggtggccgtgtccatcttcctgctgctgaccggccccacctacctgctcttcaagctgagcccccgggtgaagaggatcttctaccagaatgtgcccagccctgccatgttcttccagcccctgtacagcgtgcacaacggcaacttccagacctggatgggcgcccacggggccggcgtgctgctgagccaggactgtgccggcaccccccagggcgccctggagccctgtgtgcaggaggccacagccctgctgacctgtggccctgcccggccctggaagtctgtggccctggaggaggagcaggagggccctggcacccggctgcccggcaacctgagcagtgaagatgtgctgcctgctggctgcacagagtggagggtgcagaccctggcctacctgccccaggaggactgggcccccaccagcctgaccaggcctgcccccccagacagcgagggcagccgcagcagcagcagcagcagcagcagcaacaacaacaactactgtgccctgggctgctatggaggctggcacctgagcgccctgcccggcaacacccagagcagcggccccatcccagccctggcctgtggcctgagctgtgaccaccagggcctggagacccagcagggcgtggcctgggtgctggccggccactgccagaggcctggcctgcacgaggacctgcagggcatgctgctgcccagcgtgctgagcaaggcccgctcctggaccttctag

SEQ ID NO: 126328 - DNA, 1566 bp, Artificial Sequence
  derived and/or modified sequence
atgggcctgggccggtgcatctgggagggctggaccctggagagcgaagctcttaggagagacatgggcacatggcttctggcctgtatttgcatctgcacatgcgtctgtctcggggttagtgtgactggggaaggccagggcccacggagccggaccttcacatgtctgacaaacaatatccttaggattgactgccactggagcgccccagaacttggacaggggtcttccccttggttgctctttacatcgaaccaggcccctggaggaactcataaatgcattcttcgggggagtgaatgcacggtggttctaccacccgaagccgttttagttccctcagataatttcactatcacctttcaccactgtatgtccgggcgcgaacaggtgagcctcgtcgatcctgagtacctgcccagacgccacgtcaagctggacccaccatctgacctgcagtcaaacataagcagtgggcactgtatcctgacctggtctatatctccggccctggaacccatgacgacgcttcttagctacgaactggcctttaaaaaacaggaagaggcctgggagcaggcccagcatcgcgatcacattgtaggcgtgacttggttaatcctcgaggcattcgagttagacccgggctttatccatgaggcccgtcttagagtgcagatggctaccctggaggacgacgtcgtcgaagaggaacgctacactggtcaatggtccgagtggtcccagccagtttgttttcaggccccacagcggcagggccctttgatcccaccatggggatggcccggtaataccctcgttgcagtgtccatttttctcctgctgacaggaccaacctatctcctctttaagctgagcccgcgggtcaaaagaattttctatcagaacgtgccctctccggctatgttcttccagcccctgtattccgtgcacaatggtaatttccagacctggatgggcgcccacggcgctggggtccttctgtcccaggattgcgcaggaacaccgcagggggccctggagccttgcgtgcaggaagcgaccgcactgctgacatgcggccccgccagaccttggaagagcgtcgctcttgaagaggaacaggaggggcctggaacgcggctgcccgggaatctgtcgtccgaggacgtcttgccagccggatgtaccgagtggcgggttcagacactggcctacctgcctcaagaagattgggcccccacgtcactcacccgccccgcaccgcccgatagcgagggcagtaggtctagcagcagtagctctagtagcaacaataacaattattgtgctctgggatgttacggaggttggcacttgtctgcactcccagggaatacacagagttccgggccgatccctgccctagcctgcggcctgtcttgtgaccaccaaggacttgaaactcaacagggcgtcgcctgggttttagccgggcattgtcagagaccaggccttcatgaggacctacagggaatgctgctgccgtccgtgctttctaaagcaagaagttggactttctag

SEQ ID NO: 126329 - DNA, 1566 bp, Artificial Sequence
  derived and/or modified sequence
atgggtcttggacggtgcatctgggaggggtggactctggagtcagaagcacttcgaagagacatgggtacctggctgctagcctgtatttgtatctgcacttgcgtgtgtttaggcgttagcgttaccggcgaaggacagggtcctcgaagccgcacattcacttgccttaccaacaatattcttcgcatcgactgtcactggtcagcgcctgagttagggcaagggtcctctccttggctgttgtttacttcgaaccaggctcccggtggcactcacaaatgtattttaagaggaagtgaatgcaccgttgtcctccctcctgaagcagttctggtgcctagtgacaattttaccattacgttccaccactgcatgtccggccgagaacaagtctcgctggttgacccggagtacctgcccaggcgccatgtcaagcttgatccccctagtgatctgcaatccaacatctcatccggacactgtatcctgacatggtcgatctcacctgccctggaaccaatgacaactctactgtcttacgaattagcatttaagaagcaggaagaggcttgggagcaggcccagcatcgggatcacatagtgggtgtgacatggctaatcctcgaggccttcgagctggaccccggtttcattcatgaggcaaggctgcgagtgcaaatggccacactggaagatgacgttgtcgaggaggagcgttacactgggcagtggtcggaatggtcacaacccgtttgtttccaggcgcctcaacgacagggcccattgataccaccttggggctggccgggaaataccctggtggccgtgtctatttttcttctcttgacgggcccaacatatttgctcttcaagttatccccaagggtgaaacggatcttttatcagaatgtgccttcacccgctatgtttttccaacccctgtactccgtacataatggcaattttcaaacgtggatgggcgctcatggagcaggcgtcctgctgtcacaggattgtgccggtacaccccaaggtgcccttgagccgtgcgtgcaggaggccaccgcgcttctcacttgcggaccggcaaggccctggaaaagcgtcgctctggaagaagagcaagagggacctggcacacggcttcccggtaatctttccagtgaagacgttctgcctgcagggtgcactgaatggcgggtgcaaacactggcctacctgcctcaggaggactgggcccctacttctctcactagacccgcaccgcctgactctgaggggagccgttctagctctagcagctcttcatccaacaataataactattgcgctctcggctgctacgggggttggcacctaagtgccctgccagggaacacacagagttctggaccgattcctgcccttgcctgcgggctctcttgcgaccaccagggactggagacacagcagggcgtggcctgggttctggctgggcactgtcagagacctggcttacacgaggacttgcaaggcatgcttcttccgagcgtgctgagcaaagcacggagttggactttctag

SEQ ID NO: 126330 - DNA, 1566 bp, Artificial Sequence
  derived and/or modified sequence
atgggcctgggcagatgcatctgggagggctggaccctggagagcgaggccctgagaagagacatgggcacctggctgctggcctgcatctgcatctgcacctgcgtgtgcctgggcgtgagcgtgaccggcgagggccagggccccagaagcagaaccttcacctgcctgaccaacaacatcctgagaatcgactgccactggagcgcccccgagctgggccagggcagcagcccctggctgctgttcaccagcaaccaggcccccggcggcacccacaagtgcatcctgagaggcagcgagtgcaccgtggtgctgccccccgaggccgtgctggtgcccagcgacaacttcaccatcaccttccaccactgcatgagcggcagagagcaggtgagcctggtggaccccgagtacctgcccagaagacacgtgaagctggacccccccagcgacctgcagagcaacatcagcagcggccactgcatcctgacctggagcatcagccccgccctggagcccatgaccaccctgctgagctacgagctggccttcaagaagcaggaggaggcctgggagcaggcccagcacagagaccacatcgtgggcgtgacctggctgatcctggaggccttcgagctggaccccggcttcatccacgaggccagactgagagtgcagatggccaccctggaggacgacgtggtggaggaggagagatacaccggccagtggagcgagtggagccagcccgtgtgcttccaggccccccagagacagggccccctgatccccccctggggctggcccggcaacaccctggtggccgtgagcatcttcctgctgctgaccggccccacctacctgctgttcaagctgagccccagagtgaagagaatcttctaccagaacgtgcccagccccgccatgttcttccagcccctgtacagcgtgcacaacggcaacttccagacctggatgggcgcccacggcgccggcgtgctgctgagccaggactgcgccggcaccccccagggcgccctggagccctgcgtgcaggaggccaccgccctgctgacctgcggccccgccagaccctggaagagcgtggccctggaggaggagcaggagggccccggcaccagactgcccggcaacctgagcagcgaggacgtgctgcccgccggctgcaccgagtggagagtgcagaccctggcctacctgccccaggaggactgggcccccaccagcctgaccagacccgccccccccgacagcgagggcagcagaagcagcagcagcagcagcagcagcaacaacaacaactactgcgccctgggctgctacggcggctggcacctgagcgccctgcccggcaacacccagagcagcggccccatccccgccctggcctgcggcctgagctgcgaccaccagggcctggagacccagcagggcgtggcctgggtgctggccggccactgccagagacccggcctgcacgaggacctgcagggcatgctgctgcccagcgtgctgagcaaggccagaagctggaccttctag

SEQ ID NO: 126331 - protein, 328 aa, Artificial Sequence
  derived and/or modified sequence
MCHQQLVISWFSLVFLASPLVAIWELKKDVYVVELDWYPDAPGEMVVLTCDTPEEDGITWTLDQSSEVLGSGKTLTIQVKEFGDAGQYTCHKGGEVLSHSLLLLHKKEDGIWSTDILKDQKEPKNKTFLRCEAKNYSGRFTCWWLTTISTDLTFSVKSSRGSSDPQGVTCGAATLSAERVRGDNKEYEYSVECQEDSACPAAEESLPIEVMVDAVHKLKYENYTSSFFIRDIIKPDPPKNLQLKPLKNSRQVEVSWEYPDTWSTPHSYFSLTFCVQVQGKSKREKKDRVFTDKTSATVICRKNASISVRAQDRYYSSSWSEWASVPCS

SEQ ID NO: 126332 - DNA, 987 bp, Artificial Sequence
  derived and/or modified sequence
atgtgccaccagcagctggtgatcagctggttcagcctggtgttcctggccagccccctggtggccatctgggagctgaagaaggacgtgtacgtggtggagctggactggtaccccgacgcccccggcgagatggtggtgctgacctgcgacacccccgaggaggacggcatcacctggaccctggaccagagcagcgaggtgctgggcagcggcaagaccctgaccatccaggtgaaggagttcggcgacgccggccagtacacctgccacaagggcggcgaggtgctgagccacagcctgctgctgctgcacaagaaggaggacggcatctggagcaccgacatcctgaaggaccagaaggagcccaagaacaagaccttcctgagatgcgaggccaagaactacagcggcagattcacctgctggtggctgaccaccatcagcaccgacctgaccttcagcgtgaagagcagcagaggcagcagcgacccccagggcgtgacctgcggcgccgccaccctgagcgccgagagagtgagaggcgacaacaaggagtacgagtacagcgtggagtgccaggaggacagcgcctgccccgccgccgaggagagcctgcccatcgaggtgatggtggacgccgtgcacaagctgaagtacgagaactacaccagcagcttcttcatcagagacatcatcaagcccgacccccccaagaacctgcagctgaagcccctgaagaacagcagacaggtggaggtgagctgggagtaccccgacacctggagcaccccccacagctacttcagcctgaccttctgcgtgcaggtgcagggcaagagcaagagagagaagaaggacagagtgttcaccgacaagaccagcgccaccgtgatctgcagaaagaacgccagcatcagcgtgagagcccaggacagatactacagcagcagctggagcgagtgggccagcgtgccctgcagctag

SEQ ID NO: 126333 - DNA, 987 bp, Artificial Sequence
  derived and/or modified sequence
atgtgtcatcagcagctggtgatttcttggttttcactggtctttttagcctcgcccctggttgcaatttgggagcttaaaaaggacgtgtatgttgtggagctagattggtaccccgatgcccctggtgaaatggtcgtgctgacatgtgacacccctgaagaggacggcataacatggacgctggaccaatcaagtgaagtactagggtcaggcaagacattgacaatccaggtcaaggagtttggggatgctggacagtacacctgccacaaaggcggcgaggtcctaagccactcactgctgttgctccacaagaaggaggatggaatttggagcaccgatattcttaaggatcagaaagaaccgaagaacaaaacttttttgagatgtgaggcaaaaaactatagcggtagattcacctgctggtggttaacaaccatttcaactgacctgacattttccgtgaagagctcccgagggagttcagacccgcagggcgtcacctgcggcgccgccactctgtccgctgaacgagtccgcggggataataaggaatatgaatactcggtggaatgccaagaagacagcgcttgtcccgctgccgaggagtctcttcctatcgaagttatggtcgatgctgtgcataagctgaaatatgaaaattacacttcttcgttcttcatcagagatataattaagccagatcctcctaaaaatctccagctaaagccgctgaaaaatagccgccaggtggaagtgtcctgggagtatcccgatacttggagtaccccacattcctactttagtctcaccttttgtgtccaagtgcaagggaagagcaaacgggagaagaaagatcgcgtttttaccgacaagacatctgctacagtgatatgtcggaaaaatgctagcatcagcgtcagggcgcaggaccggtactattcctcaagctggtctgagtgggcatctgtgccctgctcgtag

SEQ ID NO: 126334 - DNA, 987 bp, Artificial Sequence
  derived and/or modified sequence
atgtgccaccagcagctggtgatctcctggttcagcctggtgttcctggccagccccctggtggccatctgggagctgaagaaggatgtgtatgtggtggagctggactggtacccagatgcccctggagagatggtggtgctgacctgtgacaccccagaagaagatggcatcacctggaccctggaccagagcagcgaggtgctgggcagcggcaagaccctgaccatccaggtgaaggagtttggagatgctggccagtacacctgccacaagggcggggaggtgctgagccacagcctgctgctgctgcacaagaaggaggatggcatctggagcacagacatcctgaaggaccagaaggagcccaagaacaagaccttcctgcgctgtgaggccaagaactacagcggccgcttcacctgctggtggctgaccaccatcagcacagacctgaccttctctgtgaagagcagccggggcagcagtgacccccagggcgtgacctgtggggccgccaccctgtctgctgagcgggtgcggggggacaacaaggagtatgagtacagcgtggagtgccaggaggacagcgcctgcccagctgctgaggagagcctgcccatcgaggtgatggtggatgctgtgcacaagctgaagtatgagaactacaccagcagcttcttcatccgggacatcatcaagccagacccccccaagaacctgcagctgaagcccctgaagaacagccggcaggtggaggtgtcctgggagtacccagacacctggagcaccccccacagctacttcagcctgaccttctgtgtgcaggtgcagggcaagagcaagcgggagaagaaggacagagtcttcacagacaagaccagcgccaccgtcatctgcaggaagaatgccagcatctctgtgcgggcccaggaccgctactacagcagctcctggagcgagtgggcctctgtgccctgcagctag

SEQ ID NO: 126335 - DNA, 987 bp, Artificial Sequence
  derived and/or modified sequence
atgtgccaccagcagctggtgatcagctggttcagcctggtgttcctagcttcccctctggtggccatttgggagctgaagaaggatgtgtatgtggttgagctagattggtatcccgacgctccaggcgagatggtggtgctcacgtgtgacacccctgaggaggatggtatcacctggactctagatcagtcctctgaagttctcggatctggaaagacgctgacaattcaggttaaagaattcggcgatgctggccaatatacctgccataagggcggcgaagtgttgtcgcattccttgctgctgctacacaaaaaagaggatggtatttggtccacagatattttaaaggaccagaaggagcccaaaaataaaacatttttacggtgtgaggctaaaaactatagcggcagattcacatgttggtggcttacaactatttctacggatttgactttctcagtgaagagctcgcgaggttcctctgatccccagggcgtcacctgcggcgcagcaacgctcagcgccgagagagttcgaggggataacaaggagtatgagtattctgtcgagtgccaggaagacagcgcctgcccagcagccgaagagagtctgcccatcgaagtaatggtcgacgctgttcataagctcaaatatgagaactacacctcctcattttttattagggatatcattaagcccgatccacccaagaacttgcagctcaagcctctgaaaaacagcaggcaggttgaggtttcctgggaatacccagacacatggtccacaccacacagctacttttctctaaccttttgtgtccaggttcaaggcaagagtaaaagggagaaaaaagacagggtattcacagataagacatcggcgaccgtaatctgtcgaaagaacgctagcatctccgtccgagcacaagaccgctattattctagctcatggagcgaatgggcatcagtaccttgcagctag

SEQ ID NO: 126336 - DNA, 987 bp, Artificial Sequence
  derived and/or modified sequence
atgtgccatcagcagctcgtgatatcatggttctcactggtgttcttggcttcccccctagttgcaatttgggaactgaaaaaggatgtgtatgtggtggaactagattggtaccctgacgcgcctggcgaaatggtggtgcttacgtgcgatacccctgaggaggatgggataacgtggaccctcgaccagagcagtgaggtgctcggtagtgggaaaactctgacaatccaggtaaaggagtttggcgacgctgggcaatacacatgccataagggtggggaggtgctttcgcattctttgttactgctgcacaagaaagaggatggaatctggagtacggatatactgaaggatcaaaaagagcccaaaaacaaaaccttccttaggtgcgaggctaaaaattatagcggacgcttcacttgttggtggttgacgacaatctcaaccgacctgacctttagcgttaagtcatctcgaggcagcagtgatcctcagggagtaacctgcggggctgctacgctgtcagccgagcgagtgcgaggcgataacaaagagtacgaatattccgtcgagtgccaggaggactctgcatgtcccgctgccgaggagtcattgcctatcgaggtgatggtagatgccgtccacaaattaaaatacgagaactatacgtccagcttttttatacgcgatatcatcaagcctgaccctccaaaaaatcttcagctaaagcccctgaagaactcacgccaagtagaagtttcatgggagtatcccgatacatggagcacaccccacagttatttttccctgacattttgcgtgcaagtgcagggaaagagcaagcgcgaaaaaaaagacagggtctttacggacaagacttccgctaccgtgatatgccgcaagaacgcaagtatatctgttagagcacaagaccgatactactcctcatcctggtccgagtgggcgtcagtcccctgttcgtag

SEQ ID NO: 126337 - DNA, 2761 bp, Artificial Sequence
  derived and/or modified sequence
gggcatacagttgttccatcccgacatgaactcagcctcccgtctgaccgccccttggccttccttcttcctcgatctgtggaacccagggaatctgcctagtgctgtctccaagcaccttggccatgatgtaaacccagagaaattagcatctccatctccttccttattccccacccaaaagtcatttcctcttagttcattacctgggattttgatgtctatgttccctcctcgttattgatacacacacagagagagacaaacaaaaaaggaacttcttgaaattcccccagaaggttttgagagttgttttcaatgttgcaacaagtcagtttctagtttaagtttccatcagaaaggagtagagtatataagttccagtaccagcaacagcagcagaagaaacaacatctgtttcagggccattggactctccgtcctgcccagagcaagatgtgtcaccagcagttggtcatctcttggttttccctggtttttctggcatctcccctcgtggccatatgggaactgaagaaagatgtttatgtcgtagaattggattggtatccggatgcccctggagaaatggtggtcctcacctgtgacacccctgaagaagatggtatcacctggaccttggaccagagcagtgaggtcttaggctctggcaaaaccctgaccatccaagtcaaagagtttggagatgctggccagtacacctgtcacaaaggaggcgaggttctaagccattcgctcctgctgcttcacaaaaaggaagatggaatttggtccactgatattttaaaggaccagaaagaacccaaaaataagacctttctaagatgcgaggccaagaattattctggacgtttcacctgctggtggctgacgacaatcagtactgatttgacattcagtgtcaaaagcagcagaggctcttctgacccccaaggggtgacgtgcggagctgctacactctctgcagagagagtcagaggggacaacaaggagtatgagtactcagtggagtgccaggaggacagtgcctgcccagctgctgaggagagtctgcccattgaggtcatggtggatgccgttcacaagctcaagtatgaaaactacaccagcagcttcttcatcagggacatcatcaaacctgacccacccaagaacttgcagctgaagccattaaagaattctcggcaggtggaggtcagctgggagtaccctgacacctggagtactccacattcctacttctccctgacattctgcgttcaggtccagggcaagagcaagagagaaaagaaagatagagtcttcacggacaagacctcagccacggtcatctgccgcaaaaatgccagcattagcgtgcgggcccaggaccgctactatagctcatcttggagcgaatgggcatctgtgccctgcagttaggttctgatccaggatgaaaatttggaggaaaagtggaagatattaagcaaaatgtttaaagacacaacggaatagacccaaaaagataatttctatctgatttgctttaaaacgtttttttaggatcacaatgatatctttgctgtatttgtatagttagatgctaaatgctcattgaaacaatcagctaatttatgtatagattttccagctctcaagttgccatgggccttcatgctatttaaatatttaagtaatttatgtatttattagtatattactgttatttaacgtttgtctgccaggatgtatggaatgtttcatactcttatgacctgatccatcaggatcagtccctattatgcaaaatgtgaatttaattttatttgtactgacaacttttcaagcaaggctgcaagtacatcagttttatgacaatcaggaagaatgcagtgttctgataccagtgccatcatacacttgtgatggatgggaacgcaagagatacttacatggaaacctgacaatgcaaacctgttgagaagatccaggagaacaagatgctagttcccatgtctgtgaagacttcctggagatggtgttgataaagcaatttagggccacttacacttctaagcaagtttaatctttggatgcctgaattttaaaagggctagaaaaaaatgattgaccagcctgggaaacataacaagaccccgtctctacaaaaaaaatttaaaattagccaggcgtggtggctcatgcttgtggtcccagctgttcaggaggatgaggcaggaggatctcttgagcccaggaggtcaaggctatggtgagccgtgattgtgccactgcataccagcctaggtgacagaatgagaccctgtctcaaaaaaaaaaatgattgaaattaaaattcagctttagcttccatggcagtcctcacccccacctctctaaaagacacaggaggatgacacagaaacaccgtaagtgtctggaaggcaaaaagatcttaagattcaagagagaggacaagtagttatggctaaggacatgaaattgtcagaatggcaggtggcttcttaacagccctgtgagaagcagacagatgcaaagaaaatctggaatccctttctcattagcatgaatgaacctgatacacaattatgaccagaaaatatggctccatgaaggtgctacttttaagtaatgtatgtgcgctctgtaaagtgattacatttgtttcctgtttgtttatttatttatttatttttgcattctgaggctgaactaataaaaactcttctttgtaatc

SEQ ID NO: 126338 - protein, 146 aa, Artificial Sequence
  derived and/or modified sequence
MHPLLNPLLLALGLMALLLTTVIALTCLGGFASPGPVPPSTALRELIEELVNITQNQKAPLCNGSMVWSINLTAGMYCAALESLINVSGCSAIEKTQRMLSGFCPHKVSAGQFSSLHVRDTKIEVAQFVKDLLLHLKKLFREGQFN

SEQ ID NO: 126339 - DNA, 441 bp, Artificial Sequence
  derived and/or modified sequence
atgcaccccctgctgaaccccctgctgctggccctgggcctgatggccctgctgctgaccaccgtgatcgccctgacctgcctgggcggcttcgccagccccggccccgtgccccccagcaccgccctgagagagctgatcgaggagctggtgaacatcacccagaaccagaaggcccccctgtgcaacggcagcatggtgtggagcatcaacctgaccgccggcatgtactgcgccgccctggagagcctgatcaacgtgagcggctgcagcgccatcgagaagacccagagaatgctgagcggcttctgcccccacaaggtgagcgccggccagttcagcagcctgcacgtgagagacaccaagatcgaggtggcccagttcgtgaaggacctgctgctgcacctgaagaagctgttcagagagggccagttcaactag

SEQ ID NO: 126340 - DNA, 441 bp, Artificial Sequence
  derived and/or modified sequence
atgcacccactcctgaatcccttgttgctcgccctgggcctgatggcccttctcctgaccaccgtcatagctctgacatgtcttggtgggttcgcttctcctggccctgtgccaccttctactgctctcagagagctgatcgaggagctcgttaacatcactcagaatcagaaagcacctctgtgcaacggctccatggtgtggagtattaaccttaccgccggcatgtattgtgccgccttggagagtctcattaacgtgtccgggtgtagcgctatagaaaagactcagcgtatgctgtccgggttttgtcctcataaagttagcgcgggccagttttcctcattacatgtgcgagatacaaaaatcgaagtagctcagttcgtcaaagacctgctgctgcacttgaagaaactattcagggagggccagtttaactag

SEQ ID NO: 126341 - DNA, 441 bp, Artificial Sequence
  derived and/or modified sequence
atgcaccccctgctgaaccccctgctgctggccctgggcctgatggccctgctgctgaccaccgtgattgccctgacctgcctgggcggctttgccagccctggccctgtgccccccagcacagccctgcgggagctgattgaggagctggtgaacatcacccagaaccagaaggcccccctgtgcaatggctccatggtgtggagcatcaacctgacagctggcatgtactgtgccgccctggagagcctcatcaacgtgtctggctgcagcgccatcgagaagacccagaggatgctgagcggcttctgcccccacaaggtgtctgctggccagttcagcagcctgcacgtgcgggacaccaagattgaggtggcccagtttgtgaaggacctgctgctgcacctgaagaagctgttccgggagggccagttcaactag

SEQ ID NO: 126342 - DNA, 441 bp, Artificial Sequence
  derived and/or modified sequence
atgcaccccctgctgaaccccctgctgctggccctgggcctgatggctctgctgttgactacagtcatcgctctgacatgtctgggtggctttgcttcgcctggtcccgttccaccaagtaccgctttacgtgagctgatcgaggagctcgtcaacattacccaaaaccagaaggcaccgctatgtaacggtagcatggtgtggagtatcaaccttaccgccggaatgtactgcgctgcattggagagtctgatcaatgtgagtggttgtagcgccatcgaaaaaacccagaggatgctcagtggtttctgtccacataaggtgagtgccggtcagttcagcagcctgcacgttcgggacacgaagattgaggtcgcccagtttgtgaaggatctgctcctccacttgaaaaaactgtttcgggaaggtcaatttaactag

SEQ ID NO: 126343 - DNA, 441 bp, Artificial Sequence
  derived and/or modified sequence
atgcaccccctgcttaatcctttgctgttagcccttgggcttatggccctgctgctcacaaccgttatcgccctcacgtgcctgggagggttcgccagcccaggaccggtgccaccttcaacagctctacgcgagctgatagaggagttagtaaacatcacccaaaatcaaaaagcccctctttgtaatggatccatggtgtggtcaataaaccttacagcagggatgtattgtgccgctttagaatctcttatcaatgtttccggatgctcagcaatcgaaaagacccagaggatgctgagtggcttctgtccccacaaggtttcagccggacagttcagtagtttgcatgtacgggatactaagatagaagtcgcccagttcgtgaaggacctgctgctgcacttgaaaaagttatttagggaagggcagtttaattag

SEQ ID NO: 126344 - DNA, 1283 bp, Artificial Sequence
  derived and/or modified sequence
aagccacccagcctatgcatccgctcctcaatcctctcctgttggcactgggcctcatggcgcttttgttgaccacggtcattgctctcacttgccttggcggctttgcctccccaggccctgtgcctccctctacagccctcagggagctcattgaggagctggtcaacatcacccagaaccagaaggctccgctctgcaatggcagcatggtatggagcatcaacctgacagctggcatgtactgtgcagccctggaatccctgatcaacgtgtcaggctgcagtgccatcgagaagacccagaggatgctgagcggattctgcccgcacaaggtctcagctgggcagttttccagcttgcatgtccgagacaccaaaatcgaggtggcccagtttgtaaaggacctgctcttacatttaaagaaactttttcgcgagggacagttcaactgaaacttcgaaagcatcattatttgcagagacaggacctgactattgaagttgcagattcatttttctttctgatgtcaaaaatgtcttgggtaggcgggaaggagggttagggaggggtaaaattccttagcttagacctcagcctgtgctgcccgtcttcagcctagccgacctcagccttccccttgcccagggctcagcctggtgggcctcctctgtccagggccctgagctcggtggacccagggatgacatgtccctacacccctcccctgccctagagcacactgtagcattacagtgggtgccccccttgccagacatgtggtgggacagggacccacttcacacacaggcaactgaggcagacagcagctcaggcacacttcttcttggtcttatttattattgtgtgttatttaaatgagtgtgtttgtcaccgttggggattggggaagactgtggctgctagcacttggagccaagggttcagagactcagggccccagcactaaagcagtggacaccaggagtccctggtaataagtactgtgtacagaattctgctacctcactggggtcctggggcctcggagcctcatccgaggcagggtcaggagaggggcagaacagccgctcctgtctgccagccagcagccagctctcagccaacgagtaatttattgtttttccttgtatttaaatattaaatatgttagcaaagagttaatatatagaagggtaccttgaacactgggggaggggacattgaacaagttgtttcattgactatcaaactgaagccagaaataaagttggtgacagata

SEQ ID NO: 126345 - protein, 267 aa, Artificial Sequence
  derived and/or modified sequence
MAPRRARGCRTLGLPALLLLLLLRPPATRGITCPPPMSVEHADIWVKSYSLYSRERYICNSGFKRKAGTSSLTECVLNKATNVAHWTTPSLKCIRDPALVHQRPAPPSTVTTAGVTPQPESLSPSGKEPAASSPSSNNTAATTAAIVPGSQLMPSKSPSTGTTEISSHESSHGTPSQTTAKNWELTASASHQPPGVYPQGHSDTTVAISTSTVLLCGLSAVSLLACYLKSRQTPPLASVEMEAMEALPVTWGTSSRDEDLENCSHHL

SEQ ID NO: 126346 - protein, 252 aa, Artificial Sequence
  derived and/or modified sequence
MAPRRARGCRTLGLPALLLLLLLRPPATRGITCPPPMSVEHADIWVKSYSLYSRERYICNSGFKRKAGTSSLTECVLNKATNVAHWTTPSLKCIRDPALVHQRPAPPSTVTTAGVTPQPESLSPSGKEPAASSPSSNNTAATTAAIVPGSQLMPSKSPSTGTTEISSHESSHGTPSQTTAKNWELTASASHQPPGVYPQGHSDTTVAISTSTVLLCGLSAVSLLACYLKSRASVCSCHPRSAGHTCSVGSVC

SEQ ID NO: 126347 - DNA, 804 bp, Artificial Sequence
  derived and/or modified sequence
atggctcctcgtagggcccgggggtgccgcacactgggtctgcccgccttgcttctcttactgctgctgcggcctcctgctaccagaggcattacctgtccaccacccatgtctgttgaacacgccgatatctgggtgaaaagttacagcctgtactcacgggaaaggtacatatgtaattctggtttcaaaaggaaggccggtacaagttcactcaccgagtgtgtgttaaataaagctacgaatgtggcccactggacgacccccagtctcaaatgcataagagaccctgcgctggtccatcagaggcctgcgccaccttccacagtcacaacagctggggtcaccccccagcccgagtccctgtcgcccagcggtaaggagcccgccgcatccagcccttcgagtaataacacggcagccacgactgccgccatcgtacctggctcacagttgatgccaagcaagtcaccatccacaggcactactgaaatcagtagtcatgaatcatctcacggcaccccttcccaaaccacagcaaagaactgggagctgaccgcctctgcttctcaccaaccgccaggagtctacccgcaaggccacagtgacaccacagtcgccatcagtacctctacagtgctgctctgcggcttgagtgccgtgtcccttctggcatgttatctcaagtctcgtcagacaccacctctggcgagcgtcgaaatggaggcaatggaggcactccccgtgacgtgggggacctcttccagggatgaggacctggagaattgcagtcaccacctgtag

SEQ ID NO: 126348 - DNA, 1626 bp, Artificial Sequence
  derived and/or modified sequence
tggcggggcggcaggtcccagagcagcgctcgccacctccccccggcctgggcagcgctcgcccggggagtccagcggtgtcctgtggagctgccgccatggccccgcggcgggcgcgcggctgccggaccctcggtctcccggcgctgctactgctgctgctgctccggccgccggcgacgcggggcatcacgtgccctccccccatgtccgtggaacacgcagacatctgggtcaagagctacagcttgtactccagggagcggtacatttgtaactctggtttcaagcgtaaagccggcacgtccagcctgacggagtgcgtgttgaacaaggccacgaatgtcgcccactggacaacccccagtctcaaatgcattagagaccctgccctggttcaccaaaggccagcgccaccctccacagtaacgacggcaggggtgaccccacagccagagagcctctccccttctggaaaagagcccgcagcttcatctcccagctcaaacaacacagcggccacaacagcagctattgtcccgggctcccagctgatgccttcaaaatcaccttccacaggaaccacagagataagcagtcatgagtcctcccacggcaccccctctcagacaacagccaagaactgggaactcacagcatccgcctcccaccagccgccaggtgtgtatccacagggccacagcgacaccactgtggctatctccacgtccactgtcctgctgtgtgggctgagcgctgtgtctctcctggcatgctacctcaagtcaaggcaaactcccccgctggccagcgttgaaatggaagccatggaggctctgccggtgacttgggggaccagcagcagagatgaagacttggaaaactgctctcaccacctatgaaactcggggaaaccagcccagctaagtccggagtgaaggagcctctctgctttagctaaagacgactgagaagaggtgcaaggaagcgggctccaggagcaagctcaccaggcctctcagaagtcccagcaggatctcacggactgccgggtcggcgcctcctgcgcgagggagcaggttctccgcattcccatgggcaccacctgcctgcctgtcgtgccttggacccagggcccagcttcccaggagagaccaaaggcttctgagcaggatttttatttcattacagtgtgagctgcctggaatacatgtggtaatgaaataaaaaccctgccccgaatcttccgtccctcatcctaactttcagttcacagagaaaagtgacatacccaaagctctctgtcaattacaaggcttctcctggcgtgggagacgtctacagggaagacaccagcgtttgggcttctaaccaccctgtctccagctgctctgcacacatggacagggacctgggaaaggtgggagagatgctgagcccagcgaatcctctccattgaaggattcaggaagaagaaaactcaactcagtgccattttacgaatatatgcgtttatatttatacttccttgtctattatatctatacattatatattatttgtattttgacattgtaccttgtataaacaaaataaaacatctattttcaatatttttaaaatgca

SEQ ID NO: 126349 - DNA, 1646 bp, Artificial Sequence
  derived and/or modified sequence
aaaagcgaaagcgaatgcgactggcggggcggcaggtcccagagcagcgctcgccacctccccccggcctgggcagcgctcgcccggggagtccagcggtgtcctgtggagctgccgccatggccccgcggcgggcgcgcggctgccggaccctcggtctcccggcgctgctactgctgctgctgctccggccgccggcgacgcggggcatcacgtgccctccccccatgtccgtggaacacgcagacatctgggtcaagagctacagcttgtactccagggagcggtacatttgtaactctggtttcaagcgtaaagccggcacgtccagcctgacggagtgcgtgttgaacaaggccacgaatgtcgcccactggacaacccccagtctcaaatgcattagagaccctgccctggttcaccaaaggccagcgccaccctccacagtaacgacggcaggggtgaccccacagccagagagcctctccccttctggaaaagagcccgcagcttcatctcccagctcaaacaacacagcggccacaacagcagctattgtcccgggctcccagctgatgccttcaaaatcaccttccacaggaaccacagagataagcagtcatgagtcctcccacggcaccccctctcagacaacagccaagaactgggaactcacagcatccgcctcccaccagccgccaggtgtgtatccacagggccacagcgacaccactgtggctatctccacgtccactgtcctgctgtgtgggctgagcgctgtgtctctcctggcatgctacctcaagtcaaggcaaactcccccgctggccagcgttgaaatggaagccatggaggctctgccggtgacttgggggaccagcagcagagatgaagacttggaaaactgctctcaccacctatgaaactcggggaaaccagcccagctaagtccggagtgaaggagcctctctgctttagctaaagacgactgagaagaggtgcaaggaagcgggctccaggagcaagctcaccaggcctctcagaagtcccagcaggatctcacggactgccgggtcggcgcctcctgcgcgagggagcaggttctccgcattcccatgggcaccacctgcctgcctgtcgtgccttggacccagggcccagcttcccaggagagaccaaaggcttctgagcaggatttttatttcattacagtgtgagctgcctggaatacatgtggtaatgaaataaaaaccctgccccgaatcttccgtccctcatcctaactttcagttcacagagaaaagtgacatacccaaagctctctgtcaattacaaggcttctcctggcgtgggagacgtctacagggaagacaccagcgtttgggcttctaaccaccctgtctccagctgctctgcacacatggacagggacctgggaaaggtgggagagatgctgagcccagcgaatcctctccattgaaggattcaggaagaagaaaactcaactcagtgccattttacgaatatatgcgtttatatttatacttccttgtctattatatctatacattatatattatttgtattttgacattgtaccttgtataaacaaaataaaacatctattttcaatatttttaaaatgc

SEQ ID NO: 126350 - DNA, 804 bp, Artificial Sequence
  derived and/or modified sequence
atggccccccggcgggcccggggctgcaggaccctgggcctgcctgccctgctgctgctgctgctgctgcggcccccagccacccggggcatcacctgccccccacccatgtctgtggagcacgccgacatctgggtgaagagctacagcctgtacagccgggagcgctacatctgcaacagcggcttcaagaggaaggccggcaccagcagcctgacagaatgtgtgctgaacaaggccaccaacgtggcccactggaccacccccagcctgaagtgcatccgggaccctgccctggtgcaccagaggcctgccccacccagcacagtgaccacagctggggtgaccccccagcctgagagcctgagccccagcggcaaggagcctgctgccagcagccccagcagcaacaacacagctgccaccacagctgccatcgtgcccggcagccagctgatgcccagcaagagccccagcacaggcaccacagagatcagcagccatgagagcagccacggcacccccagccagaccacagccaagaactgggagctgacagccagcgccagccaccagcccccaggagtgtacccccagggccacagcgacaccaccgtggccatcagcaccagcacagtgctgctgtgtggcctgtctgctgtgtccctgctggcctgctacctgaagagccggcagaccccacccctggcctctgtggagatggaggccatggaggccctgcctgtgacctggggcaccagcagcagagatgaggacctggagaactgcagccaccacctgtag

SEQ ID NO: 126351 - DNA, 804 bp, Artificial Sequence
  derived and/or modified sequence
atggccccccggcgggcccggggctgccggaccctgggcctgcccgctcttctcctgcttctgctgctcaggcccccggccacccgagggattacctgtcccccacccatgagcgttgagcacgccgatatctgggtgaagtcttattccttgtacagtcgcgagaggtatatctgcaactcaggattcaaacgcaaggccggcacaagctctttgaccgagtgtgtgttaaataaagccacaaatgtggctcattggaccacacctagtctgaagtgcatcagggatccagctctggtccaccaacgcccagcccctcccagtaccgtcacaacagcaggggttacaccccaacccgaatcactctctcctagcggcaaagagcctgcagcctcaagcccctcatccaacaataccgctgccactaccgcagccattgtacctggtagccagctcatgcccagtaaaagcccttcgaccgggacaacggaaatttcatcccatgaatccagccatggcactccaagccagactacagccaagaattgggagctcactgcctctgcttcacatcagccgcctggagtctatccccaaggccacagcgacacaactgtggcaatctctacttcaactgtgctgctgtgcggactatctgctgtcagcttgctcgcgtgctacctgaaaagcagacaaacccccccactggctagcgtggagatggaggccatggaggctttgccagtgacctgggggacctccagccgagatgaggacctcgagaactgttcacatcacctgtag

SEQ ID NO: 126352 - DNA, 804 bp, Artificial Sequence
  derived and/or modified sequence
atggcacccaggagagcaaggggctgtcggacactcggcctgcccgctctgctcttgctgttactgctgaggccccctgccactaggggcattacctgcccaccacctatgtccgtggagcacgcagacatttgggtcaagtcatactcactttactcacgagagagatatatttgcaatagtggcttcaagagaaaagccggaacctcctctttgaccgaatgcgtgttgaacaaggcaactaacgtggctcactggacgacaccaagcctcaaatgcattcgcgaccctgccctcgtgcatcagcgcccagcgcctccttctacggtgaccacggccggtgttactccccagcctgaatccctctccccatctggcaaggagcctgccgcttcaagtccgtcttccaacaacaccgccgctacgacagctgccattgtccctggttcccagctgatgccctccaagagtccatcgactggtacaaccgagatctccagccatgaaagttctcatgggacaccgagccagactactgcaaaaaactgggagctaacagcctcagccagtcatcaacctcctggtgtgtatcctcaaggccactcagacaccacagtagcaatctcaacctctaccgttctgctgtgcggactcagcgcggtgtctctgctggcgtgttacctgaaaagcagacaaaccccacctctagccagtgtggaaatggaggccatggaggccctcccggttacctggggcaccagctcccgcgatgaagatctcgagaactgttcacaccatttgtag

SEQ ID NO: 126353 - DNA, 804 bp, Artificial Sequence
  derived and/or modified sequence
atggcccccagaagagccagaggctgcagaaccctgggcctgcccgccctgctgctgctgctgctgctgagaccccccgccaccagaggcatcacctgccccccccccatgagcgtggagcacgccgacatctgggtgaagagctacagcctgtacagcagagagagatacatctgcaacagcggcttcaagagaaaggccggcaccagcagcctgaccgagtgcgtgctgaacaaggccaccaacgtggcccactggaccacccccagcctgaagtgcatcagagaccccgccctggtgcaccagagacccgccccccccagcaccgtgaccaccgccggcgtgaccccccagcccgagagcctgagccccagcggcaaggagcccgccgccagcagccccagcagcaacaacaccgccgccaccaccgccgccatcgtgcccggcagccagctgatgcccagcaagagccccagcaccggcaccaccgagatcagcagccacgagagcagccacggcacccccagccagaccaccgccaagaactgggagctgaccgccagcgccagccaccagccccccggcgtgtacccccagggccacagcgacaccaccgtggccatcagcaccagcaccgtgctgctgtgcggcctgagcgccgtgagcctgctggcctgctacctgaagagcagacagaccccccccctggccagcgtggagatggaggccatggaggccctgcccgtgacctggggcaccagcagcagagacgaggacctggagaactgcagccaccacctgtag

SEQ ID NO: 126354 - protein, 155 aa, Artificial Sequence
  derived and/or modified sequence
MTPGKTSLVSLLLLLSLEAIVKAGITIPRNPGCPNSEDKNFPRTVMVNLNIHNRNTNTNPKRSSDYYNRSTSPWNLHRNEDPERYPSVIWEAKCRHLGCINADGNVDYHMNSVPIQQEILVLRREPPHCPNSFRLEKILVSVGCTCVTPIVHHVA

SEQ ID NO: 126355 - DNA, 468 bp, Artificial Sequence
  derived and/or modified sequence
atgacccccggcaagaccagcctggtgagcctgctgctgctgctgagcctggaggccatcgtgaaggccggcatcaccatccccagaaaccccggctgccccaacagcgaggacaagaacttccccagaaccgtgatggtgaacctgaacatccacaacagaaacaccaacaccaaccccaagagaagcagcgactactacaacagaagcaccagcccctggaacctgcacagaaacgaggaccccgagagataccccagcgtgatctgggaggccaagtgcagacacctgggctgcatcaacgccgacggcaacgtggactaccacatgaacagcgtgcccatccagcaggagatcctggtgctgagaagagagcccccccactgccccaacagcttcagactggagaagatcctggtgagcgtgggctgcacctgcgtgacccccatcgtgcaccacgtggcctag

SEQ ID NO: 126356 - DNA, 468 bp, Artificial Sequence
  derived and/or modified sequence
atgacccctggaaagactagcttagtgtctctgctgctgttattgtcgctcgaggctattgtgaaagccgggataactatacctcgcaaccctggttgtcccaactcagaagacaagaactttcccaggactgtcatggttaatttaaacatacataataggaacacaaacacaaaccccaagaggtcctctgactactacaaccggtctacgagcccctggaacctccaccgcaatgaggacccagagagatacccctccgtaatttgggaggcaaaatgtcgccacctgggatgtattaacgccgacggaaatgtggactatcatatgaactcagtgccgattcagcaagagattctggtgctccggagggaacctccccactgcccgaactcctttcggctggagaaaatccttgtttccgtgggttgcacctgcgtcacccctatagtgcaccacgtggcctag

SEQ ID NO: 126357 - DNA, 468 bp, Artificial Sequence
  derived and/or modified sequence
atgaccccaggcaagaccagcctggtgtccctgctgctgctgctgagcctggaggccatcgtgaaggccggcatcaccatccccagaaatcctggctgccccaacagcgaggacaagaacttccccaggacagtgatggtgaacctgaacatccacaacagaaacaccaacaccaaccccaagaggagcagtgactactacaacagaagcaccagcccctggaacctgcacagaaatgaagatcctgagcgctaccccagcgtcatctgggaggccaagtgccgccacctgggctgcatcaatgctgatggaaatgtggactaccacatgaacagcgtgcccatccagcaggagatcctggtgctgcggcgggagcccccccactgccccaacagcttccggctggagaagatcctggtgtctgtgggctgcacctgtgtgacccccatcgtgcaccacgtggcctag

SEQ ID NO: 126358 - DNA, 468 bp, Artificial Sequence
  derived and/or modified sequence
atgacccccggcaagaccagcctggtgagcctgctgctgctgctgagcttggaggccattgtgaaagccggcatcacaattccaaggaaccccggctgtcccaattcagaagataagaatttcccacgaactgtgatggtgaatctgaatatccacaatcgaaacaccaacacaaaccctaaacgctcctctgattactacaacaggtcaacctctccatggaacctgcacagaaacgaagacccagagcggtacccctccgtgatctgggaggctaaatgccggcacctcgggtgcatcaacgcggatggtaatgtggactaccacatgaattcggttccaattcaacaggaaatccttgtgcttagaagggaaccaccgcactgcccaaacagtttccggctggaaaaaatcctggtctcagtgggctgtacctgcgtcacaccaattgtgcatcatgtcgcctag

SEQ ID NO: 126359 - DNA, 468 bp, Artificial Sequence
  derived and/or modified sequence
atgacgcctggaaaaacaagcctagtttctctcctgctccttctctccttagaggctatcgtgaaggctgggatcaccatccctcgcaatccaggatgcccgaattcggaagataagaacttcccgcgtacagtgatggttaatttaaacatccacaatcggaataccaacacaaaccctaagcgttctagtgactattacaataggagtaccagtccctggaatctccaccgcaatgaggatcctgaaagatatcctagcgtcatttgggaggccaaatgcagacacctgggctgcattaatgcagacggcaacgtcgattaccacatgaactctgtgcccatacagcaggagatcctggtgctgagacgagaaccacctcactgccccaactcgtttcggctggagaaaatcctcgtgtccgtgggttgcacatgtgtgacccccatcgtccatcacgtcgcctag

SEQ ID NO: 126360 - DNA, 1859 bp, Artificial Sequence
  derived and/or modified sequence
gcaggcacaaactcatccatccccagttgattggaagaaacaacgatgactcctgggaagacctcattggtgtcactgctactgctgctgagcctggaggccatagtgaaggcaggaatcacaatcccacgaaatccaggatgcccaaattctgaggacaagaacttcccccggactgtgatggtcaacctgaacatccataaccggaataccaataccaatcccaaaaggtcctcagattactacaaccgatccacctcaccttggaatctccaccgcaatgaggaccctgagagatatccctctgtgatctgggaggcaaagtgccgccacttgggctgcatcaacgctgatgggaacgtggactaccacatgaactctgtccccatccagcaagagatcctggtcctgcgcagggagcctccacactgccccaactccttccggctggagaagatactggtgtccgtgggctgcacctgtgtcaccccgattgtccaccatgtggcctaagagctctggggagcccacactccccaaagcagttagactatggagagccgacccagcccctcaggaaccctcatccttcaaagacagcctcatttcggactaaactcattagagttcttaaggcagtttgtccaattaaagcttcagaggtaacacttggccaagatatgagatctgaattacctttccctctttccaagaaggaaggtttgactgagtaccaatttgcttcttgtttacttttttaagggctttaagttatttatgtatttaatatgccctgagataactttggggtataagattccattttaatgaattacctactttattttgtttgtctttttaaagaagataagattctgggcttgggaattttattatttaaaaggtaaaacctgtatttatttgagctatttaaggatctatttatgtttaagtatttagaaaaaggtgaaaaagcactattatcagttctgcctaggtaaatgtaagatagaattaaatggcagtgcaaaatttctgagtctttacaacatacggatatagtatttcctcctctttgtttttaaaagttataacatggctgaaaagaaagattaaacctactttcatatgtattaatttaaattttgcaatttgttgaggttttacaagagatacagcaagtctaactctctgttccattaaacccttataataaaatccttctgtaataataaagtttcaaaagaaaatgtttatttgttctcattaaatgtattttagcaaactcagctcttccctattgggaagagttatgcaaattctcctataagcaaaacaaagcatgtctttgagtaacaatgacctggaaatacccaaaattccaagttctcgatttcacatgccttcaagactgaacaccgactaaggttttcatactattagccaatgctgtagacagaagcattttgataggaatagagcaaataagataatggccctgaggaatggcatgtcattattaaagatcatatggggaaaatgaaaccctccccaaaatacaagaagttctgggaggagacattgtcttcagactacaatgtccagtttctcccctagactcaggcttcctttggagattaaggcccctcagagatcaacagaccaacatttttctcttcctcaagcaacactcctagggcctggcttctgtctgatcaaggcaccacacaacccagaaaggagctgatggggcagaacgaactttaagtatgagaaaagttcagcccaagtaaaataaaaactcaatcacattcaattccagagtagtttcaagtttcacatcgtaaccattttcgccc

SEQ ID NO: 126361 - protein, 366 aa, Artificial Sequence
  derived and/or modified sequence
MVLHLLLFLLLTPQGGHSCQGLELARELVLAKVRALFLDALGPPAVTREGGDPGVRRLPRRHALGGFTHRGSEPEEEEDVSQAILFPATDASCEDKSAARGLAQEAEEGLFRYMFRPSQHTRSRQVTSAQLWFHTGLDRQGTAASNSSEPLLGLLALSPGGPVAVPMSLGHAPPHWAVLHLATSALSLLTHPVLVLLLRCPLCTCSARPEATPFLVAHTRTRPPSGGERARRSTPLMSWPWSPSALRLLQRPPEEPAAHANCHRVALNISFQELGWERWIVYPPSFIFHYCHGGCGLHIPPNLSLPVPGAPPTPAQPYSLLPGAQPCCAALPGTMRPLHVRTTSDGGYSFKYETVPNLLTQHCACI

SEQ ID NO: 126362 - DNA, 1101 bp, Artificial Sequence
  derived and/or modified sequence
atggtgctccatctcctcctgttcctgctcctgactcctcagggcggacactcgtgccaggggctcgaattggcacgagagctagtcctagccaaagtgcgggccctgtttcttgacgctttaggacctcccgctgttacccgggagggaggtgatcctggagtcaggaggctgcccagacgtcacgctctgggtggctttacacatcggggatcagaacccgaagaggaagaagacgtgtcccaggcgatcctatttccggccacagatgctagctgcgaagataaaagcgccgcgagagggctggcccaagaagctgaagagggccttttcaggtacatgttcagaccttcccagcacacacgcagccgacaggtgacaagtgctcagctatggttccacacgggactggaccggcagggaaccgccgcatcgaattcgagtgaacctctgctcggactcctcgccctttctcctggcggccccgtggctgtccccatgagtctgggccatgctcctcctcattgggctgtgctgcatctggccactagcgccctgtctctgttgactcaccctgtgcttgtgctgttgctgaggtgccccctgtgtacttgctcagcccggccagaagcaacgccctttctggtcgcgcataccagaacaagacctcccagcgggggcgaacgcgccaggcgcagtaccccactaatgagctggccttggagcccaagtgccctccggcttctgcagaggccccctgaggaacctgcggcacacgccaactgccaccgtgttgctctaaatatttcttttcaggaattgggctgggaaagatggattgtgtatcccccctccttcattttccattattgccacggcggttgcggactgcatattcctccgaatctttctttaccagttccaggagccccacctacacccgcacagccatattccctgctgcccggcgcccaaccttgttgtgcagcccttccaggtaccatgaggccccttcacgttagaaccacctctgatggcggctattccttcaagtacgagactgttcctaatctgctcactcagcattgtgcctgcatctag

SEQ ID NO: 126363 - DNA, 1468 bp, Artificial Sequence
  derived and/or modified sequence
gccacgggcaggggcaactcggactgtggggcgtggaaaggactggggaagactggatgagaagggtagaagagggtgggtgtgggatggggaggggagagtggaaaggccctgggcagaccctggcagaaggggcacggggcagggtgtgagttccccactagcagggccaggtgagctatggtgctgcacctactgctcttcttgctgctgaccccacagggtgggcacagctgccaggggctggagctggcccgggaacttgttctggccaaggtgagggccctgttcttggatgccttggggccccccgcggtgaccagggaaggtggggaccctggagtcaggcggctgccccgaagacatgccctggggggcttcacacacaggggctctgagcccgaggaagaggaggatgtctcccaagccatccttttcccagccacagatgccagctgtgaggacaagtcagctgccagagggctggcccaggaggctgaggagggcctcttcagatacatgttccggccatcccagcatacacgcagccgccaggtgacttcagcccagctgtggttccacaccgggctggacaggcagggcacagcagcctccaatagctctgagcccctgctaggcctgctggcactgtcaccgggaggacccgtggctgtgcccatgtctttgggccatgctccccctcactgggccgtgctgcacctggccacctctgctctctctctgctgacccaccccgtcctggtgctgctgctgcgctgtcccctctgtacctgctcagcccggcctgaggccacgcccttcctggtggcccacactcggaccagaccacccagtggaggggagagagcccgacgctcaactcccctgatgtcctggccttggtctccctctgctctgcgcctgctgcagaggcctccggaggaaccggctgcccatgccaactgccacagagtagcactgaacatctccttccaggagctgggctgggaacggtggatcgtgtaccctcccagtttcatcttccactactgtcatggtggttgtgggctgcacatcccaccaaacctgtcccttccagtccctggggctccccctaccccagcccagccctactccttgctgccaggggcccagccctgctgtgctgctctcccagggaccatgaggcccctacatgtccgcaccacctcggatggaggttactctttcaagtatgagacagtgcccaaccttctcacgcagcactgtgcttgtatctaagggtggggggtcttccttcttaatcccatggctggtggccacgcccccaccatcatcagctgggaggaaaggcagagttgggaaatagatggctcccactcctccctcctttcacttctctgcctatgggctaccctccccaccccacttctatctcaataaagaacacagtgcatatgacttgaca

SEQ ID NO: 126364 - DNA, 1101 bp, Artificial Sequence
  derived and/or modified sequence
atggtgctgcacctgctgctcttcctgctgctgaccccccagggcggccacagctgccagggcctggagctggcccgggagctggtgctggccaaggtgcgggccctcttcctggatgccctgggccccccagctgtgacccgggagggcggggaccccggggtgcggcggctgcccaggagacatgccctgggcggcttcacccaccggggcagcgagcctgaggaggaggaggatgtgtcccaggccatcctcttccctgccacagatgccagctgtgaggacaagtctgctgcccggggcctggcccaggaggccgaggagggcctcttccgctacatgttccggcccagccagcacaccaggagccggcaggtgaccagcgcccagctgtggttccacacaggcctggaccggcagggcacagctgccagcaacagcagcgagcccctgctgggcctgctggccctgagccctgggggccctgtggccgtgcccatgagcctgggccacgccccaccccactgggccgtgctgcacctggccaccagcgccctgagcctgctgacccaccctgtgctggtgctgctgctgcgctgccccctgtgcacctgcagcgcccggcctgaggccacccccttcctggtggcccacaccaggaccaggcctccttctggaggagagcgggcccggcgcagcacccccctgatgtcctggccctggagccccagcgccctgcggctgctgcagaggcctcctgaggagcctgctgcccacgccaactgccaccgggtggccctgaacatctccttccaggagctgggctgggagcgctggatcgtgtacccacccagcttcatcttccactactgccacggcggctgcggcctgcacatcccccccaacctgagcctgcctgtgcctggggccccacccaccccagcccagccctacagcctgctgcccggggcccagccctgctgtgccgccctgcccggcaccatgaggcccctgcacgtgaggaccaccagtgatggcggctacagcttcaagtatgagaccgtgcccaacctgctgacccagcactgtgcctgcatctag

SEQ ID NO: 126365 - DNA, 1101 bp, Artificial Sequence
  derived and/or modified sequence
atggtgctgcacctgctgctgttcctgctgctgaccccccagggcggccacagctgccagggcctagagctcgcgcgggagttagtacttgcaaaggtgcgggctcttttcctggacgcactcggcccgccggctgttacccgggaaggtggggatccaggagtaagaaggctcccgcggcgacacgccctcggtggcttcacccatagagggtctgaacccgaagaggaagaagatgtgtcacaggctattctcttcccagccactgatgcaagttgcgaggataagtcggcagcacgcggcctcgcccaggaggctgaagaagggctctttagatatatgtttagaccgtctcagcataccagatcccgccaggtaacctctgctcagttatggttccatacaggcctggaccgacaggggaccgcggcgtccaactcttctgagccgctgctcggtctcttggcactcagccctggcggccccgttgcagtgccaatgagtttgggtcacgctccacctcactgggctgttctccatcttgcgactagcgccctgagccttctcacccatccagtactggtactcctccttagatgtcctctctgcacatgcagcgcccggcccgaagccacacccttcctcgtggcacatactcgcacccgaccacctagcggcggagagcgagcccgtagatctacaccattaatgtcctggccgtggagtcccagtgccctcagactgcttcaaaggcctcctgaggagcctgctgcccatgctaactgccatagagtggctctcaacatttcctttcaagagctggggtgggagcgctggatagtctatcccccatcctttattttccactactgccacggtggctgtggattacacattccacctaatttgtctcttccggtccccggcgccccgcccacaccggcacagccctactccttactgccgggggcgcagccttgctgtgcggcactgcctggcaccatgcgcccactgcacgtacgcaccacttcagatggaggctatagctttaagtacgagaccgtccccaatcttcttactcagcattgtgcttgtatttag

SEQ ID NO: 126366 - DNA, 1101 bp, Artificial Sequence
  derived and/or modified sequence
atggtcctacacctcttgctgtttcttctcctcacgcctcagggcggtcactcctgtcagggcctggagctcgccagggagctggttctggccaaggtgcgcgcattgttcctagacgcccttggacccccagcagtcacccgagaaggtggtgacccgggtgttcgcagacttccaaggagacacgccctgggcggtttcactcataggggctccgaaccggaggaagaggaggacgtgtctcaggctatcctctttccggctacggacgctagctgtgaagataagagcgcggctaggggactggcccaagaggccgaggagggtctcttcagatacatgttccgccctagccagcacaccaggtctaggcaggttacatccgcgcagttatggttccatactgggctggataggcaaggcaccgccgctagcaactcctctgaaccccttcttggcctacttgccctcagccccggaggacccgtcgctgtgcctatgtcacttggtcacgccccaccacactgggccgtcttgcatctagccacatccgccctctctcttctgacccatcccgtgctggtgttgctgcttaggtgtcctttatgtacttgttcagccagacccgaggcaacaccattcctggttgcccatacccgtacacggcctcctagtggaggtgagcgggctagaagatccacccccctgatgtcttggccgtggtcccccagcgccctccgattgctgcagaggccgcctgaggagcccgctgcacacgcgaactgtcaccgtgtcgccttgaacatcagtttccaggaactcggatgggagagatggatcgtttacccaccttcctttatttttcactactgccatggcggttgcgggctccacattcctcctaacttaagtcttccggtgcctggtgctcctcccactccggcacagccctacagtttgcttccgggagcgcaaccctgctgcgcggcactccccggtaccatgcggcctttgcacgtccggacaacatccgacggcggttactcattcaaatatgagactgtgccaaatcttctcactcagcactgtgcttgtatatag

SEQ ID NO: 126367 - DNA, 1101 bp, Artificial Sequence
  derived and/or modified sequence
atggtgctgcacctgctgctgttcctgctgctgaccccccagggcggccacagctgccagggcctggagctggccagagagctggtgctggccaaggtgagagccctgttcctggacgccctgggcccccccgccgtgaccagagagggcggcgaccccggcgtgagaagactgcccagaagacacgccctgggcggcttcacccacagaggcagcgagcccgaggaggaggaggacgtgagccaggccatcctgttccccgccaccgacgccagctgcgaggacaagagcgccgccagaggcctggcccaggaggccgaggagggcctgttcagatacatgttcagacccagccagcacaccagaagcagacaggtgaccagcgcccagctgtggttccacaccggcctggacagacagggcaccgccgccagcaacagcagcgagcccctgctgggcctgctggccctgagccccggcggccccgtggccgtgcccatgagcctgggccacgcccccccccactgggccgtgctgcacctggccaccagcgccctgagcctgctgacccaccccgtgctggtgctgctgctgagatgccccctgtgcacctgcagcgccagacccgaggccacccccttcctggtggcccacaccagaaccagaccccccagcggcggcgagagagccagaagaagcacccccctgatgagctggccctggagccccagcgccctgagactgctgcagagaccccccgaggagcccgccgcccacgccaactgccacagagtggccctgaacatcagcttccaggagctgggctgggagagatggatcgtgtacccccccagcttcatcttccactactgccacggcggctgcggcctgcacatcccccccaacctgagcctgcccgtgcccggcgccccccccacccccgcccagccctacagcctgctgcccggcgcccagccctgctgcgccgccctgcccggcaccatgagacccctgcacgtgagaaccaccagcgacggcggctacagcttcaagtacgagaccgtgcccaacctgctgacccagcactgcgcctgcatctag

SEQ ID NO: 126368 - protein, 426 aa, Artificial Sequence
  derived and/or modified sequence
MPLLWLRGFLLASCWIIVRSSPTPGSEGHSAAPDCPSCALAALPKDVPNSQPEMVEAVKKHILNMLHLKKRPDVTQPVPKAALLNAIRKLHVGKVGENGYVEIEDDIGRRAEMNELMEQTSEIITFAESGTARKTLHFEISKEGSDLSVVERAEVWLFLKVPKANRTRTKVTIRLFQQQKHPQGSLDTGEEAEEVGLKGERSELLLSEKVVDARKSTWHVFPVSSSIQRLLDQGKSSLDVRIACEQCQESGASLVLLGKKKKKEEEGEGKKKGGGEGGAGADEEKEQSHRPFLMLQARQSEDHPHRRRRRGLECDGKVNICCKKQFFVSFKDIGWNDWIIAPSGYHANYCEGECPSHIAGTSGSSLSFHSTVINHYRMRGHSPFANLKSCCVPTKLRPMSMLYYDDGQNIIKKDIQNMIVEECGCS

SEQ ID NO: 126369 - DNA, 1281 bp, Artificial Sequence
  derived and/or modified sequence
atgccccttctctggctgagaggttttctcttggcatcctgctggattattgtgcgctcttcccccacacccgggagcgagggccattccgcggctcctgattgcccctcttgtgccctggcagctttgccaaaagatgtgccaaactctcagccagagatggtggaggcggtgaagaagcacatcctgaacatgctgcatctcaagaagagacctgatgtcacccagcctgttccaaaggccgctctcctcaacgcaatccgcaaattgcacgtgggaaaagtcggcgagaacggctatgtggagatcgaagacgatattggtcgaagagccgagatgaacgagctgatggaacaaacgtccgagattattactttcgccgaaagtggaaccgctcgaaaaacactgcatttcgaaatctcaaaggagggcagcgacctaagcgtcgtggagcgggccgaggtctggctgtttctcaaagtgcctaaagccaaccggactcggacaaaagtaaccataaggctgttccagcagcaaaagcatccccaaggatctctggacaccggagaggaggccgaggaggtcggcctaaagggagaaaggtccgagttgttactgagtgaaaaggttgtggatgccaggaagagtacctggcatgtcttccctgtatcttctagcattcaacgacttttagatcagggaaaatctagcctagacgtcaggatcgcctgtgagcagtgtcaggaaagtggggctagcctggtgctcctgggcaaaaagaagaagaaagaagaagagggcgaagggaagaagaagggagggggtgaaggcggggccggcgctgatgaggagaaagaacagagccataggcctttcttgatgctgcaggcacgacagagcgaggatcaccctcaccgcaggagacggaggggactggaatgcgacggcaaggtgaatatctgctgcaaaaaacagttcttcgtgagttttaaagatattgggtggaacgactggatcatcgcgcccagtggttaccatgcaaattactgtgaaggtgagtgtccatcgcacatagccggcaccagtgggtctagcttgtcatttcattccactgtgatcaatcactatcggatgcgggggcactctccgttcgctaacctgaagtcttgttgcgtgcccacgaagctgcggcccatgtctatgttgtattatgacgatggacagaatatcattaaaaaggacattcaaaacatgatcgtagaagagtgtggctgctcttag

SEQ ID NO: 126370 - DNA, 1281 bp, Artificial Sequence
  derived and/or modified sequence
atgcctctgctgtggctccgcggctttttactagccagctgctggattatcgtacgatcttctccaaccccaggctccgaaggacactcagctgcccctgactgtcccagctgtgctctcgctgccttgccgaaggacgtccccaacagccagcccgagatggtagaggctgtgaagaaacacatcctaaacatgctccatcttaaaaagaggcctgatgtgacacaaccagtaccaaaggccgccttacttaacgccattcgaaagctccatgtaggcaaggttggggagaatgggtatgtagagatcgaagacgacataggtcggcgggctgagatgaacgagttgatggagcagacttccgagataattacctttgctgaaagcggcacagcccggaagaccctgcattttgaaatttccaaggaaggcagcgatctgagcgtagttgaacgggcggaggtctggctgtttctcaaagttcccaaggctaatcgtactaggactaaagtcactattagactttttcaacagcagaagcaccctcagggctccctcgacacgggagaagaggccgaagaggtgggacttaagggtgagagatcggaactgctgctcagcgaaaaggttgttgatgcccggaaaagtacatggcacgtgttcccagtgtcatctagcattcagcggcttctcgatcaaggtaagtcgtctctcgacgtgaggatcgcctgtgaacagtgtcaggaatccggggcaagcctcgttctcctcggaaagaagaaaaaaaaagaagaagagggggaagggaaaaaaaagggcggtggcgagggcggcgccggcgccgatgaggagaaggaacaatcccaccgaccattcttgatgctgcaggctaggcagtccgaagatcatccccaccgtcggcgtcggagggggctggagtgtgatggtaaagtcaacatatgttgtaagaagcaattcttcgtaagtttcaaggacataggctggaacgattggatcatcgcacccagtggataccatgctaattactgcgagggcgaatgcccttctcacatagccgggaccagtggaagtagtctctctttccattccactgtgatcaaccactatcggatgcgggggcactcgccattcgccaaccttaaatcatgctgtgtgcctaccaagttacgaccgatgagcatgctgtactatgacgatggacagaacataatcaagaaagacattcagaatatgattgtggaagagtgcggctgtagctag

SEQ ID NO: 126371 - DNA, 6064 bp, Artificial Sequence
  derived and/or modified sequence
agtacagtataaaacttcacagtgccaataccatgaagaggagctcagacagctcttaccacatgatacaagagccggctggtggaagagtggggaccagaaagagaatttgctgaagaggagaaggaaaaaaaaaacaccaaaaaaaaaaataaaaaaatccacacacacaaaaaaacctgcgcgtgaggggggaggaaaagcagggccttttaaaaaggcaatcacaacaacttttgctgccaggatgcccttgctttggctgagaggatttctgttggcaagttgctggattatagtgaggagttcccccaccccaggatccgaggggcacagcgcggcccccgactgtccgtcctgtgcgctggccgccctcccaaaggatgtacccaactctcagccagagatggtggaggccgtcaagaagcacattttaaacatgctgcacttgaagaagagacccgatgtcacccagccggtacccaaggcggcgcttctgaacgcgatcagaaagcttcatgtgggcaaagtcggggagaacgggtatgtggagatagaggatgacattggaaggagggcagaaatgaatgaacttatggagcagacctcggagatcatcacgtttgccgagtcaggaacagccaggaagacgctgcacttcgagatttccaaggaaggcagtgacctgtcagtggtggagcgtgcagaagtctggctcttcctaaaagtccccaaggccaacaggaccaggaccaaagtcaccatccgcctcttccagcagcagaagcacccgcagggcagcttggacacaggggaagaggccgaggaagtgggcttaaagggggagaggagtgaactgttgctctctgaaaaagtagtagacgctcggaagagcacctggcatgtcttccctgtctccagcagcatccagcggttgctggaccagggcaagagctccctggacgttcggattgcctgtgagcagtgccaggagagtggcgccagcttggttctcctgggcaagaagaagaagaaagaagaggagggggaagggaaaaagaagggcggaggtgaaggtggggcaggagcagatgaggaaaaggagcagtcgcacagacctttcctcatgctgcaggcccggcagtctgaagaccaccctcatcgccggcgtcggcggggcttggagtgtgatggcaaggtcaacatctgctgtaagaaacagttctttgtcagtttcaaggacatcggctggaatgactggatcattgctccctctggctatcatgccaactactgcgagggtgagtgcccgagccatatagcaggcacgtccgggtcctcactgtccttccactcaacagtcatcaaccactaccgcatgcggggccatagcccctttgccaacctcaaatcgtgctgtgtgcccaccaagctgagacccatgtccatgttgtactatgatgatggtcaaaacatcatcaaaaaggacattcagaacatgatcgtggaggagtgtgggtgctcatagagttgcccagcccagggggaaagggagcaagagttgtccagagaagacagtggcaaaatgaagaaatttttaaggtttctgagttaaccagaaaaatagaaattaaaaacaaaacaaaaaaaaaaacaaaaaaaaacaaaagtaaattaaaaacaaaacctgatgaaacagatgaaggaagatgtggaaaaaatccttagccagggctcagagatgaagcagtgaaagagacaggaattgggagggaaagggagaatggtgtaccctttatttcttctgaaatcacactgatgacatcagttgtttaaacggggtattgtcctttccccccttgaggttcccttgtgagccttgaatcaaccaatctagtctgcagtagtgtggactagaacaacccaaatagcatctagaaagccatgagtttgaaagggcccatcacaggcactttcctacccaattacccaggtcataaggtatgtctgtgtgacacttatctctgtgtatatcagcatacacacacacacacacacacacacacacacacacaggcatttccacacattacatatatacacatactggtaaaagaacaatcgtgtgcaggtggtcacacttcctttttctgtaccacttttgcaacaaaacaaaacaaacaacattaaaaaattgagaacaagtatggaaagaatgaaagatcaaggaaaaaagaataccaagttacatttcgttaaggtgcttatgatcttagaactatgcaacctaataggtttgaaactgtttacctgagagagaacaaaaagagagacttttttgtattggaagtaatctgattaatttttattttcttcaaggagagatacttgaaaggaatatgtttgtccatctgttggatccaaacatttctatattttgtaaatgttgttgttgttttttttttaatcgtttactatttgcactacaatggtgtttgacctgtctaatccttatttaacaagtattttctttggttgggggtgggggtggggtttaagagctgcacttaatgtgagctataaaagaactgctacagcacacaaaatagctatttttattattataattataattattattattattttgtaccttaaaaaatagacacatacaccaaagacatttgtgtgagcctttaaacagtctgtctgtggttggtatcattcaccatcaatgagtcaggggttgggattcaaggttgagtagtgtggattgtgttcaggcttaaaagacctgagaagtttggtttttgactccttttacatccatgaaacaggacatttcatactggatgtacagtagttgtacactgttggatatcaagttcaatcaaattcatggaactacatgcttgtatgtgtatatatacattgcttgtgcatatgcatatctgtatgtatatatacatgtattgtaccatgtccatacacattttaagcacttcaggctgtcattttttaatgttcttaaagcaatgaatgtttgtgtgcaaaacacagtatttttaagaaggataggctatagtttttgcttttactctgaactaggtgggcgcatttcaaaaattcggatgggaaaaagcctggaaattccagtgaatattcagcaaggccctctttcattgtacagggatcaaatttcctcctcttttttgtgccccctcccacttctacaagttatcccctgtggggaaaacaggatgataatcaaaactctgggctgatgtttttccaacttagtgtctattggaatcaatcttaaatcagaagctttttcagaaaaataatatttaggccagaattagagttgagtgtattttttaaaaatgattaaggcttggttgtgagaaatattacctgtaccagctgggaaaaataatgtcatcactaactaaaagataattaatttgagagaaagtgttaagagagggagagtaaggaagagaacagttaagaggaggcagaggtgagggcagtagtaaaaatctctaaaattttaatttacagccaaaattcttcatgtgtaaatttgtattgattcagatgcagaaatgaaaaaaaaacacctttgttttataaatatcaaagtacatgcttaaagccaagtttttatctagtttattctagtacttagcttgcctggaatagctaataaattattcatgtatgtgcttttgaaaatccagagccctatttttacacacttgtgtgaagttggcaaacattttgaaaaatggaaaaaagtttctaataattgggaacaattacattaattaatattttgtaaaatattgaagcttttagccctatgtcaatttgtagattaaaataaattaattataggaaaggaagataacagtgagaaaccaaacattacaaaaggtggtttagctctccttgaaaaatatactaagttggtatactataacacttggctatatgtaggcaatgtcactactgggcaaatacacttactgtgttctagaggcagccctttcttatgcagaaaatacaatacgcactgcatgagaagcttgagagtggattctaatccaggtctgtcgaccttggatatcatgcatgtgggaaggtgggtgtggtgagaaaagttttaaggcaagagtagatggccatgttcaactttacaaaatttcttggaaaactggcagtattttgaactgcatcttctttggtaccggaacctgcagaaacagtgtgagaaattaagtcctggttcactgcgcagtagcaaagatggtcaaggccatggaaaaagcagaaatttaccaagaaagctgatacccatgtatagttcccactcatctcaaatacatctgctatctttttaagctaagtcctagacatatcggggataacatgggggttgattagtgaccacagttatcagaagcagagaaatgtaattccatattttatttgaaacttattccatattttaattggatattgagtgattgggttatcaaacacccacaaactttaattttgttaaatttatatggctttgaaatagaagtataagttgctaccattttttgataacattgaaagatagtattttaccatctttaatcatcttggaaaatacaagtcctgtgaacaaccactctttcacctagcagcatgaggccaaaagtaaaggctttaaattataacatatgggattcttagtagtatgtttttttcttgaaactcagtggctctatctaaccttactatctcctcactctttctctaagactaaactctaggctcttaaaaatctgcccacaccaatcttagaagctctgaaaagaatttgtctttaaatatcttttaatagtaacatgtattttatggaccaaattgacattttcgactattttttccaaaaaagtcaggtgaatttcagcacactgagttgggaatttcttatcccagaagaccaaccaatttcatatttatttaagattgattccatactccgttttcaaggagaatccctgcagtctccttaaaggtagaacaaatactttctatttttttttcaccattgtgggattggactttaagaggtgactctaaaaaaacagagaacaaatatgtctcagttgtattaagcacggacccatattatcatattcacttaaaaaaatgatttcctgtgcaccttttggcaacttctcttttcaatgtagggaaaaacttagtcaccctgaaaacccacaaaataaataaaacttgtagatgtgggcagaaggtttgggggtggacattgtatgtgtttaaattaaaccctgtatcactgagaagctgttgtatgggtcagagaaaatgaatgcttagaagctgttcacatcttcaagagcagaagcaaaccacatgtctcagctatattattatttattttttatgcataaagtgaatcatttcttctgtattaatttccaaagggttttaccctctatttaaatgctttgaaaaacagtgcattgacaatgggttgatatttttctttaaaagaaaaatataattatgaaagccaagataatctgaagcctgttttattttaaaactttttatgttctgtggttgatgttgtttgtttgtttgtttctattttgttggttttttactttgttttttgttttgttttgttttgttttgcatactacatgcagttctttaaccaatgtctgtttggctaatgtaattaaagttgttaatttatatgagtgcatttcaactatgtcaatggtttcttaatatttattgtgtagaagtactggtaatttttttatttacaatatgtttaaagagataacagtttgatatgttttcatgtgtttatagcagaagttatttatttctatggcattccagcggatattttggtgtttgcgaggcatgcagtcaatattttgtacagttagtggacagtattcagcaacgcctgatagcttctttggccttatgttaaataaaaagacctgtttgggatgta

SEQ ID NO: 126372 - DNA, 1632 bp, Artificial Sequence
  derived and/or modified sequence
ctccctgacagccacaaacctacagcactgactgcattcagagaggaacctgcaaacaaaacttcacagaaaactttttgttcttgttccagagaatttgctgaagaggagaaggaaaaaaaaaacaccaaaaaaaaaaataaaaaaatccacacacacaaaaaaacctgcgcgtgaggggggaggaaaagcagggccttttaaaaaggcaatcacaacaacttttgctgccaggatgcccttgctttggctgagaggatttctgttggcaagttgctggattatagtgaggagttcccccaccccaggatccgaggggcacagcgcggcccccgactgtccgtcctgtgcgctggccgccctcccaaaggatgtacccaactctcagccagagatggtggaggccgtcaagaagcacattttaaacatgctgcacttgaagaagagacccgatgtcacccagccggtacccaaggcggcgcttctgaacgcgatcagaaagcttcatgtgggcaaagtcggggagaacgggtatgtggagatagaggatgacattggaaggagggcagaaatgaatgaacttatggagcagacctcggagatcatcacgtttgccgagtcaggaacagccaggaagacgctgcacttcgagatttccaaggaaggcagtgacctgtcagtggtggagcgtgcagaagtctggctcttcctaaaagtccccaaggccaacaggaccaggaccaaagtcaccatccgcctcttccagcagcagaagcacccgcagggcagcttggacacaggggaagaggccgaggaagtgggcttaaagggggagaggagtgaactgttgctctctgaaaaagtagtagacgctcggaagagcacctggcatgtcttccctgtctccagcagcatccagcggttgctggaccagggcaagagctccctggacgttcggattgcctgtgagcagtgccaggagagtggcgccagcttggttctcctgggcaagaagaagaagaaagaagaggagggggaagggaaaaagaagggcggaggtgaaggtggggcaggagcagatgaggaaaaggagcagtcgcacagacctttcctcatgctgcaggcccggcagtctgaagaccaccctcatcgccggcgtcggcggggcttggagtgtgatggcaaggtcaacatctgctgtaagaaacagttctttgtcagtttcaaggacatcggctggaatgactggatcattgctccctctggctatcatgccaactactgcgagggtgagtgcccgagccatatagcaggcacgtccgggtcctcactgtccttccactcaacagtcatcaaccactaccgcatgcggggccatagcccctttgccaacctcaaatcgtgctgtgtgcccaccaagctgagacccatgtccatgttgtactatgatgatggtcaaaacatcatcaaaaaggacattcagaacatgatcgtggaggagtgtgggtgctcatagagttgcccagcccagggggaaagggagcaagagttgtccagagaagacagtggcaaaatgaagaaatttttaaggtttctgagttaaccagaaaaatagaaattaaaaacaaaaca

SEQ ID NO: 126373 - DNA, 1281 bp, Artificial Sequence
  derived and/or modified sequence
atgcccctgctgtggctgcggggcttcctgctggccagctgctggatcatcgtgcgcagcagccccaccccaggcagcgagggccacagcgctgccccagactgccccagctgtgccctggccgccctgcccaaggatgtgcccaacagccagcctgagatggtggaggccgtgaagaagcacatcctgaacatgctgcacctgaagaagaggccagatgtgacccagcctgtgcccaaggccgccctgctgaatgccatcaggaagctgcacgtgggcaaggtgggagaaaatggctacgtggagattgaagatgacattggaagaagagctgagatgaatgagctgatggagcagaccagcgagatcatcacctttgctgagagcggcacagccaggaagaccctgcactttgagatcagcaaggagggcagtgacctgtctgtggtggagagagctgaggtgtggctgttcctgaaggtgcccaaggccaacagaaccaggaccaaggtgaccatccgcctcttccagcagcagaagcacccccagggcagcctggacaccggggaggaggccgaggaggtgggcctgaagggggagaggtctgagctgctgctgtctgagaaggtggtggatgccaggaagagcacctggcacgtgtttcctgtgagcagcagcatccagaggctgctggaccagggcaagagcagcctggatgtgcgcatcgcctgtgagcagtgccaggagagcggggccagcctggtgctgctgggcaagaagaagaagaaggaggaggagggggagggcaagaagaagggcggcggggagggcggggccggggctgatgaggagaaggagcagagccaccggcccttcctgatgctgcaggcccggcagagcgaggaccacccccacagaagaagaagaagaggcctggagtgtgatggcaaggtgaacatctgctgcaagaagcagttctttgtgtccttcaaggacatcggctggaatgactggatcatcgcccccagcggctaccacgccaactactgtgaaggagaatgtcccagccacatcgccggcaccagcggcagcagcctgtccttccacagcaccgtcatcaaccactacaggatgaggggccacagcccctttgccaacctgaagagctgctgcgtgcccaccaagctgcggcccatgtccatgctgtactatgatgatggccagaacatcatcaagaaggacatccagaacatgattgtggaggagtgtggctgcagctag

SEQ ID NO: 126374 - DNA, 1281 bp, Artificial Sequence
  derived and/or modified sequence
atgcccctgctgtggctgcggggcttcctgctggccagctgctggataattgttcgctctagccctaccccaggaagtgagggccacagtgctgcccccgactgcccttcctgtgccttagcggctctgccgaaggacgtgcctaatagccagcccgagatggtcgaggccgtgaagaagcatatcctcaacatgctacatttgaagaagcgtcctgacgttactcaacccgtgccaaaggctgcactgcttaacgccattcgtaaactgcatgtgggcaaggtgggcgaaaacggatatgtggaaatagaggacgacattggccgtcgggctgagatgaacgaactgatggaacagacatctgagataataacctttgcagaatccggcacagccaggaagaccctgcactttgagatctccaaagaagggtccgaccttagcgtggtcgaaagggcagaagtctggctctttctcaaagtgccaaaggctaacaggacgcgtaccaaggttacaattcggctgttccaacagcagaagcacccacagggatcgctggatacgggggaggaggcggaagaggtgggattgaaaggcgagaggtcggagcttctactgagcgagaaggtcgtggatgctagaaaaagtacctggcacgtttttccagtttcctcttcaatccagaggcttttggaccaggggaaaagctcacttgatgtgcgtatcgcctgcgagcagtgtcaggaatccggtgcttcactagtgcttcttggtaaaaagaaaaaaaaggaggaagagggggagggtaagaaaaaaggaggaggagagggcggggctggagcagacgaggagaaggaacaatcccatcgcccatttttgatgctgcaggcccgccagagtgaggaccatccacacagaagacggcgccggggcctggaatgtgacggtaaggttaatatctgttgcaagaaacaatttttcgtgagtttcaaagatatcggctggaatgattggatcatcgcccctagcgggtatcacgcaaattattgtgagggggaatgtcctagccatatagccggaacatccgggtcctccctctcatttcactcaaccgtgatcaatcactatcgaatgcgcggtcactcgccgtttgcaaacctgaagtcctgttgtgttcctactaagcttcgcccaatgtcaatgttatattacgacgacggtcagaacatcatcaaaaaagacatccagaatatgattgtggaggagtgcggttgctcttag

SEQ ID NO: 126375 - DNA, 1281 bp, Artificial Sequence
  derived and/or modified sequence
atgcccctgctgtggctgcggggcttcctgctggccagctgctggatcatagttagaagcagcccaacccctggcagtgagggccactccgcagcgcccgattgtcctagctgtgccttggccgcactccctaaagacgtgcccaattcccaacctgaaatggtggaggcagtcaagaagcatattctgaatatgctccaccttaagaaacggcctgacgtgacccaacctgttcccaaggcagctctcctgaacgccatccgcaaattgcatgtgggtaaagtgggtgaaaacggctacgtggaaatagaggacgacattggccggagggcggagatgaacgagcttatggaacagactagtgaaattatcacatttgccgagtctgggacagctagaaagaccctccatttcgagataagtaaagagggaagcgacctttccgttgtggagagggctgaggtgtggctattcctcaaggtgcccaaggccaataggacacgcaccaaggttactataaggcttttccagcagcagaagcacccccagggatcgctagatacaggtgaagaggcagaggaggtcggcctgaagggcgagaggagcgagctgctcctgtctgagaaggttgtggacgcacgcaaatcgacttggcacgtgttccccgtttcttcaagtattcagaggctcctggaccaaggcaagtcatcactggacgtccgaatcgcctgcgagcagtgtcaggagagcggagcttcgctcgtgctgcttggcaagaagaagaagaaggaggaggagggcgagggtaagaagaagggaggtggagaggggggagccggtgctgacgaagagaaggagcaatcccaccgccctttccttatgttgcaggctaggcagtctgaggatcatccacaccggcggagaaggcgcggtctggagtgcgacggcaaagtcaatatctgctgcaagaaacagtttttcgtatcgtttaaagacatagggtggaatgactggatcattgctcccagcggctatcatgccaattactgcgagggagaatgtcccagtcatattgcgggaacgtcaggaagcagcctctctttccatagcaccgtaattaaccactataggatgcggggtcatagcccttttgctaatctgaagtcctgctgtgtccccactaagctccgacccatgagcatgctctattacgacgacggccagaatatcattaagaaggacatccaaaacatgatcgtcgaagagtgcggttgtagctag

SEQ ID NO: 126376 - DNA, 1281 bp, Artificial Sequence
  derived and/or modified sequence
atgcccctactatggcttcgaggcttcttacttgcctcttgttggataatcgtgcgcagttcccctaccccgggttctgaagggcactccgccgctcccgactgccccagctgtgccctggccgctttgccgaaggatgtgcctaattcccaacctgaaatggtggaagccgttaagaaacatatcctgaacatgcttcacttaaagaagcgccctgacgtcacacaaccagtgccgaaggcagcattgctcaacgcaattagaaagctgcacgtcggcaaggtgggcgagaatggctacgtcgagatcgaggacgatatcggtcggagagcggaaatgaatgagctgatggaacagaccagcgaaatcattaccttcgctgaaagcggtacagctcggaaaaccctgcattttgagatctccaaggaggggtccgacctgagcgttgttgaacgagccgaggtatggctgtttcttaaagtacccaaggcaaacaggacgagaacgaaggtgacgattcgcttattccagcagcagaagcaccctcagggctcgcttgacacaggagaagaggctgaagaagtgggcctgaagggggaacgttcagagcttcttctttccgaaaaagtcgtcgacgcgaggaaaagtacctggcatgtgttcccggtctccagttccatacaaaggcttctcgaccagggtaagtcttccttagatgtaagaattgcttgtgaacaatgtcaggagtctggtgccagtttagtcctcctcgggaaaaaaaaaaaaaaagaagaggagggggaaggaaagaaaaagggagggggagaggggggtgcaggggctgacgaagagaaggagcagagccatcgcccattcctcatgctgcaggctaggcagtccgaggatcacccccacaggcgtagaagacgaggcctagaatgcgatgggaaagtaaacatctgctgtaaaaagcaattctttgtctctttcaaggatatcggctggaatgactggattattgctcccagcggctatcacgctaattactgtgagggcgaatgcccctcacacatcgccggaacctccggtagtagccttagtttccactcaaccgtgatcaatcactacagaatgcggggtcatagcccattcgccaaccttaagtcgtgttgtgtaccaaccaagctccgacctatgagtatgctgtattacgatgatggacagaatataattaaaaaagatattcagaacatgatagtcgaagagtgcggatgctcttag

SEQ ID NO: 126377 - DNA, 1281 bp, Artificial Sequence
  derived and/or modified sequence
atgcctctgctgtggctaagaggattcctcctcgccagctgctggataatcgtcaggtctagtccaacccccggtagcgaagggcacagtgccgctcctgattgtccgtcctgcgccctcgccgctctgcccaaagacgtccccaattctcagcctgaaatggtggaagctgtaaagaagcatattctgaatatgcttcacttaaagaaaaggcctgatgtgactcagccggtacctaaggccgcactgctgaacgccatccgcaagctccacgtgggtaaggtcggtgaaaacggctatgttgagattgaggatgatattggaaggagagcggagatgaatgagctcatggagcagacaagcgaaatcattaccttcgctgaatctggaacggctcggaagacgttacacttcgagatttccaaggagggatccgacctcagtgtagtcgagcgcgcagaagtttggctattcctgaaggtacccaaagccaaccggacacgcactaaagtcacgatcaggctgttccagcagcaaaagcacccacaaggatcactcgatactggagaggaagcggaagaagttgggttaaagggagaacgctctgaattacttctgtccgagaaagtggtggacgctcgcaaatcgacctggcacgtctttccggtgtcctctagcatacaaaggttactggatcaaggtaaaagctcccttgatgttcggattgcttgcgaacagtgccaagaatccggggcatccctggtgctgttgggcaaaaagaagaaaaaggaagaggaaggcgagggcaaaaagaagggcggtggtgagggaggggcaggcgctgatgaggaaaaggaacagtcccaccgtccattcctcatgctgcaggcacgccagagtgaggatcacccacacagacggcgaaggaggggcctggagtgtgacggaaaggtgaatatttgttgtaaaaagcagttcttcgtgagctttaaagatatcggatggaacgactggatcatcgcgcctagtggttaccacgccaactattgtgaaggcgaatgccctagccacattgctgggaccagtggctcaagtctgagtttccacagcaccgtgatcaaccactaccggatgcgaggtcactcacctttcgccaacctgaaatcttgctgcgtccccacaaaactgcggccaatgagcatgctctactatgatgatgggcaaaacataattaagaaagacatacagaatatgatcgttgaagagtgcggctgttcatag

SEQ ID NO: 126378 - DNA, 1281 bp, Artificial Sequence
  derived and/or modified sequence
atgcccctgctgtggctgagaggcttcctgctggccagctgctggatcatcgtgagaagcagccccacccccggcagcgagggccacagcgccgcccccgactgccccagctgcgccctggccgccctgcccaaggacgtgcccaacagccagcccgagatggtggaggccgtgaagaagcacatcctgaacatgctgcacctgaagaagagacccgacgtgacccagcccgtgcccaaggccgccctgctgaacgccatcagaaagctgcacgtgggcaaggtgggcgagaacggctacgtggagatcgaggacgacatcggcagaagagccgagatgaacgagctgatggagcagaccagcgagatcatcaccttcgccgagagcggcaccgccagaaagaccctgcacttcgagatcagcaaggagggcagcgacctgagcgtggtggagagagccgaggtgtggctgttcctgaaggtgcccaaggccaacagaaccagaaccaaggtgaccatcagactgttccagcagcagaagcacccccagggcagcctggacaccggcgaggaggccgaggaggtgggcctgaagggcgagagaagcgagctgctgctgagcgagaaggtggtggacgccagaaagagcacctggcacgtgttccccgtgagcagcagcatccagagactgctggaccagggcaagagcagcctggacgtgagaatcgcctgcgagcagtgccaggagagcggcgccagcctggtgctgctgggcaagaagaagaagaaggaggaggagggcgagggcaagaagaagggcggcggcgagggcggcgccggcgccgacgaggagaaggagcagagccacagacccttcctgatgctgcaggccagacagagcgaggaccacccccacagaagaagaagaagaggcctggagtgcgacggcaaggtgaacatctgctgcaagaagcagttcttcgtgagcttcaaggacatcggctggaacgactggatcatcgcccccagcggctaccacgccaactactgcgagggcgagtgccccagccacatcgccggcaccagcggcagcagcctgagcttccacagcaccgtgatcaaccactacagaatgagaggccacagccccttcgccaacctgaagagctgctgcgtgcccaccaagctgagacccatgagcatgctgtactacgacgacggccagaacatcatcaagaaggacatccagaacatgatcgtggaggagtgcggctgcagctag

SEQ ID NO: 126379 - protein, 407 aa, Artificial Sequence
  derived and/or modified sequence
MDGLPGRALGAACLLLLAAGWLGPEAWGSPTPPPTPAAPPPPPPPGSPGGSQDTCTSCGGFRRPEELGRVDGDFLEAVKRHILSRLQMRGRPNITHAVPKAAMVTALRKLHAGKVREDGRVEIPHLDGHASPGADGQERVSEIISFAETDGLASSRVRLYFFISNEGNQNLFVVQASLWLYLKLLPYVLEKGSRRKVRVKVYFQEQGHGDRWNMVEKRVDLKRSGWHTFPLTEAIQALFERGERRLNLDVQCDSCQELAVVPVFVDPGEESHRPFVVVQARLGDSRHRIRKRGLECDGRTNLCCRQQFFIDFRLIGWNDWIIAPTGYYGNYCEGSCPAYLAGVPGSASSFHTAVVNQYRMRGLNPGTVNSCCIPTKLSTMSMLYFDDEYNIVKRDVPNMIVEECGCA

SEQ ID NO: 126380 - DNA, 3218 bp, Artificial Sequence
  derived and/or modified sequence
actcggctcgcctcgcggcgggcgccctcgtcgccagcggcgcaccatggacgggctgcccggtcgggcgctgggggccgcctgccttctgctgctggcggccggctggctggggcctgaggcctggggctcacccacgcccccgccgacgcctgccgcgccgccgccacccccgccacccggatccccgggtggctcgcaggacacctgtacgtcgtgcggcggcttccggcggccagaggagctcggccgagtggacggcgacttcctggaggcggtgaagcggcacatcttgagccgcctgcagatgcggggccggcccaacatcacgcacgccgtgcctaaggccgccatggtcacggccctgcgcaagctgcacgcgggcaaggtgcgcgaggacggccgcgtggagatcccgcacctcgacggccacgccagcccgggcgccgacggccaggagcgcgtttccgaaatcatcagcttcgccgagacagatggcctcgcctcctcccgggtccgcctatacttcttcatctccaacgaaggcaaccagaacctgtttgtggtccaggccagcctgtggctttacctgaaactcctgccctacgtcctggagaagggcagccggcggaaggtgcgggtcaaagtgtacttccaggagcagggccacggtgacaggtggaacatggtggagaagagggtggacctcaagcgcagcggctggcataccttcccactcacggaggccatccaggccttgtttgagcggggcgagcggcgactcaacctagacgtgcagtgtgacagctgccaggagctggccgtggtgccggtgttcgtggacccaggcgaagagtcgcaccggccctttgtggtggtgcaggctcggctgggcgacagcaggcaccgcattcgcaagcgaggcctggagtgcgatggccggaccaacctctgttgcaggcaacagttcttcattgacttccgcctcatcggctggaacgactggatcatagcacccaccggctactacgggaactactgtgagggcagctgcccagcctacctggcaggggtccccggctctgcctcctccttccacacggctgtggtgaaccagtaccgcatgcggggtctgaaccccggcacggtgaactcctgctgcattcccaccaagctgagcaccatgtccatgctgtacttcgatgatgagtacaacatcgtcaagcgggacgtgcccaacatgattgtggaggagtgcggctgcgcctgacagtgcaaggcaggggcacggtggtggggcacggagggcagtcccgggtgggcttcttccagcccccgcgggaacgggggtacacggtgggctgagtacagtcattctgttgggctgtggagatagtgccagggtgcggcctgagatatttttctacagcttcatagagcaaccagtcaaaaccagagcgagaaccctcaactgacatgaaatactttaaaatgcacacgtagccacgcacagccagacgcatcctgccacccacacagcagcctccaggataccagcaaatggatgcggtgacaaatggcagcttagctacaaatgcctgtcagtcggagagaatggggtgagcagccaccattcccaccagctggcccggccactctgaattgcgccttccgagcacacataaaagcacaaagacagagacgcagagagagagagagagccacggagaggaaaagcagatgcaggggtggggagcgcagctcggcggaggctgcgtgtgccccgtggcttttaccaggcctgctctgcctggctcgatgtctgcttcttccccagcctgggatccttcgtgcttcaaggcctggggagcctgtccttccatgcccttgtcgagggaaagagacccagaaaggacacaacccgtcagagacctgggagcaggggcaatgaccgtttgactgtttgtggcttgggcctctgacatgacttatgtgtgtgtgtgtttttggggtggggagggagggagagaagagggggctaaatttgatgctttaactgatctccaacagttgacaggtcatccttgccagttgtataactgaaaaaggacttttctaccaggtatgaccttttaagtgaaaatctgaattgttctaaatggaaagaaaaaaagttgcaatctgtgcccttcattggggacattcctctaggactggtttggggacgggtgggaatgacccctaggcaaggggatgagaccgcaggaggaaatggcggggaggaggcattcttgaactgctgaggatggggggtgtcccctcagcggaggccaagggaggggagcagcctagttggtcttggagagatggggaaggctttcagctgatttgcagaagttgcccatgtgggccccagccatcagggctggccgtggacgtggcccctgcccactcacctgcccgcctgcccgcccgcccgcatagcacttgcagacctgcctgaacgcacatgacatagcacttgccgatctgcgtgtgtccagaagtggcccttggccgagcgccgaactcgctcgccctctagatgtccaagtgccacgtgaactatgcaatttaaagggttgacccacactagacgaaactggactcgtacgactctttttatattttttatacttgaaatgaaatcctttgcttcttttttaagcgaatgattgcttttaatgtttgcactgatttagttgcatgattagtcagaaactgccatttgaaaaaaagttatttttatagcagcaaaaaaaaaaaaaaaagaatacagttaaatgtattatacataattttggaaccaaagaggccaacagatcagttttaattttattagacggtgaggccatctgagatgaggtggacgttctgagcagtcccttgagtggcctgccaacgtttcagggtatgaatggattttgtttattcggtttgatgtgtcttttccatccttacacacccagaaggtagagtaaaaatgactatgatagaatgcaggtgtgtatccttaaatcctcatctttatgtttatttaataaagctccccttagattctgtttcataataatttaaaaccaaacaattttcccatagacttgctgttaaagtattgtacgtttgtgtacagtttaagaaaataaaagattgagtgccacgggaaaaaaaaaaaaaaa

SEQ ID NO: 126381 - DNA, 1224 bp, Artificial Sequence
  derived and/or modified sequence
atggacgggcttcccgggcgcgccctgggcgctgcatgcctcctgctcttagccgccggatggctgggtcctgaggcctggggtagtccaactccccctccaacacctgcagctcctccccctccccctccccccggtagtcccggcggctcacaggacacctgcacttcctgtggaggcttccggcgcccggaagagctggggagggttgacggggactttttagaggcagtcaagaggcacatcctgagtcgccttcaaatgaggggaaggccaaacatcacgcacgcagtccctaaagctgcaatggtgaccgccctccgcaaactgcacgcaggcaaagtgcgagaagatggcagggtggagattccgcacctggatggccatgcgtcccccggcgcggatggccaggaaagagtatcagaaatcatatcattcgcagaaaccgacggacttgcctccagcagagtgcgactgtacttcttcatttccaacgaggggaaccagaatctcttcgtggtgcaagcctcactgtggctgtacttgaagttacttccttacgtattggaaaagggctctagaagaaaggtgcgtgtgaaggtgtattttcaggaacagggccatggggatagatggaacatggtggaaaagagggtggatttgaagcgttcaggctggcacacttttccattgacagaggctatccaggcgttgtttgagaggggcgagcgtcgtttgaatctggatgtgcagtgcgatagctgccaggaactcgccgtggttcccgtgtttgtggacccgggtgaggagtcacacaggccatttgtggtggttcaggcaagactgggggacagccggcatcggataagaaagcgcggactggagtgcgacggacgcaccaatctgtgttgcaggcaacaattcttcattgacttccgattaatcggttggaatgactggatcatagccccgaccggctattatgggaactactgtgagggttcttgccccgcttacctggctggagtaccgggaagcgcttcttcctttcacacagccgtggtaaaccaatatcggatgcggggcctgaaccctggtaccgtgaatagctgttgcatacctacaaagctcagcactatgagcatgctctatttcgatgatgaatataatatcgtcaaacgggacgttcccaatatgatagtggaggagtgcggctgcgcatag

SEQ ID NO: 126382 - DNA, 3204 bp, Artificial Sequence
  derived and/or modified sequence
actcggctcgcctcgcggcgggcgccctcgtcgccagcggcgcaccatggacgggctgcccggtcgggcgctgggggccgcctgccttctgctgctggcggccggctggctggggcctgaggcctggggctcacccacgcccccgccgacgcctgccgcgccgccgccacccccgccacccggatccccgggtggctcgcaggacacctgtacgtcgtgcggcggcttccggcggccagaggagctcggccgagtggacggcgacttcctggaggcggtgaagcggcacatcttgagccgcctgcagatgcggggccggcccaacatcacgcacgccgtgcctaaggccgccatggtcacggccctgcgcaagctgcacgcgggcaaggtgcgcgaggacggccgcgtggagatcccgcacctcgacggccacgccagcccgggcgccgacggccaggagcgcgtttccgaaatcatcagcttcgccgagacagatggcctcgcctcctcccgggtccgcctatacttcttcatctccaacgaaggcaaccagaacctgtttgtggtccaggccagcctgtggctttacctgaaactcctgccctacgtcctggagaagggcagccggcggaaggtgcgggtcaaagtgtacttccaggagcagggccacggtgacaggtggaacatggtggagaagagggtggacctcaagcgcagcggctggcataccttcccactcacggaggccatccaggccttgtttgagcggggcgagcggcgactcaacctagacgtgcagtgtgacagctgccaggagctggccgtggtgccggtgttcgtggacccaggcgaagagtcgcaccggccctttgtggtggtgcaggctcggctgggcgacagcaggcaccgcattcgcaagcgaggcctggagtgcgatggccggaccaacctctgttgcaggcaacagttcttcattgacttccgcctcatcggctggaacgactggatcatagcacccaccggctactacgggaactactgtgagggcagctgcccagcctacctggcaggggtccccggctctgcctcctccttccacacggctgtggtgaaccagtaccgcatgcggggtctgaaccccggcacggtgaactcctgctgcattcccaccaagctgagcaccatgtccatgctgtacttcgatgatgagtacaacatcgtcaagcgggacgtgcccaacatgattgtggaggagtgcggctgcgcctgacagtgcaaggcaggggcacggtggtggggcacggagggcagtcccgggtgggcttcttccagcccccgcgggaacgggggtacacggtgggctgagtacagtcattctgttgggctgtggagatagtgccagggtgcggcctgagatatttttctacagcttcatagagcaaccagtcaaaaccagagcgagaaccctcaactgacatgaaatactttaaaatgcacacgtagccacgcacagccagacgcatcctgccacccacacagcagcctccaggataccagcaaatggatgcggtgacaaatggcagcttagctacaaatgcctgtcagtcggagagaatggggtgagcagccaccattcccaccagctggcccggccactctgaattgcgccttccgagcacacataaaagcacaaagacagagacgcagagagagagagagagccacggagaggaaaagcagatgcaggggtggggagcgcagctcggcggaggctgcgtgtgccccgtggcttttaccaggcctgctctgcctggctcgatgtctgcttcttccccagcctgggatccttcgtgcttcaaggcctggggagcctgtccttccatgcccttgtcgagggaaagagacccagaaaggacacaacccgtcagagacctgggagcaggggcaatgaccgtttgactgtttgtggcttgggcctctgacatgacttatgtgtgtgtgtgtttttggggtggggagggagggagagaagagggggctaaatttgatgctttaactgatctccaacagttgacaggtcatccttgccagttgtataactgaaaaaggacttttctaccaggtatgaccttttaagtgaaaatctgaattgttctaaatggaaagaaaaaaagttgcaatctgtgcccttcattggggacattcctctaggactggtttggggacgggtgggaatgacccctaggcaaggggatgagaccgcaggaggaaatggcggggaggaggcattcttgaactgctgaggatggggggtgtcccctcagcggaggccaagggaggggagcagcctagttggtcttggagagatggggaaggctttcagctgatttgcagaagttgcccatgtgggccccagccatcagggctggccgtggacgtggcccctgcccactcacctgcccgcctgcccgcccgcccgcatagcacttgcagacctgcctgaacgcacatgacatagcacttgccgatctgcgtgtgtccagaagtggcccttggccgagcgccgaactcgctcgccctctagatgtccaagtgccacgtgaactatgcaatttaaagggttgacccacactagacgaaactggactcgtacgactctttttatattttttatacttgaaatgaaatcctttgcttcttttttaagcgaatgattgcttttaatgtttgcactgatttagttgcatgattagtcagaaactgccatttgaaaaaaagttatttttatagcagcaaaaaaaaaaaaaaaagaatacagttaaatgtattatacataattttggaaccaaagaggccaacagatcagttttaattttattagacggtgaggccatctgagatgaggtggacgttctgagcagtcccttgagtggcctgccaacgtttcagggtatgaatggattttgtttattcggtttgatgtgtcttttccatccttacacacccagaaggtagagtaaaaatgactatgatagaatgcaggtgtgtatccttaaatcctcatctttatgtttatttaataaagctccccttagattctgtttcataataatttaaaaccaaacaattttcccatagacttgctgttaaagtattgtacgtttgtgtacagtttaagaaaataaaagattgagtgccacgggc

SEQ ID NO: 126383 - DNA, 1224 bp, Artificial Sequence
  derived and/or modified sequence
atggatggcctgcccggccgggccctgggcgccgcctgcctgctgctgctggccgccggctggctgggccctgaggcctggggcagccccaccccaccacccaccccagctgcccctcctcctcctcctcctcctggcagccctgggggcagccaggacacctgcaccagctgtggcggcttccggcggcctgaggagctgggccgggtggatggagacttcctggaggccgtgaagaggcacatcctgagccggctgcagatgaggggccggcccaacatcacccatgctgtgcccaaggccgccatggtgacagccctgaggaagctgcacgccggcaaggtgagagaagatggccgggtggagatcccccacctggatggccacgccagccctggagcagatggccaggagcgggtgtctgagatcatcagctttgctgagacagatggcctggccagcagccgggtgcggctgtacttcttcatcagcaatgaaggcaaccagaacctgtttgtggtgcaggccagcctgtggctgtacctgaagctgctgccctacgtgctggagaagggcagcaggaggaaggtgcgggtgaaggtgtacttccaggagcagggccacggggaccgctggaacatggtggagaagagggtggacctgaagaggagcggctggcacaccttccccctgacagaggccatccaggccctgtttgagcggggggagcggcggctgaacctggatgtgcagtgtgacagctgccaggagctggccgtggtgcctgtgtttgtggaccctggagaggagagccaccggccctttgtggtggtgcaggcccggctgggggacagccgccaccgcatcaggaagaggggcctggagtgtgatggccgcaccaacctgtgctgccggcagcagttcttcatcgacttccggctgattggctggaatgactggatcatcgcccccaccggctactacggcaactactgtgagggcagctgcccagcctacctggccggcgtgcccggcagcgccagcagcttccacacagctgtggtgaaccagtacaggatgaggggcctgaaccctggcaccgtgaacagctgctgcatccccaccaagctgagcaccatgtccatgctgtactttgatgatgagtacaacatcgtgaagagagatgtgcccaacatgattgtggaggagtgtggctgtgcctag

SEQ ID NO: 126384 - DNA, 1224 bp, Artificial Sequence
  derived and/or modified sequence
atggacggcctgcccggccgggccctgggcgccgcctgcctgctgctactcgctgcaggatggttgggaccagaggcatggggctctcccaccccacctcccacacccgcagccccgccacccccacccccccctggctcacccggcggatctcaggacacgtgcacgagctgcggaggctttagacgccccgaggagctgggcagagtcgatggagacttcctcgaggcagttaaaaggcacattctttcccgattgcagatgaggggtcggcccaacatcactcacgcggtgccaaaagccgctatggtaactgctctgcggaaactgcacgcgggaaaagtccgagaggacggacgagtcgagatacctcacctggatggccatgcaagtcccggtgctgacggccaggagagagtgtccgagatcataagcttcgccgagaccgacggactggccagcagtagagtcagactgtactttttcatctccaatgaggggaatcagaatctgtttgtcgtccaggcctcactgtggctttatctcaagttgcttccgtacgtattggaaaagggatccagacgcaaggtccgcgtgaaagtctatttccaggagcaggggcatggagacagatggaatatggtcgagaagagggtagacctcaaacggtccggttggcacacctttccactcacagaagcgatccaggctttgttcgaacgcggtgaaagacgactgaaccttgacgtccagtgtgatagctgtcaggaactcgccgtggtacccgtgttcgtcgatcctggtgaagaaagccaccggccctttgttgttgtccaggcccgactgggagattcacgtcacagaatcagaaaaagaggcttggagtgtgacggcagaacaaatctgtgctgtaggcagcagttcttcattgatttccgactcataggttggaacgattggattatcgctcctacgggctattacggaaattactgtgagggcagctgtcctgcatatctggctggtgtaccgggaagtgcgagtagctttcacaccgcagtcgtcaatcagtatcgcatgagggggttaaacccaggaactgtgaattcctgttgcatcccgaccaaactctcaaccatgtccatgctttacttcgatgatgaatataatattgttaaacgggatgtgccaaacatgattgttgaggaatgcgggtgtgcatag

SEQ ID NO: 126385 - DNA, 1224 bp, Artificial Sequence
  derived and/or modified sequence
atggatggactgccaggcagggcactcggggcagcctgcttactgctcctggccgcaggatggctggggcctgaggcatggggcagcccaactccacctccaacgcctgcagcaccgccaccgccacccccacctggaagccctggaggtagccaggacacatgcaccagctgcggtgggttccgcaggccagaggagctaggtcgagtggatggggacttcttagaggcagtgaaacgacacatactgagtagactgcaaatgcgcggacgccctaatatcacacacgctgtccctaaagctgccatggtcacggcactccgtaaactgcacgccggtaaagtaagagaggatggtagggtcgaaattccacacctagacggtcacgctagtcccggtgcggacggtcaggagcgggtatccgagattatctctttcgccgaaacagatggccttgccagttccagagtgcgcctgtatttctttatcagtaatgaaggaaaccagaatcttttcgttgttcaggcttctctgtggctgtatttaaagctgttgccctatgtgctcgagaaaggcagccgaagaaaggtgagagtgaaggtctatttccaggaacagggacacggcgatcgctggaacatggtggaaaaacgcgtcgacttaaaacgcagcggctggcatacattccctttgaccgaagccattcaagcgcttttcgagcgaggcgagcgtaggcttaatctcgatgtgcagtgtgactcatgccaagaactcgccgtggttcctgtttttgtcgaccccggtgaggaatctcacaggcccttcgtcgttgtgcaagccaggctgggcgattccagacacagaatacgtaagagggggttggaatgtgacggacgtactaacctttgttgccgccagcagttcttcatcgacttccgacttattggctggaacgattggatcatagccccaactggttactacggcaactactgtgaggggagctgtcccgcatacctcgctggcgttcctgggagtgcctcctccttccatacagctgtggtcaaccagtatcggatgaggggtctgaacccaggaaccgtcaacagttgttgtattccaactaagttgtccacaatgagtatgctatactttgatgatgaatacaacatcgtcaaacgggacgttcccaacatgatagtggaggagtgcggatgtgcttag

SEQ ID NO: 126386 - DNA, 1224 bp, Artificial Sequence
  derived and/or modified sequence
atggacggcctgcccggcagagccctgggcgccgcctgcctgctgctgctggccgccggctggctgggccccgaggcctggggcagccccacccccccccccacccccgccgcccccccccccccccccccccccggcagccccggcggcagccaggacacctgcaccagctgcggcggcttcagaagacccgaggagctgggcagagtggacggcgacttcctggaggccgtgaagagacacatcctgagcagactgcagatgagaggcagacccaacatcacccacgccgtgcccaaggccgccatggtgaccgccctgagaaagctgcacgccggcaaggtgagagaggacggcagagtggagatcccccacctggacggccacgccagccccggcgccgacggccaggagagagtgagcgagatcatcagcttcgccgagaccgacggcctggccagcagcagagtgagactgtacttcttcatcagcaacgagggcaaccagaacctgttcgtggtgcaggccagcctgtggctgtacctgaagctgctgccctacgtgctggagaagggcagcagaagaaaggtgagagtgaaggtgtacttccaggagcagggccacggcgacagatggaacatggtggagaagagagtggacctgaagagaagcggctggcacaccttccccctgaccgaggccatccaggccctgttcgagagaggcgagagaagactgaacctggacgtgcagtgcgacagctgccaggagctggccgtggtgcccgtgttcgtggaccccggcgaggagagccacagacccttcgtggtggtgcaggccagactgggcgacagcagacacagaatcagaaagagaggcctggagtgcgacggcagaaccaacctgtgctgcagacagcagttcttcatcgacttcagactgatcggctggaacgactggatcatcgcccccaccggctactacggcaactactgcgagggcagctgccccgcctacctggccggcgtgcccggcagcgccagcagcttccacaccgccgtggtgaaccagtacagaatgagaggcctgaaccccggcaccgtgaacagctgctgcatccccaccaagctgagcaccatgagcatgctgtacttcgacgacgagtacaacatcgtgaagagagacgtgcccaacatgatcgtggaggagtgcggctgcgcctag

SEQ ID NO: 126387 - protein, 139 aa, Artificial Sequence
  derived and/or modified sequence
MASLFRSYLPAIWLLLSQLLRESLAAELRGCGPRFGKHLLSYCPMPEKTFTTTPGGWLLESGRPKEMVSTSNNKDGQALGTTSEFIPNLSPELKKPLSEGQPSLKKIILSRKKRSGRHRFDPFCCEVICDDGTSVKLCT

SEQ ID NO: 126388 - DNA, 420 bp, Artificial Sequence
  derived and/or modified sequence
atggcgtcgctgttcaggtcctatctccccgccatctggcttctcctgtcccaactgttacgagagagtctggcagctgagctcagagggtgcggccctcgttttgggaaacatcttctgtcatactgtcctatgccagagaaaactttcacgaccaccccaggtggatggctcctggagtccgggcgccctaaggaaatggtgtctacgtccaataacaaggacggccaggccctaggtacgacatccgaatttatccctaatcttagtccagagctgaagaagcccctgagtgaaggccagccatctttaaaaaagattatcctttctaggaagaaacgttccgggagacaccgcttcgaccccttttgctgcgaggtgatctgtgacgacggtactagcgtgaagctctgcacttag

SEQ ID NO: 126389 - DNA, 1952 bp, Artificial Sequence
  derived and/or modified sequence
agtctggagcccagaagggacacaccagcacagtctggtaggctacagcagcaagtctctaaagaaaggctgagaacacccagaacaggagagttcaggtccaggatggccagcctgttccggtcctatctgccagcaatctggctgctgctgagccaactccttagagaaagcctagcagcagagctgaggggatgtggtccccgatttggaaaacacttgctgtcatattgccccatgcctgagaagacattcaccaccaccccaggagggtggctgctggaatctggacgtcccaaagaaatggtgtcaacctccaacaacaaagatggacaagccttaggtacgacatcagaattcattcctaatttgtcaccagagctgaagaaaccactgtctgaagggcagccatcattgaagaaaataatactttcccgcaaaaagagaagtggacgtcacagatttgatccattctgttgtgaagtaatttgtgacgatggaacttcagttaaattatgtacatagtagagtaatcatggactggacatctcatccattctcatatgtattctcaatgacaaattcactgatgcccaattaaatgattgctgtttattagaacatgagaatcattattagtattcacatgtttcacttgctctgtactaatatagtctctccaaatggaggaagttagatagatggaataagttctagtagttgatagtacaatggggaaattatacttaacaataattcactgtatattccaaaatagctagaagagaattgtaatgattccaacacaaaaaagatgaatgttagtttggatgcatatcccaattaccctgatttgatcattacacattatatacacgtatcaaaatatcacatgtactacaaaaatgtgtataactgtaatatgtgaactacaaacttactggaaataaatttttaaagttttacacacataaacacatacgttcacacacactcactcaagtctcttcatttttcctcttttcacactagaagaaatgtaagagataaaggatctaaccatctctaacatcagctcatagtacggaggaaaagcagtgaaggaatgaactggtgggagaggtattaggcatgttcaccctagggtaaacccagagacctccctagaactttgcccaatgcatatcctccacctgcctctcagcacgctgcctttagaccttcaatcattctataaactcctcttttgtccctggcattactccacatcccctcatcaaagtggtgaattggcacaaatactggcattcctctggctacacatacctcctccctatgtgtctctaaatcctaaatcaaagagtacattttatactctgtcagtgaggttctactagttgtgtttgtttgtttgcaggctaactgaagctgctactacctcattatcaggtcctataaacttaattcaagtggcatgatttgagtagccccctgtgcctgcccataaagtgctctgaatctagtgtgggacatggagaagcaaaggataataagtgcaatgatacttgtaggtcatcatagagactgtaatgatccacaggaatcagggtcgtgtttaatgccaacatgtgaaagaataaatatacagggaacagtgtaggtaagaggagagagcaaaatttccctaaggaaactgatggctgatctgcatcttgaaagacatctaagcagaagagagtgcaaaaagggacaagtagaagcccaggaaaatgcacaaaggcctggaagcatagcatgtgtggaaacagccagagtcagcagggcaggaggtggtgtggagaaaaggaattgtcaagatctggttggaatggagacaggagagaggatctcaaacgattccacacaatgcagctatggggtttaggctgcatcctggagtaaggaagaactgc

SEQ ID NO: 126390 - DNA, 420 bp, Artificial Sequence
  derived and/or modified sequence
atggccagcctcttccgcagctacctgcctgccatctggctgctgctgagccagctgctgcgggagagcctggccgctgagctgcggggctgcggccccaggtttgggaagcacctgctgagctactgccccatgcctgagaagaccttcaccaccacccctgggggctggctgctggagagcggccggcccaaggagatggtgtccaccagcaacaacaaggatggccaggccctgggcaccaccagcgagttcatccccaacctgagccctgagctgaagaagcccctgtctgagggccagcccagcctgaagaagatcatcctgagcaggaagaagaggagcggccgccacagatttgaccccttctgctgtgaggtgatctgtgatgatggcacctctgtgaagctgtgcacctag

SEQ ID NO: 126391 - DNA, 420 bp, Artificial Sequence
  derived and/or modified sequence
atggccagcctgttccggagctacctgcccgccatctggctgctgctatcccagctcctgagagagagcttggcggcagagctcaggggctgtggacctcgctttggcaaacacctgctgtcctactgccctatgccggagaagaccttcacaaccacccccgggggctggcttctcgagagtggaaggcccaaagaaatggtgtctacctctaacaataaggacggacaagccctggggaccacgagtgagttcatcccgaatctttctcccgaactgaagaagcctctctccgaaggacagccttcccttaagaaaattatactgtctaggaaaaagagatccggacgccataggtttgatcctttttgctgcgaggtgatctgtgacgatggaacatcagtgaagttgtgtacctag

SEQ ID NO: 126392 - DNA, 420 bp, Artificial Sequence
  derived and/or modified sequence
atggctagtttgtttaggtcctaccttccagcaatatggctccttctgtctcagttgctgcgcgagagcctagccgcagaactcagagggtgcgggccaagatttgggaagcacctgttgtcctattgtccaatgcctgagaaaactttcaccaccacacctgggggatggttattggagagtggccgacctaaagagatggtgtccacctccaacaataaagatggacaggctttgggcacgacctccgaattcatcccgaatcttagccccgaactcaaaaagccgctgtcagaaggacagcccagccttaaaaaaattatcctcagccgcaagaagcggtctgggaggcacaggttcgaccctttctgctgtgaggtaatctgcgacgatggcaccagcgtgaagctgtgcacctag

SEQ ID NO: 126393 - DNA, 420 bp, Artificial Sequence
  derived and/or modified sequence
atggccagcctgttcagaagctacctgcccgccatctggctgctgctgagccagctgctgagagagagcctggccgccgagctgagaggctgcggccccagattcggcaagcacctgctgagctactgccccatgcccgagaagaccttcaccaccacccccggcggctggctgctggagagcggcagacccaaggagatggtgagcaccagcaacaacaaggacggccaggccctgggcaccaccagcgagttcatccccaacctgagccccgagctgaagaagcccctgagcgagggccagcccagcctgaagaagatcatcctgagcagaaagaagagaagcggcagacacagattcgaccccttctgctgcgaggtgatctgcgacgacggcaccagcgtgaagctgtgcacctag

SEQ ID NO: 126394 - protein, 510 aa, Artificial Sequence
  derived and/or modified sequence
MPRGFLVKRSKKSTPVSYRVRGGEDGDRALLLSPSCGGARAEPPAPSPVPGPLPPPPPAERAHAALAAALACAPGPQPPPQGPRAAHFGNPEAAHPAPLYSPTRPVSREHEKHKYFERSFNLGSPVSAESFPTPAALLGGGGGGGASGAGGGGTCGGDPLLFAPAELKMGTAFSAGAEAARGPGPGPPLPPAAALRPPGKRPPPPTAAEPPAKAVKAPGAKKPKAIRKLHFEDEVTTSPVLGLKIKEGPVEAPRGRAGGAARPLGEFICQLCKEEYADPFALAQHKCSRIVRVEYRCPECAKVFSCPANLASHRRWHKPRPAPAAARAPEPEAAARAEAREAPGGGSDRDTPSPGGVSESGSEDGLYECHHCAKKFRRQAYLRKHLLAHHQALQAKGAPLAPPAEDLLALYPGPDEKAPQEAAGDGEGAGVLGLSASAECHLCPVCGESFASKGAQERHLRLLHAAQVFPCKYCPATFYSSPGLTRHINKCHPSENRQVILLQVPVRPAC

SEQ ID NO: 126395 - DNA, 2838 bp, Artificial Sequence
  derived and/or modified sequence
gggcgcagagctgggccgagccgtcgccggcgccacgcgagtcccgcagccgccgcgcccgggcaatgggccgggggcactgagggccgccggggccgagcgcggaggggggaccgagccagtgccgtgccctcgggccgcgccaacatgccccgcggcttcctggtgaagcgcagcaagaagtccacgcccgtttcctaccgggtccgcggcggcgaggacggcgaccgcgcactgctgctctcgcccagctgcgggggcgcccgcgccgagcccccggcgccgagcccggtccccgggccgctgccgccgccgccgcccgcggagcgcgcccatgcagcgctcgccgccgcgcttgcctgcgcgcctgggccgcagccacccccgcagggcccgcgggccgcgcacttcggcaaccccgaggctgcgcaccccgcgccgctctacagtcccacgcggcccgtgagccgcgagcacgagaagcacaagtacttcgaacgcagcttcaacctgggctcgccggtctcggccgagtccttccccacgcccgccgcgctgctcggagggggcggcggcggcggcgcgagcggagctggcggaggcggcacctgcggcggcgacccgctgctcttcgcgcccgccgagctcaagatgggcacggcgttctcggctggcgccgaggcggcccgcggcccgggccccggccccccactgccccctgccgccgccctgcggcccccgggaaagcggcccccgccccctaccgccgcggagccgcccgccaaggcagtcaaggccccgggcgccaagaagcccaaggccatccgcaagctgcacttcgaggacgaggtgaccacgtcgcccgtgctggggctcaagatcaaggagggcccggtggaggcgccgcggggccgcgcggggggcgcggcgcggccgctgggcgagttcatctgccagctgtgcaaggaggagtacgccgacccgttcgcgctggcgcagcacaaatgctcgcgcatcgtgcgtgtggagtaccgctgtcccgagtgcgccaaggtcttcagctgcccggccaacctggcctcgcaccgccgctggcacaaaccgcggcccgcgcccgccgccgcccgcgcgccggagccagaagcagcagccagggctgaggcgcgggaggcacccggcggcggcagcgaccgggacacgccgagccccggcggcgtgtccgagtcgggctccgaggacgggctctacgagtgccatcactgcgccaagaagttccgccgccaggcctacctacgcaagcacctgctggcgcaccaccaggcgctgcaggccaagggcgcgccgctagcgcccccggccgaggacctactggccttgtaccccgggcccgacgagaaggcgccccaggaggcggccggcgacggcgagggggccggcgtgctgggcctgagtgcgtccgccgagtgccacctgtgcccagtgtgcggagagtcgttcgccagcaagggcgctcaggagcgccacctgcgcctgctgcacgccgcccaggtgttcccctgcaagtactgcccggccaccttctacagctcgcccggccttacgcggcacatcaacaagtgccacccatccgaaaacagacaggtgatcctcctgcaggtgcccgtgcgcccggcctgctagagcgcgccctccaccccggcccccgaactgtgccttcgcttggagacccacaaagagagtgcgccctgcacgccccgaacccgagtccgcgctgggggagcctcgcccccgcccccaccgggtgaaagtgtcgtctccgcttctctcggtgtggcgtgacggtaaccccatactctccttttgactccttttggaacccccacttttacgttgtgtccctccgcctcccccatggcgcaacaggagtcagtctctttctgtacaagggagaaaagctgtacgcgtttgtctcgtggttggaagcctccccttggcggggagaagctttttttcttgctagtattcgctgtgttcatggtctagaaatgcggtctggtctcgcctcgcctaccaatctctgctctctatgtatgtagcgtacgggttgttttgggtgaatcttgaggaataaatgcctttatatttcacaggctgtaaattgaacttcccacacgattagctttattatggcttgtgaactgctggagtctggctttacctttttgtatgtgaacaaatcaaattgcttaaaaaagagttttctttagtatagccacaaatgccttgaactgttgtctgggattgttttgtggggggagggaagggagtgttccgaagatgctgtagtaactgcctcagtgtttcacgtaagactttttggtttgatcatctttgttgaggtaggactatcagttccctctaaatgtatatgttgatttatgagtaattgttatttattctttatttatttatattaattatgaagattatgatattatttgattgcagatttttttggcgcgctgccccctccccaccctgccactcttgacattccactgtgcgttttagaagagagcctttttctaaagggatctgcttaaagttttaacttttatacctatctgagtgaattacagacaacctatcatttattctgcttcgagggtccccagggcccttgtacaaccgacagctcttacttttaaatgcaatctcttttctacatacattattttcttaattgttagctatttatagaaagcttcaatagaactgtttcaactgtataactatttactattcaaataaaatattttcaaagtcaaaaaaaaaaaa

SEQ ID NO: 126396 - DNA, 1533 bp, Artificial Sequence
  derived and/or modified sequence
atgcctcgaggtttcctggtgaagcgaagcaaaaaatcaacacccgttagctaccgggtccgaggcggcgaggatggagaccgagcactgttattgagcccttcctgcggcggagccagggcagaaccgcctgctccctcccctgtcccaggaccacttcctcctcctccccccgctgaaagggcccatgccgcgctggcagccgccctcgcctgtgccccaggacctcagccacctccacagggcccgcgggctgctcacttcggcaaccctgaagccgcccatcccgccccactgtattctcctactcggcctgtgagcagagaacacgagaagcacaaatacttcgagaggtcctttaacttaggatctcctgtcagtgcggagagcttccctactccagccgctctgctggggggaggagggggggggggcgctagcggggcgggtggcgggggtacatgcggaggggatcccttgcttttcgcccccgcagagcttaagatgggaactgcttttagtgccggggccgaagctgccagagggcccggaccaggccctcccctgccacccgccgccgctcttaggcctccaggaaagaggccaccaccccccactgccgccgaaccccctgctaaagccgtgaaagccccaggcgcaaaaaagcccaaagccataagaaaactgcattttgaagatgaggtgactacttccccagtgctggggctgaagataaaagaaggccctgttgaagctcctaggggccgggccgggggagctgctaggcccctgggcgagtttatctgccagctctgcaaagaagaatacgctgaccctttcgccttggcccaacacaagtgcagtcggatcgtgagggtagaatacagatgccctgaatgcgccaaggttttctcttgtcctgccaaccttgcctctcacaggcggtggcacaagccaaggcccgcccccgcagccgcgagggccccagagcccgaagctgcagccagagcagaggcgcgggaagcaccaggcggcggatctgatcgggacaccccctcccccgggggcgtgtctgaatccgggtctgaagacggcctctacgagtgccaccactgtgccaaaaaattccgccgccaggcctacctgcggaaacacctgctggcccaccatcaggccttacaggccaaaggtgcccccctggctccaccagcggaggatctgctggccctttaccctggtcctgacgagaaggccccccaggaggcagccggtgacggcgaaggggcgggggtgctgggcctgtccgcgagcgctgagtgtcatctctgtccagtgtgcggggaaagtttcgccagcaagggcgcccaggaaaggcatctgaggctgctgcacgctgctcaggtgtttccttgcaagtattgtccagccacgttctatagtagtccggggttgacacgacacataaacaagtgccatccatccgagaaccgacaagtaatactactgcaggtccctgttaggccagcttgttag

SEQ ID NO: 126397 - DNA, 2826 bp, Artificial Sequence
  derived and/or modified sequence
gggcgcagagctgggccgagccgtcgccggcgccacgcgagtcccgcagccgccgcgcccgggcaatgggccgggggcactgagggccgccggggccgagcgcggaggggggaccgagccagtgccgtgccctcgggccgcgccaacatgccccgcggcttcctggtgaagcgcagcaagaagtccacgcccgtttcctaccgggtccgcggcggcgaggacggcgaccgcgcactgctgctctcgcccagctgcgggggcgcccgcgccgagcccccggcgccgagcccggtccccgggccgctgccgccgccgccgcccgcggagcgcgcccatgcagcgctcgccgccgcgcttgcctgcgcgcctgggccgcagccacccccgcagggcccgcgggccgcgcacttcggcaaccccgaggctgcgcaccccgcgccgctctacagtcccacgcggcccgtgagccgcgagcacgagaagcacaagtacttcgaacgcagcttcaacctgggctcgccggtctcggccgagtccttccccacgcccgccgcgctgctcggagggggcggcggcggcggcgcgagcggagctggcggaggcggcacctgcggcggcgacccgctgctcttcgcgcccgccgagctcaagatgggcacggcgttctcggctggcgccgaggcggcccgcggcccgggccccggccccccactgccccctgccgccgccctgcggcccccgggaaagcggcccccgccccctaccgccgcggagccgcccgccaaggcagtcaaggccccgggcgccaagaagcccaaggccatccgcaagctgcacttcgaggacgaggtgaccacgtcgcccgtgctggggctcaagatcaaggagggcccggtggaggcgccgcggggccgcgcggggggcgcggcgcggccgctgggcgagttcatctgccagctgtgcaaggaggagtacgccgacccgttcgcgctggcgcagcacaaatgctcgcgcatcgtgcgtgtggagtaccgctgtcccgagtgcgccaaggtcttcagctgcccggccaacctggcctcgcaccgccgctggcacaaaccgcggcccgcgcccgccgccgcccgcgcgccggagccagaagcagcagccagggctgaggcgcgggaggcacccggcggcggcagcgaccgggacacgccgagccccggcggcgtgtccgagtcgggctccgaggacgggctctacgagtgccatcactgcgccaagaagttccgccgccaggcctacctacgcaagcacctgctggcgcaccaccaggcgctgcaggccaagggcgcgccgctagcgcccccggccgaggacctactggccttgtaccccgggcccgacgagaaggcgccccaggaggcggccggcgacggcgagggggccggcgtgctgggcctgagtgcgtccgccgagtgccacctgtgcccagtgtgcggagagtcgttcgccagcaagggcgctcaggagcgccacctgcgcctgctgcacgccgcccaggtgttcccctgcaagtactgcccggccaccttctacagctcgcccggccttacgcggcacatcaacaagtgccacccatccgaaaacagacaggtgatcctcctgcaggtgcccgtgcgcccggcctgctagagcgcgccctccaccccggcccccgaactgtgccttcgcttggagacccacaaagagagtgcgccctgcactccccgaacccgagtccgcgctgggggagcctcgcccccgcccccaccgggtgaaagtgtcgtctccgcttctctcggtgtggcgtgacggtaaccccatactctccttttgactccttttggaacccccacttttacgttgtgtccctccgcctcccccatggcgcaacaggagtcagtctctttctgtacaagggagaaaagctgtacgcgtttgtctcgtggttggaagcctccccttggcggggagaagctttttttcttgctagtattcgctgtgttcatggtctagaaatgcggtctggtctcgcctcgcctaccaatctctgctctctatgtatgtagcgtacgggttgttttgggtgaatcttgaggaataaatgcctttatatttcacaggctgtaaattgaacttcccacacgattagctttattatggcttgtgaactgctggagtctggctttacctttttgtatgtgaacaaatcaaattgcttaaaaaagagttttctttagtatagccacaaatgccttgaactgttgtctgggattgttttgtggggggagggaagggagtgttccgaagatgctgtagtaactgcctcagtgtttcacgtaagactttttggtttgatcatctttgttgaggtaggactatcagttccctctaaatgtatatgttgatttatgagtaattgttatttattctttatttatttatattaattatgaagattatgatattatttgattgcagatttttttggcgcgctgccccctccccaccctgccactcttgacattccactgtgcgttttagaagagagcctttttctaaagggatctgcttaaagttttaacttttatacctatctgagtgaattacagacaacctatcatttattctgcttcgagggtccccagggcccttgtacaaccgacagctcttacttttaaatgcaatctcttttctacatacattattttcttaattgttagctatttatagaaagcttcaatagaactgtttcaactgtataactatttactattcaaataaaatattttcaaagtc

SEQ ID NO: 126398 - DNA, 1533 bp, Artificial Sequence
  derived and/or modified sequence
atgccccggggcttcctggtgaagaggagcaagaagagcacccctgtgtcctacagagtgcggggcggggaggatggagaccgggccctgctgctgagccccagctgtggcggggcccgggcagagcccccagcccccagccctgtgcccggccccctgcccccacctcctcctgctgagcgggcccacgccgccctggccgccgccctggcctgtgcccctggcccccagcccccaccccagggccccagggctgcccacttcggcaaccctgaggccgcccacccagcccccctgtacagccccaccaggcctgtgtcccgggagcacgagaagcacaagtactttgagaggagcttcaacctgggcagccctgtgtctgctgagagcttccccaccccagctgccctgctgggcggcggcggcggcggcggggccagcggggccggcggcggcggcacctgtggcggggaccccctgctgtttgccccagctgagctgaagatgggcacagccttctctgctggagctgaggccgcccggggccctggccctggcccccccctgcccccagctgctgccctgcggcccccaggcaagaggcctcctccacccacagctgctgagcccccagccaaggctgtgaaggcccctggggccaagaagcccaaggccatcaggaagctgcactttgaagatgaggtgaccaccagccctgtgctgggcctgaagatcaaggagggccctgtggaggccccccggggccgggccggcggggccgcccggcccctgggggagttcatctgccagctgtgcaaggaggagtatgctgacccctttgccctggcccagcacaagtgcagccgcatcgtgcgggtggagtaccgctgcccagaatgtgccaaggtgttcagctgcccagccaacctggccagccaccggcgctggcacaagcccaggcctgccccagctgctgcccgggcccctgagcctgaggccgccgcccgggcagaggcccgggaggcccctgggggcggcagtgaccgggacacccccagccctgggggcgtgtctgagagcggctctgaagatggcctgtatgagtgccaccactgtgccaagaagttccggcggcaggcctacctgaggaagcacctgctggcccaccaccaggccctgcaggccaagggggcccccctggcccccccagctgaggacctgctggccctgtacccaggcccagatgagaaggccccccaggaggccgctggagatggagagggcgccggcgtgctgggcctgagcgccagcgctgagtgccacctgtgccctgtgtgtggggagagctttgccagcaaaggagcccaggagcggcacctgcggctgctgcatgctgcccaggtgttcccctgcaagtactgcccagccaccttctacagcagccctggcctgaccaggcacatcaacaagtgccaccccagtgaaaatcggcaggtgatcctgctgcaggtgcctgtgcggcctgcctgctag

SEQ ID NO: 126399 - DNA, 1533 bp, Artificial Sequence
  derived and/or modified sequence
atgccccggggcttcctggtgaagcggagcaagaagagcacccccgtgtcctatcgggtccgcggcggggaagatggagaccgcgctctgctgctaagcccttcttgcggtggggctagagcagagcctcctgcccccagcccagtacctgggcccctgcctccacctcctccagccgaacgggcccacgccgcgctcgctgctgccctcgcctgtgcccctggacctcagcctcctccgcagggcccccgagccgcacacttcggcaatccagaagccgcccaccccgcccctctatacagccctacccggccagtgtctcgagaacacgaaaaacataaatacttcgagagatccttcaacctcgggagccctgtatctgccgagtcttttccaacccccgccgctctgctaggcggaggcggtggtggcggagcctcaggcgccgggggaggaggcacctgtgggggcgacccattactgttcgcacctgcagagcttaagatgggcaccgccttttccgctggagcagaggctgccaggggccccggtcctggcccccccctgccacccgcggccgccctcagacccccaggcaagagaccacctcccccgaccgccgcagagccaccagccaaggctgtcaaggctccgggagcaaagaagccaaaggctattaggaaactccactttgaggacgaggttactaccagcccggtcctcgggctgaagattaaagagggacctgtggaggcccccaggggccgcgctgggggggcagcccggcccctgggggagtttatctgccagttgtgtaaagaagagtacgcagatccctttgctttagcccagcacaaatgctcaaggattgttagggtggaatacagatgccccgaatgcgccaaggtattctcgtgtcccgccaacctcgcttctcatagaaggtggcacaagcctcggcctgcaccagccgccgcacgggctcccgagccagaggccgctgcgagagccgaggccagagaggctcccgggggcggcagcgatagggacactccatctcccggaggtgtgtcagagagcggctccgaggatggcttatatgagtgtcatcactgtgctaaaaaatttcgacgccaggcttatctgcgtaagcatctgttagcccaccatcaggccctgcaggccaagggcgctccccttgcacccccagccgaagatttattggccctgtatccagggcctgacgaaaaggcaccacaggaagcggccggcgatggggaaggcgctggcgttctgggcctgagtgcaagcgcagagtgtcatttgtgccccgtgtgcggtgagtcctttgccagcaagggtgcacaggaacggcatctccgcctcctgcacgcagctcaagtctttccatgcaagtactgccccgcaacattctacagtagccctggactgacacggcatatcaacaagtgtcacccctccgaaaatcgccaagtgatactgcttcaggtgcctgtaaggccagcctgctag

SEQ ID NO: 126400 - DNA, 1533 bp, Artificial Sequence
  derived and/or modified sequence
atgcctcgcggtttcttagttaagcgaagtaagaagtcaacccccgtctcctatagggtgcgaggtggtgaggacggggatcgcgctcttttgttatcacccagttgcggcggagccagggctgagcccccagctccatcacccgttcctggccctctgcctcccccaccccctgctgagcgagcccacgcagccctcgctgctgccctcgcttgcgcacccggtccacagcctccgcctcaagggccacgagctgcgcacttcggtaaccccgaagcggcacaccccgctccactgtatagtccgacccgtcccgtatcacgcgaacatgagaagcataagtattttgaacggagttttaacctgggatcccctgtgagtgcagagagcttcccgacacctgctgcgttgctgggaggaggcggagggggtggcgcttctggcgctggaggcggaggtacatgcggaggagatcccctgctctttgcaccagctgaattgaagatgggcacagcattctccgccggagctgaggctgccagagggccagggccagggccacctctgccccctgctgcggctctaagaccaccaggaaagcgccctccccctccaacggctgctgagccccctgccaaggcggtcaaggccccaggcgcaaagaagcccaaggccatcaggaagctgcatttcgaagatgaggtgactacttctcccgtgctcggacttaaaatcaaagaaggtcctgtagaagcacctagagggagagctggcggagccgcaaggccactgggcgagttcatctgccagttgtgcaaggaggaatacgccgacccgtttgcccttgcacagcacaagtgttcaagaatagttagggtggaatacaggtgccccgaatgtgcaaaagtgttttcttgtcctgccaaccttgcgtctcatagacgctggcacaaaccacgacccgctccagccgctgcccgtgcccctgagccggaggccgctgccagagcagaagcacgtgaggctcccggaggcggaagcgacagggatacaccttcccctggcggtgtgtctgagtcgggctctgaggatggtctctacgagtgccatcactgcgctaaaaagtttagaaggcaggcctatctgaggaagcacctgctcgctcaccaccaggccctgcaggccaagggggcacccctggccccacctgccgaggacctgttagccctctatcctggtcccgacgaaaaggctccccaggaggctgcgggtgatggcgagggagccggagtccttgggttatcagcttctgcagagtgtcacttgtgcccggtgtgtggggagtcttttgcaagtaaaggggctcaggaaagacacctcagactgcttcatgctgctcaggtatttccgtgcaagtattgccccgcaactttttactcttcaccgggactcacccgccacattaacaaatgtcatccttctgaaaatcgccaagtaatactactccaggtccccgtgagacccgcatgttag

SEQ ID NO: 126401 - DNA, 1533 bp, Artificial Sequence
  derived and/or modified sequence
atgcccagaggcttcctggtgaagagaagcaagaagagcacccccgtgagctacagagtgagaggcggcgaggacggcgacagagccctgctgctgagccccagctgcggcggcgccagagccgagccccccgcccccagccccgtgcccggccccctgcccccccccccccccgccgagagagcccacgccgccctggccgccgccctggcctgcgcccccggcccccagccccccccccagggccccagagccgcccacttcggcaaccccgaggccgcccaccccgcccccctgtacagccccaccagacccgtgagcagagagcacgagaagcacaagtacttcgagagaagcttcaacctgggcagccccgtgagcgccgagagcttccccacccccgccgccctgctgggcggcggcggcggcggcggcgccagcggcgccggcggcggcggcacctgcggcggcgaccccctgctgttcgcccccgccgagctgaagatgggcaccgccttcagcgccggcgccgaggccgccagaggccccggccccggcccccccctgccccccgccgccgccctgagaccccccggcaagagaccccccccccccaccgccgccgagccccccgccaaggccgtgaaggcccccggcgccaagaagcccaaggccatcagaaagctgcacttcgaggacgaggtgaccaccagccccgtgctgggcctgaagatcaaggagggccccgtggaggcccccagaggcagagccggcggcgccgccagacccctgggcgagttcatctgccagctgtgcaaggaggagtacgccgaccccttcgccctggcccagcacaagtgcagcagaatcgtgagagtggagtacagatgccccgagtgcgccaaggtgttcagctgccccgccaacctggccagccacagaagatggcacaagcccagacccgcccccgccgccgccagagcccccgagcccgaggccgccgccagagccgaggccagagaggcccccggcggcggcagcgacagagacacccccagccccggcggcgtgagcgagagcggcagcgaggacggcctgtacgagtgccaccactgcgccaagaagttcagaagacaggcctacctgagaaagcacctgctggcccaccaccaggccctgcaggccaagggcgcccccctggccccccccgccgaggacctgctggccctgtaccccggccccgacgagaaggccccccaggaggccgccggcgacggcgagggcgccggcgtgctgggcctgagcgccagcgccgagtgccacctgtgccccgtgtgcggcgagagcttcgccagcaagggcgcccaggagagacacctgagactgctgcacgccgcccaggtgttcccctgcaagtactgccccgccaccttctacagcagccccggcctgaccagacacatcaacaagtgccaccccagcgagaacagacaggtgatcctgctgcaggtgcccgtgagacccgcctgctag

SEQ ID NO: 126402 - protein, 889 aa, Artificial Sequence
  derived and/or modified sequence
MSNPFAHLAEPLDPVQPGKKFFNLNKLEDSRYGRLPFSIRVLLEAAIRNCDEFLVKKQDIENILHWNVTQHKNIEVPFKPARVILQDFTGVPAVVDFAAMRDAVKKLGGDPEKINPVCPADLVIDHSIQVDFNRRADSLQKNQDLEFERNRERFEFLKWGSQAFHNMRIIPPGSGIIHQVNLEYLARVVFDQDGYYYPDSLVGTDSHTTMIDGLGILGWGVGGIEAEAVMLGQPISMVLPQVIGYRLMGKPHPLVTSTDIVLTITKHLRQVGVVGKFVEFFGPGVAQLSIADRATIANMCPEYGATAAFFPVDEVSITYLVQTGRDEEKLKYIKKYLQAVGMFRDFNDPSQDPDFTQVVELDLKTVVPCCSGPKRPQDKVAVSDMKKDFESCLGAKQGFKGFQVAPEHHNDHKTFIYDNTEFTLAHGSVVIAAITSCTNTSNPSVMLGAGLLAKKAVDAGLNVMPYIKTSLSPGSGVVTYYLQESGVMPYLSQLGFDVVGYGCMTCIGNSGPLPEPVVEAITQGDLVAVGVLSGNRNFEGRVHPNTRANYLASPPLVIAYAIAGTIRIDFEKEPLGVNAKGQQVFLKDIWPTRDEIQAVERQYVIPGMFKEVYQKIETVNESWNALATPSDKLFFWNSKSTYIKSPPFFENLTLDLQPPKSIVDAYVLLNLGDSVTTDHISPAGNIARNSPAARYLTNRGLTPREFNSYGSRRGNDAVMARGTFANIRLLNRFLNKQAPQTIHLPSGEILDVFDAAERYQQAGLPLIVLAGKEYGAGSSRDWAAKGPFLLGIKAVLAESYERIHRSNLVGMGVIPLEYLPGENADALGLTGQERYTIIIPENLKPQMKVQVKLDTGKTFQAVMRFDTDVELTYFLNGGILNYMIRKMAK

SEQ ID NO: 126403 - protein, 434 aa, Artificial Sequence
  derived and/or modified sequence
MSNPFAHLAEPLDPVQPGKKFFNLNKLEDSRYGRLPFSIRVLLEAAIRNCDEFLVKKQDIENILHWNVTQHKNIEVPFKPARVILQDFTGVPAVVDFAAMRDAVKKLGGDPEKINPVCPADLVIDHSIQVDFNRRADSLQKNQDLEFERNRERFEFLKWGSQAFHNMRIIPPGSGIIHQVNLEYLARVVFDQDGYYYPDSLVGTDSHTTMIDGLGILGWGVGGIEAEAVMLGQPISMVLPQVIGYRLMGKPHPLVTSTDIVLTITKHLRQVGVVGKFVEFFGPGVAQLSIADRATIANMCPEYGATAAFFPVDEVSITYLVQTGRDEEKLKYIKKYLQAVGMFRDFNDPSQDPDFTQVVELDLKTVVPCCSGPKRPQDKVAVSDMKKDFESCLGAKQGFKGFQVAPEHHNDHKTFIYDNTEFTLAHGSVVIAAL

SEQ ID NO: 126404 - protein, 781 aa, Artificial Sequence
  derived and/or modified sequence
QLEPRSARERVPLLGSGSPVAGAPPCSRRNTWPSVIMSNPFAHLAEPLDPVQPGKKFFNLNKLEDSRYGRLPFSIRVLLEAAIRNCDEFLVKKQDIENILHWNVTQHKNIEVPFKPARVILQDFTGVPAVVDFAAMRDAVKKLGGDPEKINPVCPADLVIDHSIQVDFNRRADSLQKNQDLEFERNRERFEFLKWGSQAFHNMRIIPPGSGIIHQVNLEYLARVVFDQDGYYYPDSLVGTDSHTTMIDGLGILGWGVGGIEAEAVMLGQPISMVLPQVIGYRLMGKPHPLVTSTDIVLTITKHLRQVGVVGKFVEFFGPGVAQLSIADRATIANMCPEYGATAAFFPVDEVSITYLVQTGRDEEKLKYIKKYLQAVGMFRDFNDPSQDPDFTQVVELDLKTVVPCCSGPKRPQDKVAVSDMKKDFESCLGAKQGFKGFQVAPEHHNDHKTFIYDNTEFTLAHGSVVIAAITSCTNTSNPSVMLGAGLLAKKAVDAGLNVMPYIKTSLSPGSGVVTYYLQESGVMPYLSQLGFDVVGYGCMTCIGNSGPLPEPVVEAITQGDLVAVGVLSGNRNFEGRVHPNTRANYLASPPLVIAYAIAGTIRIDFEKEPLGVNAKGQQVFLKDIWPTRDEIQAVERQYVIPGMFKEVYQKIETVNESWNALATPSDKLFFWNSKSTYIKSPPFFENLTLDLQPPKSIVDAYVLLNLGDSVTTDHISPAGNIARNSPAARYLTNRGFERQLTQENTDLCLSPPLLTSLSSPLKLWGQLFCHGEQCLGDLEK

SEQ ID NO: 126405 - protein, 790 aa, Artificial Sequence
  derived and/or modified sequence
MRDAVKKLGGDPEKINPVCPADLVIDHSIQVDFNRRADSLQKNQDLEFERNRERFEFLKWGSQAFHNMRIIPPGSGIIHQVNLEYLARVVFDQDGYYYPDSLVGTDSHTTMIDGLGILGWGVGGIEAEAVMLGQPISMVLPQVIGYRLMGKPHPLVTSTDIVLTITKHLRQVGVVGKFVEFFGPGVAQLSIADRATIANMCPEYGATAAFFPVDEVSITYLVQTGRDEEKLKYIKKYLQAVGMFRDFNDPSQDPDFTQVVELDLKTVVPCCSGPKRPQDKVAVSDMKKDFESCLGAKQGFKGFQVAPEHHNDHKTFIYDNTEFTLAHGSVVIAAITSCTNTSNPSVMLGAGLLAKKAVDAGLNVMPYIKTSLSPGSGVVTYYLQESGVMPYLSQLGFDVVGYGCMTCIGNSGPLPEPVVEAITQGDLVAVGVLSGNRNFEGRVHPNTRANYLASPPLVIAYAIAGTIRIDFEKEPLGVNAKGQQVFLKDIWPTRDEIQAVERQYVIPGMFKEVYQKIETVNESWNALATPSDKLFFWNSKSTYIKSPPFFENLTLDLQPPKSIVDAYVLLNLGDSVTTDHISPAGNIARNSPAARYLTNRGLTPREFNSYGSRRGNDAVMARGTFANIRLLNRFLNKQAPQTIHLPSGEILDVFDAAERYQQAGLPLIVLAGKEYGAGSSRDWAAKGPFLLGIKAVLAESYERIHRSNLVGMGVIPLEYLPGENADALGLTGQERYTIIIPENLKPQMKVQVKLDTGKTFQAVMRFDTDVELTYFLNGGILNYMIRKMAK

SEQ ID NO: 126406 - DNA, 2670 bp, Artificial Sequence
  derived and/or modified sequence
atgtccaacccatttgcgcatctagccgagcccctggaccccgtccaacctggtaagaagttttttaacctgaacaaactggaggattccaggtatgggcgactgccattctcaattagggttttgcttgaagccgctatcaggaattgtgatgagtttctggtgaagaaacaagacatcgagaacatacttcactggaacgtgacacaacacaaaaacatcgaggtaccatttaagccagcacgggtcatcctgcaagacttcaccggggtgcccgccgtggtagatttcgctgccatgcgggatgctgtaaagaaactcggtggcgacccagaaaaaatcaacccagtttgtcctgcggaccttgtcatcgaccattcaatccaggtggacttcaaccgccgcgcggattctttacaaaaaaaccaggacttagaatttgagaggaaccgcgagaggtttgaatttctgaaatggggaagccaagcattccacaatatgcggattatcccccctggatccggcatcatccatcaggtgaaccttgagtacctagcgcgcgtggtcttcgatcaggacggctactattaccccgatagcctggtgggaacagattcccacaccacaatgatcgatgggctgggtatccttggctggggcgtgggcggaatcgaggctgaagctgtcatgctgggacagcccataagcatggtgttgccgcaggtgattggctatcggctgatgggcaaaccccatccactggtgacatctaccgacattgtgctaacaattaccaagcacctcaggcaagtcggagtggtcggcaagttcgttgaattcttcgggcccggtgtcgcgcagctgtctatcgcggacagagccaccatagccaacatgtgtccagaatatggagcaactgcagctttttttccagtggatgaggtgtcgatcacctacctcgtgcaaaccgggcgcgacgaagaaaagctgaaatacatcaaaaagtatctgcaggccgtgggcatgttcagagatttcaatgacccctcccaggatccagacttcactcaggtggtagagctggacttaaagaccgtggttccatgctgcagtggtcctaagcgaccccaggacaaagtggcagtgagtgatatgaagaaggatttcgagtcatgcctgggcgccaaacaggggttcaagggcttccaggtggctcccgagcaccataacgaccataaaacgtttatatacgacaacactgaatttacgctcgcccatggctcagtggttatcgctgccatcaccagttgcaccaatacctcaaacccaagtgttatgctcggggcaggcctgcttgcaaagaaggctgtcgatgccggtctcaatgtgatgccatacatcaagacctcactcagccccggatctggtgtcgtgacctattatctgcaggagtctggtgttatgccctacctctcccagctgggcttcgatgtggtggggtatggctgcatgacttgtattggtaacagcggccccctgcctgagccagtggtcgaggcgattacccagggagatctcgttgctgttggagtattgagtggcaacaggaatttcgaaggcagagtccatcctaacactagagcgaactacctggcctctccgcctcttgtcatcgcttacgcaatcgcaggtaccatcagaattgactttgagaaggaaccactgggcgttaacgctaaaggtcagcaggtgtttcttaaggatatatggcccaccagagacgaaatccaggctgtcgagagacagtatgtaatcccagggatgtttaaagaagtttatcagaaaatcgaaaccgtcaatgaatcttggaatgcattggcgactccttcagataagctgtttttttggaactctaaatccacctatatcaaatctcccccctttttcgagaatcttacccttgatctgcagccacctaaatctatagtagacgcctacgtgctgttgaatctgggcgactcagttactactgaccacatatcacctgctgggaacatagcccgaaactcccctgcagctagatatctcacaaaccgcggcctgaccccccgcgagtttaactcctacggttcccgtcgaggcaacgacgccgttatggcaagagggacctttgcgaacatcaggcttctcaaccggtttctgaacaagcaagctccccagacgattcacctgccctcaggagagattctggacgtgttcgatgctgctgagcggtatcagcaagcagggcttccacttatagtcctggccggcaaggagtatggcgcaggctcgagtcgggactgggcggctaaagggccatttcttctcggaattaaggccgtgctggctgaaagttacgaaagaattcaccgcagcaatctcgtgggcatgggagtcatccccttagagtatctgcccggagagaatgctgacgctcttgggctgaccggacaggaacgctacactattatcatcccggaaaatctaaaaccacagatgaaggtgcaagtgaagctagacactgggaaaaccttccaggcagtcatgcgttttgatactgacgtcgagctcacatactttctgaacggcgggatactcaattatatgattcgcaaaatggcgaaatag

SEQ ID NO: 126407 - DNA, 1305 bp, Artificial Sequence
  derived and/or modified sequence
atgtccaatccctttgcacacctcgctgaaccactggatcccgtccaacctgggaaaaagtttttcaacctgaacaaattggaggacagtcgctacggccggctgcccttctcgatcagggtactgctggaagcggccattcggaattgtgatgaatttcttgtgaagaagcaagatattgagaatatcttgcactggaacgtcactcagcacaaaaatatcgaggtgcccttcaagccggctcgggtgatcctgcaggacttcacgggcgttccagcagtggtagactttgcagccatgagagacgcagtgaaaaaacttggcggggaccccgagaaaattaatcccgtttgtcccgcagatctcgtgatcgaccactcaatacaagttgatttcaacagacgggcagattcattgcagaaaaaccaggatctcgaatttgaacgcaatcgggagaggttcgagttcctgaagtggggaagccaggctttccataatatgcgtattatcccacctggcagcggcataattcatcaagtgaatcttgagtatctggcacgtgttgtttttgaccaggatggatattactatccagattcgctcgtgggcactgacagccataccacgatgatcgacgggttggggattctgggctggggcgtcggcggaatcgaagcagaagctgtcatgctgggtcaacccatttcaatggtgctcccacaagtgattggttacaggttgatgggcaagcctcaccctcttgtgacctccacagacatcgtgctgaccatcaccaagcacctgcgacaagtgggcgtggtcggaaagttcgtagaattttttgggcccggcgtcgctcagctttctatcgctgatagggccactatcgctaacatgtgtcctgaatacggcgcaaccgcggcatttttccctgtcgacgaggtctccataacctacctcgtacagactgggagggatgaagagaaactgaagtacataaagaagtaccttcaagccgttggcatgtttcgggactttaatgatccatcacaggatcctgattttacgcaagtggtggaactagacctgaagactgtagttccgtgttgtagcggtcctaagaggccccaagataaagtggctgtcagcgatatgaaaaaggatttcgagtcttgcctgggcgcaaagcaagggttcaagggatttcaagtagctcctgagcatcataacgaccataagactttcatttacgacaatacagaatttactctcgctcacggttcggtcgtaatcgccgctttgtag

SEQ ID NO: 126408 - DNA, 2670 bp, Artificial Sequence
  derived and/or modified sequence
atgtctaacccatttgctcatcttgctgaacccctggacccagttcagccaggcaagaaatttttcaatctaaacaaactggaagattcccgatacggcaggcttccctttagtatcagggtgttactagaggccgcaattcggaactgcgatgagttcctggtcaagaagcaggatatagagaacatcctccactggaatgtaacccagcacaagaatattgaggtcccattcaagcccgccagggtcatactgcaagattttacaggcgttccagctgtcgtggattttgccgcaatgagagatgcggtcaagaaactgggtggcgaccctgagaagattaatcctgtgtgtcctgcagaccttgtgatagatcacagtatccaggtggattttaatcggagagccgactctctccagaagaaccaggacctcgagtttgagcgcaatagggagagatttgaattcctgaaatggggaagccaggcctttcacaacatgcggatcatccctccaggtagcgggatcattcatcaagtaaacctggagtacctggcacgcgtggtgtttgatcaggatggctactattaccctgatagtctcgtcggtactgattcccacactactatgatcgatgggttagggattttgggctggggcgttggaggcatcgaagcagaggccgttatgctcgggcagcctataagcatggttctcccacaagtgatcggatatcgcctgatgggtaaacctcatccgctggtgacctcgacggatatagtgctcacaatcaccaaacatctccgccaggttggtgtggtcggtaagtttgtggagtttttcggcccgggagtcgcccagctctcaattgctgacagagctaccatcgcgaatatgtgccctgagtatggagcaaccgctgcttttttccccgtggatgaggtttcaattacctacctggtgcagactggtcgggatgaggagaagcttaaatacattaagaagtatttacaggctgtgggcatgtttcgggatttcaatgaccccagccaggatccggatttcacgcaggtcgtggagctggacctcaaaactgtggtaccgtgttgcagtggaccaaaacgcccgcaggataaagtcgctgtcagtgacatgaagaaagacttcgaatcgtgtcttggggccaagcaaggcttcaagggtttccaggtggcccctgaacaccataatgaccataagacttttatttatgacaataccgaattcacgctggcgcatggctcagttgtaatcgcagcgattaccagctgcacaaatacttctaatcccagcgtgatgctgggagcgggattactcgctaagaaagctgtggacgccgggctgaatgtgatgccatatattaagacatccctgtcaccgggaagcggtgtggttacatattacctccaagagagtggagtgatgccatacttgtctcagctcggattcgatgtcgtaggctatggctgcatgacctgtatcggaaatagcggcccccttcctgaacctgtcgtggaagccatcacacagggcgaccttgtcgctgttggagtgctgtcgggtaataggaatttcgagggacgagtgcaccctaacacgcgcgcgaactacttagccagccctccactcgttatcgcatacgctattgctggcaccatcaggattgattttgaaaaggagccactaggggtcaacgcgaaaggtcaacaggttttcctgaaagacatctggccaaccagggacgagatccaggctgtggagcgacaatatgttattcctggcatgttcaaggaggtgtaccagaaaattgagaccgtcaacgaaagctggaatgccctggccaccccgtctgacaagctcttcttctggaacagcaaaagcacttacatcaagagcccccccttttttgaaaacttgaccctcgacctacagcctcccaagtctattgtcgacgcctacgttctgctaaacctcggcgactcagttacaaccgatcacatctctcccgctgggaacattgcccgaaacagccccgcagctaggtatctgaccaatcggggactcactccacgtgagttcaactcttacgggtccagaagggggaacgatgcggtcatggctcgcggcaccttcgctaatattcggctgttgaacaggtttttgaataaacaggccccacagaccatccaccttccttccggggaaattctggatgtttttgatgccgccgaacgataccagcaggctgggcttcctctcatcgttctcgctggaaaagaatacggggcagggagttcacgggattgggcggccaagggcccttttctcctggggatcaaagcagttctggcagagtcatatgaacgcatccaccggagcaacctcgtcggaatgggcgtcatacctttagagtatctgcccggcgagaacgccgatgcactggggctcactggacaggaaaggtacacaattatcatccctgagaatcttaagcctcaaatgaaagttcaagtgaagctggatacaggaaaaaccttccaagccgtgatgaggtttgacactgatgtagaactgacctacttcctcaatggcggtatcctgaattacatgattcggaagatggccaaatag

SEQ ID NO: 126409 - DNA, 2346 bp, Artificial Sequence
  derived and/or modified sequence
cagttagagcctaggtctgctcgcgaaagagtgccccttttaggatctggatccccggtagctggtgcccctccatgtagtcggcggaatacatggccctccgttataatgtccaacccatttgcacacctcgcagaacctctggacccagtccagcctggaaagaaattcttcaatctgaacaaattggaagacagtcggtacggcaggcttcctttctctattcgggtgctgttggaggccgctatccgaaactgtgatgagttccttgtgaaaaagcaggacatcgagaatatattgcattggaacgttactcagcacaagaacattgaagtgccttttaagcctgctcgggtgatcctccaggacttcaccggtgtgcccgcagtggtcgactttgctgccatgagggacgccgttaaaaagctgggcggggaccccgagaaaatcaatccggtgtgccctgctgacttggtcattgatcacagcatacaagtggactttaatcggcgcgccgattcactgcagaagaatcaggacctcgagtttgagcgcaacagggaaaggttcgagtttctcaagtggggaagtcaagcgttccacaacatgcggatcatacctcctgggagtggaataattcatcaggtgaatctggaatatctagcaagagttgtctttgaccaggacgggtactattaccctgattctctggtgggcactgatagccatacgacaatgattgatggccttggaattctgggctggggcgtgggtggaattgaagctgaggctgtgatgctggggcagccaattagtatggtgctgcctcaggttattggatatcggctcatggggaaacctcatcctctggtaacgtccaccgatattgtgctcaccatcactaagcatctgcggcaagtgggagtggtggggaagtttgtggagttcttcgggcctggggttgcccaactgagtatagccgatcgtgcaacaatagccaacatgtgtcccgaatacggtgcgacagccgccttcttccctgtggacgaagtgtccatcacttacctggtacagacaggacgagatgaagagaagctcaagtacatcaagaaatacctgcaggctgttggtatgttccgcgactttaacgacccttctcaggatccggattttacacaggtagtggagctggacctgaagactgtggttccttgctgtagcgggccgaaaaggcctcaagacaaggtggccgtctcagatatgaagaaagactttgaatcctgccttggtgccaagcagggctttaagggatttcaggtggctccggaacaccacaacgaccacaagacctttatctatgataatacagaatttacactcgcccatggaagcgtagtgatagccgccattacatcttgcactaataccagcaatccctctgtgatgcttggcgctggattgcttgccaagaaagctgtggacgccgggttgaacgtgatgccctacatcaagactagtctgtctcccggcagcggggtggtgacctattacctgcaggaaagcggcgttatgccgtaccttagccagctgggctttgacgtcgtaggatacgggtgcatgacatgcatcgggaactctggcccactgccagaaccagtcgtggaagctatcacacagggtgacctggttgcagttggggtcctctctggcaataggaatttcgaaggacgcgtacaccctaacaccagggccaactatctcgcctctcctcccctggtaattgcctacgcaattgctgggacaattaggatcgactttgagaaagaaccactgggcgtcaacgccaaggggcagcaagtattcctgaaggatatttggcccacaagggacgagattcaggctgtggagcgccagtacgtgatccctggcatgttcaaagaagtctaccagaagatcgagacagtcaatgagtcgtggaatgccttagctacaccttccgataaattattcttttggaactcaaaatctacatatatcaaatccccccctttcttcgagaatctgacacttgacctgcagccacccaagtccatcgtggacgcttatgttttacttaacctgggagacagtgtcacaaccgaccatatctcccctgctgggaacatcgcacgtaacagtcccgctgctaggtatttaaccaacagaggatttgagaggcaactgacccaggagaacacagacttgtgtcttagcccacctctcttgacttctctcagctctccccttaaactgtggggccagctattctgtcacggcgagcagtgcctgggggacctggaaaagtag

SEQ ID NO: 126410 - DNA, 2373 bp, Artificial Sequence
  derived and/or modified sequence
atgagggatgccgtcaagaagcttggaggagatcccgaaaagatcaatccagtgtgcccggccgatctagtgatcgaccacagtatccaggtcgattttaacaggcgcgctgattctctccagaagaaccaggacctggaatttgaacggaatagggagaggtttgaatttctaaaatggggtagtcaggcatttcataatatgaggataattcctcccggtagcgggattattcaccaagttaatttagaatatctggcacgggtcgtgtttgatcaagacggatattactaccctgactcactagtgggaacggacagccacacgacaatgatagacggcctaggcattctgggatggggtgtgggcgggattgaggctgaagccgtaatgctgggccagccaattagcatggtcctgccacaggtgatcgggtaccgtctgatgggaaagcctcatcccctggtaacatccacggacatcgtgttaacaatcaccaagcacttacgtcaggtgggggtcgtgggtaagttcgttgagttttttggaccgggagttgcacagttatcaatcgcagaccgcgcgaccatcgccaacatgtgtcccgagtatggcgcaacagctgcttttttcccagtggacgaggtgagcattacatacttagtgcagaccggacgggacgaagaaaagttaaagtatattaagaagtacttgcaagcagttggtatgttccgagacttcaacgaccctagtcaggaccccgactttactcaggtagtggagctcgacttgaaaacggtggtaccttgctgttccggcccaaaacgaccgcaagataaggtcgccgtgagcgacatgaaaaaagacttcgagagctgtctgggagctaagcagggctttaaagggttccaggtcgcaccagagcatcataacgatcataagacttttatatacgataacaccgagttcaccttggcacacgggtcagtcgtgatcgccgcaatcacgtcctgcaccaacacaagtaacccttccgtgatgttgggcgcgggactactggctaaaaaagctgtggatgccggactcaatgtcatgccttatattaaaacttcattgtcccccggttccggggttgttacttactacctgcaagaatcgggagttatgccctacctcagccagctggggttcgacgtggttggatacgggtgtatgacctgtatcggtaatagcggccctctgccagagcctgtggtcgaagccattacacaaggggatttggttgccgtcggtgtgctgtccggaaatcggaatttcgaggggagagtccaccccaatactagagccaattacctcgcctcccctcccctggtaatcgcatacgccatcgcaggcacaatcaggatcgattttgaaaaagaaccactgggcgtgaatgctaaaggccagcaggtgttcttaaaagatatctggcccacccgggatgagatacaggctgtggaacggcaatacgtcattcccggcatgtttaaagaagtttaccagaagatcgaaacagttaatgaaagttggaatgctctcgccacacctagcgataaactgttcttctggaactccaaatccacttatattaagagcccgcccttttttgaaaatctgactctggatctgcaaccccccaagtctattgtagatgcctacgtgttgctgaacctcggggactccgtcaccaccgaccacattagcccagccgggaacatcgctcgcaactcccccgctgcccggtaccttacgaatcgggggctgaccccaagagagttcaactcctacggctcacggagggggaatgatgctgtgatggcaaggggaaccttcgccaatattcggctgcttaataggtttctcaataaacaggcccctcagacaatccatctgcccagcggcgaaattttagacgtgtttgacgccgcagaacggtaccagcaggctgggctcccacttattgtcttggcaggaaaggaatacggtgctggcagttccagagactgggcagcaaagggcccatttctcttgggaatcaaggccgtcctggcggagagctacgagcgcattcacagatccaatcttgtggggatgggcgtcatcccactcgaataccttcctggggagaacgccgacgctttggggctgactggccaggaacgttacaccattatcattccagagaacctgaagccacagatgaaggtgcaggtgaagctggacaccggtaagacctttcaggcagtgatgagattcgacaccgatgtcgagctgacctactttctgaatggaggcattctcaactatatgattaggaagatggccaagtag

SEQ ID NO: 126411 - DNA, 2670 bp, Artificial Sequence
  derived and/or modified sequence
atgagcaacccctttgcccacctggccgagcccctggaccctgtgcagcccgggaagaagttcttcaacctgaacaagctggaggacagccgctatggccgcctgcccttcagcatccgggtgctgctggaggccgccatccggaactgtgatgagttcctggtgaagaagcaggacatcgagaacatcctgcactggaatgtgacccagcacaagaacatcgaggtgcccttcaagccagcccgggtcatcctgcaggacttcaccggggtgcctgctgtggtggactttgctgccatgagagatgctgtgaagaagctgggcggggaccctgagaagatcaaccctgtgtgcccagctgacctggtgattgaccacagcatccaggtggacttcaacagaagagctgacagcctgcagaagaaccaggacctggagtttgaaagaaaccgggagagatttgagttcctgaagtggggcagccaggccttccacaacatgaggatcatccccccaggcagcggcatcatccaccaggtgaacctggagtacctggcccgggtggtgtttgaccaggacggctactactacccagacagcctggtgggcacagacagccacaccaccatgattgatggcctgggcatcctgggctggggcgtgggcggcatcgaggccgaggccgtgatgctgggccagcccatctccatggtgctgccccaggtgattggctaccgcctgatgggcaagccccaccccctggtgaccagcacagacatcgtgctgaccatcaccaagcacctgcggcaggtgggcgtggtgggcaagtttgtggagttctttggacctggggtggcccagctgagcattgctgaccgggccaccatcgccaacatgtgcccagaatatggagccacagctgccttcttccctgtggatgaggtgtccatcacctacctggtgcagacaggaagagatgaggagaagctgaagtacatcaagaagtacctgcaggccgtgggcatgttccgggacttcaatgaccccagccaggaccctgacttcacccaggtggtggagctggacctgaagacagtggtgccctgctgcagcggccccaagaggccccaggacaaggtggccgtgtctgacatgaagaaggactttgagagctgcctgggcgccaagcagggcttcaagggcttccaggtggcccctgagcaccacaatgaccacaagaccttcatctatgacaacacagagttcaccctggcccacggctctgtggtgattgctgccatcaccagctgcaccaacaccagcaaccccagcgtgatgctgggcgccggcctgctggccaagaaggctgtggatgctggcctgaatgtgatgccctacatcaagaccagcctgagccctggcagcggcgtggtgacctactacctgcaggagagcggcgtgatgccctacctgagccagctgggctttgatgtggtgggctacggctgcatgacctgcatcggcaacagcggccccctgcctgagcctgtggtggaggccatcacccagggcgacctggtggccgtgggcgtgctgagcggcaacagaaactttgagggccgggtgcaccccaacacccgggccaactacctggccagcccccccctggtgattgcctatgccatcgccggcaccatcagaattgactttgagaaggagcccctgggcgtgaatgccaagggccagcaggtgttcctgaaggacatctggcccaccagagatgagatccaggccgtggagcggcagtatgtgattcctggcatgttcaaggaggtgtaccagaagattgagaccgtgaatgaatcctggaatgccctggccacccccagcgacaagctgttcttctggaacagcaagagcacctacatcaagagcccccccttctttgagaacctgaccctggacctgcagccccccaagagcatcgtggatgcctacgtgctgctgaacctgggggacagcgtgaccacagaccacatcagccctgctggcaacatcgccaggaacagccctgctgcccgctacctgaccaacagaggcctgaccccccgggagttcaacagctatggcagcagaagaggaaatgatgctgtgatggcccggggcacctttgccaacatccggctgctgaaccgcttcctgaacaagcaggccccccagaccatccacctgcccagcggggagatcctggatgtgtttgatgctgctgagcgctaccagcaggccggcctgcccctgattgtgctggccggcaaggagtatggagctggcagcagccgggactgggccgccaagggccccttcctgctgggcatcaaggctgtgctggccgagagctatgaaagaatccacaggagcaacctggtgggcatgggcgtcatccccctggagtacctgcccggggagaatgctgatgccctgggcctgaccggccaggagcgctacaccatcatcatccctgagaacctgaagccccagatgaaggtgcaggtgaagctggacaccgggaagaccttccaggccgtgatgagatttgacacagatgtggagctgacctacttcctgaatggaggcatcctgaactacatgatcaggaagatggccaagtag

SEQ ID NO: 126412 - DNA, 1305 bp, Artificial Sequence
  derived and/or modified sequence
atgagcaacccctttgcccacctggccgagcccctggaccctgtgcagcccgggaagaagttcttcaacctgaacaagctggaggacagccgctatggccgcctgcccttcagcatccgggtgctgctggaggccgccatccggaactgtgatgagttcctggtgaagaagcaggacatcgagaacatcctgcactggaatgtgacccagcacaagaacatcgaggtgcccttcaagccagcccgggtcatcctgcaggacttcaccggggtgcctgctgtggtggactttgctgccatgagagatgctgtgaagaagctgggcggggaccctgagaagatcaaccctgtgtgcccagctgacctggtgattgaccacagcatccaggtggacttcaacagaagagctgacagcctgcagaagaaccaggacctggagtttgaaagaaaccgggagagatttgagttcctgaagtggggcagccaggccttccacaacatgaggatcatccccccaggcagcggcatcatccaccaggtgaacctggagtacctggcccgggtggtgtttgaccaggacggctactactacccagacagcctggtgggcacagacagccacaccaccatgattgatggcctgggcatcctgggctggggcgtgggcggcatcgaggccgaggccgtgatgctgggccagcccatctccatggtgctgccccaggtgattggctaccgcctgatgggcaagccccaccccctggtgaccagcacagacatcgtgctgaccatcaccaagcacctgcggcaggtgggcgtggtgggcaagtttgtggagttctttggacctggggtggcccagctgagcattgctgaccgggccaccatcgccaacatgtgcccagaatatggagccacagctgccttcttccctgtggatgaggtgtccatcacctacctggtgcagacaggaagagatgaggagaagctgaagtacatcaagaagtacctgcaggccgtgggcatgttccgggacttcaatgaccccagccaggaccctgacttcacccaggtggtggagctggacctgaagacagtggtgccctgctgcagcggccccaagaggccccaggacaaggtggccgtgtctgacatgaagaaggactttgagagctgcctgggcgccaagcagggcttcaagggcttccaggtggcccctgagcaccacaatgaccacaagaccttcatctatgacaacacagagttcaccctggcccacggctctgtggtgattgctgccctgtag

SEQ ID NO: 126413 - DNA, 2346 bp, Artificial Sequence
  derived and/or modified sequence
cagctggagcccaggtctgcccgggagcgggtgcccctgctgggcagcggcagccctgtggccggggccccaccctgcagcagaagaaacacctggcccagcgtcatcatgagcaacccctttgcccacctggccgagcccctggaccctgtgcagcccgggaagaagttcttcaacctgaacaagctggaggacagccgctatggccgcctgcccttcagcatccgggtgctgctggaggccgccatccggaactgtgatgagttcctggtgaagaagcaggacatcgagaacatcctgcactggaatgtgacccagcacaagaacatcgaggtgcccttcaagccagcccgggtcatcctgcaggacttcaccggggtgcctgctgtggtggactttgctgccatgagagatgctgtgaagaagctgggcggggaccctgagaagatcaaccctgtgtgcccagctgacctggtgattgaccacagcatccaggtggacttcaacagaagagctgacagcctgcagaagaaccaggacctggagtttgaaagaaaccgggagagatttgagttcctgaagtggggcagccaggccttccacaacatgaggatcatccccccaggcagcggcatcatccaccaggtgaacctggagtacctggcccgggtggtgtttgaccaggacggctactactacccagacagcctggtgggcacagacagccacaccaccatgattgatggcctgggcatcctgggctggggcgtgggcggcatcgaggccgaggccgtgatgctgggccagcccatctccatggtgctgccccaggtgattggctaccgcctgatgggcaagccccaccccctggtgaccagcacagacatcgtgctgaccatcaccaagcacctgcggcaggtgggcgtggtgggcaagtttgtggagttctttggacctggggtggcccagctgagcattgctgaccgggccaccatcgccaacatgtgcccagaatatggagccacagctgccttcttccctgtggatgaggtgtccatcacctacctggtgcagacaggaagagatgaggagaagctgaagtacatcaagaagtacctgcaggccgtgggcatgttccgggacttcaatgaccccagccaggaccctgacttcacccaggtggtggagctggacctgaagacagtggtgccctgctgcagcggccccaagaggccccaggacaaggtggccgtgtctgacatgaagaaggactttgagagctgcctgggcgccaagcagggcttcaagggcttccaggtggcccctgagcaccacaatgaccacaagaccttcatctatgacaacacagagttcaccctggcccacggctctgtggtgattgctgccatcaccagctgcaccaacaccagcaaccccagcgtgatgctgggcgccggcctgctggccaagaaggctgtggatgctggcctgaatgtgatgccctacatcaagaccagcctgagccctggcagcggcgtggtgacctactacctgcaggagagcggcgtgatgccctacctgagccagctgggctttgatgtggtgggctacggctgcatgacctgcatcggcaacagcggccccctgcctgagcctgtggtggaggccatcacccagggcgacctggtggccgtgggcgtgctgagcggcaacagaaactttgagggccgggtgcaccccaacacccgggccaactacctggccagcccccccctggtgattgcctatgccatcgccggcaccatcagaattgactttgagaaggagcccctgggcgtgaatgccaagggccagcaggtgttcctgaaggacatctggcccaccagagatgagatccaggccgtggagcggcagtatgtgattcctggcatgttcaaggaggtgtaccagaagattgagaccgtgaatgaatcctggaatgccctggccacccccagcgacaagctgttcttctggaacagcaagagcacctacatcaagagcccccccttctttgagaacctgaccctggacctgcagccccccaagagcatcgtggatgcctacgtgctgctgaacctgggggacagcgtgaccacagaccacatcagccctgctggcaacatcgccaggaacagccctgctgcccgctacctgaccaacagaggatttgagcggcagctgacccaggagaacacagacctgtgcctgagcccccccctgctgaccagcctgagcagccccctgaagctgtggggccagctgttctgccacggggagcagtgcctgggggacctggagaagtag

SEQ ID NO: 126414 - DNA, 2373 bp, Artificial Sequence
  derived and/or modified sequence
atgagagatgctgtgaagaagctgggcggggaccctgagaagatcaaccctgtgtgcccagctgacctggtgattgaccacagcatccaggtggacttcaacagaagagctgacagcctgcagaagaaccaggacctggagtttgagaggaaccgggagagatttgagttcctgaagtggggcagccaggccttccacaacatgaggatcatccccccaggcagcggcatcatccaccaggtgaacctggagtacctggcccgggtggtgtttgaccaggacggctactactacccagacagcctggtgggcacagacagccacaccaccatgattgatggcctgggcatcctgggctggggcgtgggcggcattgaagctgaggccgtgatgctgggccagcccatctccatggtgctgccccaggtgattggctaccgcctgatgggcaagccccaccccctggtgaccagcacagacatcgtgctgaccatcaccaagcacctgcggcaggtgggcgtggtgggcaagtttgtggagttcttcggccctggggtggcccagctgagcattgctgaccgggccaccatcgccaacatgtgcccagaatatggagccacagctgccttcttccctgtggatgaggtgtccatcacctacctggtgcagacaggaagagatgaggagaagctgaagtacatcaagaagtacctgcaggccgtgggcatgttccgggacttcaatgaccccagccaggaccctgacttcacccaggtggtggagctggacctgaagacagtggtgccctgctgcagcggccccaagaggccccaggacaaggtggccgtgtctgacatgaagaaggactttgagagctgcctgggcgccaagcagggcttcaagggcttccaggtggcccctgagcaccacaatgaccacaagaccttcatctatgacaacacagagttcaccctggcccacggctctgtggtgattgctgccatcaccagctgcaccaacaccagcaaccccagcgtgatgctgggcgccggcctgctggccaagaaggctgtggatgctggcctgaatgtgatgccctacatcaagaccagcctgagccctggcagcggcgtggtgacctactacctgcaggagagcggcgtgatgccctacctgagccagctgggctttgatgtggtgggctacggctgcatgacctgcatcggcaacagcggccccctgcctgagcctgtggtggaggccatcacccagggcgacctggtggccgtgggcgtgctgagcggcaacagaaactttgagggccgggtgcaccccaacacccgggccaactacctggccagcccccccctggtgattgcctatgccatcgccggcaccatcagaattgactttgagaaggagcccctgggcgtgaatgccaagggccagcaggtgttcctgaaggacatctggcccaccagagatgagatccaggccgtggagcggcagtatgtgattcctggcatgttcaaggaggtgtaccagaagattgaaacagtgaatgaatcctggaatgccctggccacccccagcgacaagctgttcttctggaacagcaagagcacctacatcaagagcccccccttctttgagaacctgaccctggacctgcagccccccaagagcatcgtggatgcctacgtgctgctgaacctgggggacagcgtgaccacagaccacatcagccctgctggcaacatcgccaggaacagccctgctgcccgctacctgaccaacagaggcctgaccccccgggagttcaacagctatggcagcagaagaggaaatgatgctgtgatggcccggggcacctttgccaacatccggctgctgaaccgcttcctgaacaagcaggccccccagaccatccacctgcccagcggggagatcctggatgtgtttgatgctgctgagcgctaccagcaggccggcctgcccctcatcgtgctggccggcaaggagtatggagctggcagcagccgggactgggccgccaagggccccttcctgctgggcatcaaggctgtgctggccgagagctatgagcgcatccacaggagcaacctggtgggcatgggcgtcatccccctggagtacctgcctggagaaaatgctgatgccctgggcctgaccggccaggagcgctacaccatcatcatccctgagaacctgaagccccagatgaaggtgcaggtgaagctggacaccgggaagaccttccaggccgtgatgagatttgacacagatgtggagctgacctacttcctgaatggaggcatcctgaactacatgatcaggaagatggccaagtag

SEQ ID NO: 126415 - DNA, 2670 bp, Artificial Sequence
  derived and/or modified sequence
atgagcaaccccttcgcccacctggccgagcccctggaccccgtgcagccgggcaaaaaattttttaatctgaataagttagaggactcccgctacggcaggctcccattcagcatacgagtgctgctggaggccgccatacggaactgtgatgagtttctggttaaaaaacaggatattgagaacatccttcactggaatgtcacgcaacacaaaaatatagaggtgcctttcaaacctgctcgggtcattctgcaggacttcacaggggtgcccgcggttgtggattttgcagccatgagggacgctgtgaagaagttagggggcgaccccgagaaaattaacccggtgtgtcctgctgatctcgtgatcgaccactccatccaggtggatttcaatcggcgggccgactccctgcagaagaaccaagacctggaatttgaaaggaatagagagaggttcgagttcctgaagtgggggagtcaggcattccataacatgcgtatcattcctccaggctctggcattatacaccaagtaaacctcgaatacttggcacgggtcgtcttcgaccaggatggatattactatcctgattctctcgtcggcaccgacagccataccacaatgattgacgggctcgggatcctgggctggggcgtgggaggtattgaggctgaggctgtgatgttggggcagcctatctcaatggtgctgccacaggtgatcggttatcggcttatggggaagcctcaccctctggtgacatccaccgacattgtcctcacgataaccaagcatctccggcaagtgggcgtagttggtaagtttgtggagttttttgggccgggcgtggctcagctcagcatcgccgacagagctaccatagcaaatatgtgtcctgagtatggcgccactgcagcctttttccctgtggacgaggtgagcatcacctatctggtacagacaggccgagacgaggaaaagcttaaatacattaagaagtacctccaagctgttggaatgtttcgcgatttcaatgaccctagtcaagatcccgatttcacgcaggtcgtggagctggacctgaagaccgttgtgccttgttgtagcggacccaagcggccacaggacaaagtagcagtctccgatatgaaaaaggactttgagagctgtctgggggcaaaacaaggctttaagggatttcaggtcgccccggaacaccataacgatcacaaaacttttatatacgataatacggaattcaccctcgcccacggaagcgtggtgatcgctgcaatcacaagctgcacaaatacgtctaacccgagcgtgatgctgggcgcaggcctgctcgcgaaaaaggccgtggacgccggactcaacgtgatgccctacatcaagacatccctgtcaccggggtctggtgtggtgacatattatctccaagagtctggcgtgatgccttacctatcccaattgggcttcgacgtcgttggctacggatgtatgacttgcatcggcaactccggccctctgcccgaaccagtagtagaggctatcacccaaggagacttggtggctgtgggcgttctctccgggaatcgcaactttgaagggagagtccaccccaacacacgggcaaactatctcgccagcccaccactcgtgatcgcttacgccatagccgggaccattaggatcgattttgaaaaggagccgctcggggtcaacgccaaggggcagcaggtgttcctgaaggacatttggccaactcgagacgagattcaggctgtcgaacggcaatacgtcattcccgggatgttcaaggaggtttatcagaagattgaaactgtgaacgagtcctggaatgccctcgctaccccctcagataaactctttttctggaattcaaagtcaacctatatcaagagtccgccctttttcgagaatctaactctggatctgcagccaccaaaatccattgttgatgcctacgtactgctgaacctgggtgactccgttacaaccgaccacatatccccagcaggcaacatcgctaggaactccccggctgctaggtatttgacaaatcggggcttgacacccagggagttcaatagctacggttccagaaggggcaatgacgctgtgatggcccgtgggacatttgccaacatcaggcttctgaacagatttttgaacaaacaggcccctcagactatccacctcccttcgggtgaaattttagacgtgttcgacgctgccgaaaggtaccaacaggccggcttgccactgatcgtccttgccggaaaggagtatggggccgggtcgtccagagactgggccgccaagggaccattcttgcttgggatcaaagcagtactggccgagtcatacgaacgcattcacagaagcaacttggtcggtatgggtgtgattccactggagtacttacctggggaaaatgccgatgcactcgggctaaccgggcaggagagatatacaattattatacccgagaacctgaagccacagatgaaagtccaggttaaactcgatactggaaagacctttcaagctgttatgagatttgacacagatgtggaacttacatactttctgaacggtgggattttgaactatatgattcgcaagatggccaaatag

SEQ ID NO: 126416 - DNA, 1305 bp, Artificial Sequence
  derived and/or modified sequence
atgagcaaccccttcgcccacctggccgagcccctggaccccgtgcagccggggaagaagttcttcaacctcaataaactagaggattccagatacggacgcctccccttctctattcgtgtgctgctagaggccgcaattcgcaactgcgacgagtttctggtaaagaagcaagacatcgagaatatcctgcattggaatgtgacacaacacaagaatattgaggtccccttcaagcccgccagggtcatcctgcaggattttacaggagtccccgcggtcgtggattttgctgctatgcgcgacgccgttaaaaagctggggggggaccctgaaaagattaatcctgtgtgtccggccgacctcgttattgatcactccattcaggttgacttcaataggagggcagattccctccagaagaaccaagatttagagtttgaacggaaccgggaaagattcgagtttctaaagtggggcagccaagcattccataacatgaggatcatacccccaggctctgggataatccaccaggtgaacctggagtacctggcaagggttgtcttcgatcaagatggctactactaccctgattctcttgtgggtaccgattctcataccacaatgatagacggcctaggaatcctgggatggggcgtgggaggaatcgaggccgaggcggtgatgctgggccagcccatcagcatggtgctgccacaggtgatcggctacaggctgatgggcaagccccaccctctcgtgacctcaacagacattgtgctgacaataaccaagcacctgaggcaggtgggagtagtgggcaaatttgtggagtttttcggccccggggtggcccagcttagtattgctgaccgggctaccatcgccaacatgtgtcccgagtacggcgccacagccgcctttttccctgtcgacgaagtatcaataacttatctcgtgcaaactgggagggatgaagagaagctgaaatacatcaagaaatatctgcaagccgtggggatgttcagggactttaatgaccccagtcaggacccagatttcacccaggttgtcgagctggacctgaagaccgtcgtgccatgctgcagtggcccaaagcggccccaggataaggttgccgtctccgacatgaaaaaggacttcgaaagctgcctcggcgcgaagcagggctttaagggcttccaagtggcacccgagcatcataatgatcacaagacttttatttatgacaataccgaattcacactagcacatggcagcgttgtgattgccgccctctag

SEQ ID NO: 126417 - DNA, 2670 bp, Artificial Sequence
  derived and/or modified sequence
atgagcaaccccttcgcccacctggccgagcccctggaccccgtgcagcctggaaagaaatttttcaacctaaataagcttgaagactctcgctatggcagattgcctttttcaatcagggtgctgctggaggcagccataaggaactgcgatgaattcttggttaagaaacaggacatcgaaaatatcctccactggaatgtgacacagcataagaacattgaagtgccatttaaacctgctcgggttattctccaagacttcacaggagtccctgccgtcgtggacttcgccgccatgcgtgacgcagttaaaaaacttggaggtgacccagagaagattaaccccgtttgcccagcggatctggtgattgatcattcaatccaagtcgactttaaccgacgggccgattcacttcagaagaatcaggacctcgaattcgagcggaatcgtgaacgatttgagttcttaaagtggggctcccaggcttttcacaatatgcgcattattcctccagggtccgggataatccaccaggtgaatttagaatacctggcacgggttgtgtttgaccaagatgggtactactacccagactctttggtggggacagacagccacactactatgatcgatggattaggcatactgggatggggcgttggcgggatcgaggctgaagcggtgatgctcggacaacctattagcatggtacttcctcaggttatcggttaccggcttatgggcaagccccatcctcttgttacttccactgacatcgttctaactattactaagcacctgcggcaggtgggagtggtcggaaagttcgtggaattttttgggcccggggtggcccagctgagcatagcagatagagcaacaatcgccaatatgtgtcctgagtatggcgctacggccgcgttcttcccagtagatgaggtgtctattacctatctggtgcagacagggagggacgaagaaaagttgaagtatataaagaagtacttgcaagccgtggggatgtttcgtgattttaatgatccaagccaggatcctgatttcacgcaagtggttgaactcgaccttaaaactgtggttccttgctgtagcggcccaaaaaggccacaggataaggtcgccgtctctgatatgaagaaagacttcgagtcctgcttgggggcaaagcaggggtttaaaggctttcaagtggcacccgagcaccacaacgatcacaagacatttatatacgataatacagaattcaccctcgcgcatggaagcgtggtgatagccgcaatcacgagctgcaccaacacttccaaccctagcgtgatgctcggtgctggcttgctggccaaaaaagccgtcgatgccggcctgaacgtcatgccctacattaagacctctctaagtcccggctctggggttgtgacctattatttgcaagaatctggcgttatgccgtacctatcacagctaggctttgacgtggtcggatacggctgcatgacttgtataggcaattccggaccacttccggaaccggtggttgaggccattacacagggtgatctcgtggccgtgggtgttctttcaggcaatcgcaacttcgaaggaagggtgcaccctaatacacgggcaaattacctcgcctcccctcctctcgtaatcgcctatgcaatcgcaggtacaatacgcattgactttgaaaaggagcctcttggtgttaacgcaaaaggacagcaagttttcttgaaagatatctggcctacacgagacgagatacaagctgtggagagacaatatgtcatccctggcatgttcaaggaggtatatcaaaagatcgagaccgtcaatgaaagctggaacgcactggctaccccttcagataaattatttttctggaattcaaaatctacctacataaagtcacccccattttttgaaaatttaactctcgatcttcagcctcccaagagcatcgtggatgcttacgttctgttgaatctgggagactctgtcacgacggaccatatctcgcccgccggaaacatcgcacgaaactcacctgccgcccgctatctgaccaaccgtgggttgacgcctagagaatttaactcctatggaagccgccgcggtaatgatgcagtcatggctcgggggacatttgccaatattaggctgctgaatagatttctgaacaaacaggctccccagaccatccacttgccctcaggcgaaatcctggatgtatttgacgccgcggaaaggtatcagcaggcaggattacctctcatcgtgctggcgggcaaggagtacggcgctgggtccagcagagactgggccgccaaagggccattcctcttggggattaaggccgtcttagccgagagctacgagcgcattcataggtctaatcttgtcggaatgggtgtaatcccgctggaatatctgccaggcgagaacgcagacgcactcgggctaacgggacaggagagatacactatcatcatccccgagaacctgaaacctcaaatgaaggtacaagttaagctcgacacgggcaaaacattccaagctgtcatgcggtttgatactgacgtggaactgacctattttctgaatggcgggatcctcaattatatgatcaggaagatggctaagtag

SEQ ID NO: 126418 - DNA, 2346 bp, Artificial Sequence
  derived and/or modified sequence
cagctggagccccggagcgcccgggagcgggtgcccctgctgggcagcggttctccagtggcgggcgcgcccccctgctccaggaggaatacttggccgtccgtgataatgtcaaacccgttcgcccatctggccgagcccctggatcccgtgcagccaggaaagaaattcttcaatctgaataaactggaggattcaagatatggaagactgcccttttcaatccgagtcttgctggaagctgcaatcagaaactgcgacgagttcctcgtgaagaagcaggatattgagaatatcctccactggaacgttactcagcacaaaaacattgaggttccttttaagcctgcccgggtaattctacaggactttaccggcgtcccagcagtcgtagattttgccgcgatgagggacgccgtgaagaaactgggaggggaccccgaaaaaatcaacccagtgtgccctgccgacttagtcatcgatcactctatccaggtcgactttaacaggcgagccgacagcctgcaaaaaaaccaagatctagagtttgagcgcaacagggaacggttcgagtttctcaagtgggggtcacaggcctttcataacatgaggattatcccccccgggtcaggcataatacaccaggtaaacctggagtacctggcccgtgtcgtatttgaccaggatggatactattatcccgattcactcgttggcactgactctcacaccacgatgatcgacgggctcggtattttaggctggggagtggggggcattgaggcagaagccgttatgctgggacagccaatttccatggtgctcccacaggtcattggttaccgccttatgggcaaaccccatccactggttacaagcacagatatagtgctcacaattaccaaacatttacgccaagtcggggtagtcgggaaatttgtggaattctttggacctggcgtggctcaactgtctattgccgatcgtgccacaatagcaaatatgtgtcctgagtacggcgccactgctgcttttttccccgtggacgaggtctccattacatacctggtgcaaactggccgggatgaggagaagctgaaatatattaaaaagtacctgcaggccgttggcatgttccgggacttcaacgatccttcacaggatcccgacttcacacaggtggtagaacttgatctgaaaacggtggtgccttgctgttccgggcctaagagaccccaggacaaggtcgccgtgagtgacatgaaaaaagactttgagtcatgcctcggagcaaaacaggggtttaagggcttccaggtggcacctgagcatcacaatgatcacaaaactttcatttacgacaacaccgagtttactctggcacacggcagtgtagtgattgctgcaattacatcatgcacaaacactagtaacccctccgtcatgttgggggccgggctcctcgccaagaaggctgtagatgccggtctcaatgtcatgccttacatcaagacatcattgtctcctgggagcggggtggtcacctattatctgcaggagagcggagtgatgccctatctgagccagctcggcttcgatgttgtcggctatggttgcatgacatgtatcggcaattcaggccctcttcctgagcctgtcgttgaggccattactcaaggcgacctggtcgctgtgggagtgctgagcggcaaccgcaattttgaggggcgagtgcatccaaataccagagccaattacctcgcatcgcctcccctggttatcgcttacgcgattgccggaaccattcgtatagactttgaaaaggaaccactcggcgtcaacgctaaaggacaacaggtattcctgaaagacatttggcctactcgcgacgaaatccaggccgttgagagacagtatgtgatcccagggatgttcaaagaagtgtatcaaaagatagaaacggttaacgagagttggaacgcccttgctactccatccgataagcttttcttctggaattccaagagcacctacattaagtccccccctttcttcgagaacctgacgctggacctgcagccccccaagtccatcgtagatgcttacgtgctactcaatctcggagactcagttaccactgaccacatctcacccgctggaaatatcgcccggaattcccctgccgctcgttacctgaccaataggggtttcgagcggcaattaacccaggaaaacaccgatctatgcctgagcccacccctcctgacgagcctttctagcccactgaaactgtgggggcagttgttctgtcacggcgagcagtgtctcggcgatctggagaaatag

SEQ ID NO: 126419 - DNA, 2373 bp, Artificial Sequence
  derived and/or modified sequence
atgcgggacgccgtgaagaagctgggcggcgaccccgagaagatcaaccctgtgtgccccgcagatctagtgattgatcactccattcaagtagatttcaataggcgcgcggatagccttcagaaaaaccaagacctcgagtttgagaggaacagagagcgatttgagtttctgaagtggggatcacaggctttccataacatgcggattatccccccaggctccggaataatacaccaggtgaatctggagtatctcgcgagggtggtgttcgatcaggacggctactactatccagattccctcgtgggcaccgactctcacacaacaatgatagatggtctaggtattctcggctggggcgtgggtggcattgaggccgaagccgtgatgctcggacagccaatcagtatggttctaccccaggttatcggctatagactgatgggcaagccgcacccgcttgtaacctccaccgatattgttctgacaatcacgaagcacttgaggcaagtaggggtggtcggcaaattcgttgagttctttggaccgggcgtcgcccagttgagcatcgctgaccgggctacaattgctaacatgtgtcctgaatatggagctaccgctgcattttttccagtggatgaagtctccattacttatctagtgcagacgggccgagatgaggagaaactaaagtacatcaaaaaatacttgcaggcggtgggcatgtttagggattttaacgacccaagccaggatcccgatttcacacaggtggttgaactggacctgaagaccgtggtcccctgctgctccggacccaaaaggccccaggataaagtcgctgtaagcgacatgaaaaaagatttcgaaagctgtctcggtgccaaacagggattcaaaggatttcaggttgctcccgaacatcataacgaccacaagacttttatctacgataacacagaattcactctggcccacggcagcgtggtgatcgcagccataacatcatgcactaacacaagcaatcccagcgttatgttgggggctgggctgttggccaagaaagctgtggatgcaggactgaacgtcatgccttacatcaaaaccagcctgtccccaggtagcggtgtcgtgacgtattatctacaggagtctggcgtcatgccgtatttgagccagctgggtttcgatgtcgtggggtacggctgtatgacctgtattgggaactctggacctctcccggaaccggtggtggaagccatcacccagggcgacttggtcgcagtgggagtcttgtctggcaacagaaactttgaagggcgggtgcaccccaataccagagcgaattatctggccagtccccctctggtgatcgcctacgccatagccggaacgatccggatcgacttcgagaaggagcctttgggtgtgaacgccaaggggcagcaggttttcctaaaagatatctggccgacccgcgatgaaatacaggccgtcgagagacagtacgtaatccccggcatgttcaaggaagtgtatcagaaaatcgaaacagttaacgaatcctggaacgccctcgccacaccctccgacaagctgttcttctggaacagcaagtcaacttacattaagtcccctcccttcttcgaaaacttgaccttggacctccagcccccgaaaagtattgtcgatgcatacgtgctacttaaccttggagactccgtcactacggatcacatctcccctgccggaaacatcgccagaaacagccccgcggcccgctatctaactaatcgcggactgactccacgcgaattcaattcttatgggagtcgccgcgggaacgatgccgtgatggcaagaggaacttttgcaaacatccgcttgctcaaccgctttctgaacaagcaggccccacagaccatccatttgcccagtggagagatactcgatgtattcgatgctgccgagaggtatcagcaagccggacttcccttgatcgtgctggcaggtaaagaatacggcgctggtagctccagggactgggcagcaaaagggccctttctgctcggcatcaaggccgtgctggccgagtcctacgagcgtatccacagaagcaatcttgtcggcatgggagtgattccactggaatatctgcctggtgagaatgccgacgctctgggcctgactggccaggagaggtataccatcatcatcccggagaacctgaagcctcaaatgaaagttcaggtgaaactggatacaggcaagacctttcaagccgtgatgagatttgatacagatgtggagctaacctacttcctcaatggagggattctgaattatatgattaggaagatggcgaaatag

SEQ ID NO: 126420 - DNA, 2670 bp, Artificial Sequence
  derived and/or modified sequence
atgtctaacccttttgctcacttagccgaacccctagaccctgtccagcccggaaagaagtttttcaacctgaacaagctggaagattctcgctacgggcgtctaccgttctccatacgcgtcctattggaggccgctatccgtaattgcgacgagtttttggtaaagaaacaagatatcgagaacatcttacactggaatgtgactcagcataaaaacatagaagtcccctttaagcctgctcgagtgattctgcaagactttactggcgttcctgccgtggtcgattttgccgcaatgagggatgctgtgaaaaaattaggcggagatcccgaaaaaataaaccccgtctgccctgccgacctggtgatcgaccacagtattcaggtcgacttcaaccggcgtgctgatagcctgcagaaaaaccaggacctggagtttgaaaggaatcgggagcgctttgagttccttaagtggggctcgcaagcattccataacatgcgcattattcccccaggaagtggcattatccaccaggtgaatctggaatatctggcccgagtggtgtttgaccaggacggatactactatccagactcactggtgggtacagactcccacacaacaatgatcgacggattgggtattctggggtggggggtgggaggcattgaggccgaggctgtcatgcttggacagccaatcagtatggtgttgccccaggtgatcggttacaggctaatgggtaaacctcacccgctggtgacttctactgacattgtgctgacaatcacaaaacacttacggcaagtgggcgtggtaggaaaatttgttgagttcttcggccctggggtcgcccagctctctatcgctgatcgcgcaacgattgctaacatgtgtcctgaatacggcgctaccgctgctttctttcccgtagacgaggtctccattacatatctcgtgcagacaggtcgagacgaggaaaagttgaagtacattaagaaatacctgcaggccgtgggcatgtttcgcgatttcaatgatccttctcaggatcctgattttacccaggtagtagagttggacctcaagactgtcgtgccttgttgttccgggcctaagcggccacaggacaaagtggccgtaagcgacatgaaaaaagatttcgagagttgcttgggcgctaagcaaggcttcaaagggtttcaggtcgctccagaacaccacaatgatcacaaaacattcatctatgataacaccgagtttaccctggcccacgggtccgtcgtgattgccgctatcacctcttgtactaatacatccaatcctagtgttatgctgggagctggcctgctggccaagaaggcagtcgatgctgggctgaacgtcatgccctatataaaaacaagtctcagcccgggtagtggcgtggtcacctattatctacaggagagcggcgttatgccttatctctcacagctagggtttgacgtggttggctatgggtgtatgacatgcattggcaattccggtcccctcccggagccagtggtggaagccattactcagggagatctggtggccgtcggagtgctcagcggaaataggaacttcgaaggcagagttcaccccaacacgagggcaaactacctcgccagtccaccactcgtgatcgcatacgcaatcgcagggactattcgaattgattttgaaaaggagccactaggtgtgaatgccaaggggcagcaggtctttctgaaggatatctggccaacgcgggacgagatccaggccgtcgagaggcagtacgtgataccgggaatgtttaaggaggtttatcagaagattgagacagttaacgaatcctggaatgctctcgctacaccctctgacaagttatttttttggaatagtaaatctacgtacatcaagtcccccccattcttcgaaaatctgactttagacttacaaccgcctaagtccattgtggatgcttatgtgctcctcaacctaggtgatagcgtcactaccgatcatatatctcctgcaggtaacatagctcgcaacagccctgcagcaaggtacctgactaatcgcggactgacacctcgtgagttcaactcttacgggagccgtagagggaatgacgccgtgatggctcgcggtaccttcgccaatatccgactgctgaatagatttctcaacaagcaggctcctcagacaattcacttgccctcgggcgaaatactcgacgtctttgatgccgcagagcgctaccaacaggcgggtctgccactcattgtgctggctggaaaagagtatggagccggttcttctagagattgggcagccaagggcccatttctgcttggaatcaaggccgtgctggctgaatcatacgagcggattcatcgttcaaaccttgtaggtatgggggtgatacccctggagtacctgcctggtgagaacgccgacgccttgggactcacaggacaagagaggtacacaattattatacccgagaaccttaaaccacagatgaaagtgcaggtgaagttggacacaggcaagactttccaggcagtgatgcgcttcgataccgatgtcgagctgacgtacttcctgaatggcggaatactgaactacatgattcgaaaaatggcgaaatag

SEQ ID NO: 126421 - DNA, 1305 bp, Artificial Sequence
  derived and/or modified sequence
atgagcaatcccttcgcccatctggccgagcctctggatcccgtccagcctgggaagaaattcttcaacttaaacaaactggaggactctaggtacggccgactccctttttcaattcgtgttctcctcgaggctgccattcgtaactgtgatgagtttctggtaaaaaagcaggatatcgaaaacatcctccactggaacgtgactcagcataaaaatatcgaagtaccgtttaagccggctcgagtaatcttacaagattttacaggggtgccagccgtcgtggactttgcagctatgagagacgccgttaagaagctcggaggtgaccctgaaaagattaatcccgtatgtcccgcagatcttgtgatagaccattcaatacaggtggatttcaatcggagagccgactccctgcaaaagaaccaagatcttgagttcgaacgaaacagagaacgctttgaattcttgaagtgggggtcgcaggccttccacaatatgcggattatccccccagggtcaggcatcattcatcaggtgaatctcgagtacctggcaagggtcgttttcgaccaagacggctactattatcccgattcactggttgggactgacagccacacaacaatgattgatggcctcggcatattgggatggggcgttgggggaattgaagctgaagctgtgatgctggggcagccaatttccatggtactgccacaggtaattggctataggctgatgggaaaaccacatcccctggttacaagcacagacatcgttcttaccatcacgaagcatctgcgccaagtgggagttgtgggaaaatttgtggagtttttcggcccaggggtggcacaactaagtattgcagatagggctactatagcaaacatgtgtccagagtatggggctacggctgccttcttccccgtcgacgaagtcagcatcacttatttagtgcagacgggcagagacgaagaaaagttaaagtatataaaaaaataccttcaggccgtgggaatgttccgggactttaacgacccttcccaggacccagatttcacacaggtggttgagttagatttgaagacagtggtaccatgttgttctggacccaaacggccacaggataaagtagccgtgagtgatatgaagaaagacttcgagtcttgcctgggggctaaacaggggtttaaggggtttcaggtggccccagagcaccataacgatcataagacctttatttacgataacactgagttcactctggctcatggctctgttgtgattgctgctctctag

SEQ ID NO: 126422 - DNA, 2670 bp, Artificial Sequence
  derived and/or modified sequence
atgtccaacccattcgcacatctggccgaaccccttgacccggtgcagcctggaaagaaatttttcaacctgaacaagctcgaggactcccgatatgggaggcttcccttctctataagggtgctgttggaagccgctatcaggaactgtgatgagttcttggtcaagaaacaggatatcgaaaacatactccattggaatgtgacccagcacaaaaatatcgaggtgccctttaagcctgcacgcgtaattctgcaggacttcaccggtgtgcccgctgttgtcgacttcgctgcaatgagagatgcagtgaaaaagctcggcggagatcctgagaagatcaaccccgtctgccccgctgatttggtgattgaccactctatacaggtagattttaacagaagggccgactcgctgcagaaaaatcaggatctggagttcgagaggaaccgggaaagatttgagttccttaaatggggttcacaggccttccataacatgaggatcataccacccggatcaggcatcattcaccaggtcaacctggagtacctggcccgtgtggtttttgatcaggacggatactattatccggattctctcgtgggaaccgattctcatactacgatgatagacgggctcggtatcctaggatggggagtcggcggaatcgaggctgaagccgttatgttaggccagcccatttctatggtcctgccacaggtgatcggctacaggttgatgggtaaaccacatccgctggttaccagcacagatattgtgttgacgattactaagcatttacggcaggtcggggttgtgggcaaattcgtcgaattttttgggcctggagtggcgcaactgtcaatagctgatcgggctacaatcgccaatatgtgcccagagtacggggcaactgccgcattcttccccgttgacgaggtgtccattacctatctggtacaaacaggacgggatgaggagaagcttaagtatattaagaaatatcttcaggccgtgggaatgtttagagatttcaacgacccctcgcaggaccctgacttcactcaagtggtcgagctggacctgaaaacggttgtcccatgctgtagcggacccaagcgaccccaagacaaggttgccgtctcagatatgaagaaggatttcgagagttgtctgggcgctaagcaggggtttaagggcttccaagttgccccagagcaccacaacgatcacaagactttcatatatgacaacaccgaattcacccttgcccatggcagcgtagtgatcgcggcaatcacaagctgtacaaacacctctaatcccagcgtcatgctcggagctggcctgctggctaagaaggctgtggacgccggacttaatgtgatgccatatattaaaacatccctcagtccgggaagcggtgtcgtcacttactacctccaagagtctggagtaatgccgtacctcagtcaactggggttcgacgtagtgggctatgggtgtatgacatgtatcggtaactcaggacccctccctgagcctgttgtggaggctataactcagggtgatttggtggctgtaggcgtcctgtcgggtaatcgcaactttgaaggcagagtgcaccctaacactagagcgaattacttggccagcccccctttggtcatcgcttatgctatcgcagggactattcgtattgatttcgagaaggaacccctaggcgttaatgcaaagggacagcaggtttttttaaaagatatatggcctacgagggacgagattcaggcagtcgagcgccagtatgttattccaggcatgttcaaggaggtttaccaaaaaattgagaccgtgaacgagtcgtggaatgctctggcaacaccatcggataagctgttcttttggaactcaaagtccacttatatcaaatctccgcctttcttcgagaacctcacgctggatttgcaacctccgaagtctatcgtcgatgcatacgtcctgctgaacttaggcgacagcgtgaccactgatcacatctcccccgctggcaacattgccagaaactcacctgcggcaaggtatctcaccaatagaggtttaacacccagagagtttaactcttatgggagccgcagaggaaacgacgcagttatggccaggggcaccttcgccaacatacgcctgcttaaccggtttctgaataagcaggccccacagaccattcatctgcccagtggggaaattctggatgtgtttgacgctgcggaaagataccagcaggccggtctgcccctaatagtgctggccggaaaggagtacggggctggttctagtcgtgattgggcagccaaaggcccttttcttctcggcattaaggcagtgctcgctgagagctatgagagaatccatagatcgaacctggtggggatgggagtcattccgttggaatacttgccaggcgagaatgccgacgcactcggcttaactggccaggagaggtacacaatcattatcccagaaaacctcaaaccccagatgaaagtccaggtgaagctggacactggaaagacctttcaggcagtcatgcggttcgatacagacgtggagctgacttattttttgaatggaggcatcctgaactacatgattagaaaaatggccaagtag

SEQ ID NO: 126423 - DNA, 2346 bp, Artificial Sequence
  derived and/or modified sequence
cagctcgagcccagatccgctcgggagcgcgtgcccctgctcggctcaggcagcccggtcgccggagctccaccctgtagcaggaggaacacatggccctctgtgataatgtccaatccattcgctcatctggccgaacctttggatcctgtccagccaggcaaaaagttttttaatcttaataagctcgaggatagccggtatggtcgcctaccctttagtatcagagttctgctggaggccgctatacggaactgcgatgagttcttagtgaaaaagcaggatattgagaatatcttgcattggaacgttacacaacacaaaaatatcgaggtgcccttcaagccagcaagagtcatcttgcaggatttcacaggagtccctgctgtcgtcgattttgccgcaatgcgagacgcggtcaaaaagctaggtggagatccagagaagataaaccccgtctgtcctgcagatctggtcattgatcattcgatccaggtggacttcaacagacgcgctgactcactccagaagaatcaagatttggaattcgaaaggaatagagagaggttcgaatttctcaaatgggggagtcaggccttccataacatgcgcatcattcctccaggatccgggattatacatcaggtcaacttagaatacctggctcgggttgtatttgaccaagacgggtattattatcctgatagcctggtaggcacagatagtcatacaacaatgatagatggattgggaattctcggttggggggttggcggaatcgaggcggaggccgtgatgctggggcaacctattagcatggtactgcctcaggtgatcggataccggctgatggggaaaccccaccccttagttactagcactgacatcgtgctgaccattaccaaacacctccgtcaggtgggcgtggtcggtaagttcgtagagttcttcgggccaggggtcgcgcaactgagcatcgccgacagggccactatagcaaatatgtgccctgaatacggggctacagctgcctttttccctgttgatgaggttagcataacctaccttgtgcaaacaggcagagatgaagagaagctgaagtacatcaagaagtacctgcaggccgtgggcatgttcagggactttaacgacccttcgcaagatcccgactttacacaggtagtcgagctggatctcaaaaccgttgtgccatgctgctccgggcctaagcgccctcaagacaaggtggctgtctctgatatgaagaaggattttgaatcctgccttggagccaagcaggggttcaaaggctttcaggtggctcccgaacaccacaatgaccacaaaacatttatttatgataatactgaatttacattagctcacggttcagtggtgattgccgctatcaccagttgcactaatacttcgaatcccagtgtgatgcttggcgctggcctgctcgcgaagaaggcggtcgacgcgggactcaatgtgatgccatacataaagacttctctgtcacctggatctggggtcgtaacctattacctgcaggagtctggcgtgatgccgtatctcagtcagctgggattcgacgtcgtgggatacggatgcatgacatgcatcgggaacagtggccctttgcctgagcctgtagtggaggctatcacgcagggagacctggttgcagtgggtgtactcagtggaaacagaaattttgagggcagggtccacccaaatactagagccaactatttggccagtccaccactggttatagcttatgctattgctggcactatcagaattgatttcgaaaaggaacctctaggagtcaatgccaagggacaacaggtattccttaaagacatctggccaacgcgggatgaaattcaagccgtcgaacgccaatacgtgatcccgggaatgttcaaggaggtgtaccagaaaatcgagacggtaaacgaaagctggaacgcactcgccactccttcagataaactgtttttttggaattccaaatcaacatacattaaatccccaccatttttcgaaaatttgactctggatctgcagccgccaaaaagcattgtggacgcctatgtgctgctcaacctgggcgactctgttactactgaccacatcagtcctgctggcaacatcgcacgaaacagcccagctgcgaggtacttgaccaacagaggttttgagcgccagcttacacaggagaacacagatctctgcctcagcccacccttgttgacctctttaagttcccccctgaaactgtgggggcagctcttctgccacggtgagcagtgcctaggcgatctggaaaaatag

SEQ ID NO: 126424 - DNA, 2373 bp, Artificial Sequence
  derived and/or modified sequence
atgcgagatgctgtgaagaaactgggaggcgatccagagaagattaaccctgtgtgtcctgctgacctcgtaatcgatcattcaattcaagtggacttcaacagaagagccgattcactgcagaaaaaccaggatctcgagtttgaaagaaatagggagcgatttgaatttctcaagtgggggtcacaagcgttccataacatgaggataatcccgccaggcagcggcatcatccatcaagtgaaccttgaataccttgccagggtggtttttgaccaagacggttactattacccagactcactggtgggcaccgactctcacactactatgatcgacggcctgggcatactgggttggggggtggggggaatcgaggccgaagccgtgatgctgggacagccgatctcaatggtgcttccccaagtgattggctacaggctaatgggtaaaccgcatcctctagttacgtcaaccgacatcgttctcacaatcactaagcaccttcgccaggtcggcgtggtagggaagtttgttgagttcttcggccctggcgttgcccagttatcaattgccgaccgcgcaacgatcgcaaacatgtgtcccgaatacggagctacagcagcctttttccctgtagatgaggtgtcaatcacgtatttggtgcagaccgggagggacgaagaaaagttaaagtacataaagaagtacctacaggctgtgggaatgtttagggacttcaatgatcccagtcaggacccagactttacgcaggtggtggagcttgatctcaaaacagtggtgccctgttgttccgggccaaagcggccacaggacaaggtggccgtttctgatatgaagaaggacttcgagtcttgtcttggcgctaagcagggcttcaaaggcttccaggttgctcctgaacatcataacgaccacaagacctttatctatgacaataccgagtttactttggcccatggctctgtagtcatcgccgctataacctcctgtacgaatacaagcaaccctagcgtcatgctgggtgcaggtctgctcgccaagaaggccgttgatgccggacttaacgttatgccctacatcaaaacaagtttgagtccagggagtggtgtggtgacctactacttgcaggagtcgggcgtgatgccatatctgtcccagcttggcttcgatgtcgtaggatatgggtgcatgacctgcatcggaaactccggccctctgcccgagcctgtggtggaggctattacacaaggcgacctcgttgctgtaggggtgttgtccggaaacaggaactttgaaggcagggttcatcccaatactagggccaattatttggcctccccaccgctcgtcatagcttatgcaatcgcaggcaccatccgaatcgactttgaaaaagaacccctcggtgttaatgctaaaggtcagcaggtctttctgaaggatatttggccaaccagagacgaaatccaggcagtggaaagacagtacgtgatcccagggatgtttaaagaagtgtaccaaaagatcgaaaccgtcaatgaaagctggaacgccctagcaacaccttctgataagctattcttctggaatagtaagtctacttatatcaagagccctcctttcttcgagaatctcactctcgatctgcagccaccaaaaagtatcgtcgacgcatacgtcttactgaatctgggcgatagcgtcacgactgatcacattagtcccgcaggcaatatcgctagaaattctccggctgccaggtacctcaccaatagaggcctcacaccgagggagtttaacagctacggctcccggaggggaaatgatgcagttatggcgcgtggcacgttcgctaacatccgcctgctgaatcgcttcctgaacaaacaggcgccacagaccatacacttgccttcgggcgagatcttggacgtgttcgacgccgctgaacgataccaacaggctggtcttcccctaattgtcctggcaggtaaggaatatggagccggttcatctagagattgggctgcaaaggggccatttctgctgggaatcaaggccgttctggcggagtcctatgaaaggatccacagatctaacctcgtggggatgggtgtaatccctttagagtatctccccggagagaacgcagatgccctgggattgaccgggcaggaacgttataccatcatcattccagaaaatctaaaacctcagatgaaagttcaggtgaaactggacaccggcaagacatttcaggctgtgatgagatttgacaccgatgtggaactcacttacttcctgaacggcggtatcctaaactatatgattcggaagatggccaaatag

SEQ ID NO: 126425 - DNA, 3533 bp, Artificial Sequence
  derived and/or modified sequence
ggggcgagagggggcggagcgtggaggcggcagctggaaccgcgcagcgcacgggaacgcgtcccgctgcttgggtcaggttcgccggtcgcgggagccccgccgtgcagtcggaggaacacgtggccatcagtaatcatgagcaacccattcgcacaccttgctgagccattggatcctgtacaaccaggaaagaaattcttcaatttgaataaattggaggattcaagatatgggcgcttaccattttcgatcagagttcttctggaagcagccattcggaattgtgatgagtttttggtgaagaaacaggatattgaaaatattctacattggaatgtcacgcagcacaagaacatagaagtgccatttaagcctgctcgtgtcatcctgcaggactttacgggtgtgcccgctgtggttgactttgctgcaatgcgtgatgctgtgaaaaagttaggaggagatccagagaaaataaaccctgtctgccctgctgatcttgtaatagatcattccatccaggttgatttcaacagaagggcagacagtttacagaagaatcaagacctggaatttgaaagaaatagagagcgatttgaatttttaaagtggggttcccaggcttttcacaacatgcggattattccccctggctcaggaatcatccaccaggtgaatttggaatatttggcaagagtggtatttgatcaggatggatattattacccagacagcctcgtgggcacagactcgcacactaccatgattgatggcttgggcattcttggttggggtgtcggtggtattgaagcagaagctgtcatgctgggtcagccaatcagtatggtgcttcctcaggtgattggctacaggctgatggggaagccccaccctctggtaacatccactgacatcgtgctcaccattaccaagcacctccgccaggttggggtagtgggcaaatttgtcgagttcttcgggcctggagtagcccagttgtccattgctgaccgagctacgattgctaacatgtgtccagagtacggagcaactgctgcctttttcccagttgatgaagttagtatcacgtacctggtgcaaacaggtcgtgatgaagaaaaattaaagtatattaaaaaatatcttcaggctgtaggaatgtttcgagatttcaatgacccttctcaagacccagacttcacccaggttgtggaattagatttgaaaacagtagtgccttgctgtagtggacccaaaaggcctcaggacaaagttgctgtgtccgacatgaaaaaggactttgagagctgccttggagccaagcaaggatttaaaggattccaagttgctcctgaacatcataatgaccataagacctttatctatgataacactgaattcacccttgctcatggttctgtggtcattgctgccattactagctgcacaaacaccagtaatccgtctgtgatgttaggggcaggattgttagcaaagaaagctgtggatgctggcctgaacgtgatgccttacatcaaaactagcctgtctcctgggagtggcgtggtcacctactacctacaagaaagcggagtcatgccttatctgtctcagcttgggtttgacgtggtgggctatggctgcatgacctgcattggcaacagtgggcctttacctgaacctgtggtagaagccatcacacagggagaccttgtagctgttggagtactatctggaaacaggaattttgaaggtcgagttcaccccaacacccgggccaactatttagcctctccccccttagtaatagcatatgcaattgctggaaccatcagaatcgactttgagaaagagccattgggagtaaatgcaaagggacagcaggtatttctgaaagatatctggccgactagagacgagatccaggcagtggagcgtcagtatgtcatcccggggatgtttaaggaagtctatcagaaaatagagactgtgaatgaaagctggaatgccttagcaaccccatcagataagctgtttttctggaattccaaatctacgtatatcaaatcaccaccattctttgaaaacctgactttggatcttcagccccctaaatctatagtggatgcctatgtgctgctaaatttgggagattcggtaacaactgaccacatctccccagctggaaatattgcaagaaacagtcctgctgctcgctacttaactaacagaggcctaactccacgagaattcaactcctatggctcccgccgaggtaatgacgccgtcatggcacggggaacatttgccaacattcgcttgttaaacagatttttgaacaagcaggcaccacagactatccatctgccttctggggaaatccttgatgtgtttgatgctgctgagcggtaccagcaggcaggccttcccctgatcgttctggctggcaaagagtacggtgcaggcagctcccgagactgggcagctaagggccctttcctgctgggaatcaaagccgtcctggccgagagctacgagcgcattcaccgcagtaacctggttgggatgggtgtgatcccacttgaatatctccctggtgagaatgcagatgccctggggctcacagggcaagaacgatacactatcattattccagaaaacctcaaaccacaaatgaaagtccaggtcaagctggatactggcaagaccttccaggctgtcatgaggtttgacactgatgtggagctcacttatttcctcaacgggggcatcctcaactacatgatccgcaagatggccaagtaggagacgtgcacttggtgctgcgcccagggaggaagccgcaccaccagccagcgcaggccctggtggagaggcctccctggctgcctctgggaggggtgctgccttgtagatggagcaagtgagcactgagggtctggtgccaatcctgtaggcacaaaaccagaagtttctacattctctatttttgttaatcatcttctctttttccagaatttggaagctagaatggtgggaatgtcagtagtgccagaaagagagaaccaagcttgtctttaaagttactgatcacaggacgttgctttttcactgtttcctattaatcttcagctgaacacaagcaaaccttctcaggaggtgtctcctaccctcttattgttcctcttacgctctgctcaatgaaaccttcctcttgagggtcattttcctttctgtattaattataccagtgttaagtgacatagataagaactttgcacacttcaaatcagagcagtgattctctcttctctccccttttccttcagagtgaatcatccagactcctcatggataggtcgggtgttaaagttgttttgattatgtaccttttgatagatccacataaaaagaaatgtgaagttttcttttactatcttttcatttatcaagcagagacctttgttgggaggcggtttgggagaacacatttctaatttgaatgaaatgaaatctattttcagtgaaaa

SEQ ID NO: 126426 - DNA, 1956 bp, Artificial Sequence
  derived and/or modified sequence
ggggcgagagggggcggagcgtggaggcggcagctggaaccgcgcagcgcacgggaacgcgtcccgctgcttgggtcaggttcgccggtcgcgggagccccgccgtgcagtcggaggaacacgtggccatcagtaatcatgagcaacccattcgcacaccttgctgagccattggatcctgtacaaccaggaaagaaattcttcaatttgaataaattggaggattcaagatatgggcgcttaccattttcgatcagagttcttctggaagcagccattcggaattgtgatgagtttttggtgaagaaacaggatattgaaaatattctacattggaatgtcacgcagcacaagaacatagaagtgccatttaagcctgctcgtgtcatcctgcaggactttacgggtgtgcccgctgtggttgactttgctgcaatgcgtgatgctgtgaaaaagttaggaggagatccagagaaaataaaccctgtctgccctgctgatcttgtaatagatcattccatccaggttgatttcaacagaagggcagacagtttacagaagaatcaagacctggaatttgaaagaaatagagagcgatttgaatttttaaagtggggttcccaggcttttcacaacatgcggattattccccctggctcaggaatcatccaccaggtgaatttggaatatttggcaagagtggtatttgatcaggatggatattattacccagacagcctcgtgggcacagactcgcacactaccatgattgatggcttgggcattcttggttggggtgtcggtggtattgaagcagaagctgtcatgctgggtcagccaatcagtatggtgcttcctcaggtgattggctacaggctgatggggaagccccaccctctggtaacatccactgacatcgtgctcaccattaccaagcacctccgccaggttggggtagtgggcaaatttgtcgagttcttcgggcctggagtagcccagttgtccattgctgaccgagctacgattgctaacatgtgtccagagtacggagcaactgctgcctttttcccagttgatgaagttagtatcacgtacctggtgcaaacaggtcgtgatgaagaaaaattaaagtatattaaaaaatatcttcaggctgtaggaatgtttcgagatttcaatgacccttctcaagacccagacttcacccaggttgtggaattagatttgaaaacagtagtgccttgctgtagtggacccaaaaggcctcaggacaaagttgctgtgtccgacatgaaaaaggactttgagagctgccttggagccaagcaaggatttaaaggattccaagttgctcctgaacatcataatgaccataagacctttatctatgataacactgaattcacccttgctcatggttctgtggtcattgctgccttgtagatggagcaagtgagcactgagggtctggtgccaatcctgtaggcacaaaaccagaagtttctacattctctatttttgttaatcatcttctctttttccagaatttggaagctagaatggtgggaatgtcagtagtgccagaaagagagaaccaagcttgtctttaaagttactgatcacaggacgttgctttttcactgtttcctattaatcttcagctgaacacaagcaaaccttctcaggaggtgtctcctaccctcttattgttcctcttacgctctgctcaatgaaaccttcctcttgagggtcattttcctttctgtattaattataccagtgttaagtgacatagataagaactttgcacacttcaaatcagagcagtgattctctcttctctccccttttccttcagagtgaatcatccagactcctcatggataggtcgggtgttaaagttgttttgattatgtaccttttgatagatccacataaaaagaaatgtgaagtttt

SEQ ID NO: 126427 - DNA, 3601 bp, Artificial Sequence
  derived and/or modified sequence
ggggcgagagggggcggagcgtggaggcggcagctggaaccgcgcagcgcacgggaacgcgtcccgctgcttgggtcaggttcgccggtcgcgggagccccgccgtgcagtcggagagggtgtcactctgagtggtgcttcctcagcccctgtcaaaaagcagtttccaccatcctggagtgtggaacacgtggccatcagtaatcatgagcaacccattcgcacaccttgctgagccattggatcctgtacaaccaggaaagaaattcttcaatttgaataaattggaggattcaagatatgggcgcttaccattttcgatcagagttcttctggaagcagccattcggaattgtgatgagtttttggtgaagaaacaggatattgaaaatattctacattggaatgtcacgcagcacaagaacatagaagtgccatttaagcctgctcgtgtcatcctgcaggactttacgggtgtgcccgctgtggttgactttgctgcaatgcgtgatgctgtgaaaaagttaggaggagatccagagaaaataaaccctgtctgccctgctgatcttgtaatagatcattccatccaggttgatttcaacagaagggcagacagtttacagaagaatcaagacctggaatttgaaagaaatagagagcgatttgaatttttaaagtggggttcccaggcttttcacaacatgcggattattccccctggctcaggaatcatccaccaggtgaatttggaatatttggcaagagtggtatttgatcaggatggatattattacccagacagcctcgtgggcacagactcgcacactaccatgattgatggcttgggcattcttggttggggtgtcggtggtattgaagcagaagctgtcatgctgggtcagccaatcagtatggtgcttcctcaggtgattggctacaggctgatggggaagccccaccctctggtaacatccactgacatcgtgctcaccattaccaagcacctccgccaggttggggtagtgggcaaatttgtcgagttcttcgggcctggagtagcccagttgtccattgctgaccgagctacgattgctaacatgtgtccagagtacggagcaactgctgcctttttcccagttgatgaagttagtatcacgtacctggtgcaaacaggtcgtgatgaagaaaaattaaagtatattaaaaaatatcttcaggctgtaggaatgtttcgagatttcaatgacccttctcaagacccagacttcacccaggttgtggaattagatttgaaaacagtagtgccttgctgtagtggacccaaaaggcctcaggacaaagttgctgtgtccgacatgaaaaaggactttgagagctgccttggagccaagcaaggatttaaaggattccaagttgctcctgaacatcataatgaccataagacctttatctatgataacactgaattcacccttgctcatggttctgtggtcattgctgccattactagctgcacaaacaccagtaatccgtctgtgatgttaggggcaggattgttagcaaagaaagctgtggatgctggcctgaacgtgatgccttacatcaaaactagcctgtctcctgggagtggcgtggtcacctactacctacaagaaagcggagtcatgccttatctgtctcagcttgggtttgacgtggtgggctatggctgcatgacctgcattggcaacagtgggcctttacctgaacctgtggtagaagccatcacacagggagaccttgtagctgttggagtactatctggaaacaggaattttgaaggtcgagttcaccccaacacccgggccaactatttagcctctccccccttagtaatagcatatgcaattgctggaaccatcagaatcgactttgagaaagagccattgggagtaaatgcaaagggacagcaggtatttctgaaagatatctggccgactagagacgagatccaggcagtggagcgtcagtatgtcatcccggggatgtttaaggaagtctatcagaaaatagagactgtgaatgaaagctggaatgccttagcaaccccatcagataagctgtttttctggaattccaaatctacgtatatcaaatcaccaccattctttgaaaacctgactttggatcttcagccccctaaatctatagtggatgcctatgtgctgctaaatttgggagattcggtaacaactgaccacatctccccagctggaaatattgcaagaaacagtcctgctgctcgctacttaactaacagaggcctaactccacgagaattcaactcctatggctcccgccgaggtaatgacgccgtcatggcacggggaacatttgccaacattcgcttgttaaacagatttttgaacaagcaggcaccacagactatccatctgccttctggggaaatccttgatgtgtttgatgctgctgagcggtaccagcaggcaggccttcccctgatcgttctggctggcaaagagtacggtgcaggcagctcccgagactgggcagctaagggccctttcctgctgggaatcaaagccgtcctggccgagagctacgagcgcattcaccgcagtaacctggttgggatgggtgtgatcccacttgaatatctccctggtgagaatgcagatgccctggggctcacagggcaagaacgatacactatcattattccagaaaacctcaaaccacaaatgaaagtccaggtcaagctggatactggcaagaccttccaggctgtcatgaggtttgacactgatgtggagctcacttatttcctcaacgggggcatcctcaactacatgatccgcaagatggccaagtaggagacgtgcacttggtgctgcgcccagggaggaagccgcaccaccagccagcgcaggccctggtggagaggcctccctggctgcctctgggaggggtgctgccttgtagatggagcaagtgagcactgagggtctggtgccaatcctgtaggcacaaaaccagaagtttctacattctctatttttgttaatcatcttctctttttccagaatttggaagctagaatggtgggaatgtcagtagtgccagaaagagagaaccaagcttgtctttaaagttactgatcacaggacgttgctttttcactgtttcctattaatcttcagctgaacacaagcaaaccttctcaggaggtgtctcctaccctcttattgttcctcttacgctctgctcaatgaaaccttcctcttgagggtcattttcctttctgtattaattataccagtgttaagtgacatagataagaactttgcacacttcaaatcagagcagtgattctctcttctctccccttttccttcagagtgaatcatccagactcctcatggataggtcgggtgttaaagttgttttgattatgtaccttttgatagatccacataaaaagaaatgtgaagttttcttttactatcttttcatttatcaagcagagacctttgttgggaggcggtttgggagaacacatttctaatttgaatgaaatgaaatctattttcagtgaaaa

SEQ ID NO: 126428 - DNA, 2393 bp, Artificial Sequence
  derived and/or modified sequence
atcgcgcggcggccccgggggcgagagggggcggagcgtggaggcggcagctggaaccgcgcagcgcacgggaacgcgtcccgctgcttgggtcaggttcgccggtcgcgggagccccgccgtgcagtcggaggaacacgtggccatcagtaatcatgagcaacccattcgcacaccttgctgagccattggatcctgtacaaccaggaaagaaattcttcaatttgaataaattggaggattcaagatatgggcgcttaccattttcgatcagagttcttctggaagcagccattcggaattgtgatgagtttttggtgaagaaacaggatattgaaaatattctacattggaatgtcacgcagcacaagaacatagaagtgccatttaagcctgctcgtgtcatcctgcaggactttacgggtgtgcccgctgtggttgactttgctgcaatgcgtgatgctgtgaaaaagttaggaggagatccagagaaaataaaccctgtctgccctgctgatcttgtaatagatcattccatccaggttgatttcaacagaagggcagacagtttacagaagaatcaagacctggaatttgaaagaaatagagagcgatttgaatttttaaagtggggttcccaggcttttcacaacatgcggattattccccctggctcaggaatcatccaccaggtgaatttggaatatttggcaagagtggtatttgatcaggatggatattattacccagacagcctcgtgggcacagactcgcacactaccatgattgatggcttgggcattcttggttggggtgtcggtggtattgaagcagaagctgtcatgctgggtcagccaatcagtatggtgcttcctcaggtgattggctacaggctgatggggaagccccaccctctggtaacatccactgacatcgtgctcaccattaccaagcacctccgccaggttggggtagtgggcaaatttgtcgagttcttcgggcctggagtagcccagttgtccattgctgaccgagctacgattgctaacatgtgtccagagtacggagcaactgctgcctttttcccagttgatgaagttagtatcacgtacctggtgcaaacaggtcgtgatgaagaaaaattaaagtatattaaaaaatatcttcaggctgtaggaatgtttcgagatttcaatgacccttctcaagacccagacttcacccaggttgtggaattagatttgaaaacagtagtgccttgctgtagtggacccaaaaggcctcaggacaaagttgctgtgtccgacatgaaaaaggactttgagagctgccttggagccaagcaaggatttaaaggattccaagttgctcctgaacatcataatgaccataagacctttatctatgataacactgaattcacccttgctcatggttctgtggtcattgctgccattactagctgcacaaacaccagtaatccgtctgtgatgttaggggcaggattgttagcaaagaaagctgtggatgctggcctgaacgtgatgccttacatcaaaactagcctgtctcctgggagtggcgtggtcacctactacctacaagaaagcggagtcatgccttatctgtctcagcttgggtttgacgtggtgggctatggctgcatgacctgcattggcaacagtgggcctttacctgaacctgtggtagaagccatcacacagggagaccttgtagctgttggagtactatctggaaacaggaattttgaaggtcgagttcaccccaacacccgggccaactatttagcctctccccccttagtaatagcatatgcaattgctggaaccatcagaatcgactttgagaaagagccattgggagtaaatgcaaagggacagcaggtatttctgaaagatatctggccgactagagacgagatccaggcagtggagcgtcagtatgtcatcccggggatgtttaaggaagtctatcagaaaatagagactgtgaatgaaagctggaatgccttagcaaccccatcagataagctgtttttctggaattccaaatctacgtatatcaaatcaccaccattctttgaaaacctgactttggatcttcagccccctaaatctatagtggatgcctatgtgctgctaaatttgggagattcggtaacaactgaccacatctccccagctggaaatattgcaagaaacagtcctgctgctcgctacttaactaacagaggatttgaaagacaattaacccaggagaatactgacttatgcctctcaccaccccttctcacctctctctcttctccgttgaagctttggggacagcttttctgccatggagaacaatgcttaggagacttagagaaatag

SEQ ID NO: 126429 - DNA, 3597 bp, Artificial Sequence
  derived and/or modified sequence
ggggcgagagggggcggagcgtggaggcggcagctggaaccgcgcagcgcacgggaacgcgtcccgctgcttgggtcaggttcgccggtcgcgggagccccgccgtgcagtcggagagggtgtcactctgagtggtgcttcctcagcccctgtcaaaaagcagtttccaccatcctggagtgtggaacacgtggccatcagtaatcatgagcaacccattcgcacaccttgctgagccattggatcctgtacaaccaggaaagaaattcttcaatttgaataaattggaggattcaagatatgggcgcttaccattttcgatcagagttcttctggaagcagccattcggaattgtgatgagtttttggtgaagaaacaggatattgaaaatattctacattggaatgtcacgcagcacaagaacatagaagtgccatttaagcctgctcgtgtcatcctgcaggactttacgggtgtgcccgctgtggttgactttgctgcaatgcgtgatgctgtgaaaaagttaggaggagatccagagaaaataaaccctgtctgccctgctgatcttgtaatagatcattccatccaggttgatttcaacagaagggcagacagtttacagaagaatcaagacctggaatttgaaagaaatagagagcgatttgaatttttaaagtggggttcccaggcttttcacaacatgcggattattccccctggctcaggaatcatccaccaggtgaatttggaatatttggcaagagtggtatttgatcaggatggatattattacccagacagcctcgtgggcacagactcgcacactaccatgattgatggcttgggcattcttggttggggtgtcggtggtattgaagcagaagctgtcatgctgggtcagccaatcagtatggtgcttcctcaggtgattggctacaggctgatggggaagccccaccctctggtaacatccactgacatcgtgctcaccattaccaagcacctccgccaggttggggtagtgggcaaatttgtcgagttcttcgggcctggagtagcccagttgtccattgctgaccgagctacgattgctaacatgtgtccagagtacggagcaactgctgcctttttcccagttgatgaagttagtatcacgtacctggtgcaaacaggtcgtgatgaagaaaaattaaagtatattaaaaaatatcttcaggctgtaggaatgtttcgagatttcaatgacccttctcaagacccagacttcacccaggttgtggaattagatttgaaaacagtagtgccttgctgtagtggacccaaaaggcctcaggacaaagttgctgtgtccgacatgaaaaaggactttgagagctgccttggagccaagcaaggatttaaaggattccaagttgctcctgaacatcataatgaccataagacctttatctatgataacactgaattcacccttgctcatggttctgtggtcattgctgccattactagctgcacaaacaccagtaatccgtctgtgatgttaggggcaggattgttagcaaagaaagctgtggatgctggcctgaacgtgatgccttacatcaaaactagcctgtctcctgggagtggcgtggtcacctactacctacaagaaagcggagtcatgccttatctgtctcagcttgggtttgacgtggtgggctatggctgcatgacctgcattggcaacagtgggcctttacctgaacctgtggtagaagccatcacacagggagaccttgtagctgttggagtactatctggaaacaggaattttgaaggtcgagttcaccccaacacccgggccaactatttagcctctccccccttagtaatagcatatgcaattgctggaaccatcagaatcgactttgagaaagagccattgggagtaaatgcaaagggacagcaggtatttctgaaagatatctggccgactagagacgagatccaggcagtggagcgtcagtatgtcatcccggggatgtttaaggaagtctatcagaaaatagagactgtgaatgaaagctggaatgccttagcaaccccatcagataagctgtttttctggaattccaaatctacgtatatcaaatcaccaccattctttgaaaacctgactttggatcttcagccccctaaatctatagtggatgcctatgtgctgctaaatttgggagattcggtaacaactgaccacatctccccagctggaaatattgcaagaaacagtcctgctgctcgctacttaactaacagaggcctaactccacgagaattcaactcctatggctcccgccgaggtaatgacgccgtcatggcacggggaacatttgccaacattcgcttgttaaacagatttttgaacaagcaggcaccacagactatccatctgccttctggggaaatccttgatgtgtttgatgctgctgagcggtaccagcaggcaggccttcccctgatcgttctggctggcaaagagtacggtgcaggcagctcccgagactgggcagctaagggccctttcctgctgggaatcaaagccgtcctggccgagagctacgagcgcattcaccgcagtaacctggttgggatgggtgtgatcccacttgaatatctccctggtgagaatgcagatgccctggggctcacagggcaagaacgatacactatcattattccagaaaacctcaaaccacaaatgaaagtccaggtcaagctggatactggcaagaccttccaggctgtcatgaggtttgacactgatgtggagctcacttatttcctcaacgggggcatcctcaactacatgatccgcaagatggccaagtaggagacgtgcacttggtgctgcgcccagggaggaagccgcaccaccagccagcgcaggccctggtggagaggcctccctggctgcctctgggaggggtgctgccttgtagatggagcaagtgagcactgagggtctggtgccaatcctgtaggcacaaaaccagaagtttctacattctctatttttgttaatcatcttctctttttccagaatttggaagctagaatggtgggaatgtcagtagtgccagaaagagagaaccaagcttgtctttaaagttactgatcacaggacgttgctttttcactgtttcctattaatcttcagctgaacacaagcaaaccttctcaggaggtgtctcctaccctcttattgttcctcttacgctctgctcaatgaaaccttcctcttgagggtcattttcctttctgtattaattataccagtgttaagtgacatagataagaactttgcacacttcaaatcagagcagtgattctctcttctctccccttttccttcagagtgaatcatccagactcctcatggataggtcgggtgttaaagttgttttgattatgtaccttttgatagatccacataaaaagaaatgtgaagttttcttttactatcttttcatttatcaagcagagacctttgttgggaggcggtttgggagaacacatttctaatttgaatgaaatgaaatctattttcagtg

SEQ ID NO: 126430 - DNA, 2670 bp, Artificial Sequence
  derived and/or modified sequence
atgagcaaccccttcgcccacctggccgagcccctggaccccgtgcagcccggcaagaagttcttcaacctgaacaagctggaggacagcagatacggcagactgcccttcagcatcagagtgctgctggaggccgccatcagaaactgcgacgagttcctggtgaagaagcaggacatcgagaacatcctgcactggaacgtgacccagcacaagaacatcgaggtgcccttcaagcccgccagagtgatcctgcaggacttcaccggcgtgcccgccgtggtggacttcgccgccatgagagacgccgtgaagaagctgggcggcgaccccgagaagatcaaccccgtgtgccccgccgacctggtgatcgaccacagcatccaggtggacttcaacagaagagccgacagcctgcagaagaaccaggacctggagttcgagagaaacagagagagattcgagttcctgaagtggggcagccaggccttccacaacatgagaatcatcccccccggcagcggcatcatccaccaggtgaacctggagtacctggccagagtggtgttcgaccaggacggctactactaccccgacagcctggtgggcaccgacagccacaccaccatgatcgacggcctgggcatcctgggctggggcgtgggcggcatcgaggccgaggccgtgatgctgggccagcccatcagcatggtgctgccccaggtgatcggctacagactgatgggcaagccccaccccctggtgaccagcaccgacatcgtgctgaccatcaccaagcacctgagacaggtgggcgtggtgggcaagttcgtggagttcttcggccccggcgtggcccagctgagcatcgccgacagagccaccatcgccaacatgtgccccgagtacggcgccaccgccgccttcttccccgtggacgaggtgagcatcacctacctggtgcagaccggcagagacgaggagaagctgaagtacatcaagaagtacctgcaggccgtgggcatgttcagagacttcaacgaccccagccaggaccccgacttcacccaggtggtggagctggacctgaagaccgtggtgccctgctgcagcggccccaagagaccccaggacaaggtggccgtgagcgacatgaagaaggacttcgagagctgcctgggcgccaagcagggcttcaagggcttccaggtggcccccgagcaccacaacgaccacaagaccttcatctacgacaacaccgagttcaccctggcccacggcagcgtggtgatcgccgccatcaccagctgcaccaacaccagcaaccccagcgtgatgctgggcgccggcctgctggccaagaaggccgtggacgccggcctgaacgtgatgccctacatcaagaccagcctgagccccggcagcggcgtggtgacctactacctgcaggagagcggcgtgatgccctacctgagccagctgggcttcgacgtggtgggctacggctgcatgacctgcatcggcaacagcggccccctgcccgagcccgtggtggaggccatcacccagggcgacctggtggccgtgggcgtgctgagcggcaacagaaacttcgagggcagagtgcaccccaacaccagagccaactacctggccagcccccccctggtgatcgcctacgccatcgccggcaccatcagaatcgacttcgagaaggagcccctgggcgtgaacgccaagggccagcaggtgttcctgaaggacatctggcccaccagagacgagatccaggccgtggagagacagtacgtgatccccggcatgttcaaggaggtgtaccagaagatcgagaccgtgaacgagagctggaacgccctggccacccccagcgacaagctgttcttctggaacagcaagagcacctacatcaagagcccccccttcttcgagaacctgaccctggacctgcagccccccaagagcatcgtggacgcctacgtgctgctgaacctgggcgacagcgtgaccaccgaccacatcagccccgccggcaacatcgccagaaacagccccgccgccagatacctgaccaacagaggcctgacccccagagagttcaacagctacggcagcagaagaggcaacgacgccgtgatggccagaggcaccttcgccaacatcagactgctgaacagattcctgaacaagcaggccccccagaccatccacctgcccagcggcgagatcctggacgtgttcgacgccgccgagagataccagcaggccggcctgcccctgatcgtgctggccggcaaggagtacggcgccggcagcagcagagactgggccgccaagggccccttcctgctgggcatcaaggccgtgctggccgagagctacgagagaatccacagaagcaacctggtgggcatgggcgtgatccccctggagtacctgcccggcgagaacgccgacgccctgggcctgaccggccaggagagatacaccatcatcatccccgagaacctgaagccccagatgaaggtgcaggtgaagctggacaccggcaagaccttccaggccgtgatgagattcgacaccgacgtggagctgacctacttcctgaacggcggcatcctgaactacatgatcagaaagatggccaagtag

SEQ ID NO: 126431 - DNA, 1305 bp, Artificial Sequence
  derived and/or modified sequence
atgagcaaccccttcgcccacctggccgagcccctggaccccgtgcagcccggcaagaagttcttcaacctgaacaagctggaggacagcagatacggcagactgcccttcagcatcagagtgctgctggaggccgccatcagaaactgcgacgagttcctggtgaagaagcaggacatcgagaacatcctgcactggaacgtgacccagcacaagaacatcgaggtgcccttcaagcccgccagagtgatcctgcaggacttcaccggcgtgcccgccgtggtggacttcgccgccatgagagacgccgtgaagaagctgggcggcgaccccgagaagatcaaccccgtgtgccccgccgacctggtgatcgaccacagcatccaggtggacttcaacagaagagccgacagcctgcagaagaaccaggacctggagttcgagagaaacagagagagattcgagttcctgaagtggggcagccaggccttccacaacatgagaatcatcccccccggcagcggcatcatccaccaggtgaacctggagtacctggccagagtggtgttcgaccaggacggctactactaccccgacagcctggtgggcaccgacagccacaccaccatgatcgacggcctgggcatcctgggctggggcgtgggcggcatcgaggccgaggccgtgatgctgggccagcccatcagcatggtgctgccccaggtgatcggctacagactgatgggcaagccccaccccctggtgaccagcaccgacatcgtgctgaccatcaccaagcacctgagacaggtgggcgtggtgggcaagttcgtggagttcttcggccccggcgtggcccagctgagcatcgccgacagagccaccatcgccaacatgtgccccgagtacggcgccaccgccgccttcttccccgtggacgaggtgagcatcacctacctggtgcagaccggcagagacgaggagaagctgaagtacatcaagaagtacctgcaggccgtgggcatgttcagagacttcaacgaccccagccaggaccccgacttcacccaggtggtggagctggacctgaagaccgtggtgccctgctgcagcggccccaagagaccccaggacaaggtggccgtgagcgacatgaagaaggacttcgagagctgcctgggcgccaagcagggcttcaagggcttccaggtggcccccgagcaccacaacgaccacaagaccttcatctacgacaacaccgagttcaccctggcccacggcagcgtggtgatcgccgccctgtag

SEQ ID NO: 126432 - DNA, 2346 bp, Artificial Sequence
  derived and/or modified sequence
cagctggagcccagaagcgccagagagagagtgcccctgctgggcagcggcagccccgtggccggcgcccccccctgcagcagaagaaacacctggcccagcgtgatcatgagcaaccccttcgcccacctggccgagcccctggaccccgtgcagcccggcaagaagttcttcaacctgaacaagctggaggacagcagatacggcagactgcccttcagcatcagagtgctgctggaggccgccatcagaaactgcgacgagttcctggtgaagaagcaggacatcgagaacatcctgcactggaacgtgacccagcacaagaacatcgaggtgcccttcaagcccgccagagtgatcctgcaggacttcaccggcgtgcccgccgtggtggacttcgccgccatgagagacgccgtgaagaagctgggcggcgaccccgagaagatcaaccccgtgtgccccgccgacctggtgatcgaccacagcatccaggtggacttcaacagaagagccgacagcctgcagaagaaccaggacctggagttcgagagaaacagagagagattcgagttcctgaagtggggcagccaggccttccacaacatgagaatcatcccccccggcagcggcatcatccaccaggtgaacctggagtacctggccagagtggtgttcgaccaggacggctactactaccccgacagcctggtgggcaccgacagccacaccaccatgatcgacggcctgggcatcctgggctggggcgtgggcggcatcgaggccgaggccgtgatgctgggccagcccatcagcatggtgctgccccaggtgatcggctacagactgatgggcaagccccaccccctggtgaccagcaccgacatcgtgctgaccatcaccaagcacctgagacaggtgggcgtggtgggcaagttcgtggagttcttcggccccggcgtggcccagctgagcatcgccgacagagccaccatcgccaacatgtgccccgagtacggcgccaccgccgccttcttccccgtggacgaggtgagcatcacctacctggtgcagaccggcagagacgaggagaagctgaagtacatcaagaagtacctgcaggccgtgggcatgttcagagacttcaacgaccccagccaggaccccgacttcacccaggtggtggagctggacctgaagaccgtggtgccctgctgcagcggccccaagagaccccaggacaaggtggccgtgagcgacatgaagaaggacttcgagagctgcctgggcgccaagcagggcttcaagggcttccaggtggcccccgagcaccacaacgaccacaagaccttcatctacgacaacaccgagttcaccctggcccacggcagcgtggtgatcgccgccatcaccagctgcaccaacaccagcaaccccagcgtgatgctgggcgccggcctgctggccaagaaggccgtggacgccggcctgaacgtgatgccctacatcaagaccagcctgagccccggcagcggcgtggtgacctactacctgcaggagagcggcgtgatgccctacctgagccagctgggcttcgacgtggtgggctacggctgcatgacctgcatcggcaacagcggccccctgcccgagcccgtggtggaggccatcacccagggcgacctggtggccgtgggcgtgctgagcggcaacagaaacttcgagggcagagtgcaccccaacaccagagccaactacctggccagcccccccctggtgatcgcctacgccatcgccggcaccatcagaatcgacttcgagaaggagcccctgggcgtgaacgccaagggccagcaggtgttcctgaaggacatctggcccaccagagacgagatccaggccgtggagagacagtacgtgatccccggcatgttcaaggaggtgtaccagaagatcgagaccgtgaacgagagctggaacgccctggccacccccagcgacaagctgttcttctggaacagcaagagcacctacatcaagagcccccccttcttcgagaacctgaccctggacctgcagccccccaagagcatcgtggacgcctacgtgctgctgaacctgggcgacagcgtgaccaccgaccacatcagccccgccggcaacatcgccagaaacagccccgccgccagatacctgaccaacagaggcttcgagagacagctgacccaggagaacaccgacctgtgcctgagcccccccctgctgaccagcctgagcagccccctgaagctgtggggccagctgttctgccacggcgagcagtgcctgggcgacctggagaagtag

SEQ ID NO: 126433 - DNA, 2373 bp, Artificial Sequence
  derived and/or modified sequence
atgagagacgccgtgaagaagctgggcggcgaccccgagaagatcaaccccgtgtgccccgccgacctggtgatcgaccacagcatccaggtggacttcaacagaagagccgacagcctgcagaagaaccaggacctggagttcgagagaaacagagagagattcgagttcctgaagtggggcagccaggccttccacaacatgagaatcatcccccccggcagcggcatcatccaccaggtgaacctggagtacctggccagagtggtgttcgaccaggacggctactactaccccgacagcctggtgggcaccgacagccacaccaccatgatcgacggcctgggcatcctgggctggggcgtgggcggcatcgaggccgaggccgtgatgctgggccagcccatcagcatggtgctgccccaggtgatcggctacagactgatgggcaagccccaccccctggtgaccagcaccgacatcgtgctgaccatcaccaagcacctgagacaggtgggcgtggtgggcaagttcgtggagttcttcggccccggcgtggcccagctgagcatcgccgacagagccaccatcgccaacatgtgccccgagtacggcgccaccgccgccttcttccccgtggacgaggtgagcatcacctacctggtgcagaccggcagagacgaggagaagctgaagtacatcaagaagtacctgcaggccgtgggcatgttcagagacttcaacgaccccagccaggaccccgacttcacccaggtggtggagctggacctgaagaccgtggtgccctgctgcagcggccccaagagaccccaggacaaggtggccgtgagcgacatgaagaaggacttcgagagctgcctgggcgccaagcagggcttcaagggcttccaggtggcccccgagcaccacaacgaccacaagaccttcatctacgacaacaccgagttcaccctggcccacggcagcgtggtgatcgccgccatcaccagctgcaccaacaccagcaaccccagcgtgatgctgggcgccggcctgctggccaagaaggccgtggacgccggcctgaacgtgatgccctacatcaagaccagcctgagccccggcagcggcgtggtgacctactacctgcaggagagcggcgtgatgccctacctgagccagctgggcttcgacgtggtgggctacggctgcatgacctgcatcggcaacagcggccccctgcccgagcccgtggtggaggccatcacccagggcgacctggtggccgtgggcgtgctgagcggcaacagaaacttcgagggcagagtgcaccccaacaccagagccaactacctggccagcccccccctggtgatcgcctacgccatcgccggcaccatcagaatcgacttcgagaaggagcccctgggcgtgaacgccaagggccagcaggtgttcctgaaggacatctggcccaccagagacgagatccaggccgtggagagacagtacgtgatccccggcatgttcaaggaggtgtaccagaagatcgagaccgtgaacgagagctggaacgccctggccacccccagcgacaagctgttcttctggaacagcaagagcacctacatcaagagcccccccttcttcgagaacctgaccctggacctgcagccccccaagagcatcgtggacgcctacgtgctgctgaacctgggcgacagcgtgaccaccgaccacatcagccccgccggcaacatcgccagaaacagccccgccgccagatacctgaccaacagaggcctgacccccagagagttcaacagctacggcagcagaagaggcaacgacgccgtgatggccagaggcaccttcgccaacatcagactgctgaacagattcctgaacaagcaggccccccagaccatccacctgcccagcggcgagatcctggacgtgttcgacgccgccgagagataccagcaggccggcctgcccctgatcgtgctggccggcaaggagtacggcgccggcagcagcagagactgggccgccaagggccccttcctgctgggcatcaaggccgtgctggccgagagctacgagagaatccacagaagcaacctggtgggcatgggcgtgatccccctggagtacctgcccggcgagaacgccgacgccctgggcctgaccggccaggagagatacaccatcatcatccccgagaacctgaagccccagatgaaggtgcaggtgaagctggacaccggcaagaccttccaggccgtgatgagattcgacaccgacgtggagctgacctacttcctgaacggcggcatcctgaactacatgatcagaaagatggccaagtag

SEQ ID NO: 126434 - protein, 325 aa, Artificial Sequence
  derived and/or modified sequence
MPITRMRMRPWLEMQINSNQIPGLIWINKEEMIFQIPWKHAAKHGWDINKDACLFRSWAIHTGRYKAGEKEPDPKTWKANFRCAMNSLPDIEEVKDQSRNKGSSAVRVYRMLPPLTKNQRKERKSKSSRDAKSKAKRKSCGDSSPDTFSDGLSSSTLPDDHSSYTVPGYMQDLEVEQALTPALSPCAVSSTLPDWHIPVEVVPDSTSDLYNFQVSPMPSTSEATTDEDEEGKLPEDIMKLLEQSEWQPTNVDGKGYLLNEPGVQPTSVYGDFSCKEEPEIDSPGGDIGLSLQRVFTDLKNMDATWLDSLLTPVRLPSIQAIPCAP

SEQ ID NO: 126435 - protein, 192 aa, Artificial Sequence
  derived and/or modified sequence
MPITRMRMRPWLEMQINSNQIPGLIWINKEEMIFQIPWKHAAKHGWDINKDACLFRSWAIHTGRYKAGEKEPDPKTWKANFRCAMNSLPDIEEVKDQSRNKGSSAVRVYRMLPPLTKNQRKERKSKSSRDAKSKAKRKSCGDSSPDTFSDGLSSSTLPDDHSSYTVPGYMQDLEVEQALTPALSPCAVSSTL

SEQ ID NO: 126436 - DNA, 3567 bp, Artificial Sequence
  derived and/or modified sequence
agagctcgccactccttagtcgaggcaagacgtgcgcccgagccccgccgaaccgaggccacccggagccgtgcccagtccacgccggccgtgcccggcggccttaagaacccggcaacctctgccttcttccctcttccactcggagtcgcgctccgcgcgccctcactgcagcccctgcgtcgccgggaccctcgcgcgcgaccgccgaatcgctcctgcagcagagccaacatgcccatcactcggatgcgcatgagaccctggctagagatgcagattaattccaaccaaatcccggggctcatctggattaataaagaggagatgatcttccagatcccatggaagcatgctgccaagcatggctgggacatcaacaaggatgcctgtttgttccggagctgggccattcacacaggccgatacaaagcaggggaaaaggagccagatcccaagacgtggaaggccaactttcgctgtgccatgaactccctgccagatatcgaggaggtgaaagaccagagcaggaacaagggcagctcagctgtgcgagtgtaccggatgcttccacctctcaccaagaaccagagaaaagaaagaaagtcgaagtccagccgagatgctaagagcaaggccaagaggaagtcatgtggggattccagccctgataccttctctgatggactcagcagctccactctgcctgatgaccacagcagctacacagttccaggctacatgcaggacttggaggtggagcaggccctgactccagcactgtcgccatgtgctgtcagcagcactctccccgactggcacatcccagtggaagttgtgccggacagcaccagtgatctgtacaacttccaggtgtcacccatgccctccacctctgaagctacaacagatgaggatgaggaagggaaattacctgaggacatcatgaagctcttggagcagtcggagtggcagccaacaaacgtggatgggaaggggtacctactcaatgaacctggagtccagcccacctctgtctatggagactttagctgtaaggaggagccagaaattgacagcccagggggggatattgggctgagtctacagcgtgtcttcacagatctgaagaacatggatgccacctggctggacagcctgctgaccccagtccggttgccctccatccaggccattccctgtgcaccgtagcagggcccctgggcccctcttattcctctaggcaagcaggacctggcatcatggtggatatggtgcagagaagctggacttctgtgggcccctcaacagccaagtgtgaccccactgccaagtggggatggggcctccctccttgggtcattgacctctcagggcctggcaggccagtgtctgggtttttcttgtggtgtaaagctggccctgcctcctgggaagatgaggttctgagaccagtgtatcaggtcagggacttggacaggagtcagtgtctggctttttcctctgagcccagctgcctggagagggtctcgctgtcactggctggctcctaggggaacagaccagtgaccccagaaaagcataacaccaatcccagggctggctctgcactaagagaaaattgcactaaatgaatctcgttcccaaagaactacccccttttcagctgagccctggggactgttccaaagccagtgaaatgtgaaggaaagtggggtccttcggggcgatgctccctcagcctcagaggagctctaccctgctccctgctttggctgaggggcttgggaaaaaaacttggcactttttcgtgtggatcttgccacatttctgatcagaggtgtacactaacatttcccccgagctcttggcctttgcatttatttatacagtgccttgctcggcgcccaccaccccctcaagccccagcagccctcaacaggcccagggagggaagtgtgagcgccttggtatgacttaaaattggaaatgtcatctaaccattaagtcatgtgtgaacacataaggacgtgtgtaaatatgtacatttgtctttttataaaaagtaaattgtttataaggggtgtggcctttttagagagaaatttaacttgtagatgattttactttttatggaaacactgatggacttattattggcatcccgcctgaacttgactttggggtgaacagggacatgcatctattataaaatcctttcggccaggcgcggtggctcacacctgtaatcccagcactttgggaggccgagatgggtggatcacctgaggtcaggagttcgagaccagcctggtgaaactccatttctactaaaaatgcaaaaattagctgggcgtggttgcgggtgcttgtaatcccagctactcaggaggctgaggcaagagaatcgcttgaacctgggaggtggaggttgcagtgagccgagaacatgccattgcactccagcccgggcaccaaaaaaaaaaaaaaaaaaaaaaacctttcatttggccgggcatggtggcttatgcctgtaatcctggcactttgggaggccaaggtgggcagatcacctgaggtcaggagtttgagaccagcctggccaacatggtgaaacctcatctctactaaaaatacaaaaattaggccgggcacggtggctcacgcctgtaatcccagcactttgggaggcagaggcgggcggatcacgaggtcaggagatcaagaccatcctggctaacacggtgaaaccccgtctctactaaaaatataaaaaattagccgggcctagtggcgggtgcctgtagtcccagctactcgggaggctgaggcaggagaatggcatgaaccccggaggcagagcttgcagtgagccgagattgcaccactgcactacagcctgggcgacagagcgagactccgtctcaaaaaaaaaaaaaaaaattagccgggcctggtggcgggcgcctgtaatcccagctactgtggaggctgaagcacaagaatcacttgaacccgggagatggaggttgcagtgagctgagactgtgccactgcactccagcctgggtgacaagagtgagactttgtctcaaaaaaaaaaaaatccttttgtttatgttcacatagacaatggcagaaggaggggacattcctgtcataggaacatgcttatataaacatagtcacctgtccttgactatcaccagggctgtcagttgattctgggctcctggggcccaaggagtgttaagttttgaggcatgtgccataggtgatgtgtcctgctaacacacagatgctgctccaaaaagtcagttgatatgacacagtcacagacagaacagtcagcagcccaagaaaggtcctcacggctgctgtgctgggtagcacttgccatccagtttctagagtgatgaaatgctctgtctgtaccgttcaatacagtaggcactggcactagccacatgtgccagctaagcacttgaaatgtggccagtgcaataaggaattgaacttttaattgcatttaataaactgtatgtaaatagtcaaaaaaaaaaaaaa

SEQ ID NO: 126437 - DNA, 978 bp, Artificial Sequence
  derived and/or modified sequence
atgcccatcaccagaatgagaatgagaccctggctggagatgcagatcaacagcaaccagatccccggcctgatctggatcaacaaggaggagatgatcttccagatcccctggaagcacgccgccaagcacggctgggacatcaacaaggacgcctgcctgttcagaagctgggccatccacaccggcagatacaaggccggcgagaaggagcccgaccccaagacctggaaggccaacttcagatgcgccatgaacagcctgcccgacatcgaggaggtgaaggaccagagcagaaacaagggcagcagcgccgtgagagtgtacagaatgctgccccccctgaccaagaaccagagaaaggagagaaagagcaagagcagcagagacgccaagagcaaggccaagagaaagagctgcggcgacagcagccccgacaccttcagcgacggcctgagcagcagcaccctgcccgacgaccacagcagctacaccgtgcccggctacatgcaggacctggaggtggagcaggccctgacccccgccctgagcccctgcgccgtgagcagcaccctgcccgactggcacatccccgtggaggtggtgcccgacagcaccagcgacctgtacaacttccaggtgagccccatgcccagcaccagcgaggccaccaccgacgaggacgaggagggcaagctgcccgaggacatcatgaagctgctggagcagagcgagtggcagcccaccaacgtggacggcaagggctacctgctgaacgagcccggcgtgcagcccaccagcgtgtacggcgacttcagctgcaaggaggagcccgagatcgacagccccggcggcgacatcggcctgagcctgcagagagtgttcaccgacctgaagaacatggacgccacctggctggacagcctgctgacccccgtgagactgcccagcatccaggccatcccctgcgccccctag

SEQ ID NO: 126438 - DNA, 579 bp, Artificial Sequence
  derived and/or modified sequence
atgcccatcaccagaatgagaatgagaccctggctggagatgcagatcaacagcaaccagatccccggcctgatctggatcaacaaggaggagatgatcttccagatcccctggaagcacgccgccaagcacggctgggacatcaacaaggacgcctgcctgttcagaagctgggccatccacaccggcagatacaaggccggcgagaaggagcccgaccccaagacctggaaggccaacttcagatgcgccatgaacagcctgcccgacatcgaggaggtgaaggaccagagcagaaacaagggcagcagcgccgtgagagtgtacagaatgctgccccccctgaccaagaaccagagaaaggagagaaagagcaagagcagcagagacgccaagagcaaggccaagagaaagagctgcggcgacagcagccccgacaccttcagcgacggcctgagcagcagcaccctgcccgacgaccacagcagctacaccgtgcccggctacatgcaggacctggaggtggagcaggccctgacccccgccctgagcccctgcgccgtgagcagcaccctgtag

SEQ ID NO: 126439 - DNA, 978 bp, Artificial Sequence
  derived and/or modified sequence
atgcctattacaaggatgcgcatgcgcccttggctcgagatgcagatcaatagcaatcaaatccccggcttgatttggattaataaggaggaaatgattttccagatcccatggaagcacgccgccaaacacgggtgggacattaataaggatgcttgcctgttccgctcgtgggccattcacaccggccgctataaagccggcgagaaggaacctgaccccaagacttggaaggctaatttccgatgcgctatgaacagcctcccggatatcgaggaggtaaaagaccagtcccggaataaggggtcctctgctgtgagggtgtatagaatgctgccacctctgactaagaaccagcgcaaggaaaggaagagcaagtcaagccgggacgcgaagtctaaggcaaagagaaagtcctgtggcgactcatcacctgacaccttttccgacgggctctcctcgagcaccctgcccgacgaccatagttcctataccgtgccgggctacatgcaggatctggaagtcgagcaggcgctgaccccagccctgtcgccatgcgcagtgagcagtaccctgcccgattggcatatccctgtggaagtagtgcccgactcaacttccgacctctacaatttccaggtgagccctatgccaagcacttcagaggccacaactgatgaggacgaggaaggcaaacttccagaagacattatgaagctactggagcagtcagaatggcagcctactaacgtggatggtaaaggatacctgcttaacgagcccggagtccagcctacctccgtttacggcgacttctcttgcaaggaggagcccgagatcgatagccctggtggcgatatcggtttgtcactacagagagtattcacggacttaaaaaatatggatgcaacatggctcgattccctgctgacaccagtgaggctgccatcaattcaggccattccctgtgctccctag

SEQ ID NO: 126440 - DNA, 978 bp, Artificial Sequence
  derived and/or modified sequence
atgccaataactagaatgaggatgagaccctggctggagatgcagattaactccaatcagatccctgggttaatctggattaacaaggaagaaatgatttttcagatcccatggaagcacgctgccaaacacggatgggatattaataaggacgcttgtctattccgcagttgggctatccacacgggacgttacaaagccggcgagaaagagcccgatccaaaaacctggaaggcaaactttcgctgcgcaatgaatagcctccctgacatagaggaggttaaggaccaaagccgaaataagggaagctccgcagttcgcgtctatcgaatgctaccaccactgaccaagaatcaacggaaagaacggaaatctaaatcttctagagacgccaaatcgaaggccaaaagaaagtcttgtggtgactccagtcctgataccttcagtgacggcctcagtagctccactctaccggacgaccacagttcatacacggtacccggctatatgcaggacctagaggtggagcaagccctgacacccgcactgtccccctgcgctgtgagtagtacccttcccgattggcacatccccgtggaggtagtccccgacagcacatctgacctttacaactttcaagtctcccctatgccctcgacctctgaggcaaccacagatgaggacgaagaagggaaactacccgaggacattatgaaactgctggagcagagtgaatggcaacccactaacgtcgacggcaaaggctacctgttaaatgagccaggcgtccagccgacatcggtgtatggagactttagctgtaaggaggagcccgaaattgactccccagggggggacatcgggttgagcctccagcgagtgttcaccgatctgaagaacatggacgcaacctggctggactcactgttaacaccggtcagactgcccagcatccaagccatcccatgcgctccgtag

SEQ ID NO: 126441 - DNA, 579 bp, Artificial Sequence
  derived and/or modified sequence
atgcctatcacaaggatgagaatgcggccatggttggaaatgcagataaacagcaaccagattccggggctcatttggattaacaaagaggagatgatctttcaaatcccatggaagcatgctgcaaaacatggatgggatattaacaaagacgcctgcctgtttcgcagctgggccatccacacgggtcgatataaagcaggcgaaaaagagcctgacccaaaaacatggaaagccaactttcgctgtgctatgaactctctgcccgacatcgaggaggtcaaggatcaaagtaggaataaaggctcatcagctgtgagggtgtaccggatgctgcccccactgactaaaaaccagaggaaagagagaaaatcaaagtcgtcaagggacgctaaatctaaggcgaagaggaagtcatgcggtgattcctctcccgacacgttctccgacggactgagcagctctacattgcctgatgaccatagtagctatacagtgcccgggtatatgcaggatttggaggtcgaacaggcactgacacctgccctcagtccatgcgcggtctcatccactctgtag

SEQ ID NO: 126442 - DNA, 978 bp, Artificial Sequence
  derived and/or modified sequence
atgcccatcaccaggatgaggatgaggccctggctggagatgcagatcaacagcaaccagatccctggcctcatctggatcaacaaggaggagatgatcttccagatcccctggaagcatgctgccaagcacggctgggacatcaacaaggatgcctgcctcttccgctcctgggccatccacacaggccgctacaaggccggggagaaggagccagaccccaagacctggaaggccaacttccgctgtgccatgaacagcctgcctgacatcgaggaggtgaaggaccagagcagaaataaaggcagcagcgctgtgcgggtgtacaggatgctgccccccctgaccaagaaccagaggaaggagaggaagagcaagagcagcagagatgccaagagcaaggccaagaggaagagctgtggggacagcagcccagacaccttcagtgatggcctgagcagcagcaccctgcctgatgaccacagcagctacacagtgcccggctacatgcaggacctggaggtggagcaggccctgaccccagccctgagcccctgtgctgtgagcagcaccctgcctgactggcacatccctgtggaggtggtgcctgacagcaccagtgacctgtacaacttccaggtgagccccatgcccagcaccagcgaggccaccacagatgaagatgaggagggcaagctgcctgaggacatcatgaagctgctggagcagagcgagtggcagcccaccaacgtggatggcaagggctacctgctgaatgaacctggggtgcagcccacctctgtgtatggagacttcagctgcaaggaggagcctgagattgacagccctggaggagacatcggcctgagcctgcagagggtcttcacagacctgaagaacatggatgccacctggctggacagcctgctgacccctgtgcggctgcccagcatccaggccatcccctgtgccccctag

SEQ ID NO: 126443 - DNA, 579 bp, Artificial Sequence
  derived and/or modified sequence
atgcccatcaccaggatgaggatgaggccctggctggagatgcagatcaacagcaaccagatccctggcctcatctggatcaacaaggaggagatgatcttccagatcccctggaagcatgctgccaagcacggctgggacatcaacaaggatgcctgcctcttccgctcctgggccatccacacaggccgctacaaggccggggagaaggagccagaccccaagacctggaaggccaacttccgctgtgccatgaacagcctgcctgacatcgaggaggtgaaggaccagagcagaaataaaggcagcagcgctgtgcgggtgtacaggatgctgccccccctgaccaagaaccagaggaaggagaggaagagcaagagcagcagagatgccaagagcaaggccaagaggaagagctgtggggacagcagcccagacaccttcagtgatggcctgagcagcagcaccctgcctgatgaccacagcagctacacagtgcccggctacatgcaggacctggaggtggagcaggccctgaccccagccctgagcccctgtgctgtgagcagcaccctgtag

SEQ ID NO: 126444 - DNA, 3579 bp, Artificial Sequence
  derived and/or modified sequence
tgctcggtggcgccgctgccctggcagagctcgccactccttagtcgaggcaagacgtgcgcccgagccccgccgaaccgaggccacccggagccgtgcccagtccacgccggccgtgcccggcggccttaagaacccggcaacctctgccttcttccctcttccactcggagtcgcgctccgcgcgccctcactgcagcccctgcgtcgccgggaccctcgcgcgcgaccgccgaatcgctcctgcagcagagccaacatgcccatcactcggatgcgcatgagaccctggctagagatgcagattaattccaaccaaatcccggggctcatctggattaataaagaggagatgatcttccagatcccatggaagcatgctgccaagcatggctgggacatcaacaaggatgcctgtttgttccggagctgggccattcacacaggccgatacaaagcaggggaaaaggagccagatcccaagacgtggaaggccaactttcgctgtgccatgaactccctgccagatatcgaggaggtgaaagaccagagcaggaacaagggcagctcagctgtgcgagtgtaccggatgcttccacctctcaccaagaaccagagaaaagaaagaaagtcgaagtccagccgagatgctaagagcaaggccaagaggaagtcatgtggggattccagccctgataccttctctgatggactcagcagctccactctgcctgatgaccacagcagctacacagttccaggctacatgcaggacttggaggtggagcaggccctgactccagcactgtcgccatgtgctgtcagcagcactctccccgactggcacatcccagtggaagttgtgccggacagcaccagtgatctgtacaacttccaggtgtcacccatgccctccacctctgaagctacaacagatgaggatgaggaagggaaattacctgaggacatcatgaagctcttggagcagtcggagtggcagccaacaaacgtggatgggaaggggtacctactcaatgaacctggagtccagcccacctctgtctatggagactttagctgtaaggaggagccagaaattgacagcccagggggggatattgggctgagtctacagcgtgtcttcacagatctgaagaacatggatgccacctggctggacagcctgctgaccccagtccggttgccctccatccaggccattccctgtgcaccgtagcagggcccctgggcccctcttattcctctaggcaagcaggacctggcatcatggtggatatggtgcagagaagctggacttctgtgggcccctcaacagccaagtgtgaccccactgccaagtggggatggggcctccctccttgggtcattgacctctcagggcctggcaggccagtgtctgggtttttcttgtggtgtaaagctggccctgcctcctgggaagatgaggttctgagaccagtgtatcaggtcagggacttggacaggagtcagtgtctggctttttcctctgagcccagctgcctggagagggtctcgctgtcactggctggctcctaggggaacagaccagtgaccccagaaaagcataacaccaatcccagggctggctctgcactaagagaaaattgcactaaatgaatctcgttcccaaagaactacccccttttcagctgagccctggggactgttccaaagccagtgaaatgtgaaggaaagtggggtccttcggggcgatgctccctcagcctcagaggagctctaccctgctccctgctttggctgaggggcttgggaaaaaaacttggcactttttcgtgtggatcttgccacatttctgatcagaggtgtacactaacatttcccccgagctcttggcctttgcatttatttatacagtgccttgctcggcgcccaccaccccctcaagccccagcagccctcaacaggcccagggagggaagtgtgagcgccttggtatgacttaaaattggaaatgtcatctaaccattaagtcatgtgtgaacacataaggacgtgtgtaaatatgtacatttgtctttttataaaaagtaaattgtttataaggggtgtggcctttttagagagaaatttaacttgtagatgattttactttttatggaaacactgatggacttattattggcatcccgcctgaacttgactttggggtgaacagggacatgcatctattataaaatcctttcggccaggcgcggtggctcacacctgtaatcccagcactttgggaggccgagatgggtggatcacctgaggtcaggagttcgagaccagcctggtgaaactccatttctactaaaaatgcaaaaattagctgggcgtggttgcgggtgcttgtaatcccagctactcaggaggctgaggcaagagaatcgcttgaacctgggaggtggaggttgcagtgagccgagaacatgccattgcactccagcccgggcaccaaaaaaaaaaaaaaaaaaaaaaacctttcatttggccgggcatggtggcttatgcctgtaatcctggcactttgggaggccaaggtgggcagatcacctgaggtcaggagtttgagaccagcctggccaacatggtgaaacctcatctctactaaaaatacaaaaattaggccgggcacggtggctcacgcctgtaatcccagcactttgggaggcagaggcgggcggatcacgaggtcaggagatcaagaccatcctggctaacacggtgaaaccccgtctctactaaaaatataaaaaattagccgggcctagtggcgggtgcctgtagtcccagctactcgggaggctgaggcaggagaatggcatgaaccccggaggcagagcttgcagtgagccgagattgcaccactgcactacagcctgggcgacagagcgagactccgtctcaaaaaaaaaaaaaaaaattagccgggcctggtggcgggcgcctgtaatcccagctactgtggaggctgaagcacaagaatcacttgaacccgggagatggaggttgcagtgagctgagactgtgccactgcactccagcctgggtgacaagagtgagactttgtctcaaaaaaaaaaaaatccttttgtttatgttcacatagacaatggcagaaggaggggacattcctgtcataggaacatgcttatataaacatagtcacctgtccttgactatcaccagggctgtcagttgattctgggctcctggggcccaaggagtgttaagttttgaggcatgtgccataggtgatgtgtcctgctaacacacagatgctgctccaaaaagtcagttgatatgacacagtcacagacagaacagtcagcagcccaagaaaggtcctcacggctgctgtgctgggtagcacttgccatccagtttctagagtgatgaaatgctctgtctgtaccgttcaatacagtaggcactggcactagccacatgtgccagctaagcacttgaaatgtggccagtgcaataaggaattgaacttttaattgcatttaataaactgtatgtaaatagtca

SEQ ID NO: 126445 - DNA, 2032 bp, Artificial Sequence
  derived and/or modified sequence
gccgtgccggggaccgagtgtcagcccacgcgtgggcgcccagtgctcccggctttcggcggtcccagctccgcgcccaggcgacaggttttgggctccctgtgctggtggcaagggctggcttactgcccaggtggctggagggaatcgtgacctacggagactgcgggaagaggcgccacagccaacatgcccatcactcggatgcgcatgagaccctggctagagatgcagattaattccaaccaaatcccggggctcatctggattaataaagaggagatgatcttccagatcccatggaagcatgctgccaagcatggctgggacatcaacaaggatgcctgtttgttccggagctgggccattcacacaggccgatacaaagcaggggaaaaggagccagatcccaagacgtggaaggccaactttcgctgtgccatgaactccctgccagatatcgaggaggtgaaagaccagagcaggaacaagggcagctcagctgtgcgagtgtaccggatgcttccacctctcaccaagaaccagagaaaagaaagaaagtcgaagtccagccgagatgctaagagcaaggccaagaggaagtcatgtggggattccagccctgataccttctctgatggactcagcagctccactctgcctgatgaccacagcagctacacagttccaggctacatgcaggacttggaggtggagcaggccctgactccagcactgtcgccatgtgctgtcagcagcactctccccgactggcacatcccagtggaagttgtgccggacagcaccagtgatctgtacaacttccaggtgtcacccatgccctccacctctgaagctacaacagatgaggatgaggaagggaaattacctgaggacatcatgaagctcttggagcagtcggagtggcagccaacaaacgtggatgggaaggggtacctactcaatgaacctggagtccagcccacctctgtctatggagactttagctgtaaggaggagccagaaattgacagcccagggggggatattgggctgagtctacagcgtgtcttcacagatctgaagaacatggatgccacctggctggacagcctgctgaccccagtccggttgccctccatccaggccattccctgtgcaccgtagcagggcccctgggcccctcttattcctctaggcaagcaggacctggcatcatggtggatatggtgcagagaagctggacttctgtgggcccctcaacagccaagtgtgaccccactgccaagtggggatggggcctccctccttgggtcattgacctctcagggcctggcaggccagtgtctgggtttttcttgtggtgtaaagctggccctgcctcctgggaagatgaggttctgagaccagtgtatcaggtcagggacttggacaggagtcagtgtctggctttttcctctgagcccagctgcctggagagggtctcgctgtcactggctggctcctaggggaacagaccagtgaccccagaaaagcataacaccaatcccagggctggctctgcactaagagaaaattgcactaaatgaatctcgttcccaaagaactacccccttttcagctgagccctggggactgttccaaagccagtgaaatgtgaaggaaagtggggtccttcggggcgatgctccctcagcctcagaggagctctaccctgctccctgctttggctgaggggcttgggaaaaaaacttggcactttttcgtgtggatcttgccacatttctgatcagaggtgtacactaacatttcccccgagctcttggcctttgcatttatttatacagtgccttgctcggcgcccaccaccccctcaagccccagcagccctcaacaggcccagggagggaagtgtgagcgccttggtatgacttaaaattggaaatgtcatctaaccattaagtcatgtgtgaacacataaggacgtgtgtaaatatgtacatttgtctttttataaaaagtaaattgttta

SEQ ID NO: 126446 - DNA, 885 bp, Artificial Sequence
  derived and/or modified sequence
cgcagatctgcgtgcgcgcagccgccaggggcctgtaggtggcccgctatgttcgtcccgcgcatccacacgccgtgccggggaccgagtgtcagcccacgcgtgggcgcccagtgctcccggctttcggcggtcccagctccgcgcccaggcgacaggttttgggctccctgtgctggtggcaagggctggcttactgcccaggtggctggagggaatcgtgacctacggagactgcgggaagaggcgccacaggtgttccttgggccacttctccagaggaggggaaaccgggccggaaggccaacatgcccatcactcggatgcgcatgagaccctggctagagatgcagattaattccaaccaaatcccggggctcatctggattaataaagaggagatgatcttccagatcccatggaagcatgctgccaagcatggctgggacatcaacaaggatgcctgtttgttccggagctgggccattcacacaggccgatacaaagcaggggaaaaggagccagatcccaagacgtggaaggccaactttcgctgtgccatgaactccctgccagatatcgaggaggtgaaagaccagagcaggaacaagggcagctcagctgtgcgagtgtaccggatgcttccacctctcaccaagaaccagagaaaagaaagaaagtcgaagtccagccgagatgctaagagcaaggccaagaggaagtcatgtggggattccagccctgataccttctctgatggactcagcagctccactctgcctgatgaccacagcagctacacagttccaggctacatgcaggacttggaggtggagcaggccctgactccagcactgtcgccatgtgctgtcagcagcactctcc

SEQ ID NO: 126447 - DNA, 978 bp, Artificial Sequence
  derived and/or modified sequence
atgcccatcacccggatgcggatgcggccctggctggagatgcagattaattccaatcaaatcccaggtctgatttggattaacaaagaggaaatgattttccaaatcccatggaaacatgcagcaaagcacggttgggacatcaataaagacgcgtgtctatttcgaagttgggccatacacaccggacggtataaagctggcgaaaaggagccagaccccaaaacttggaaagccaacttcaggtgtgctatgaactcacttcccgacattgaggaggtaaaggatcaaagccggaacaaagggtcatcagccgtgagagtctaccggatgctacctcctctcaccaaaaatcaacgtaaggagcgaaagtctaagtccagccgagacgccaagagcaaggccaaacgcaaaagttgtggagattcctccccagacacatttagtgacggtttaagttccagcaccttgcctgatgaccactcaagttataccgtcccaggctatatgcaggatctcgaagtggagcaggccctcacccccgcactcagcccctgtgctgtttcttccacactgcccgattggcacatcccagtagaggttgtgccggattccacctcagatctgtacaatttccaggttagtcccatgccctccacctcagaagcgacgactgatgaagacgaggagggcaagttacctgaagatataatgaagttactcgaacagtcagagtggcagccaacgaacgtagatgggaaaggatacctgctgaacgagcccggggttcagcccacttctgtgtatggagatttttcctgtaaggaggaaccggagattgatagccctggaggcgatattggcctgtccctccagagggtatttacagacctgaagaacatggatgccacctggctggatagtctgctgaccccagtacggctgccatccatccaggcaataccttgcgctccgtag

SEQ ID NO: 126448 - DNA, 978 bp, Artificial Sequence
  derived and/or modified sequence
atgcccatcacccggatgcggatgcggccctggctggagatgcagatcaacagtaaccagattcccggtctcatctggatcaataaagaagagatgatattccagatcccttggaaacacgctgcaaaacacggctgggacatcaataaggacgcatgtctctttagatcctgggccatccacacgggccgttacaaggccggagaaaaggagccagaccccaagacttggaaggctaatttccgctgtgcaatgaactctctgccagatatcgaggaagtaaaggaccagagcagaaataagggcagctccgctgtgagggtgtacagaatgctgccgccattgaccaaaaaccagcgtaaagaacgaaagtcaaagagttcacgggatgccaagagtaaggctaaacgcaagtcttgtggtgacagttccccggacacattctcggacggactaagcagttcaacactccccgacgaccacagtagttacacggttcctggctatatgcaggatctggaagttgagcaggcgctcaccccagccctgagtccgtgcgctgtgagcagtactctccccgactggcatatacccgtcgaggtggtgcccgattccacatccgacctgtacaacttccaagtatctccgatgccaagtacttctgaagcaactacggacgaggatgaagaaggaaagttgccggaagatattatgaagctgctggagcagagcgagtggcagcctactaatgtggacgggaagggctacctcttgaacgaacctggagtgcaaccaacctccgtgtatggtgatttttcttgtaaggaagagccagaaattgactctcccggaggcgacatcggcctttctctgcagagagtcttcaccgatctgaagaatatggatgccacttggctggacagcctgctcaccccagtgagacttcctagcatccaggccataccctgcgccccttag

SEQ ID NO: 126449 - DNA, 579 bp, Artificial Sequence
  derived and/or modified sequence
atgcccatcacccggatgcggatgcggccctggctggagatgcagataaactctaaccagatacccggactgatatggattaataaagaggagatgatcttccagataccttggaagcatgcagccaagcatggatgggatataaataaggatgcgtgccttttcagatcgtgggctatacataccggtagatacaaagcgggcgaaaaggagcctgacccgaagacttggaaagccaattttcggtgcgccatgaattctctgcccgatattgaagaggtgaaagatcagagtcggaataagggctcttccgctgtcagggtctataggatgcttccaccactaaccaaaaatcaacggaaggagagaaagtccaagtcctcacgcgacgctaaaagcaaggccaaacgcaagagctgtggcgactctagtccagacacattttcagatgggttaagttccagtacactgcccgacgaccatagcagctacacagtccccggatacatgcaggatctcgaagtcgagcaggcattgacacctgcactgagcccgtgtgctgtgagctcaactctctag

SEQ ID NO: 126450 - DNA, 978 bp, Artificial Sequence
  derived and/or modified sequence
atgcctatcacaaggatgcgcatgcgcccatggctggaaatgcagataaattcaaaccagattcctggtctcatttggatcaacaaggaggagatgatttttcagattccttggaagcacgctgctaagcatggatgggacataaataaggacgcttgtttgtttagatcatgggctattcatacgggacgatacaaagcgggagaaaaggaacccgaccctaaaacatggaaggcaaactttaggtgcgctatgaatagtctaccagatattgaggaagtcaaagatcagagcaggaacaaggggtcctccgccgtgcgggtctatcgtatgcttccccctctgactaagaatcagcgaaaggaacgcaagtctaaaagctcccgggatgctaaaagcaaggccaaaaggaaatcctgcggtgactcttctcccgatactttttcagatggattatccagttcaactctccccgatgatcacagctcctacacagtacctggatatatgcaggacctcgaggttgagcaggccttaacccccgctttgagtccatgcgcagtgtcgtccacgctccctgattggcatattcctgtggaagtagtccctgattccactagtgatctgtataacttccaggtgagtcccatgcccagtacatccgaggcgactaccgacgaggatgaagaaggcaagctgcctgaggacattatgaaacttttggagcagtccgagtggcaacctacaaacgtggacgggaaggggtatctgttaaatgaaccgggtgtacagcctacctcggtttatggggacttctcctgcaaggaggaacctgaaatcgactcgcccggaggcgacatcggattgtctctgcagcgcgtgttcaccgatctgaaaaatatggatgcgacctggcttgactcccttctgacccccgttaggctgccttccatccaagctatcccatgcgctccctag

SEQ ID NO: 126451 - DNA, 978 bp, Artificial Sequence
  derived and/or modified sequence
atgccgattaccaggatgcgtatgcgcccttggctggagatgcagattaattctaatcagatcccgggattgatttggataaacaaagaggaaatgattttccagatcccatggaagcacgctgctaaacatgggtgggatatcaataaagacgcctgtcttttcaggtcttgggcgatccataccggcagatataaagccggtgagaaagaacctgaccctaaaacttggaaagctaatttccgttgcgctatgaattctctcccggacatcgaggaggttaaagaccaatcaaggaataagggctcttctgccgtgcgtgtctaccgaatgctgcctccccttacaaaaaaccagcggaaggaacggaaatctaagtcctcacgcgatgctaagagcaaagcaaagcggaagagttgtggcgactccagtcctgacactttctctgatggactgtcaagttcaactctccccgacgatcacagttcctacacggtcccaggctacatgcaggaccttgaggtcgagcaggctcttactcctgcactttcaccttgcgcggtgtcaagcacattgcctgattggcatatccccgtggaggtcgtgccagactcgacatctgacctttataatttccaggtaagccccatgccctcaacttccgaggcaacgaccgacgaagacgaggaaggcaaattacccgaggatattatgaagctcctggaacagtctgagtggcagccaacgaacgtggacgggaagggatacctgttgaacgagccaggcgtacagcctacctccgtgtacggagatttctcttgtaaagaggagcctgaaatcgatagtccagggggagacattggactcagcctacagcgcgtgttcacagatttaaagaatatggacgccacttggctggattctctcctgactccagtgcgcctgccctccattcaagctatcccctgcgccccttag

SEQ ID NO: 126452 - DNA, 579 bp, Artificial Sequence
  derived and/or modified sequence
atgccaattacacgaatgagaatgcgaccctggcttgaaatgcagattaactctaaccagatccccggactgatctggataaataaagaagaaatgattttccagattccctggaagcacgccgcaaagcacggttgggatatcaacaaggacgcttgcctcttcagatcgtgggcaattcacacggggagatataaggctggcgagaaagagcccgatccgaagacctggaaagccaattttcgctgcgccatgaactccctgccagacatcgaagaggtcaaagaccaatcccgaaacaagggatcctcagctgtcagggtctacaggatgctgccaccattaacaaagaaccagcggaaagagcggaagtccaaatcatcaagagatgctaaaagcaaggcaaagagaaaatcctgcggcgatagctctccggataccttttcggacggcctgtcttcctctaccctccccgacgaccactcaagctatacagtgccaggctatatgcaggacctggaggttgaacaggctttgacaccggcactgtccccttgcgcagtttcaagcaccctctag

SEQ ID NO: 126453 - protein, 349 aa, Artificial Sequence
  derived and/or modified sequence
MPVERMRMRPWLEEQINSNTIPGLKWLNKEKKIFQIPWMHAARHGWDVEKDAPLFRNWAIHTGKHQPGVDKPDPKTWKANFRCAMNSLPDIEEVKDKSIKKGNNAFRVYRMLPLSERPSKKGKKPKTEKEDKVKHIKQEPVESSLGLSNGVSDLSPEYAVLTSTIKNEVDSTVNIIVVGQSHLDSNIENQEIVTNPPDICQVVEVTTESDEQPVSMSELYPLQISPVSSYAESETTDSVPSDEESAEGRPHWRKRNIEGKQYLSNMGTRGSYLLPGMASFVTSNKPDLQVTIKEESNPVPYNSSWPPFQDLPLSSSMTPASSSSRPDRETRASVIKKTSDITQARVKSC

SEQ ID NO: 126454 - protein, 137 aa, Artificial Sequence
  derived and/or modified sequence
MPVERMRMRPWLEEQINSNTIPGLKWLNKEKKIFQIPWMHAARHGWDVEKDAPLFRNWAIHTGKHQPGVDKPDPKTWKANFRCAMNSLPDIEEVKDKSIKKGNNAFRVYRMLPLSERPSKKGKKPKTEKEDKVKHIK

SEQ ID NO: 126455 - protein, 161 aa, Artificial Sequence
  derived and/or modified sequence
MPVERMRMRPWLEEQINSNTIPGLKWLNKEKKIFQIPWMHAARHGWDVEKDAPLFRNWAIHTGKHQPGVDKPDPKTWKANFRCAMNSLPDIEEVKDKSIKKGNNAFRVYRMLPLSERPSKKGKKPKTEKEDKVKHIKQEPVESSLGLSNGVSDLSPEYAVL

SEQ ID NO: 126456 - DNA, 2302 bp, Artificial Sequence
  derived and/or modified sequence
agccgcggctcttcgcagtttcctctccttgttttgctttcgatctggactgttctcaggcaagccggggagtaacttttagttttgctcctgcgattattcaactgacgggctttcatttccatttcacataccctagcaacacttataccttgcggaattgtattggtagcgtgaaaaaagcacactgagagggcaccatgccggtggaaaggatgcgcatgcgcccgtggctggaggagcagataaactccaacacgatcccggggctcaagtggcttaacaaggaaaagaagatttttcagatcccctggatgcatgcggctagacatgggtgggatgtggaaaaagatgcaccactctttagaaactgggcaatccatacaggaaagcatcaaccaggagtagataaacctgatcccaaaacatggaaggcgaatttcagatgcgccatgaattccttgcctgatattgaagaagtcaaggataaaagcataaagaaaggaaataatgccttcagggtctaccgaatgctgcccctatcagaacggccttctaagaaaggaaagaaaccaaagacagaaaaagaagacaaagttaagcacatcaagcaagaaccagttgagtcatctctggggcttagtaatggagtaagtgatctttctcctgagtatgcggtcctgacttcaactataaaaaatgaagtggatagtacggtgaacatcatagttgtaggacagtcccatctggacagcaacattgagaatcaagagattgtcaccaatccgccagacatttgccaagttgtagaggtgaccactgagagcgacgagcagccggtcagcatgagcgagctctaccctctgcagatctcccccgtgtcttcctatgcagaaagcgaaacgactgatagtgtgcccagcgatgaagagagtgccgaggggcggccacactggcggaagaggaatattgaaggcaaacagtacctcagcaacatggggactcgaggctcctacctgctgcccggcatggcgtccttcgtcacttccaacaaaccggacctccaggtcaccatcaaagaggagagcaatccggtgccttacaacagctcctggcccccttttcaagacctccccctttcttcctccatgaccccagcatccagcagcagtcggccagaccgggagacccgggccagcgtcatcaagaaaacatcggatatcacccaggcccgcgtcaagagctgttaagcctctgactctccgcggtggttgttggggcttcttggctttgttttgttgtttgtttgtattttatttttttctctctgacacctattttagacaaatctaagggaaaaagccttgacaatagaacattgattgctgtgtccaactccagtactggagcttctctttaactcaggactccagcccattggtagacgtgtgtttctagagcctgctggatctcccagggctactcactcaagttcaaggaccaacaagggcagtggaggtgctgcattgcctgcggtcaaggccagcaaggtggagtggatgcctcagaacggacgagataatgtgaactagctggaattttttattcttgtgaatatgtacataggcagcactagcgacattgcagtctgcttctgcaccttatcttaaagcacttacagataggccttcttgtgatcttgctctatctcacagcacactcagcacccccttctctgcccattccccagcctctcttcctatcccatcccatcccatcccatcccatcccatcccatcccgctcttttcctacttttccttccctcaaagcttccattccacatccggaggagaagaaggaaatgaatttctctacagatgtcccattttcagactgctttaaaaaaaatccttctaatctgctatgcttgaatgccacgcggtacaaaggaaaaagtatcatggaaatattatgcaaattcccagatttgaagacaaaaatactctaattctaaccagagcaagcttttttattttttatacaggggaatattttattcaaggtaaaattctaaataaaatataattgttttttatcttttctacagcaaatttataattttaagattccttttcttgtttatcagcagttgttattacatccttgtggcacatttttttttttaattttgtaaaggtgaaaaaagcttttatgagctcatgtagcaatcagattttcctgtggattgataataaatgaatatgatatatagttaaatttttaaaaaaaaaaaaaaaaaa

SEQ ID NO: 126457 - DNA, 1050 bp, Artificial Sequence
  derived and/or modified sequence
atgccagtagagcgtatgaggatgcggccctggttagaggaacagattaatagcaacaccatccccgggctcaagtggctgaacaaagaaaaaaaaatctttcagatcccttggatgcacgccgctcgccacggatgggacgttgagaaggatgcacccttgttccgaaactgggctatccacacaggtaagcaccagcccggtgtggacaagccagatcccaagacatggaaggcaaactttcggtgtgcaatgaatagcctccccgacatagaggaggtcaaggataaaagcataaagaaagggaataacgcttttagggtctaccgtatgctgcccctttctgaacgtccaagcaagaaggggaaaaagcccaaaaccgaaaaagaggacaaggtcaaacacattaagcaagaacccgtggagtcctctctcggcctgtccaacggcgtctctgatctcagccctgaatatgccgtgctcaccagtacaatcaaaaacgaagtggactcaacggtgaatatcattgtcgtcggccagagtcacttggactcaaatattgagaaccaggaaattgtgaccaacccaccggacatttgccaagtggtagaagtcactacggagtctgacgagcagccagtctccatgtctgaactatatccattgcagatctctccggtgtctagctacgcagaatctgaaacaaccgattcagtccccagcgacgaggagtcagctgagggccgtccccactggcgaaagaggaacattgagggaaagcagtacctctccaatatgggaactcggggctcatacttgttgcccggcatggcctcatttgttacatctaataaaccggacctccaggtgactattaaggaggagagtaatccagtgccatacaattcctcatggccacctttccaggatttaccgctgtcctcttctatgactcccgcaagctccagctctaggcccgacagagagactagagccagtgttattaaaaagacgtccgatataactcaagctcgcgtgaaaagctgttag

SEQ ID NO: 126458 - DNA, 2303 bp, Artificial Sequence
  derived and/or modified sequence
ggatttccagccgcggctcttcgcagtttcctctccttgttttgctttcgatctggactgttctcaggcaagccggggagtaacttttagttttgctcctgcgattattcaactgacgggctttcatttccatttcacataccctagcaacacttataccttgcggaattgtattggtagcgtgaaaaaagcacactgagagggcaccatgccggtggaaaggatgcgcatgcgcccgtggctggaggagcagataaactccaacacgatcccggggctcaagtggcttaacaaggaaaagaagatttttcagatcccctggatgcatgcggctagacatgggtgggatgtggaaaaagatgcaccactctttagaaactgggcaatccatacaggaaagcatcaaccaggagtagataaacctgatcccaaaacatggaaggcgaatttcagatgcgccatgaattccttgcctgatattgaagaagtcaaggataaaagcataaagaaaggaaataatgccttcagggtctaccgaatgctgcccctatcagaacggccttctaagaaaggaaagaaaccaaagacagaaaaagaagacaaagttaagcacatcaagcaagaaccagttgagtcatctctggggcttagtaatggagtaagtgatctttctcctgagtatgcggtcctgacttcaactataaaaaatgaagtggatagtacggtgaacatcatagttgtaggacagtcccatctggacagcaacattgagaatcaagagattgtcaccaatccgccagacatttgccaagttgtagaggtgaccactgagagcgacgagcagccggtcagcatgagcgagctctaccctctgcagatctcccccgtgtcttcctatgcagaaagcgaaacgactgatagtgtgcccagcgatgaagagagtgccgaggggcggccacactggcggaagaggaatattgaaggcaaacagtacctcagcaacatggggactcgaggctcctacctgctgcccggcatggcgtccttcgtcacttccaacaaaccggacctccaggtcaccatcaaagaggagagcaatccggtgccttacaacagctcctggcccccttttcaagacctccccctttcttcctccatgaccccagcatccagcagcagtcggccagaccgggagacccgggccagcgtcatcaagaaaacatcggatatcacccaggcccgcgtcaagagctgttaagcctctgactctccgcggtggttgttggggcttcttggctttgttttgttgtttgtttgtattttatttttttctctctgacacctattttagacaaatctaagggaaaaagccttgacaatagaacattgattgctgtgtccaactccagtactggagcttctctttaactcaggactccagcccattggtagacgtgtgtttctagagcctgctggatctcccagggctactcactcaagttcaaggaccaacaagggcagtggaggtgctgcattgcctgcggtcaaggccagcaaggtggagtggatgcctcagaacggacgagataatgtgaactagctggaattttttattcttgtgaatatgtacataggcagcactagcgacattgcagtctgcttctgcaccttatcttaaagcacttacagataggccttcttgtgatcttgctctatctcacagcacactcagcacccccttctctgcccattccccagcctctcttcctatcccatcccatcccatcccatcccatcccatcccatcccgctcttttcctacttttccttccctcaaagcttccattccacatccggaggagaagaaggaaatgaatttctctacagatgtcccattttcagactgctttaaaaaaaatccttctaatctgctatgcttgaatgccacgcggtacaaaggaaaaagtatcatggaaatattatgcaaattcccagatttgaagacaaaaatactctaattctaaccagagcaagcttttttattttttatacaggggaatattttattcaaggtaaaattctaaataaaatataattgttttttatcttttctacagcaaatttataattttaagattccttttcttgtttatcagcagttgttattacatccttgtggcacatttttttttttaattttgtaaaggtgaaaaaagcttttatgagctcatgtagcaatcagattttcctgtggattgataataaatgaatatgatatatagttaaatttttaaggggcatca

SEQ ID NO: 126459 - DNA, 1050 bp, Artificial Sequence
  derived and/or modified sequence
atgcctgtggagaggatgaggatgaggccctggctggaggagcagatcaacagcaacaccatccctggcctgaagtggctgaacaaggagaagaagatcttccagatcccctggatgcatgctgcccggcacggctgggatgtggagaaggatgcccccctcttcaggaactgggccatccacacaggcaagcaccagcccggggtggacaagccagaccccaagacctggaaggccaacttccgctgtgccatgaacagcctgcctgacatcgaggaggtgaaggacaagagcatcaagaagggcaacaatgccttccgggtgtacaggatgctgcccctgtctgagcggcccagcaagaagggcaagaagcccaagacagagaaggaggacaaggtgaagcacatcaagcaggagcctgtggagagcagcctgggcctgagcaatggagtgtctgacctgagcccagaatatgctgtgctgaccagcaccatcaagaatgaggtggacagcacagtgaacatcatcgtggtgggccagagccacctggacagcaacatcgagaaccaggagatcgtgaccaaccccccagacatctgccaggtggtggaggtgaccacagaaagtgatgagcagcctgtgtccatgtctgagctgtaccccctgcagatcagccctgtgtcctcctatgcagagagcgagaccacagacagcgtgcccagtgatgaggagagcgctgagggccggccccactggaggaagagaaatattgagggcaagcagtacctgagcaacatgggcacccggggcagctacctgctgcccggcatggccagctttgtgaccagcaacaagccagacctgcaggtgaccatcaaggaggagagcaaccctgtgccctacaacagctcctggccacccttccaggacctgcccctgagcagctccatgaccccagccagcagcagcagcaggccagaccgggagacccgggccagcgtcatcaagaagaccagtgacatcacccaggcccgggtgaagagctgctag

SEQ ID NO: 126460 - DNA, 1050 bp, Artificial Sequence
  derived and/or modified sequence
atgcccgtggagcggatgcggatgcggccctggctggaggagcagataaacagcaacaccatccccgggctgaagtggcttaacaaggaaaagaaaatattccaaattccatggatgcacgcagcgcgccatggctgggacgtggaaaaggacgctcccttgttccgaaattgggccattcataccggtaagcatcagcccggagtagacaagccagaccccaaaacctggaaagccaacttccggtgtgcgatgaattccctccctgatatagaggaagtcaaggataagtcgattaagaaagggaacaacgcattccgcgtataccggatgttgcccctgagtgaacggccatcaaaaaaagggaagaaaccaaagaccgaaaaggaggacaaggtaaagcacatcaaacaggagccggtggagtcatcgctgggtctgtcaaacggcgtcagcgacctgagccccgaatacgctgtcctgacatccacaattaaaaatgaagtggacagtaccgtgaatatcatcgtggtcgggcagtcccatctggattccaacatcgaaaatcaggagattgtgaccaacccccctgatatctgccaggtggtagaagtgaccactgaaagtgacgagcagcctgtttcaatgtcagagctgtaccccttacaaatatctcctgtgagttcctacgccgagtctgaaaccacagattctgttccctccgacgaggagtccgcagagggacgcccacattggagaaaacgcaatattgaaggcaaacagtatctctccaacatggggacccgagggtcttatttgctccccggaatggccagttttgtgaccagcaacaagccggaccttcaggtcactattaaggaagaatccaaccccgtgccgtacaactccagctggccaccattccaagatctacccctttcctcctctatgacccccgctagttctagcagtcgccctgatagggagacccgcgcatcagtgattaagaagacttccgacatcacgcaagccagagtcaaaagctgttag

SEQ ID NO: 126461 - DNA, 1050 bp, Artificial Sequence
  derived and/or modified sequence
atgccagtggagcggatgcgaatgcgaccgtggcttgaagaacaaatcaattcgaataccatccccggtctgaagtggctgaacaaggagaagaagatcttccagattccctggatgcacgctgccagacacggatgggacgtggaaaaggatgcacctctctttcggaactgggcaatccataccgggaaacatcaaccaggtgtagacaagccagatccgaaaacctggaaagctaacttccgctgtgccatgaacagcttgcctgacatcgaagaagttaaggataagtccatcaaaaaaggcaataatgctttccgggtgtacaggatgcttcctctcagcgagcgccctagcaaaaaggggaagaaacctaaaacagaaaaagaagacaaggttaagcatatcaaacaggagcctgttgagtcaagtttgggcttatccaatggggtgtccgatctttcccctgagtatgcagtgctcacaagcacaattaagaatgaagtagattctactgtgaatatcatcgttgtcggccagtctcatttggactcaaacattgagaaccaggagatcgtgaccaacccccctgatatttgccaagtagtggaagtgaccactgaatcagatgaacaacccgtgtccatgtctgagctgtatccactgcaaatcagcccagttagctcctacgcagagagtgaaacgactgactcagtgccaagtgatgaagaatctgcagagggacgaccacactggcggaagagaaacattgaagggaaacagtacctgagcaacatgggtacccgcggtagctacctcttaccaggcatggcatcttttgtcacctccaataagcccgacctccaggtgacaatcaaggaagagagtaacccggtgccgtacaacagctcatggcccccatttcaggacctgccccttagttccagcatgactccagcttccagtagtagccggccagacagggagacacgcgcttcggtcataaagaaaactagcgacatcacacaggcgcgagtcaaatcatgctag

SEQ ID NO: 126462 - DNA, 1050 bp, Artificial Sequence
  derived and/or modified sequence
atgcccgtggagagaatgagaatgagaccctggctggaggagcagatcaacagcaacaccatccccggcctgaagtggctgaacaaggagaagaagatcttccagatcccctggatgcacgccgccagacacggctgggacgtggagaaggacgcccccctgttcagaaactgggccatccacaccggcaagcaccagcccggcgtggacaagcccgaccccaagacctggaaggccaacttcagatgcgccatgaacagcctgcccgacatcgaggaggtgaaggacaagagcatcaagaagggcaacaacgccttcagagtgtacagaatgctgcccctgagcgagagacccagcaagaagggcaagaagcccaagaccgagaaggaggacaaggtgaagcacatcaagcaggagcccgtggagagcagcctgggcctgagcaacggcgtgagcgacctgagccccgagtacgccgtgctgaccagcaccatcaagaacgaggtggacagcaccgtgaacatcatcgtggtgggccagagccacctggacagcaacatcgagaaccaggagatcgtgaccaacccccccgacatctgccaggtggtggaggtgaccaccgagagcgacgagcagcccgtgagcatgagcgagctgtaccccctgcagatcagccccgtgagcagctacgccgagagcgagaccaccgacagcgtgcccagcgacgaggagagcgccgagggcagaccccactggagaaagagaaacatcgagggcaagcagtacctgagcaacatgggcaccagaggcagctacctgctgcccggcatggccagcttcgtgaccagcaacaagcccgacctgcaggtgaccatcaaggaggagagcaaccccgtgccctacaacagcagctggccccccttccaggacctgcccctgagcagcagcatgacccccgccagcagcagcagcagacccgacagagagaccagagccagcgtgatcaagaagaccagcgacatcacccaggccagagtgaagagctgctag

SEQ ID NO: 126463 - protein, 349 aa, Artificial Sequence
  derived and/or modified sequence
MGDMGDPPKKKRLISLCVGCGNQIHDQYILRVSPDLEWHAACLKCAECNQYLDESCTCFVRDGKTYCKRDYIRLYGIKCAKCSIGFSKNDFVMRARSKVYHIECFRCVACSRQLIPGDEFALREDGLFCRADHDVVERASLGAGDPLSPLHPARPLQMAAEPISARQPALRPHVHKQPEKTTRVRTVLNEKQLHTLRTCYAANPRPDALMKEQLVEMTGLSPRVIRVWFQNKRCKDKKRSIMMKQLQQQQPNDKTNIQGMTGTPMVAASPERHDGGLQANPVEVQSYQPPWKVLSDFALQSDIDQPAFQQLVNFSEGGPGSNSTGSEVASMSSQLPDTPNSMVASPIEA

SEQ ID NO: 126464 - protein, 326 aa, Artificial Sequence
  derived and/or modified sequence
MGDMGDPPKKKRLISLCVGCGNQIHDQYILRVSPDLEWHAACLKCAECNQYLDESCTCFVRDGKTYCKRDYIRLYGIKCAKCSIGFSKNDFVMRARSKVYHIECFRCVACSRQLIPGDEFALREDGLFCRADHDVVERASLGAGDPLSPLHPARPLQMAAEPISARQPALRPHVHKQPEKTTRVRTVLNEKQLHTLRTCYAANPRPDALMKEQLVEMTGLSPRVIRVWFQNKRCKDKKRSIMMKQLQQQQPNDKTANPVEVQSYQPPWKVLSDFALQSDIDQPAFQQLVNFSEGGPGSNSTGSEVASMSSQLPDTPNSMVASPIEA

SEQ ID NO: 126465 - DNA, 2729 bp, Artificial Sequence
  derived and/or modified sequence
gaaggaagaggaagaggaggagagggaggccagagccagaacagcccggcagcccgagcttcgggggagaacggcctgagccccgagcaagttgcctcgggagccctaatcctctcccgctggctcgccgagcggtcagtggcgctcagcggcggcgaggctgaaatatgataatcagaacagctgcgccgcgcgccctgcagccaatgggcgcggcgctcgcctgacgtccccgcgcgctgcgtcagaccaatggcgatggagctgagttggagcagagaagtttgagtaagagataaggaagagaggtgcccgagccgcgccgagtctgccgccgccgcagcgcctccgctccgccaactccgccggcttaaattggactcctagatccgcgagggcgcggcgcagccgagcagcggctctttcagcattggcaaccccaggggccaatatttcccacttagccacagctccagcatcctctctgtgggctgttcaccaactgtacaaccaccatttcactgtggacattactccctcttacagatatgggagacatgggagatccaccaaaaaaaaaacgtctgatttccctatgtgttggttgcggcaatcagattcacgatcagtatattctgagggtttctccggatttggaatggcatgcggcatgtttgaaatgtgcggagtgtaatcagtatttggacgagagctgtacatgctttgttagggatgggaaaacctactgtaaaagagattatatcaggttgtacgggatcaaatgcgccaagtgcagcatcggcttcagcaagaacgacttcgtgatgcgtgcccgctccaaggtgtatcacatcgagtgtttccgctgtgtggcctgcagccgccagctcatccctggggacgaatttgcgcttcgggaggacggtctcttctgccgagcagaccacgatgtggtggagagggccagtctaggcgctggcgacccgctcagtcccctgcatccagcgcggccactgcaaatggcagcggagcccatctccgccaggcagccagccctgcggccccacgtccacaagcagccggagaagaccacccgcgtgcggactgtgctgaacgagaagcagctgcacaccttgcggacctgctacgccgcaaacccgcggccagatgcgctcatgaaggagcaactggtagagatgacgggcctcagtccccgtgtgatccgggtctggtttcaaaacaagcggtgcaaggacaagaagcgaagcatcatgatgaagcaactccagcagcagcagcccaatgacaaaactaatatccaggggatgacaggaactcccatggtggctgccagtccagagagacacgacggtggcttacaggctaacccagtggaagtacaaagttaccagccaccttggaaagtactgagcgacttcgccttgcagagtgacatagatcagcctgcttttcagcaactggtcaatttttcagaaggaggaccgggctctaattccactggcagtgaagtagcatcaatgtcctctcaacttccagatacacctaacagcatggtagccagtcctattgaggcatgaggaacattcattctgtattttttttccctgttggagaaagtgggaaattataatgtcgaactctgaaacaaaagtatttaacgacccagtcaatgaaaactgaatcaagaaatgaatgctccatgaaatgcacgaagtctgttttaatgacaaggtgatatggtagcaacactgtgaagacaatcatgggattttactagaattaaacaacaaacaaaacgcaaaacccagtatatgctattcaatgatcttagaagtactgaaaaaaaaagacgtttttaaaacgtagaggatttatattcaaggatctcaaagaaagcattttcatttcactgcacatctagagaaaaacaaaaatagaaaattttctagtccatcctaatctgaatggtgctgtttctatattggtcattgccttgccaaacaggagctccagcaaaagcgcaggaagagagactggcctccttggctgaaagagtcctttcaggaaggtggagctgcattggtttgatatgtttaaagttgactttaacaaggggttaattgaaatcctgggtctcttggcctgtcctgtagctggtttattttttactttgccccctccccactttttttgagatccatcctttatcaagaagtctgaagcgactataaaggtttttgaattcagatttaaaaaccaacttataaagcattgcaacaaggttacctctattttgccacaagcgtctcgggattgtgtttgacttgtgtctgtccaagaacttttcccccaaagatgtgtatagttattggttaaaatgactgttttctctctctatggaaataaaaaggaaaaaaaaaaaggaaactttttttgtttgctcttgcattgcaaaaattataaagtaatttattatttattgtcggaagacttgccacttttcatgtcatttgacattttttgtttgctgaagtgaaaaaaaaagataaaggttgtacggtggtctttgaattatatgtctaattctatgtgttttgtctttttcttaaatattatgtgaaatcaaagcgccatatgtagaattatatcttcaggactatttcactaataaacatttggcatagataaataaataaaaaaaaaaaaaa

SEQ ID NO: 126466 - DNA, 1050 bp, Artificial Sequence
  derived and/or modified sequence
atgggcgacatgggcgacccccccaagaagaagagactgatcagcctgtgcgtgggctgcggcaaccagatccacgaccagtacatcctgagagtgagccccgacctggagtggcacgccgcctgcctgaagtgcgccgagtgcaaccagtacctggacgagagctgcacctgcttcgtgagagacggcaagacctactgcaagagagactacatcagactgtacggcatcaagtgcgccaagtgcagcatcggcttcagcaagaacgacttcgtgatgagagccagaagcaaggtgtaccacatcgagtgcttcagatgcgtggcctgcagcagacagctgatccccggcgacgagttcgccctgagagaggacggcctgttctgcagagccgaccacgacgtggtggagagagccagcctgggcgccggcgaccccctgagccccctgcaccccgccagacccctgcagatggccgccgagcccatcagcgccagacagcccgccctgagaccccacgtgcacaagcagcccgagaagaccaccagagtgagaaccgtgctgaacgagaagcagctgcacaccctgagaacctgctacgccgccaaccccagacccgacgccctgatgaaggagcagctggtggagatgaccggcctgagccccagagtgatcagagtgtggttccagaacaagagatgcaaggacaagaagagaagcatcatgatgaagcagctgcagcagcagcagcccaacgacaagaccaacatccagggcatgaccggcacccccatggtggccgccagccccgagagacacgacggcggcctgcaggccaaccccgtggaggtgcagagctaccagcccccctggaaggtgctgagcgacttcgccctgcagagcgacatcgaccagcccgccttccagcagctggtgaacttcagcgagggcggccccggcagcaacagcaccggcagcgaggtggccagcatgagcagccagctgcccgacacccccaacagcatggtggccagccccatcgaggcctag

SEQ ID NO: 126467 - DNA, 981 bp, Artificial Sequence
  derived and/or modified sequence
atgggcgatatgggcgaccctccgaaaaaaaaacggctcataagtctttgcgtgggctgcggtaaccagatccatgatcagtatatcctgcgtgtctccccagacctggagtggcacgcagcttgtctcaagtgcgcggaatgtaaccagtatctagatgagagctgcacctgttttgtgcgcgatggaaaaacctactgcaagcgcgactacataaggctgtatggtatcaaatgtgctaagtgctcaatcggcttttcaaagaatgactttgtgatgcgcgccaggagcaaagtttatcacattgagtgttttcgctgtgtcgcctgtagtagacagcttatacccggcgacgagttcgccttgcgagaggacggactgttctgcagggcggaccatgacgtcgtcgagcgggccagcctgggcgccggagacccactgtccccgctgcatccggctcgaccgctgcagatggcggctgaaccgataagcgctagacagcccgcattgaggccgcacgtccataagcagcctgagaaaaccaccagggtgcggacggttctgaacgaaaagcagttacataccctgaggacttgttatgccgctaacccaaggcccgacgccctgatgaaggaacagctggtggagatgaccggtctgagccccagagtaatccgcgtgtggtttcaaaacaagcggtgcaaagacaagaaacgctcaatcatgatgaagcagctacagcagcagcaaccaaacgataagaccgcgaatcctgtagaagtgcagagttatcaacctccctggaaagtgctaagtgactttgctcttcagtccgatatcgaccaaccagcctttcagcagttggtgaatttttccgagggcgggcctgggtccaactctactgggtctgaagtggccagcatgagtagccaactccccgacactcctaattctatggtggccagccctattgaggcatag

SEQ ID NO: 126468 - DNA, 1050 bp, Artificial Sequence
  derived and/or modified sequence
atgggagacatgggtgaccctccaaaaaaaaagagactcatctctctgtgcgtaggctgtgggaaccagattcacgaccaatatatccttcgcgtttcgcccgacttagagtggcatgcagcctgcctcaagtgtgcagagtgtaatcaatatcttgacgaatcatgtacttgctttgttcgggacgggaaaacttattgtaagagggactatattcgcttgtatgggattaaatgcgcaaagtgttccatcgggttctcaaagaacgatttcgttatgcgagctcgatctaaggtttatcatatagagtgctttcgctgcgttgcatgcagtagacagcttatccccggcgacgaattcgccctcagggaggacggtctgttttgtagggccgaccacgatgtcgttgaaagagctagcttgggcgccggcgatcctttatctccattgcatccggccagacctttgcagatggcagccgagcctatctcggccaggcagcccgcgctcaggcctcacgtgcacaagcagcctgagaagaccactcgcgtgcgcaccgtgctgaatgaaaagcagctgcacacactgcggacctgctatgccgccaatccaaggccggacgctcttatgaaggaacagctagtggaaatgaccgggctgagtcctcgggttatcagagtgtggtttcagaataagaggtgtaaggacaaaaaaaggagtataatgatgaaacagcttcagcagcagcaacccaacgataaaacaaatattcagggcatgaccggcactcccatggttgccgcatctccggagagacatgatggtggtctccaggccaaccctgtcgaagtgcagtcataccaacccccatggaaggtgctgagtgatttcgctctgcagtctgatatagaccaaccagcattccagcagttggtcaacttctccgagggcggccccggctccaacagcacaggcagtgaggtggcttctatgtctagtcagctgcccgatacccctaattcgatggttgctagcccaattgaggcgtag

SEQ ID NO: 126469 - DNA, 2755 bp, Artificial Sequence
  derived and/or modified sequence
caggcggcgcggccgggaaggaacgcgggaggggacagaaggaagaggaagaggaggagagggaggccagagccagaacagcccggcagcccgagcttcgggggagaacggcctgagccccgagcaagttgcctcgggagccctaatcctctcccgctggctcgccgagcggtcagtggcgctcagcggcggcgaggctgaaatatgataatcagaacagctgcgccgcgcgccctgcagccaatgggcgcggcgctcgcctgacgtccccgcgcgctgcgtcagaccaatggcgatggagctgagttggagcagagaagtttgagtaagagataaggaagagaggtgcccgagccgcgccgagtctgccgccgccgcagcgcctccgctccgccaactccgccggcttaaattggactcctagatccgcgagggcgcggcgcagccgagcagcggctctttcagcattggcaaccccaggggccaatatttcccacttagccacagctccagcatcctctctgtgggctgttcaccaactgtacaaccaccatttcactgtggacattactccctcttacagatatgggagacatgggagatccaccaaaaaaaaaacgtctgatttccctatgtgttggttgcggcaatcagattcacgatcagtatattctgagggtttctccggatttggaatggcatgcggcatgtttgaaatgtgcggagtgtaatcagtatttggacgagagctgtacatgctttgttagggatgggaaaacctactgtaaaagagattatatcaggttgtacgggatcaaatgcgccaagtgcagcatcggcttcagcaagaacgacttcgtgatgcgtgcccgctccaaggtgtatcacatcgagtgtttccgctgtgtggcctgcagccgccagctcatccctggggacgaatttgcgcttcgggaggacggtctcttctgccgagcagaccacgatgtggtggagagggccagtctaggcgctggcgacccgctcagtcccctgcatccagcgcggccactgcaaatggcagcggagcccatctccgccaggcagccagccctgcggccccacgtccacaagcagccggagaagaccacccgcgtgcggactgtgctgaacgagaagcagctgcacaccttgcggacctgctacgccgcaaacccgcggccagatgcgctcatgaaggagcaactggtagagatgacgggcctcagtccccgtgtgatccgggtctggtttcaaaacaagcggtgcaaggacaagaagcgaagcatcatgatgaagcaactccagcagcagcagcccaatgacaaaactaatatccaggggatgacaggaactcccatggtggctgccagtccagagagacacgacggtggcttacaggctaacccagtggaagtacaaagttaccagccaccttggaaagtactgagcgacttcgccttgcagagtgacatagatcagcctgcttttcagcaactggtcaatttttcagaaggaggaccgggctctaattccactggcagtgaagtagcatcaatgtcctctcaacttccagatacacctaacagcatggtagccagtcctattgaggcatgaggaacattcattctgtattttttttccctgttggagaaagtgggaaattataatgtcgaactctgaaacaaaagtatttaacgacccagtcaatgaaaactgaatcaagaaatgaatgctccatgaaatgcacgaagtctgttttaatgacaaggtgatatggtagcaacactgtgaagacaatcatgggattttactagaattaaacaacaaacaaaacgcaaaacccagtatatgctattcaatgatcttagaagtactgaaaaaaaaagacgtttttaaaacgtagaggatttatattcaaggatctcaaagaaagcattttcatttcactgcacatctagagaaaaacaaaaatagaaaattttctagtccatcctaatctgaatggtgctgtttctatattggtcattgccttgccaaacaggagctccagcaaaagcgcaggaagagagactggcctccttggctgaaagagtcctttcaggaaggtggagctgcattggtttgatatgtttaaagttgactttaacaaggggttaattgaaatcctgggtctcttggcctgtcctgtagctggtttattttttactttgccccctccccactttttttgagatccatcctttatcaagaagtctgaagcgactataaaggtttttgaattcagatttaaaaaccaacttataaagcattgcaacaaggttacctctattttgccacaagcgtctcgggattgtgtttgacttgtgtctgtccaagaacttttcccccaaagatgtgtatagttattggttaaaatgactgttttctctctctatggaaataaaaaggaaaaaaaaaaaggaaactttttttgtttgctcttgcattgcaaaaattataaagtaatttattatttattgtcggaagacttgccacttttcatgtcatttgacattttttgtttgctgaagtgaaaaaaaaagataaaggttgtacggtggtctttgaattatatgtctaattctatgtgttttgtctttttcttaaatattatgtgaaatcaaagcgccatatgtagaattatatcttcaggactatttcactaataaacatttggcatagataaataaataaa

SEQ ID NO: 126470 - DNA, 981 bp, Artificial Sequence
  derived and/or modified sequence
atgggagacatgggagatccaccaaaaaaaaaacgtctgatttccctatgtgttggttgcggcaatcagattcacgatcagtatattctgagggtttctccggatttggaatggcatgcggcatgtttgaaatgtgcggagtgtaatcagtatttggacgagagctgtacatgctttgttagggatgggaaaacctactgtaaaagagattatatcaggttgtacgggatcaaatgcgccaagtgcagcatcggcttcagcaagaacgacttcgtgatgcgtgcccgctccaaggtgtatcacatcgagtgtttccgctgtgtggcctgcagccgccagctcatccctggggacgaatttgcgcttcgggaggacggtctcttctgccgagcagaccacgatgtggtggagagggccagtctaggcgctggcgacccgctcagtcccctgcatccagcgcggccactgcaaatggcagcggagcccatctccgccaggcagccagccctgcggccccacgtccacaagcagccggagaagaccacccgcgtgcggactgtgctgaacgagaagcagctgcacaccttgcggacctgctacgccgcaaacccgcggccagatgcgctcatgaaggagcaactggtagagatgacgggcctcagtccccgtgtgatccgggtctggtttcaaaacaagcggtgcaaggacaagaagcgaagcatcatgatgaagcaactccagcagcagcagcccaatgacaaaactgctaacccagtggaagtacaaagttaccagccaccttggaaagtactgagcgacttcgccttgcagagtgacatagatcagcctgcttttcagcaactggtcaatttttcagaaggaggaccgggctctaattccactggcagtgaagtagcatcaatgtcctctcaacttccagatacacctaacagcatggtagccagtcctattgaggcatga

SEQ ID NO: 126471 - DNA, 981 bp, Artificial Sequence
  derived and/or modified sequence
atgggagacatgggagacccccccaagaagaagaggctcatcagcctgtgtgtgggctgcggcaaccagatccatgaccagtacatcctgcgggtgtccccagacctggagtggcacgccgcctgcctgaagtgtgccgagtgcaaccagtacctggatgagagctgcacctgctttgtgagagatggcaagacctactgcaagagggactacatccggctgtatggcatcaagtgtgccaagtgcagcatcggcttcagcaagaatgactttgtgatgagggcccggagcaaggtgtaccacatcgagtgcttccgctgtgtggcctgcagccggcagctgatccctggagatgaatttgccctgcgggaggatggcctcttctgcagagctgaccatgatgtggtggagcgggccagcctgggcgctggggaccccctgagccccctgcacccagcccggcccctgcagatggctgctgagcccatcagcgcccggcagcctgccctgcggccccacgtgcacaagcagcctgagaagaccaccagggtgaggacagtgctgaatgagaagcagctgcacaccctgcggacctgctatgctgccaaccccaggccagatgccctgatgaaggagcagctggtggagatgacaggcctgagccccagggtcatccgggtgtggttccagaacaagcgctgcaaggacaagaagaggagcatcatgatgaagcagctgcagcagcagcagcccaatgacaagacagccaaccctgtggaggtgcagagctaccagcccccctggaaggtgctgagtgactttgccctgcagagcgacatcgaccagcctgccttccagcagctggtgaacttcagcgagggcggccctggcagcaacagcactggaagtgaggtggcctccatgagcagccagctgcctgacacccccaacagcatggtggccagccccatcgaggcctag

SEQ ID NO: 126472 - DNA, 1050 bp, Artificial Sequence
  derived and/or modified sequence
atgggagacatgggagacccccccaagaagaagaggctcatcagcctgtgtgtgggctgcggcaaccagatccatgaccagtacatcctgcgggtgtccccagacctggagtggcacgccgcctgcctgaagtgtgccgagtgcaaccagtacctggatgagagctgcacctgctttgtgagagatggcaagacctactgcaagagggactacatccggctgtatggcatcaagtgtgccaagtgcagcatcggcttcagcaagaatgactttgtgatgagggcccggagcaaggtgtaccacatcgagtgcttccgctgtgtggcctgcagccggcagctgatccctggagatgaatttgccctgcgggaggatggcctcttctgcagagctgaccatgatgtggtggagcgggccagcctgggcgctggggaccccctgagccccctgcacccagcccggcccctgcagatggctgctgagcccatcagcgcccggcagcctgccctgcggccccacgtgcacaagcagcctgagaagaccaccagggtgaggacagtgctgaatgagaagcagctgcacaccctgcggacctgctatgctgccaaccccaggccagatgccctgatgaaggagcagctggtggagatgacaggcctgagccccagggtcatccgggtgtggttccagaacaagcgctgcaaggacaagaagaggagcatcatgatgaagcagctgcagcagcagcagcccaatgacaagaccaacatccagggcatgacaggcacccccatggtggccgccagccctgagagacatgatggcggcctgcaggccaaccctgtggaggtgcagagctaccagcccccctggaaggtgctgagtgactttgccctgcagagcgacatcgaccagcctgccttccagcagctggtgaacttcagcgagggcggccctggcagcaacagcacaggcagcgaggtggcctccatgagcagccagctgcctgacacccccaacagcatggtggccagccccatcgaggcctag

SEQ ID NO: 126473 - DNA, 981 bp, Artificial Sequence
  derived and/or modified sequence
atgggcgacatgggcgacccccccaagaagaagcggctgatcagcttgtgcgttggatgcggcaaccagatccacgaccagtacatattacgggtgtccccagacctcgagtggcatgccgcgtgtctgaaatgcgctgagtgcaatcaatatcttgacgagtcttgtacctgtttcgtgcgagacgggaagacctattgcaagcgcgattacatacgtctctacggcatcaagtgcgccaaatgttctatcggcttcagcaagaacgacttcgtgatgagggccaggagcaaagtctaccacatcgaatgcttcagatgcgtggcatgttcacgccaattgatccctggtgatgaatttgctctccgagaggacggcctattttgtcgagctgatcacgacgtcgtcgagcgcgcatccctgggagcgggcgatccactgagccccctccatccggcgaggccgctacaaatggccgctgagcccatcagcgcccggcagccagctctgagaccccatgtgcataaacagcccgaaaagacaacaagagtgaggacagtgctgaacgagaagcagctccacacactccggacctgttatgctgctaatcctcgtccagacgctctgatgaaggaacaactggtcgagatgacgggcttatccccccgagtgataagggtatggttccagaataagcgatgcaaggataagaagaggagtataatgatgaaacaactccagcaacagcagccaaacgataaaaccgccaacccggtcgaagtgcagagttaccaaccgccatggaaagtcctgtctgacttcgctctgcagagtgacattgaccagccagcttttcagcaattggtcaacttttctgagggcggcccaggttcgaattctaccggttccgaggtggcaagcatgtcctcccagttacccgacactccaaatagcatggtggcttcaccaatcgaagcttag

SEQ ID NO: 126474 - DNA, 1050 bp, Artificial Sequence
  derived and/or modified sequence
atgggcgacatgggcgacccccccaagaagaagcggctgatcagcctgtgcgttggctgtggcaaccagatacacgaccagtatattctgcgagtgtcccctgacctggaatggcacgccgcctgtctaaaatgcgccgagtgtaaccaatatctggatgagagctgtacctgcttcgtgagagacggtaaaacctattgcaagcgcgactatatcagattgtatgggattaagtgtgcaaaatgtagcatcgggttctctaagaacgacttcgtgatgcgagcaagatctaaggtgtatcacatagagtgcttccgttgcgtggcctgctctagacagctcatccctggcgacgagttcgctctgagagaggacgggctcttttgcagggccgatcatgacgtggtggagcgcgcttcgctgggcgccggcgatcctctgtcccccctgcatccggcacgacctctgcagatggcggctgaaccaatctcagcccgacagcctgctcttcgtccacacgttcacaaacagcctgaaaagacgacacgcgttaggaccgtgctgaacgagaaacagctgcatacactgcgtacctgctatgccgcaaatcccaggcccgacgccctgatgaaggaacaactggttgagatgactgggctgagcccccgcgtgattagagtgtggttccagaataaaaggtgtaaggacaagaaacggtccattatgatgaagcagctgcagcagcagcagccaaatgacaaaacaaatatacagggtatgaccggcacccctatggtagccgcttctccagagcgacatgacggtggtctgcaggccaacccggttgaggtccagtcctaccaaccaccttggaaggtattgtctgattttgcactacagtcggacattgaccagcccgcctttcagcagttggttaactttagcgagggggggcccggcagcaactcgacaggtagtgaagtggcatctatgagctctcagttgcccgacacacctaattctatggtagctagtcccatagaggcgtag

SEQ ID NO: 126475 - DNA, 981 bp, Artificial Sequence
  derived and/or modified sequence
atgggggatatgggggatcctccgaaaaaaaaacggctgattagcctctgcgtgggctgcggcaaccagattcacgatcaatatatcctgcgcgtgtcccccgatctcgaatggcacgccgcttgcctgaagtgcgcagagtgtaatcagtatctggacgagtcctgcacatgtttcgtgagagacggaaaaacgtattgcaaacgcgattacatccgactttacggcataaagtgcgcgaagtgtagcatcggctttagtaagaacgacttcgtgatgcgggctcgatctaaagtgtaccacatcgaatgcttcaggtgcgtcgcatgttctaggcaactgatccctggagatgaattcgcactacgcgaagacgggctgttttgccgagccgaccacgacgtggtggaaagagcaagtctaggcgcaggcgaccctctgtctcctctgcatcctgctcgacctcttcagatggcggcagagcccatcagtgctaggcagccagcacttcgcccacatgttcataagcagcctgagaaaacgacccgagtgcgcactgttctgaatgaaaaacagttgcatacacttcgcacgtgttacgccgctaatccacggcctgatgccctcatgaaagagcagctcgtggaaatgacgggcctgtccccaagagtcattagggtgtggttccaaaacaagcggtgcaaagataagaagcgctctataatgatgaagcagttgcagcaacagcagccgaacgacaagaccgccaacccagtggaagttcagagttaccagccaccgtggaaagtgttatccgattttgctctgcaaagcgatattgaccagcctgccttccagcagctcgtaaattttagcgagggcggacctgggagcaatagtacaggatccgaagtagcatccatgagctctcaactccctgatactcctaattccatggttgccagcccaattgaagcttag

SEQ ID NO: 126476 - DNA, 1050 bp, Artificial Sequence
  derived and/or modified sequence
atgggggatatgggagacccacccaagaagaagcggctgatctccctgtgcgttggctgtggaaaccaaattcacgaccagtatatcctgcgggttagtccagacctcgaatggcacgctgcctgcctgaaatgtgctgaatgtaatcaatacctggatgagagctgtacttgtttcgttagagatgggaagacatactgtaaaagggattatatcagactttatggtatcaagtgcgcaaaatgttctatcgggtttagtaaaaacgacttcgtaatgagagctcggtcaaaggtatatcatatcgagtgctttcgctgcgtcgcctgcagcaggcagctcatcccaggagatgaattcgcattgcgggaagacgggttgttctgcagggccgatcatgatgttgttgaacgggcttcactcggtgccggtgacccgctcagtccattacaccctgcacgcccattgcagatggctgcggagcccatcagtgccagacaacccgcacttcgcccacacgtccacaagcagccagagaaaaccactcgcgtaagaaccgttttgaatgaaaagcaactgcacacgctgcgtacatgttacgcagcaaaccccaggcctgacgccctgatgaaggaacaactcgtcgagatgaccggtcttagcccgcgtgtcatccgggtgtggtttcaaaataaacgctgcaaagacaagaaacggtccatcatgatgaagcagcttcagcagcaacagccaaacgacaagaccaacatccagggaatgactggcacaccaatggttgctgcaagtcctgaaagacacgatggtggcctacaggctaatcccgtcgaagtccagagttatcagcctccctggaaggtactctctgactttgctctccagtctgatatcgaccagcccgcatttcaacagcttgtgaactttagtgaaggcggtcctggatccaattctacaggatctgaggtggcttccatgtccagtcagttgccggataccccaaatagtatggttgctagcccaatcgaagcttag

SEQ ID NO: 126477 - DNA, 981 bp, Artificial Sequence
  derived and/or modified sequence
atgggcgacatgggcgacccccccaagaagaagagactgatcagcctgtgcgtgggctgcggcaaccagatccacgaccagtacatcctgagagtgagccccgacctggagtggcacgccgcctgcctgaagtgcgccgagtgcaaccagtacctggacgagagctgcacctgcttcgtgagagacggcaagacctactgcaagagagactacatcagactgtacggcatcaagtgcgccaagtgcagcatcggcttcagcaagaacgacttcgtgatgagagccagaagcaaggtgtaccacatcgagtgcttcagatgcgtggcctgcagcagacagctgatccccggcgacgagttcgccctgagagaggacggcctgttctgcagagccgaccacgacgtggtggagagagccagcctgggcgccggcgaccccctgagccccctgcaccccgccagacccctgcagatggccgccgagcccatcagcgccagacagcccgccctgagaccccacgtgcacaagcagcccgagaagaccaccagagtgagaaccgtgctgaacgagaagcagctgcacaccctgagaacctgctacgccgccaaccccagacccgacgccctgatgaaggagcagctggtggagatgaccggcctgagccccagagtgatcagagtgtggttccagaacaagagatgcaaggacaagaagagaagcatcatgatgaagcagctgcagcagcagcagcccaacgacaagaccgccaaccccgtggaggtgcagagctaccagcccccctggaaggtgctgagcgacttcgccctgcagagcgacatcgaccagcccgccttccagcagctggtgaacttcagcgagggcggccccggcagcaacagcaccggcagcgaggtggccagcatgagcagccagctgcccgacacccccaacagcatggtggccagccccatcgaggcctag

SEQ ID NO: 126478 - protein, 1181 aa, Artificial Sequence
  derived and/or modified sequence
MGPERTGAAPLPLLLVLALSQGILNCCLAYNVGLPEAKIFSGPSSEQFGYAVQQFINPKGNWLLVGSPWSGFPENRMGDVYKCPVDLSTATCEKLNLQTSTSIPNVTEMKTNMSLGLILTRNMGTGGFLTCGPLWAQQCGNQYYTTGVCSDISPDFQLSASFSPATQPCPSLIDVVVVCDESNSIYPWDAVKNFLEKFVQGLDIGPTKTQVGLIQYANNPRVVFNLNTYKTKEEMIVATSQTSQYGGDLTNTFGAIQYARKYAYSAASGGRRSATKVMVVVTDGESHDGSMLKAVIDQCNHDNILRFGIAVLGYLNRNALDTKNLIKEIKAIASIPTERYFFNVSDEAALLEKAGTLGEQIFSIEGTVQGGDNFQMEMSQVGFSADYSSQNDILMLGAVGAFGWSGTIVQKTSHGHLIFPKQAFDQILQDRNHSSYLGYSVAAISTGESTHFVAGAPRANYTGQIVLYSVNENGNITVIQAHRGDQIGSYFGSVLCSVDVDKDTITDVLLVGAPMYMSDLKKEEGRVYLFTIKEGILGQHQFLEGPEGIENTRFGSAIAALSDINMDGFNDVIVGSPLENQNSGAVYIYNGHQGTIRTKYSQKILGSDGAFRSHLQYFGRSLDGYGDLNGDSITDVSIGAFGQVVQLWSQSIADVAIEASFTPEKITLVNKNAQIILKLCFSAKFRPTKQNNQVAIVYNITLDADGFSSRVTSRGLFKENNERCLQKNMVVNQAQSCPEHIIYIQEPSDVVNSLDLRVDISLENPGTSPALEAYSETAKVFSIPFHKDCGEDGLCISDLVLDVRQIPAAQEQPFIVSNQNKRLTFSVTLKNKRESAYNTGIVVDFSENLFFASFSLPVDGTEVTCQVAASQKSVACDVGYPALKREQQVTFTINFDFNLQNLQNQASLSFQALSESQEENKADNLVNLKIPLLYDAEIHLTRSTNINFYEISSDGNVPSIVHSFEDVGPKFIFSLKVTTGSVPVSMATVIIHIPQYTKEKNPLMYLTGVQTDKAGDISCNADINPLKIGQTSSSVSFKSENFRHTKELNCRTASCSNVTCWLKDVHMKGEYFVNVTTRIWNGTFASSTFQTVQLTAAAEINTYNPEIYVIEDNTVTIPLMIMKPDEKAEVPTGVIIGSIIAGILLLLALVAILWKLGFFKRKYEKMTKNPDEIDETTELSS

SEQ ID NO: 126479 - protein, 815 aa, Artificial Sequence
  derived and/or modified sequence
MGPERTGAAPLPLLLVLALSQGILNCCLAYNVGLPEAKIFSGPSSEQFGYAVQQFINPKGNWLLVGSPWSGFPENRMGDVYKCPVDLSTATCEKLNLQTSTSIPNVTEMKTNMSLGLILTRNMGTGGFLTCGPLWAQQCGNQYYTTGVCSDISPDFQLSASFSPATQPCPSLIDVVVVCDESNSIYPWDAVKNFLEKFVQGLDIGPTKTQVGLIQYANNPRVVFNLNTYKTKEEMIVATSQTSQYGGDLTNTFGAIQYARKYAYSAASGGRRSATKVMVVVTDGESHDGSMLKAVIDQCNHDNILRFGIAVLGYLNRNALDTKNLIKEIKAIASIPTERYFFNVSDEAALLEKAGTLGEQIFSIEGTVQGGDNFQMEMSQVGFSADYSSQNDILMLGAVGAFGWSGTIVQKTSHGHLIFPKQAFDQILQDRNHSSYLGYSVAAISTGESTHFVAGAPRANYTGQIVLYSVNENGNITVIQAHRGDQIGSYFGSVLCSVDVDKDTITDVLLVGAPMYMSDLKKEEGRVYLFTIKEGILGQHQFLEGPEGIENTRFGSAIAALSDINMDGFNDVIVGSPLENQNSGAVYIYNGHQGTIRTKYSQKILGSDGAFRSHLQYFGRSLDGYGDLNGDSITDVSIGAFGQVVQLWSQSIADVAIEASFTPEKITLVNKNAQIILKLCFSAKFRPTKQNNQVAIVYNITLDADGFSSRVTSRGLFKENNERCLQKNMVVNQAQSCPEHIIYIQEPSDVVNSLDLRVDISLENPGTSPALEAYSETAKVFSIPFHKDCGEDGLCISDLVLDVRQIPAAQLMGQK

SEQ ID NO: 126480 - protein, 641 aa, Artificial Sequence
  derived and/or modified sequence
MGPERTGAAPLPLLLVLALSQGILNCCLAYNVGLPEAKIFSGPSSEQFGYAVQQFINPKGNWLLVGSPWSGFPENRMGDVYKCPVDLSTATCEKLNLQTSTSIPNVTEMKTNMSLGLILTRNMGTGGFLTCGPLWAQQCGNQYYTTGVCSDISPDFQLSASFSPATQPCPSLIDVVVVCDESNSIYPWDAVKNFLEKFVQGLDIGPTKTQVGLIQYANNPRVVFNLNTYKTKEEMIVATSQTSQYGGDLTNTFGAIQYARKYAYSAASGGRRSATKVMVVVTDGESHDGSMLKAVIDQCNHDNILRFGIAVLGYLNRNALDTKNLIKEIKAIASIPTERYFFNVSDEAALLEKAGTLGEQIFSIEGTVQGGDNFQMEMSQVGFSADYSSQNDILMLGAVGAFGWSGTIVQKTSHGHLIFPKQAFDQILQDRNHSSYLGYSVAAISTGESTHFVAGAPRANYTGQIVLYSVNENGNITVIQAHRGDQIGSYFGSVLCSVDVDKDTITDVLLVGAPMYMSDLKKEEGRVYLFTIKEGILGQHQFLEGPEGIENTRFGSAIAALSDINMDGFNDVIVGSPLENQNSGAVYIYNGHQGTIRTKYSQLLCTIISCQTCSFRKSWDPMEPLGAISSTLGGPWMAMEI

SEQ ID NO: 126481 - protein, 942 aa, Artificial Sequence
  derived and/or modified sequence
MGPERTGAAPLPLLLVLALSQGILNCCLAYNVGLPEAKIFSGPSSEQFGYAVQQFINPKGNWLLVGSPWSGFPENRMGDVYKCPVDLSTATCEKLNLQTSTSIPNVTEMKTNMSLGLILTRNMGTGGFLTCGPLWAQQCGNQYYTTGVCSDISPDFQLSASFSPATQPCPSLIDVVVVCDESNSIYPWDAVKNFLEKFVQGLDIGPTKTQVGLIQYANNPRVVFNLNTYKTKEEMIVATSQTSQYGGDLTNTFGAIQYARKYAYSAASGGRRSATKVMVVVTDGESHDGSMLKAVIDQCNHDNILRFGIAVLGYLNRNALDTKNLIKEIKAIASIPTERYFFNVSDEAALLEKAGTLGEQIFSIEGTVQGGDNFQMEMSQVGFSADYSSQNDILMLGAVGAFGWSGTIVQKTSHGHLIFPKQAFDQILQDRNHSSYLGYSVAAISTGESTHFVAGAPRANYTGQIVLYSVNENGNITVIQAHRGDQIGSYFGSVLCSVDVDKDTITDVLLVGAPMYMSDLKKEEGRVYLFTIKEGILGQHQFLEGPEGIENTRFGSAIAALSDINMDGFNDVIVGSPLENQNSGAVYIYNGHQGTIRTKYSQKILGSDGAFRSHLQYFGRSLDGYGDLNGDSITDVSIGAFGQVVQLWSQSIADVAIEASFTPEKITLVNKNAQIILKLCFSAKFRPTKQNNQVAIVYNITLDADGFSSRVTSRGLFKENNERCLQKNMVVNQAQSCPEHIIYIQEPSDVVNSLDLRVDISLENPGTSPALEAYSETAKVFSIPFHKDCGEDGLCISDLVLDVRQIPAAQEQPFIVSNQNKRLTFSVTLKNKRESAYNTGIVVDFSENLFFASFSLPVDGTEVTCQVAASQKSVACDVGYPALKREQQVTFTINFDFNLQNLQNQASLSFQALSESQEENKADNLVNLKIPLLYDAEIHLTR

SEQ ID NO: 126482 - DNA, 3546 bp, Artificial Sequence
  derived and/or modified sequence
atgggcccagagcgaaccggtgctgccccactgcccctgttgctggtgcttgccctgtcccagggcatactgaactgttgtttggcttataatgtgggactgcccgaggccaagatcttttctgggccctcctccgagcagtttggatacgcggtccaacagttcataaaccctaagggaaattggttactggtcggaagcccgtggagtgggttcccggagaaccggatgggcgatgtttacaaatgccctgttgatctgtcgaccgcaacctgtgaaaagctcaatttgcagacatctaccagtattcctaatgttaccgagatgaagactaatatgagtctcggcctgattcttaccaggaatatgggaaccggcggttttctcacgtgtggccccctctgggcacagcagtgtggtaaccagtattatacaaccggagtctgtagcgacatctcccccgacttccaactgagcgctagcttttcaccagctacccaaccctgcccctctctcatcgatgtggtggttgtctgtgatgagtccaactcaatctacccatgggatgccgtaaagaatttccttgagaagttcgtacaggggttggatatcgggccaaccaagacccaggtgggtttaatccagtacgccaacaacccccgggtggtttttaatctaaacacatacaaaacaaaagaggagatgatagtagccaccagtcagacgagccaatatggcggagatttgaccaacaccttcggcgccattcagtacgcccgtaagtatgcctactccgcggctagcggcgggaggcggtccgctacaaaggtgatggtggtagttacggatggagagagccatgatggatcaatgctcaaagctgtaatagatcagtgcaaccatgacaacatcctcagattcggtattgcagtcctcggctatctgaaccggaacgcgctcgacacaaagaacctgatcaaagaaataaaagcaatcgccagtatccctaccgaacgctatttctttaacgtgtcagacgaagccgccctccttgaaaaggccggcacactgggcgagcagattttctctattgaggggaccgtacaggggggtgataactttcagatggaaatgtcccaggttgggtttagtgccgactactcaagccagaatgacatcctgatgcttggggccgtaggagcgttcgggtggagtggcaccatcgtgcagaagacttctcatggacatcttattttccccaagcaggcttttgatcagatcctacaggataggaatcactccagttacttaggctacagtgttgcggccatctcaacaggggagagcacacatttcgtggccggtgcaccacgcgccaattatacgggtcagatcgtgttatatagcgtaaatgagaacggcaacataaccgtgatccaggcccaccggggggaccagatcggctcctacttcggttccgtcctatgttcggtggatgtcgacaaagatactattaccgacgtgctgctggtaggcgcccccatgtatatgtcagacctgaaaaaagaagaaggtcgtgtgtacctatttactattaaagaagggatcctcggccagcatcagttcctggaggggcctgaaggtatcgaaaacacccgctttggatcagccatcgcggctctgagcgatatcaatatggacggcttcaacgacgttatcgtcgggagccctttagaaaatcagaacagcggggctgtctatatctacaacgggcaccagggtactatcaggaccaaatactctcaaaagattttgggttctgacggagcctttagatctcatctgcaatatttcggaaggtctctggacggatacggcgacttgaacggggatagcatcaccgatgtttctataggagcattcggtcaagttgtgcagctctggtctcagtccatcgcagacgtggccatcgaggcctcttttacacctgaaaagataaccctggtgaacaaaaacgcccagattatcctgaagctttgcttcagcgctaaattccggcctacgaaacagaataaccaggtggcgatcgtttacaatattaccctggacgccgatggcttttcatcacgcgtcacatccagagggctgtttaaagaaaacaatgagaggtgtttacagaagaacatggtcgtgaatcaggcgcagtcctgcccagaacatataatctacatacaggaaccaagtgatgtcgtgaactctttggacctgcgggtggatatcagcctcgagaatcctggaaccagccccgcgctggaagcatattctgagacagcaaaggttttttcaatccccttccataaggattgtggagaggacgggttatgcatctcagacctggtcttagacgtcagacagattcccgcagcgcaagagcagcccttcattgtgtctaatcaaaacaaacgcctgacattcagcgtgacactcaagaacaaacgtgagtctgcctacaatactgggattgtggtcgacttctccgaaaacctcttctttgctagctttagtctgcccgtggatggtacagaggtaacatgccaagtcgccgcttcacaaaaaagtgtggcctgcgacgtcggatacccagcattgaagcgagaacagcaggtgacgtttaccatcaactttgacttcaacctgcagaatctgcagaaccaggccagtcttagcttccaggccctctcggagtcccaggaggaaaataaggccgacaaccttgtgaatcttaaaatccccctgctttatgatgcagaaattcatctgaccagatcaaccaatattaacttctacgagatctcttctgatggaaacgtgccaagcattgtccactccttcgaagacgtcgggcccaaatttattttctccctcaaagtgaccacaggctctgtccctgtgagcatggccactgtgataatccacatcccccagtacaccaaagaaaagaatccactcatgtacctgacgggagtgcagactgacaaagcaggggacatttcctgtaacgcagatatcaaccccttgaagattgggcagacaagcagttcagttagcttcaagtccgaaaattttagacacacaaaagagctgaattgtcgcacagctagttgctccaatgtgacatgttggctcaaggacgtgcacatgaagggcgagtactttgttaacgtcactactaggatttggaacggcactttcgccagttcaacctttcaaacagtgcaattaacagcggccgctgagatcaacacctataacccagagatctacgtcatcgaggacaacactgtcacaatccccctgatgatcatgaaaccagatgaaaaggccgaagtgcctacaggcgtcattattggtagtatcattgccggtattctgctccttctggccctggttgcgatcctctggaagctggggttctttaagaggaaatatgagaaaatgacaaagaaccccgatgagatcgacgaaacaactgagctttcatcctag

SEQ ID NO: 126483 - DNA, 2448 bp, Artificial Sequence
  derived and/or modified sequence
atgggacccgagcggaccggagcggctccgctacctctccttctggtgctcgctctgagccagggcatcctgaactgttgtctggcctacaatgtcggactacccgaagccaagatcttctctggcccttccagtgaacagtttggatatgcagtccagcagttcatcaatcccaaggggaattggctgctggtgggaagtccctggagcggatttcccgagaaccgtatgggcgacgtgtataaatgcccagtggatctgtctaccgccacatgtgagaaattgaatctgcaaacgtccacaagtatcccaaacgtcactgaaatgaagacaaacatgtcgctaggactaatcctgacaagaaatatggggaccggcgggtttctgacatgcggaccgctatgggctcagcagtgcggcaaccagtattacacaaccggtgtgtgcagtgatatatccccagattttcagctatcagccagtttctcccccgcaacacagccctgcccttctctcatcgacgtagtggtcgtgtgtgatgaaagtaacagtatctatccctgggacgctgtcaaaaatttcctggagaagttcgtacagggtcttgacatcgggccaaccaaaacccaagtcgggttgattcagtatgctaataaccccagggtcgtgtttaatctaaatacctacaagactaaggaagagatgattgtcgctaccagccagacgtcacaatacggcggcgatttgactaatactttcggtgctatccagtacgccaggaagtatgcttattctgctgcttcaggtggtcgcaggagtgccaccaaggtcatggtggtagtgactgatggtgagagccacgatggaagcatgctgaaggcagtaattgatcaatgtaatcatgacaacatcctgcggtttgggatagccgtcctcggctatcttaatagaaacgccctcgacaccaagaacctgataaaggagattaaagctatcgcttctatccccacagaacggtatttctttaatgtgtcagacgaggccgctctgctcgagaaggcagggaccttgggcgaacagatattttctatagagggaacggtgcaaggaggcgacaacttccaaatggagatgtcccaggtcggctttagcgccgactacagcagccagaacgacatcctcatgctcggggctgtgggggctttcggctggtcgggcaccatagtgcagaaaacctcccacgggcatttaatcttccctaaacaggcctttgaccaaatcctccaggatcggaaccactcaagctaccttggatactcagtcgctgcaattagcacaggggagtcaactcactttgtggccggcgcaccccgcgctaattacactggtcagatagttctgtactccgttaatgaaaatgggaacataactgtgatccaggctcatcgcggtgatcaaattggctcatattttggaagcgtcctttgcagcgtcgatgtggacaaggacacgattacagacgtgttgctggttggagctcccatgtatatgagcgatcttaaaaaggaggaaggacgggtgtatctgtttaccatcaaagaagggatcttagggcaacaccaatttcttgagggccctgaaggcatagaaaacactagatttggctcagcgattgccgccctgagcgacatcaacatggacggatttaacgatgtgatcgttggcagtcccctggagaatcaaaattctggagcggtgtatatatataacggtcaccagggtaccatcaggactaaatattcccagaagatcctgggttcagatggggcgttcaggtcgcatcttcagtatttcgggcgtagcctggacggatacggcgacctgaacggtgactctattactgacgtgtcgataggcgcttttggacaggtcgtgcaactgtggagtcaatccattgctgatgttgcaattgaggcgtcctttacgcctgaaaaaatcaccctggtgaacaaaaacgctcagatcatactcaagctgtgtttctccgctaaatttcgtcctaccaaacagaataatcaggtggcaatcgtctataacattactctggatgcggatggtttctcctctcgggttacgtcccggggattatttaaagaaaacaatgaacggtgcctgcaaaagaacatggtggtgaatcaggcccagtcttgtccggagcacattatctatatacaggagccgtctgatgtggtcaattctttagacctgcgcgtggacatcagtcttgagaaccctggtacatcccctgccctggaagcgtatagcgagacagccaaggtgttttccatccccttccataaggattgtggtgaagatgggttgtgtatctcagacctggtgctagatgtcaggcagattcctgccgcacaactcatgggacagaagtag

SEQ ID NO: 126484 - DNA, 1926 bp, Artificial Sequence
  derived and/or modified sequence
atggggcctgagagaactggcgccgcacccctgcccctcctcctggtgctcgcgctgtcccagggcatcctgaactgctgtttggcctataatgtaggcctgccggaagctaagatcttcagtggacccagcagcgagcaattcggatatgcagtgcagcagtttataaaccccaagggcaactggctcctggtcgggtcgccttggtcaggtttcccagaaaatagaatgggggatgtgtataagtgtcctgtggacctgagtactgccacctgcgagaagctcaacctgcagaccagcacctctatccctaatgtaaccgaaatgaagaccaacatgagcctcggactgattctcacccggaatatgggaacaggaggcttcctgacttgcggccccctgtgggcccagcagtgtggtaatcagtactatacgaccggcgtgtgctccgatatttcacctgactttcagctcagcgcatcattttcacctgctacacagccatgtccctctctgatcgacgtagtggttgtgtgtgatgaatccaattctatttatccgtgggacgccgtgaaaaacttcctcgagaaattcgtgcagggcctggacattggacccacaaaaacacaggtgggtctgatccagtatgccaacaatcctagggttgtctttaacctgaacacctacaaaactaaggaggaaatgattgttgcgacatcccagactagtcagtacgggggcgacctgactaacacattcggagccattcagtacgccagaaagtacgcatactcagctgcaagtgggggacggcgcagtgccaccaaagtgatggtggtggtgaccgatggagagtctcacgatggcagtatgcttaaggccgtaatcgatcaatgcaaccacgacaacatcctcagatttgggatcgctgtcctgggctacctcaataggaacgccctggacacaaaaaatctcattaaggaaatcaaagccatcgcgtccatccctaccgaaagatatttcttcaatgtatcagacgaggcagccctgttggaaaaagccggtaccctaggtgagcagatcttctccattgagggaacagtccaaggaggagataacttccagatggaaatgagtcaggtgggattctccgcagactactctagtcaaaacgatattttaatgctaggagccgtcggggcattcggctggtctggcacaattgttcagaagacaagccacggtcatctcatttttccaaagcaggcatttgaccagattctgcaggaccgcaatcatagctcatatttaggctacagcgtggctgccatctcaaccggagagagcactcacttcgtggctggggcccccagagcaaactataccggccaaatcgtgctctattcagtgaacgagaatgggaacatcaccgttattcaggcacacagaggtgatcagatcggctcttactttggctccgttctttgcagcgtcgacgtagataaagacactattacggatgtgctacttgtgggggctccaatgtacatgagtgacctgaagaaagaggaaggaagagtctacctttttacaataaaagagggcattctaggccaacaccagtttctcgagggcccagagggcattgagaatacacgattcggatccgctattgccgctctgagcgatatcaatatggatgggttcaatgacgtgattgtgggatctcccctagagaaccagaactcgggcgcggtgtacatttacaacgggcaccaggggacaatacggaccaagtactctcagttgctgtgcacaataataagttgtcagacctgctcttttcgaaaatcatgggacccgatggaacccctgggagccatttcatccacccttggcgggccgtggatggctatggagatctag

SEQ ID NO: 126485 - DNA, 2829 bp, Artificial Sequence
  derived and/or modified sequence
atgggacctgaaaggactggcgctgcccctctcccccttctacttgtgttagccctgagtcagggaattctgaattgttgcttggcctataacgtgggcctacctgaggccaagatattctcggggccaagctccgaacaattcgggtatgcagttcagcagttcattaatcctaaaggaaactggctcctggttggctccccgtggtctgggttccctgagaaccgaatgggcgacgtgtataagtgtcctgtggacctgtcaactgctacctgtgagaagctaaatctgcagacgtccacctccattcccaacgtcacagagatgaagactaacatgagcttgggcctaattctcactaggaatatgggaactggaggattcctgacttgcggacccctctgggcacaacagtgcggtaaccagtactacactaccggggtctgttctgacatttctcccgactttcaactatctgccagcttctcaccggctacacagccttgcccaagcttgattgatgtggtggtggtttgtgacgaatccaatagtatttatccatgggacgcagtcaaaaactttctggagaaattcgtgcagggtctagacattgggcccaccaagacacaggtcggactgatccagtacgcaaataatccaagagtagtctttaatttgaatacctacaagactaaagaagagatgatagtggctacatctcagacctcacagtatggcggtgatctgaccaacacgtttggcgcaatccagtacgcacggaagtatgcatatagcgccgccagcggagggcggcggagtgccacgaaggtcatggttgttgtgaccgacggggagtcccacgacgggtctatgctaaaagctgtaatcgatcaatgtaaccatgataacatcctgaggttcggtatcgcagttttgggctatttgaatcgcaacgccctggatacaaagaacttgattaaagagatcaaagcaatcgcgtccatccccacagagaggtatttttttaatgtgagcgatgaagccgcattgttggaaaaagccggaacacttggggaacaaattttctccatcgaggggaccgttcagggcggcgataattttcaaatggaaatgtcccaagttgggtttagtgcagattacagttcccagaacgatattctcatgctgggagctgtgggagcgtttggctggagtggcacaattgtccaaaagacttcacacggccatctgatcttccctaagcaggcctttgaccagatcttacaggacagaaaccacagttcgtacctcggctatagtgtggccgccatctctacaggcgaaagtacacactttgtagccggagctccgagagctaattacaccgggcagatcgtgctttactctgtcaacgaaaatggaaacattacggtcattcaagcccacagaggggatcagataggcagttactttggaagcgtgctgtgcagcgttgatgtcgataaggacactatcacagacgtgttgctggtgggcgccccaatgtatatgagcgaccttaagaaagaagagggcagagtttacttgtttaccattaaagaagggattctgggtcagcatcaattcctggaaggaccggaaggtatcgaaaacacgagattcggatcggctatcgccgctctctctgacattaacatggacggctttaacgacgtgatcgtcggctcccccctggagaatcagaatagtggagccgtctatatctataacggccatcaggggaccatccgaacaaaatactctcaaaaaatcctgggatccgatggtgccttcaggagtcatctgcagtatttcgggcgcagtctggacggatacggcgacttaaacggtgattctatcacagatgtgtccattggcgcttttggacaggtagttcagctgtggtcacagtcaatcgctgatgtagccatcgaggccagcttcacgcctgaaaagatcacgctcgtcaacaaaaatgctcaaatcattttgaagctgtgtttcagcgccaaatttcggcctaccaaacagaacaaccaggttgctatcgtttataacattactttagatgccgacggattcagcagcagagttacctcccgaggtctcttcaaggaaaataatgagcggtgcttgcaaaagaatatggtggtgaatcaggcccagtcatgtcccgaacacataatttatatccaggaaccaagtgacgtggtgaattcacttgatctgagggtcgatatcagcttagagaacccaggaacctcacccgcgttggaggcttatagcgagactgcaaaggtgttttctattccattccataaagactgcggcgaagacggcctttgcatttctgatctcgtgctggatgtaagacagattccagctgcgcaggagcagcccttcatcgtgtcgaaccaaaacaaaaggctgactttttcagttacgctgaaaaataagcgggagtccgcatacaatacagggatcgtcgtggacttctccgagaaccttttcttcgctagttttagcctcccagttgacggcaccgaagtgacatgtcaggtcgctgccagccagaagtccgtggcctgcgatgtgggctacccagcccttaagagagagcagcaggtgacatttaccattaactttgatttcaatctgcagaacttgcaaaatcaggcaagtctgagttttcaagccctgagcgaaagccaggaagaaaacaaggcagacaatctggtgaatctcaagatcccccttctgtacgatgcagaaattcacctaactaggtag

SEQ ID NO: 126486 - DNA, 7869 bp, Artificial Sequence
  derived and/or modified sequence
ttttccctgctctcaccgggcgggggagagaagccctctggacagcttctagagtgtgcaggttctcgtatccctcggccaagggtatcctctgcaaacctctgcaaacccagcgcaactacggtcccccggtcagacccaggatggggccagaacggacaggggccgcgccgctgccgctgctgctggtgttagcgctcagtcaaggcattttaaattgttgtttggcctacaatgttggtctcccagaagcaaaaatattttccggtccttcaagtgaacagtttggctatgcagtgcagcagtttataaatccaaaaggcaactggttactggttggttcaccctggagtggctttcctgagaaccgaatgggagatgtgtataaatgtcctgttgacctatccactgccacatgtgaaaaactaaatttgcaaacttcaacaagcattccaaatgttactgagatgaaaaccaacatgagcctcggcttgatcctcaccaggaacatgggaactggaggttttctcacatgtggtcctctgtgggcacagcaatgtgggaatcagtattacacaacgggtgtgtgttctgacatcagtcctgattttcagctctcagccagcttctcacctgcaactcagccctgcccttccctcatagatgttgtggttgtgtgtgatgaatcaaatagtatttatccttgggatgcagtaaagaattttttggaaaaatttgtacaaggcctggatataggccccacaaagacacaggtggggttaattcagtatgccaataatccaagagttgtgtttaacttgaacacatataaaaccaaagaagaaatgattgtagcaacatcccagacatcccaatatggtggggacctcacaaacacattcggagcaattcaatatgcaagaaaatatgcttattcagcagcttctggtgggcgacgaagtgctacgaaagtaatggtagttgtaactgacggtgaatcacatgatggttcaatgttgaaagctgtgattgatcaatgcaaccatgacaatatactgaggtttggcatagcagttcttgggtacttaaacagaaacgcccttgatactaaaaatttaataaaagaaataaaagcaatcgctagtattccaacagaaagatactttttcaatgtgtctgatgaagcagctctactagaaaaggctgggacattaggagaacaaattttcagcattgaaggtactgttcaaggaggagacaactttcagatggaaatgtcacaagtgggattcagtgcagattactcttctcaaaatgatattctgatgctgggtgcagtgggagcttttggctggagtgggaccattgtccagaagacatctcatggccatttgatctttcctaaacaagcctttgaccaaattctgcaggacagaaatcacagttcatatttaggttactctgtggctgcaatttctactggagaaagcactcactttgttgctggtgctcctcgggcaaattataccggccagatagtgctatatagtgtgaatgagaatggcaatatcacggttattcaggctcaccgaggtgaccagattggctcctattttggtagtgtgctgtgttcagttgatgtggataaagacaccattacagacgtgctcttggtaggtgcaccaatgtacatgagtgacctaaagaaagaggaaggaagagtctacctgtttactatcaaagagggcattttgggtcagcaccaatttcttgaaggccccgagggcattgaaaacactcgatttggttcagcaattgcagctctttcagacatcaacatggatggctttaatgatgtgattgttggttcaccactagaaaatcagaattctggagctgtatacatttacaatggtcatcagggcactatccgcacaaagtattcccagaaaatcttgggatccgatggagcctttaggagccatctccagtactttgggaggtccttggatggctatggagatttaaatggggattccatcaccgatgtgtctattggtgcctttggacaagtggttcaactctggtcacaaagtattgctgatgtagctatagaagcttcattcacaccagaaaaaatcactttggtcaacaagaatgctcagataattctcaaactctgcttcagtgcaaagttcagacctactaagcaaaacaatcaagtggccattgtatataacatcacacttgatgcagatggattttcatccagagtaacctccagggggttatttaaagaaaacaatgaaaggtgcctgcagaagaatatggtagtaaatcaagcacagagttgccccgagcacatcatttatatacaggagccctctgatgttgtcaactctttggatttgcgtgtggacatcagtctggaaaaccctggcactagccctgcccttgaagcctattctgagactgccaaggtcttcagtattcctttccacaaagactgtggtgaggacggactttgcatttctgatctagtcctagatgtccgacaaataccagctgctcaagaacaaccctttattgtcagcaaccaaaacaaaaggttaacattttcagtaacgctgaaaaataaaagggaaagtgcatacaacactggaattgttgttgatttttcagaaaacttgttttttgcatcattctccctgccggttgatgggacagaagtaacatgccaggtggctgcatctcagaagtctgttgcctgcgatgtaggctaccctgctttaaagagagaacaacaggtgacttttactattaactttgacttcaatcttcaaaaccttcagaatcaggcgtctctcagtttccaagccttaagtgaaagccaagaagaaaacaaggctgataatttggtcaacctcaaaattcctctcctgtatgatgctgaaattcacttaacaagatctaccaacataaatttttatgaaatctcttcggatgggaatgttccttcaatcgtgcacagttttgaagatgttggtccaaaattcatcttctccctgaaggtaacaacaggaagtgttccagtaagcatggcaactgtaatcatccacatccctcagtataccaaagaaaagaacccactgatgtacctaactggggtgcaaacagacaaggctggtgacatcagttgtaatgcagatatcaatccactgaaaataggacaaacatcttcttctgtatctttcaaaagtgaaaatttcaggcacaccaaagaattgaactgcagaactgcttcctgtagtaatgttacctgctggttgaaagacgttcacatgaaaggagaatactttgttaatgtgactaccagaatttggaacgggactttcgcatcatcaacgttccagacagtacagctaacggcagctgcagaaatcaacacctataaccctgagatatatgtgattgaagataacactgttacgattcccctgatgataatgaaacctgatgagaaagccgaagtaccaacaggagttataataggaagtataattgctggaatccttttgctgttagctctggttgcaattttatggaagctcggcttcttcaaaagaaaatatgaaaagatgaccaaaaatccagatgagattgatgagaccacagagctcagtagctgaaccagcagacctacctgcagtgggaaccggcagcatcccagccagggtttgctgtttgcgtgaatggatttctttttaaatcccatattttttttatcatgtcgtaggtaaactaacctggtattttaagagaaaactgcaggtcagtttggaatgaagaaattgtggggggtgggggaggtgcggggggcaggtagggaaataatagggaaaatacctattttatatgatgggggaaaaaaagtaatctttaaactggctggcccagagtttacattctaatttgcattgtgtcagaaacatgaaatgcttccaagcatgacaacttttaaagaaaaatatgatactctcagattttaagggggaaaactgttctctttaaaatatttgtctttaaacagcaactacagaagtggaagtgcttgatatgtaagtacttccacttgtgtatattttaatgaatattgatgttaacaagaggggaaaacaaaacacaggttttttcaatttatgctgctcatccaaagttgccacagatgatacttccaagtgataattttatttataaactaggtaaaatttgttgttggttccttttagaccacggctgccccttccacaccccatcttgctctaatgatcaaaacatgcttgaataactgagcttagagtatacctcctatatgtccatttaagttaggagagggggcgatatagagaataaggcacaaaattttgtttaaaactcagaatataacatgtaaaatcccatctgctagaagcccatcctgtgccagaggaaggaaaaggaggaaatttcctttctcttttaggaggcacaacagttctcttctaggatttgtttggctgactggcagtaacctagtgaatttctgaaagatgagtaatttctttggcaaccttcctcctcccttactgaaccactctcccacctcctggtggtaccattattatagaagccctctacagcctgactttctctccagcggtccaaagttatcccctcctttacccctcatccaaagttcccactccttcaggacagctgctgtgcattagatattaggggggaaagtcatctgtttaatttacacacttgcatgaattactgtatataaactccttaacttcagggagctattttcatttagtgctaaacaagtaagaaaaataagctcgagtgaatttctaaatgttggaatgttatgggatgtaaacaatgtaaagtaagacatctcaggatttcaccagaagttacagatgaggcactggaagccaccaaattagcaggtgcaccttctgtggctgtcttgtttctgaagtacttaaacttccacaagagtgaatttgacctaggcaagtttgttcaaaaggtagatcctgagatgatttggtcagattgggataaggcccagcaatctgcattttaacaagcaccccagtcactaggatgcagatggaccacactttgagaaacaccacccatttctactttttgcaccttattttctctgttcctgagcccccacattctctaggagaaacttagaggaaaagggcacagacactacatatctaaagctttggacaagtccttgacctctataaacttcagagtcctcattataaaatgggaagactgagctggagttcagcagtgatgcttttagttttaaaagtctatgatctggacttcctataatacaaatacacaatcctccaagaatttgacttggaaaaaaatgtcaaaggaaaacaggttatctgcccatgtgcatatggacaaccttgactaccctggcctggcccgtggtggcagtccagggctatctgtactgtttacagaattactttgtagttgacaacacaaaacaaacaaaaaaggcataaaatgccagcggtttatagaaaaaacagcatggtattctccagttaggtatgccagagtccaattcttttaacagctgtgagaatttgctgcttcattccaacaaaattttatttaaaaaaaaaaaaaaaagactggagaaactagtcattagcttgataaagaatatttaacagctagtggtgctggtgtgtacctgaagctccagctacttgagagactgagacaggaagatcgcttgagcccaggagttcaagtccagcctaagcaacatagcaagaccctgtctcaaaaaaatgactatttaaaaagacaatgtggccaggcacggtggctcacacctgtaatcccaacactttgggaggctgaggccggtggatcacgaggtcaggagtttgagactagcctggccaacatggtgaaaccccatctctaataatataaaaattagctgggcgtagtagcaggtgcctgtaatcccagttactcgggaagctgaggcaggagaatcacttgaacccgggaggcagaggtttcagtgagccgagatcgcgccactgcactccagcctgggtgacagggcaagactctgtctcaaacaaacaaacaaaaaaaaagttagtactgtatatgtaaatactagcttttcaatgtgctatacaaacaattatagcacatccttccttttactctgtctcacctcctttaggtgagtacttccttaaataagtgctaaacatacatatacggaacttgaaagctttggttagccttgccttaggtaatcagcctagtttacactgtttccagggagtagttgaattactataaaccattagccacttgtctctgcaccatttatcacaccaggacagggtctctcaacctgggcgctactgtcatttggggccaggtgattcttccttgcaggggctgtcctgtaccttgtaggacagcagccctgtcctagaaggtatgtttagcagcattcctggcctctagctacccgatgccagagcatgctccccccgcagtcatgacaatcaaaaaatgtctccagacattgtcaaatgcctcctggggggcagtatttctcaagcacttttaagcaaaggtaagtattcatacaagaaatttagggggaaaaaacattgtttaaataaaagctatgtgttcctattcaacaatatttttgctttaaaagtaagtagagggcataaaagatgtcatattcaaatttccatttcataaatggtgtacagacaaggtctatagaatgtggtaaaaacttgactgcaacacaaggcttataaaatagtaagatagtaaaatagcttatgaagaaactacagagatttaaaattgtgcatgactcatttcagcagcaaaataagaactcctaactgaacagaaatttttctacctagcaatgttattcttgtaaaatagttacctattaaaactgtgaagagtaaaactaaagccaatttattatagtcacacaagtgattatactaaaaattattataaaggttataattttataatgtatttacctgtcctgatatatagctataacccaatatatgaaaatctcaaaaattaagacatcatcatacagaaggcaggattccttaaactgagatccctgatccatctttaatatttcaatttgcacacataaaacaatgcccttttgtgtacattcaggcatacccattttaatcaatttgaaaggttaatttaaacctctagaggtgaatgagaaacatgggggaaaagtatgaaataggtgaaaatcttaactatttctttgaactctaaagactgaaactgtagccattatgtaaataaagtttcatatgtacctgtttattttggcagattaagtcaaaatatgaatgtatatattgcataactatgttagaattgtatatattttaaagaaattgtcttggatattttcctttatacataatagataagtcttttttcaaatgtggtgtttgatgtttttgattaaatgtgttttgcctctttccacaaaaactgtaaaaataaatgcatgtttgtacaaaaagttgcagaattcatttgatttatgagaaacaaaaattaaattgtagtcaacagttagtagtttttctcatatccaagtataacaaacagaaaagtttcattattgtaacccacttttttcataccacattattgaatattgttacaattgttttgaaaataaagccattttctttgggcttttataagtta

SEQ ID NO: 126487 - DNA, 3487 bp, Artificial Sequence
  derived and/or modified sequence
gcaactacggtcccccggtcagacccaggatggggccagaacggacaggggccgcgccgctgccgctgctgctggtgttagcgctcagtcaaggcattttaaattgttgtttggcctacaatgttggtctcccagaagcaaaaatattttccggtccttcaagtgaacagtttggctatgcagtgcagcagtttataaatccaaaaggcaactggttactggttggttcaccctggagtggctttcctgagaaccgaatgggagatgtgtataaatgtcctgttgacctatccactgccacatgtgaaaaactaaatttgcaaacttcaacaagcattccaaatgttactgagatgaaaaccaacatgagcctcggcttgatcctcaccaggaacatgggaactggaggttttctcacatgtggtcctctgtgggcacagcaatgtgggaatcagtattacacaacgggtgtgtgttctgacatcagtcctgattttcagctctcagccagcttctcacctgcaactcagccctgcccttccctcatagatgttgtggttgtgtgtgatgaatcaaatagtatttatccttgggatgcagtaaagaattttttggaaaaatttgtacaaggcctggatataggccccacaaagacacaggtggggttaattcagtatgccaataatccaagagttgtgtttaacttgaacacatataaaaccaaagaagaaatgattgtagcaacatcccagacatcccaatatggtggggacctcacaaacacattcggagcaattcaatatgcaagaaaatatgcttattcagcagcttctggtgggcgacgaagtgctacgaaagtaatggtagttgtaactgacggtgaatcacatgatggttcaatgttgaaagctgtgattgatcaatgcaaccatgacaatatactgaggtttggcatagcagttcttgggtacttaaacagaaacgcccttgatactaaaaatttaataaaagaaataaaagcaatcgctagtattccaacagaaagatactttttcaatgtgtctgatgaagcagctctactagaaaaggctgggacattaggagaacaaattttcagcattgaaggtactgttcaaggaggagacaactttcagatggaaatgtcacaagtgggattcagtgcagattactcttctcaaaatgatattctgatgctgggtgcagtgggagcttttggctggagtgggaccattgtccagaagacatctcatggccatttgatctttcctaaacaagcctttgaccaaattctgcaggacagaaatcacagttcatatttaggttactctgtggctgcaatttctactggagaaagcactcactttgttgctggtgctcctcgggcaaattataccggccagatagtgctatatagtgtgaatgagaatggcaatatcacggttattcaggctcaccgaggtgaccagattggctcctattttggtagtgtgctgtgttcagttgatgtggataaagacaccattacagacgtgctcttggtaggtgcaccaatgtacatgagtgacctaaagaaagaggaaggaagagtctacctgtttactatcaaagagggcattttgggtcagcaccaatttcttgaaggccccgagggcattgaaaacactcgatttggttcagcaattgcagctctttcagacatcaacatggatggctttaatgatgtgattgttggttcaccactagaaaatcagaattctggagctgtatacatttacaatggtcatcagggcactatccgcacaaagtattcccagaaaatcttgggatccgatggagcctttaggagccatctccagtactttgggaggtccttggatggctatggagatttaaatggggattccatcaccgatgtgtctattggtgcctttggacaagtggttcaactctggtcacaaagtattgctgatgtagctatagaagcttcattcacaccagaaaaaatcactttggtcaacaagaatgctcagataattctcaaactctgcttcagtgcaaagttcagacctactaagcaaaacaatcaagtggccattgtatataacatcacacttgatgcagatggattttcatccagagtaacctccagggggttatttaaagaaaacaatgaaaggtgcctgcagaagaatatggtagtaaatcaagcacagagttgccccgagcacatcatttatatacaggagccctctgatgttgtcaactctttggatttgcgtgtggacatcagtctggaaaaccctggcactagccctgcccttgaagcctattctgagactgccaaggtcttcagtattcctttccacaaagactgtggtgaggacggactttgcatttctgatctagtcctagatgtccgacaaataccagctgctcagttgatgggacagaagtaacatgccaggtggctgcatctcagaagtctgttgcctgcgatgtaggctaccctgctttaaagagagaacaacaggtgacttttactattaactttgacttcaatcttcaaaaccttcagaatcaggcgtctctcagtttccaagccttaagtgaaagccaagaagaaaacaaggctgataatttggtcaacctcaaaattcctctcctgtatgatgctgaaattcacttaacaagatctaccaacataaatttttatgaaatctcttcggatgggaatgttccttcaatcgtgcacagttttgaagatgttggtccaaaattcatcttctccctgaaggtaacaacaggaagtgttccagtaagcatggcaactgtaatcatccacatccctcagtataccaaagaaaagaacccactgatgtacctaactggggtgcaaacagacaaggctggtgacatcagttgtaatgcagatatcaatccactgaaaataggacaaacatcttcttctgtatctttcaaaagtgaaaatttcaggcacaccaaagaattgaactgcagaactgcttcctgtagtaatgttacctgctggttgaaagacgttcacatgaaaggagaatactttgttaatgtgactaccagaatttggaacgggactttcgcatcatcaacgttccagacagtacagctaacggcagctgcagaaatcaacacctataaccctgagatatatgtgattgaagataacactgttacgattcccctgatgataatgaaacctgatgagaaagccgaagtaccaacaggagttataataggaagtataattgctggaatccttttgctgttagctctggttgcaattttatggaagctcggcttcttcaaaagaaaatatgaaaagatgaccaaaaatccagatgagattgatgagaccacagagctcagtagctgaaccagcagacctacctgcagtgggaaccggcagcatcccagccagggtttgctg

SEQ ID NO: 126488 - DNA, 3674 bp, Artificial Sequence
  derived and/or modified sequence
gcaactacggtcccccggtcagacccaggatggggccagaacggacaggggccgcgccgctgccgctgctgctggtgttagcgctcagtcaaggcattttaaattgttgtttggcctacaatgttggtctcccagaagcaaaaatattttccggtccttcaagtgaacagtttggctatgcagtgcagcagtttataaatccaaaaggcaactggttactggttggttcaccctggagtggctttcctgagaaccgaatgggagatgtgtataaatgtcctgttgacctatccactgccacatgtgaaaaactaaatttgcaaacttcaacaagcattccaaatgttactgagatgaaaaccaacatgagcctcggcttgatcctcaccaggaacatgggaactggaggttttctcacatgtggtcctctgtgggcacagcaatgtgggaatcagtattacacaacgggtgtgtgttctgacatcagtcctgattttcagctctcagccagcttctcacctgcaactcagccctgcccttccctcatagatgttgtggttgtgtgtgatgaatcaaatagtatttatccttgggatgcagtaaagaattttttggaaaaatttgtacaaggcctggatataggccccacaaagacacaggtggggttaattcagtatgccaataatccaagagttgtgtttaacttgaacacatataaaaccaaagaagaaatgattgtagcaacatcccagacatcccaatatggtggggacctcacaaacacattcggagcaattcaatatgcaagaaaatatgcttattcagcagcttctggtgggcgacgaagtgctacgaaagtaatggtagttgtaactgacggtgaatcacatgatggttcaatgttgaaagctgtgattgatcaatgcaaccatgacaatatactgaggtttggcatagcagttcttgggtacttaaacagaaacgcccttgatactaaaaatttaataaaagaaataaaagcaatcgctagtattccaacagaaagatactttttcaatgtgtctgatgaagcagctctactagaaaaggctgggacattaggagaacaaattttcagcattgaaggtactgttcaaggaggagacaactttcagatggaaatgtcacaagtgggattcagtgcagattactcttctcaaaatgatattctgatgctgggtgcagtgggagcttttggctggagtgggaccattgtccagaagacatctcatggccatttgatctttcctaaacaagcctttgaccaaattctgcaggacagaaatcacagttcatatttaggttactctgtggctgcaatttctactggagaaagcactcactttgttgctggtgctcctcgggcaaattataccggccagatagtgctatatagtgtgaatgagaatggcaatatcacggttattcaggctcaccgaggtgaccagattggctcctattttggtagtgtgctgtgttcagttgatgtggataaagacaccattacagacgtgctcttggtaggtgcaccaatgtacatgagtgacctaaagaaagaggaaggaagagtctacctgtttactatcaaagagggcattttgggtcagcaccaatttcttgaaggccccgagggcattgaaaacactcgatttggttcagcaattgcagctctttcagacatcaacatggatggctttaatgatgtgattgttggttcaccactagaaaatcagaattctggagctgtatacatttacaatggtcatcagggcactatccgcacaaagtattcccagctgttgtgtactataatttcgtgtcaaacctgctcttttagaaaatcttgggatccgatggagcctttaggagccatctccagtactttgggaggtccttggatggctatggagatttaaatggggattccatcaccgatgtgtctattggtgcctttggacaagtggttcaactctggtcacaaagtattgctgatgtagctatagaagcttcattcacaccagaaaaaatcactttggtcaacaagaatgctcagataattctcaaactctgcttcagtgcaaagttcagacctactaagcaaaacaatcaagtggccattgtatataacatcacacttgatgcagatggattttcatccagagtaacctccagggggttatttaaagaaaacaatgaaaggtgcctgcagaagaatatggtagtaaatcaagcacagagttgccccgagcacatcatttatatacaggagccctctgatgttgtcaactctttggatttgcgtgtggacatcagtctggaaaaccctggcactagccctgcccttgaagcctattctgagactgccaaggtcttcagtattcctttccacaaagactgtggtgaggacggactttgcatttctgatctagtcctagatgtccgacaaataccagctgctcaagaacaaccctttattgtcagcaaccaaaacaaaaggttaacattttcagtaacgctgaaaaataaaagggaaagtgcatacaacactggaattgttgttgatttttcagaaaacttgttttttgcatcattctccctgccggttgatgggacagaagtaacatgccaggtggctgcatctcagaagtctgttgcctgcgatgtaggctaccctgctttaaagagagaacaacaggtgacttttactattaactttgacttcaatcttcaaaaccttcagaatcaggcgtctctcagtttccaagccttaagtgaaagccaagaagaaaacaaggctgataatttggtcaacctcaaaattcctctcctgtatgatgctgaaattcacttaacaagatctaccaacataaatttttatgaaatctcttcggatgggaatgttccttcaatcgtgcacagttttgaagatgttggtccaaaattcatcttctccctgaaggtaacaacaggaagtgttccagtaagcatggcaactgtaatcatccacatccctcagtataccaaagaaaagaacccactgatgtacctaactggggtgcaaacagacaaggctggtgacatcagttgtaatgcagatatcaatccactgaaaataggacaaacatcttcttctgtatctttcaaaagtgaaaatttcaggcacaccaaagaattgaactgcagaactgcttcctgtagtaatgttacctgctggttgaaagacgttcacatgaaaggagaatactttgttaatgtgactaccagaatttggaacgggactttcgcatcatcaacgttccagacagtacagctaacggcagctgcagaaatcaacacctataaccctgagatatatgtgattgaagataacactgttacgattcccctgatgataatgaaacctgatgagaaagccgaagtaccaacaggagttataataggaagtataattgctggaatccttttgctgttagctctggttgcaattttatggaagctcggcttcttcaaaagaaaatatgaaaagatgaccaaaaatccagatgagattgatgagaccacagagctcagtagctgaaccagcagacctacctgcagtgggaaccggcagcatcccagccagggtttgctgtttg

SEQ ID NO: 126489 - DNA, 3530 bp, Artificial Sequence
  derived and/or modified sequence
gcaactacggtcccccggtcagacccaggatggggccagaacggacaggggccgcgccgctgccgctgctgctggtgttagcgctcagtcaaggcattttaaattgttgtttggcctacaatgttggtctcccagaagcaaaaatattttccggtccttcaagtgaacagtttggctatgcagtgcagcagtttataaatccaaaaggcaactggttactggttggttcaccctggagtggctttcctgagaaccgaatgggagatgtgtataaatgtcctgttgacctatccactgccacatgtgaaaaactaaatttgcaaacttcaacaagcattccaaatgttactgagatgaaaaccaacatgagcctcggcttgatcctcaccaggaacatgggaactggaggttttctcacatgtggtcctctgtgggcacagcaatgtgggaatcagtattacacaacgggtgtgtgttctgacatcagtcctgattttcagctctcagccagcttctcacctgcaactcagccctgcccttccctcatagatgttgtggttgtgtgtgatgaatcaaatagtatttatccttgggatgcagtaaagaattttttggaaaaatttgtacaaggcctggatataggccccacaaagacacaggtggggttaattcagtatgccaataatccaagagttgtgtttaacttgaacacatataaaaccaaagaagaaatgattgtagcaacatcccagacatcccaatatggtggggacctcacaaacacattcggagcaattcaatatgcaagaaaatatgcttattcagcagcttctggtgggcgacgaagtgctacgaaagtaatggtagttgtaactgacggtgaatcacatgatggttcaatgttgaaagctgtgattgatcaatgcaaccatgacaatatactgaggtttggcatagcagttcttgggtacttaaacagaaacgcccttgatactaaaaatttaataaaagaaataaaagcaatcgctagtattccaacagaaagatactttttcaatgtgtctgatgaagcagctctactagaaaaggctgggacattaggagaacaaattttcagcattgaaggtactgttcaaggaggagacaactttcagatggaaatgtcacaagtgggattcagtgcagattactcttctcaaaatgatattctgatgctgggtgcagtgggagcttttggctggagtgggaccattgtccagaagacatctcatggccatttgatctttcctaaacaagcctttgaccaaattctgcaggacagaaatcacagttcatatttaggttactctgtggctgcaatttctactggagaaagcactcactttgttgctggtgctcctcgggcaaattataccggccagatagtgctatatagtgtgaatgagaatggcaatatcacggttattcaggctcaccgaggtgaccagattggctcctattttggtagtgtgctgtgttcagttgatgtggataaagacaccattacagacgtgctcttggtaggtgcaccaatgtacatgagtgacctaaagaaagaggaaggaagagtctacctgtttactatcaaagagggcattttgggtcagcaccaatttcttgaaggccccgagggcattgaaaacactcgatttggttcagcaattgcagctctttcagacatcaacatggatggctttaatgatgtgattgttggttcaccactagaaaatcagaattctggagctgtatacatttacaatggtcatcagggcactatccgcacaaagtattcccagaaaatcttgggatccgatggagcctttaggagccatctccagtactttgggaggtccttggatggctatggagatttaaatggggattccatcaccgatgtgtctattggtgcctttggacaagtggttcaactctggtcacaaagtattgctgatgtagctatagaagcttcattcacaccagaaaaaatcactttggtcaacaagaatgctcagataattctcaaactctgcttcagtgcaaagttcagacctactaagcaaaacaatcaagtggccattgtatataacatcacacttgatgcagatggattttcatccagagtaacctccagggggttatttaaagaaaacaatgaaaggtgcctgcagaagaatatggtagtaaatcaagcacagagttgccccgagcacatcatttatatacaggagccctctgatgttgtcaactctttggatttgcgtgtggacatcagtctggaaaaccctggcactagccctgcccttgaagcctattctgagactgccaaggtcttcagtattcctttccacaaagactgtggtgaggacggactttgcatttctgatctagtcctagatgtccgacaaataccagctgctcaagaacaaccctttattgtcagcaaccaaaacaaaaggttaacattttcagtaacgctgaaaaataaaagggaaagtgcatacaacactggaattgttgttgatttttcagaaaacttgttttttgcatcattctccctgccggttgatgggacagaagtaacatgccaggtggctgcatctcagaagtctgttgcctgcgatgtaggctaccctgctttaaagagagaacaacaggtgacttttactattaactttgacttcaatcttcaaaaccttcagaatcaggcgtctctcagtttccaagccttaagtgaaagccaagaagaaaacaaggctgataatttggtcaacctcaaaattcctctcctgtatgatgctgaaattcacttaacaaggtaacaacaggaagtgttccagtaagcatggcaactgtaatcatccacatccctcagtataccaaagaaaagaacccactgatgtacctaactggggtgcaaacagacaaggctggtgacatcagttgtaatgcagatatcaatccactgaaaataggacaaacatcttcttctgtatctttcaaaagtgaaaatttcaggcacaccaaagaattgaactgcagaactgcttcctgtagtaatgttacctgctggttgaaagacgttcacatgaaaggagaatactttgttaatgtgactaccagaatttggaacgggactttcgcatcatcaacgttccagacagtacagctaacggcagctgcagaaatcaacacctataaccctgagatatatgtgattgaagataacactgttacgattcccctgatgataatgaaacctgatgagaaagccgaagtaccaacaggagttataataggaagtataattgctggaatccttttgctgttagctctggttgcaattttatggaagctcggcttcttcaaaagaaaatatgaaaagatgaccaaaaatccagatgagattgatgagaccacagagctcagtagctgaaccagcagacctacctgcagtgggaaccggcagcatcccagccagggtttgctgtttg

SEQ ID NO: 126490 - DNA, 3546 bp, Artificial Sequence
  derived and/or modified sequence
atgggccctgagaggactggagctgcccccctgcccctgctgctggtgctggccctgagccagggcatcctgaactgctgcctggcctacaacgtgggcctgcctgaggccaagatcttcagcggccccagcagcgagcagtttggctatgctgtgcagcagttcatcaaccccaagggcaactggctgctggtgggcagcccctggagcggcttccctgagaacaggatgggagatgtgtacaagtgccctgtggacctgagcacagccacctgtgagaagctgaacctgcagaccagcaccagcatccccaacgtgacagagatgaagaccaacatgagcctgggcctcatcctgaccaggaacatgggcactggaggcttcctgacctgtggccccctgtgggcccagcagtgtggcaaccagtactacaccaccggggtgtgcagcgacatcagcccagacttccagctgagcgccagcttcagccctgccacccagccctgccccagcctgattgatgtggtggtggtgtgtgatgagagcaacagcatctacccctgggatgctgtgaagaacttcctggagaagtttgtgcagggcctggacatcggccccaccaagacccaggtgggcctcatccagtatgccaacaacccccgggtggtgttcaacctgaacacctacaagaccaaggaggagatgattgtggccaccagccagaccagccagtatggaggagacctgaccaacacctttggagccatccagtatgccaggaaatatgcctacagcgctgccagcggcggcagaagaagtgccaccaaggtgatggtggtggtgacagatggagagagccatgatggctccatgctgaaggccgtcatcgaccagtgcaaccacgacaacatcctgcgctttggaattgctgtgctgggctacctgaacagaaatgccctggacaccaagaacctgatcaaggagatcaaggccatcgccagcatccccacagagcgctacttcttcaacgtgtctgatgaggccgccctgctggagaaggccggcaccctgggggagcagatcttcagcattgagggcaccgtgcagggcggggacaacttccagatggagatgagccaggtgggcttctctgctgactacagcagccagaatgacatcctgatgctgggcgctgtgggcgccttcggctggagcggcaccatcgtgcagaagaccagccacggccacctgatcttccccaagcaggcctttgaccagatcctgcaggacaggaaccacagcagctacctgggctacagcgtggccgccatcagcactggagagagcacccactttgtggccggggccccccgggccaactacacaggccagatcgtgctgtacagcgtgaatgaaaatggaaacatcaccgtcatccaggcccacagaggagaccagatcggcagctactttggatctgtgctgtgcagcgtggatgtggacaaggacaccatcacagatgtgctgctggtgggcgcccccatgtacatgtctgacctgaagaaggaggagggccgggtgtacctgttcaccatcaaggagggcatcctgggccagcaccagttcctggagggccctgagggcatcgagaacacccgcttcggcagcgccatcgccgccctgagtgacatcaacatggatggcttcaatgatgtgattgtgggcagccccctggagaaccagaacagcggggctgtgtacatctacaacggccaccagggcaccatccgcaccaagtacagccagaagatcctgggcagtgatggagccttccgcagccacctgcagtacttcggccgcagcctggatggctatggagacctgaatggagacagcatcacagatgtgtccatcggggccttcggccaggtggtgcagctgtggagccagagcattgctgatgtggccatcgaggccagcttcaccccagagaagatcaccctggtgaacaagaatgcccagatcatcctgaagctgtgcttcagcgccaagttccggcccaccaagcagaacaaccaggtggccatcgtgtacaacatcaccctggatgctgatggcttcagcagccgggtgaccagccggggcctcttcaaggaaaataatgaacgctgcctgcagaagaacatggtggtgaaccaggcccagagctgcccagagcacatcatctacatccaggagcccagtgatgtggtgaacagcctggacctgcgggtggacatcagcctggagaaccctggcaccagccctgccctggaggcctacagcgagacagccaaggtgttcagcatccccttccacaaggactgtggagaagatggcctgtgcatcagtgacctggtgctggatgtgcggcagatcccagctgcccaggagcagcccttcatcgtgagcaaccagaacaagaggctgaccttctctgtgaccctgaagaacaagcgggagagcgcctacaacacaggaattgtggtggacttctctgaaaatctcttctttgccagcttcagcctgcctgtggatggaacagaggtgacctgccaggtggccgccagccagaagtctgtggcctgtgatgtgggctacccagccctgaagcgggagcagcaggtgaccttcaccatcaactttgacttcaacctgcagaacctgcagaaccaggccagcctgtccttccaggccctgtctgagagccaggaggagaacaaggctgacaacctggtgaacctgaagatccccctgctgtatgatgctgagatccacctgaccaggagcaccaacatcaacttctatgagatcagcagtgatggaaatgtgcccagcatcgtgcacagctttgaagatgtgggccccaagttcatcttcagcctgaaggtgaccactggatctgtgcctgtgtccatggccaccgtcatcatccacatcccccagtacaccaaggagaagaaccccctgatgtacctgactggagtgcagacagacaaggccggggacatcagctgcaatgctgacatcaaccccctgaagattggccagaccagcagctctgtgtccttcaagtctgagaacttccgccacaccaaggagctgaactgcaggacagccagctgcagcaatgtgacctgctggctgaaggatgtgcacatgaagggggagtactttgtgaatgtgaccacccgcatctggaatggcacctttgccagcagcaccttccagacagtgcagctgacagctgctgctgagatcaacacctacaaccctgagatctacgtgattgaggacaacacagtgaccatccccctgatgatcatgaagccagatgagaaggccgaggtgcccaccggggtcatcatcggcagcatcatcgccggcatcctgctgctgctggccctggtggccatcctgtggaagctgggcttcttcaagaggaaatatgagaagatgaccaagaacccagatgaaattgatgagaccacagagctgagcagctag

SEQ ID NO: 126491 - DNA, 2448 bp, Artificial Sequence
  derived and/or modified sequence
atgggccctgagaggactggagctgcccccctgcccctgctgctggtgctggccctgagccagggcatcctgaactgctgcctggcctacaacgtgggcctgcctgaggccaagatcttcagcggccccagcagcgagcagtttggctatgctgtgcagcagttcatcaaccccaagggcaactggctgctggtgggcagcccctggagcggcttccctgagaacaggatgggagatgtgtacaagtgccctgtggacctgagcacagccacctgtgagaagctgaacctgcagaccagcaccagcatccccaacgtgacagagatgaagaccaacatgagcctgggcctcatcctgaccaggaacatgggcactggaggcttcctgacctgtggccccctgtgggcccagcagtgtggcaaccagtactacaccaccggggtgtgcagcgacatcagcccagacttccagctgagcgccagcttcagccctgccacccagccctgccccagcctgattgatgtggtggtggtgtgtgatgagagcaacagcatctacccctgggatgctgtgaagaacttcctggagaagtttgtgcagggcctggacatcggccccaccaagacccaggtgggcctcatccagtatgccaacaacccccgggtggtgttcaacctgaacacctacaagaccaaggaggagatgattgtggccaccagccagaccagccagtatggaggagacctgaccaacacctttggagccatccagtatgccaggaaatatgcctacagcgctgccagcggcggcagaagaagtgccaccaaggtgatggtggtggtgacagatggagagagccatgatggctccatgctgaaggccgtcatcgaccagtgcaaccacgacaacatcctgcgctttggaattgctgtgctgggctacctgaacagaaatgccctggacaccaagaacctgatcaaggagatcaaggccatcgccagcatccccacagagcgctacttcttcaacgtgtctgatgaggccgccctgctggagaaggccggcaccctgggggagcagatcttcagcattgagggcaccgtgcagggcggggacaacttccagatggagatgagccaggtgggcttctctgctgactacagcagccagaatgacatcctgatgctgggcgctgtgggcgccttcggctggagcggcaccatcgtgcagaagaccagccacggccacctgatcttccccaagcaggcctttgaccagatcctgcaggacaggaaccacagcagctacctgggctacagcgtggccgccatcagcactggagagagcacccactttgtggccggggccccccgggccaactacacaggccagatcgtgctgtacagcgtgaatgaaaatggaaacatcaccgtcatccaggcccacagaggagaccagatcggcagctactttggatctgtgctgtgcagcgtggatgtggacaaggacaccatcacagatgtgctgctggtgggcgcccccatgtacatgtctgacctgaagaaggaggagggccgggtgtacctgttcaccatcaaggagggcatcctgggccagcaccagttcctggagggccctgagggcatcgagaacacccgcttcggcagcgccatcgccgccctgagtgacatcaacatggatggcttcaatgatgtgattgtgggcagccccctggagaaccagaacagcggggctgtgtacatctacaacggccaccagggcaccatccgcaccaagtacagccagaagatcctgggcagtgatggagccttccgcagccacctgcagtacttcggccgcagcctggatggctatggagacctgaatggagacagcatcacagatgtgtccatcggggccttcggccaggtggtgcagctgtggagccagagcattgctgatgtggccatcgaggccagcttcaccccagagaagatcaccctggtgaacaagaatgcccagatcatcctgaagctgtgcttcagcgccaagttccggcccaccaagcagaacaaccaggtggccatcgtgtacaacatcaccctggatgctgatggcttcagcagccgggtgaccagccggggcctcttcaaggaaaataatgaacgctgcctgcagaagaacatggtggtgaaccaggcccagagctgcccagagcacatcatctacatccaggagcccagtgatgtggtgaacagcctggacctgcgggtggacatcagcctggagaaccctggcaccagccctgccctggaggcctacagcgagacagccaaggtgttcagcatccccttccacaaggactgtggagaagatggcctgtgcatcagtgacctggtgctggatgtgcggcagatcccagctgcccagctgatgggccagaagtag

SEQ ID NO: 126492 - DNA, 1926 bp, Artificial Sequence
  derived and/or modified sequence
atgggccctgagaggactggagctgcccccctgcccctgctgctggtgctggccctgagccagggcatcctgaactgctgcctggcctacaacgtgggcctgcctgaggccaagatcttcagcggccccagcagcgagcagtttggctatgctgtgcagcagttcatcaaccccaagggcaactggctgctggtgggcagcccctggagcggcttccctgagaacaggatgggagatgtgtacaagtgccctgtggacctgagcacagccacctgtgagaagctgaacctgcagaccagcaccagcatccccaacgtgacagagatgaagaccaacatgagcctgggcctcatcctgaccaggaacatgggcactggaggcttcctgacctgtggccccctgtgggcccagcagtgtggcaaccagtactacaccaccggggtgtgcagcgacatcagcccagacttccagctgagcgccagcttcagccctgccacccagccctgccccagcctgattgatgtggtggtggtgtgtgatgagagcaacagcatctacccctgggatgctgtgaagaacttcctggagaagtttgtgcagggcctggacatcggccccaccaagacccaggtgggcctcatccagtatgccaacaacccccgggtggtgttcaacctgaacacctacaagaccaaggaggagatgattgtggccaccagccagaccagccagtatggaggagacctgaccaacacctttggagccatccagtatgccaggaaatatgcctacagcgctgccagcggcggcagaagaagtgccaccaaggtgatggtggtggtgacagatggagagagccatgatggctccatgctgaaggccgtcatcgaccagtgcaaccacgacaacatcctgcgctttggaattgctgtgctgggctacctgaacagaaatgccctggacaccaagaacctgatcaaggagatcaaggccatcgccagcatccccacagagcgctacttcttcaacgtgtctgatgaggccgccctgctggagaaggccggcaccctgggggagcagatcttcagcattgagggcaccgtgcagggcggggacaacttccagatggagatgagccaggtgggcttctctgctgactacagcagccagaatgacatcctgatgctgggcgctgtgggcgccttcggctggagcggcaccatcgtgcagaagaccagccacggccacctgatcttccccaagcaggcctttgaccagatcctgcaggacaggaaccacagcagctacctgggctacagcgtggccgccatcagcactggagagagcacccactttgtggccggggccccccgggccaactacacaggccagatcgtgctgtacagcgtgaatgaaaatggaaacatcaccgtcatccaggcccacagaggagaccagatcggcagctactttggatctgtgctgtgcagcgtggatgtggacaaggacaccatcacagatgtgctgctggtgggcgcccccatgtacatgtctgacctgaagaaggaggagggccgggtgtacctgttcaccatcaaggagggcatcctgggccagcaccagttcctggagggccctgagggcatcgagaacacccgcttcggcagcgccatcgccgccctgagtgacatcaacatggatggcttcaatgatgtgattgtgggcagccccctggagaaccagaacagcggggctgtgtacatctacaacggccaccagggcaccatccgcaccaagtacagccagctgctgtgcaccatcatcagctgccagacctgcagcttcaggaagtcctgggaccccatggagcccctgggcgccatcagcagcaccctgggcggcccctggatggccatggagatctag

SEQ ID NO: 126493 - DNA, 2829 bp, Artificial Sequence
  derived and/or modified sequence
atgggccctgagaggactggagctgcccccctgcccctgctgctggtgctggccctgagccagggcatcctgaactgctgcctggcctacaacgtgggcctgcctgaggccaagatcttcagcggccccagcagcgagcagtttggctatgctgtgcagcagttcatcaaccccaagggcaactggctgctggtgggcagcccctggagcggcttccctgagaacaggatgggagatgtgtacaagtgccctgtggacctgagcacagccacctgtgagaagctgaacctgcagaccagcaccagcatccccaacgtgacagagatgaagaccaacatgagcctgggcctcatcctgaccaggaacatgggcactggaggcttcctgacctgtggccccctgtgggcccagcagtgtggcaaccagtactacaccaccggggtgtgcagcgacatcagcccagacttccagctgagcgccagcttcagccctgccacccagccctgccccagcctgattgatgtggtggtggtgtgtgatgagagcaacagcatctacccctgggatgctgtgaagaacttcctggagaagtttgtgcagggcctggacatcggccccaccaagacccaggtgggcctcatccagtatgccaacaacccccgggtggtgttcaacctgaacacctacaagaccaaggaggagatgattgtggccaccagccagaccagccagtatggaggagacctgaccaacacctttggagccatccagtatgccaggaaatatgcctacagcgctgccagcggcggcagaagaagtgccaccaaggtgatggtggtggtgacagatggagagagccatgatggctccatgctgaaggccgtcatcgaccagtgcaaccacgacaacatcctgcgctttggaattgctgtgctgggctacctgaacagaaatgccctggacaccaagaacctgatcaaggagatcaaggccatcgccagcatccccacagagcgctacttcttcaacgtgtctgatgaggccgccctgctggagaaggccggcaccctgggggagcagatcttcagcattgagggcaccgtgcagggcggggacaacttccagatggagatgagccaggtgggcttctctgctgactacagcagccagaatgacatcctgatgctgggcgctgtgggcgccttcggctggagcggcaccatcgtgcagaagaccagccacggccacctgatcttccccaagcaggcctttgaccagatcctgcaggacaggaaccacagcagctacctgggctacagcgtggccgccatcagcactggagagagcacccactttgtggccggggccccccgggccaactacacaggccagatcgtgctgtacagcgtgaatgaaaatggaaacatcaccgtcatccaggcccacagaggagaccagatcggcagctactttggatctgtgctgtgcagcgtggatgtggacaaggacaccatcacagatgtgctgctggtgggcgcccccatgtacatgtctgacctgaagaaggaggagggccgggtgtacctgttcaccatcaaggagggcatcctgggccagcaccagttcctggagggccctgagggcatcgagaacacccgcttcggcagcgccatcgccgccctgagtgacatcaacatggatggcttcaatgatgtgattgtgggcagccccctggagaaccagaacagcggggctgtgtacatctacaacggccaccagggcaccatccgcaccaagtacagccagaagatcctgggcagtgatggagccttccgcagccacctgcagtacttcggccgcagcctggatggctatggagacctgaatggagacagcatcacagatgtgtccatcggggccttcggccaggtggtgcagctgtggagccagagcattgctgatgtggccatcgaggccagcttcaccccagagaagatcaccctggtgaacaagaatgcccagatcatcctgaagctgtgcttcagcgccaagttccggcccaccaagcagaacaaccaggtggccatcgtgtacaacatcaccctggatgctgatggcttcagcagccgggtgaccagccggggcctcttcaaggaaaataatgaacgctgcctgcagaagaacatggtggtgaaccaggcccagagctgcccagagcacatcatctacatccaggagcccagtgatgtggtgaacagcctggacctgcgggtggacatcagcctggagaaccctggcaccagccctgccctggaggcctacagcgagacagccaaggtgttcagcatccccttccacaaggactgtggagaagatggcctgtgcatcagtgacctggtgctggatgtgcggcagatcccagctgcccaggagcagcccttcatcgtgagcaaccagaacaagaggctgaccttctctgtgaccctgaagaacaagcgggagagcgcctacaacacaggaattgtggtggacttctctgaaaatctcttctttgccagcttcagcctgcctgtggatggaacagaggtgacctgccaggtggccgccagccagaagtctgtggcctgtgatgtgggctacccagccctgaagcgggagcagcaggtgaccttcaccatcaactttgacttcaacctgcagaacctgcagaaccaggccagcctgtccttccaggccctgtctgagagccaggaggagaacaaggctgacaacctggtgaacctgaagatccccctgctgtatgatgctgagatccacctgaccaggtag

SEQ ID NO: 126494 - DNA, 3546 bp, Artificial Sequence
  derived and/or modified sequence
atgggccccgagcggaccggcgccgcccccctgcccctgctgctggtccttgccctgtctcaaggaatcctgaattgttgtctggcctataacgttggactccctgaggccaagatcttttcagggccttcgtccgagcaattcgggtacgccgtacagcaatttattaacccaaaaggcaactggctgttagtcggcagcccctggtctggttttccagagaatcgcatgggagacgtctataaatgccccgtcgatttgtcaacggccacatgtgaaaagcttaacctacagacgtctacctcgatcccaaacgtaaccgagatgaaaacaaatatgtccctcggcttgatcctgacccggaacatggggacgggcggtttcctcacttgcgggccactgtgggcccaacaatgtgggaatcagtattacaccactggagtgtgcagcgacatcagccctgatttccaactgtcagctagtttctctcccgctacccagccttgcccctccctgatcgacgtggtcgtggtttgtgacgaatcaaactccatctatccgtgggacgccgtaaaaaatttcctggaaaagttcgttcagggactcgacatcggacctacgaaaacccaggtgggtctaattcagtacgccaataatcccagagttgtctttaatctgaacacctacaagactaaggaagagatgatcgtcgctaccagtcagacatcccagtacggtggcgacctcaccaatacattcggcgctattcaatacgcaagaaagtacgcatattctgccgcttctggcggacgaagatcagccactaaggtcatggtcgtcgtcacggacggagaaagtcacgatggctctatgttgaaagccgtgatcgatcagtgtaatcatgacaacatcctccggttcggcattgctgtcctcgggtatctcaataggaacgcactggacaccaagaacttgatcaaagagatcaaggccattgcttcaattccaaccgaacgctacttttttaatgtgtccgacgaggcggcgctcctagagaaggctgggacacttggcgaacagatcttcagcatcgagggcaccgtgcaaggtggtgacaactttcagatggaaatgagtcaggtgggcttttccgccgattactcgtcccagaatgatattttaatgctcggagccgtgggcgcattcggctggagcggaaccatcgtgcagaagaccagccatggacaccttatcttcccgaagcaagcatttgaccagatcttacaggatcggaatcattcctcttacctaggctacagcgttgctgcgatcagcacgggagaatccacccattttgtggctggtgcaccacgcgccaactacaccggccagattgtgctgtatagcgtgaatgagaacggcaacatcaccgtgatccaggcacataggggtgatcagattgggagctacttcggcagcgttttatgttctgtcgatgtggacaaggatacgatcaccgacgtcctgctggttggcgccccaatgtatatgtccgacctgaaaaaggaggaggggcgcgtgtaccttttcacaatcaaagagggcattctggggcagcatcagtttctggagggtccagaagggatcgagaatacccgcttcgggtccgccatcgctgcgctgtcggacatcaacatggacggctttaacgacgtgattgtgggatccccgctggagaaccagaactcgggagccgtctatatctacaacgggcaccaggggacaatccgcacgaaatactctcagaaaatccttggatcagacggggcttttagaagccatcttcagtatttcgggcgttcattggacggatatggcgaccttaacggagattctatcactgatgtgagtattggcgccttcggccaagtggtgcaattgtggtcccaatccatcgccgatgtggccatcgaagcctcgttcacaccagagaaaatcactctcgtcaataagaatgctcagatcatcttgaaattgtgtttctccgctaaattcagaccaactaagcagaacaatcaagttgccatcgtctataacatcaccctggacgccgatggattttcatcaagggtgacatccaggggcctcttcaaagagaataatgagcgatgcctgcagaaaaatatggttgtgaatcaggcccagtcttgtcctgaacacatcatttacattcaggaaccgtccgacgtcgtaaatagcctggatcttagagtggatatctctctggaaaatcctggtacgagccccgcgctggaagcctatagtgagactgcgaaggtattttctattcccttccataaggactgtggagaggatggattatgtatctcggacttagtactggacgttcgccagattccagccgcacaggagcagccctttatcgtgtccaatcaaaacaaacgactcactttctctgttacactgaaaaacaagcgcgagagtgcctacaatacagggattgtggtggacttctccgagaatctgtttttcgcctccttctctttgccagtcgacggaaccgaggtgacttgccaggtagctgcttcgcaaaagtctgtcgcgtgtgacgttgggtacccagcgctgaagagagagcagcaagtgacgtttactatcaactttgacttcaacctgcaaaacctgcagaaccaggcaagcctgagtttccaggccctgagtgaaagccaggaagagaataaagctgataacttggtcaatctcaaaattcctcttctctacgacgctgaaattcacctgacaagatctacaaatataaatttctatgagatcagttcagacggcaacgtacccagcatcgtccacagcttcgaggatgttggacccaaattcatattctctctcaaggtgaccacaggtagcgtgcctgtttctatggcgacggttattatacacatcccccaatacacaaaggaaaaaaaccctttaatgtacctcactggagtgcagaccgataaggcaggcgatattagctgcaatgcggacatcaatccgctgaagatcggccagacgtcatcatccgtaagttttaagtcagaaaactttagacatacaaaggagctcaattgccgtacggcatcttgttccaacgtgacgtgctggctgaaagatgtgcatatgaaaggagagtacttcgtgaatgtcaccacaaggatatggaacggtaccttcgcctcatccacttttcagaccgtccagctgaccgccgccgcagaaattaatacatataatccagagatctatgtgattgaagataacacagtgactatacccctgatgatcatgaagcccgatgaaaaggctgaggttcccacaggagtcattatcggctcaataatagctggcatcctactgctgctggcccttgtggcgatcttatggaagcttggcttctttaaaaggaagtatgaaaagatgactaaaaatcccgatgagatcgacgagaccaccgagctgagcagctag

SEQ ID NO: 126495 - DNA, 2448 bp, Artificial Sequence
  derived and/or modified sequence
atgggccccgagcggaccggcgccgcccccctgcccctgctgctggtgttggctctatcacagggcatcctgaattgttgtctcgcctataacgtcggtctacccgaagcaaagattttttcgggcccctcttccgagcagtttggctacgccgtccagcagtttatcaatcctaagggcaactggctccttgtgggtagtccatggtctggtttcccagagaatcggatgggagacgtttataagtgtccagtggacttgtctactgctacttgcgaaaagctgaaccttcagacctcaactagtattcccaacgtcacagaaatgaagacaaatatgtctctcgggctcattctcacgcgtaatatgggcaccggcggctttctgacatgcggtcccctttgggcgcagcaatgtggcaaccagtattataccaccggcgtgtgtagcgacatttctccggacttccagctgtctgcaagcttttctcccgccacacaaccatgccccagtctcatagatgtcgtagtggtttgtgacgaatccaactcgatttatccatgggacgctgtcaagaacttcctggaaaagttcgtgcagggcctggacataggaccaaccaagacacaggtgggcctaatacagtatgcaaataacccaagagttgtcttcaacctcaatacttataagacgaaggaagaaatgatagtggctacaagtcagacctcacagtacggcggcgacctgacaaatactttcggggccatacagtacgcacgcaaatacgcatacagtgccgcctcagggggtagacggagtgcgacaaaggttatggtggtggtaacggatggcgagtctcacgacgggtcgatgttgaaagctgtaatcgaccagtgtaatcatgataacatcctgcgattcggcatcgcagtgctcggctacctaaatcgaaacgccctcgataccaagaatctgataaaggagattaaggccatcgcctctatacctacagagagatatttcttcaatgtgtctgacgaggcggctctgctggagaaggcaggtacccttggagaacagatttttagcattgagggaacggtgcaaggtggcgacaactttcagatggaaatgtcccaggtagggttcagtgctgactacagcagccagaacgatatactcatgctcggtgccgtgggagccttcggttggagtggcaccatcgtgcaaaagacgtctcacggccacctgatctttcctaaacaggcctttgatcaaatcttacaggaccgtaaccatagctcctatctgggatacagtgtggctgccattagtactggcgagagcacacactttgtcgcgggggcgccacgagcaaactacacaggccagatcgtgctatacagtgtcaacgaaaacgggaacattactgtgatacaggcgcatcgaggtgatcagatcggctcctacttcggctccgtcctgtgctccgtcgatgtggacaaagataccattactgacgttctcctggttggtgctcccatgtatatgtctgacctaaagaaggaagaaggaagagtatatctcttcactataaaagagggaattctgggtcagcaccagttcttagaaggaccagagggaatagagaatactagatttgggtccgcaatcgccgcccttagtgacataaatatggatgggttcaacgacgtcatcgtcggctcaccactggagaatcagaacagtggggcagtatacatctataatggccaccagggaacaattaggacgaaatactctcaaaaaatacttggcagcgatggagcctttcggtcccaccttcagtacttcggccggtctctcgatggttatggcgatctaaacggcgacagcattactgatgtgtccatcggcgctttcggacaagtagtccagctgtggtcccagtctatcgctgacgtcgctattgaggcaagcttcactcccgagaagattacactcgtgaacaagaacgcccagatcatcttgaaactgtgcttttctgccaagttcagacctacaaaacaaaataatcaggttgctatcgtgtataacattaccctagatgctgatggatttagctctcgggttacctcacgagggcttttcaaagaaaataatgagcggtgcctccaaaagaacatggtggtcaaccaggcgcaatcatgccccgaacatattatctatatacaggaaccaagcgacgttgttaattcactggacctgcgcgtcgacatcagcctcgaaaaccccggcactagccccgctctggaggcctacagcgagaccgcaaaggtctttagcatccccttccataaggactgcggggaagatggcctatgcatttccgacctggtcttggacgttcgccagataccagcggcacagttaatgggacaaaaatag

SEQ ID NO: 126496 - DNA, 1926 bp, Artificial Sequence
  derived and/or modified sequence
atgggccccgagcggaccggcgccgcccccctgcccctgctgctggtcctggccctctcccaggggatcttgaattgctgcttggcctataatgttggactgcctgaagccaagatattctccggtccttcctcggaacagttcgggtacgccgtccagcaatttataaaccccaaggggaattggttgctcgtgggatctccatggagcggtttccctgaaaatcgaatgggtgatgtgtataaatgtccagtagatctttctaccgctacctgtgagaaattgaacctgcagacatctaccagcattccgaacgttactgagatgaaaaccaatatgtcattaggtctaatcctcacccgaaacatggggaccggtggcttcctgacttgtggcccattatgggcacagcagtgcggcaatcagtactacacaacaggagtctgttccgatatatctcctgacttccagctctctgcctccttcagcccggccacccagccttgtcccagtctgatcgacgtggtggtggtgtgtgatgaatccaactccatttacccgtgggatgctgttaaaaatttccttgagaagttcgtgcagggtttggacattgggccaaccaaaacacaggtaggacttatacagtacgccaacaacccccgggtggtatttaaccttaacacctataagacaaaagaggaaatgatcgtggctacatctcagaccagccaatacggcggggatctgacaaataccttcggcgcgatccagtatgcccggaagtacgcctactccgccgccagcggcgggcggcgcagtgccacgaaagtaatggtggtggtgaccgacggggaatcccacgatggcagtatgcttaaggcagttattgaccagtgtaatcacgacaatatcttgcgattcggcatagccgtgctaggatacctcaacaggaacgctctggataccaagaaccttattaaggagattaaggctatagcatctattccaactgaacgctattttttcaatgtgagtgacgaggcagctctgctggagaaggccgggactctgggagagcagatcttttcaatcgagggcaccgtgcagggaggcgacaacttccagatggaaatgagccaggtgggctttagcgctgactatagcagccagaacgacatcctaatgttaggggctgttggggcgttcggctggagtggtaccatcgtacaaaaaacctcccacggacacctgatcttccctaagcaagctttcgatcagatcctccaggatcggaaccactcctcctatttaggatattccgtcgcggcaatttctactggcgaatcaacccatttcgtggctggagcccccagagcaaactatacaggacagatagtcttgtacagcgtgaatgagaatggcaacataaccgtgattcaggcccatcggggggaccagatcgggtcctacttcggctctgtgctgtgcagcgtcgacgttgacaaggataccattactgacgtgctcctggtgggtgcccccatgtatatgagcgaccttaagaaagaagaggggagggtctacctgttcactattaaggagggaatattggggcagcatcagtttctggaaggtccagaagggatagagaacacaaggttcggttccgcgattgcagccctgagcgacatcaatatggatggtttcaatgacgtgatcgtaggttccccactcgaaaatcaaaattctggggcagtgtacatatataacggtcaccagggaaccattcgaacaaagtactcccagctcctatgcacaatcatatcgtgccaaacctgtagtttccggaagagctgggatccaatggagccattaggggctatctcctcaaccctcggtgggccatggatggcaatggagatatag

SEQ ID NO: 126497 - DNA, 2829 bp, Artificial Sequence
  derived and/or modified sequence
atgggccccgagcggaccggcgccgcccccctgcccctgctgctggtgctggccttgtcacagggcatcctgaactgctgcctagcctacaacgtgggcttacctgaggcaaagattttttctggtccatcaagcgaacagttcgggtacgctgtgcagcaatttatcaatcctaagggcaattggctgctcgtggggagtccatggagtggttttcctgaaaacagaatgggcgatgtttacaaatgtcctgtcgatctgagtacagcaacctgcgagaaactcaatctccaaacctcgacctccattccaaacgtaactgagatgaagacgaacatgtccctcggtttaattcttactagaaatatgggaaccggcggattcctcacctgcggaccactgtgggcacagcagtgcgggaatcagtattacacaacaggcgtttgttcagacatctcacccgactttcaactgtcagcaagtttctcgcccgccacacaaccctgtccctcccttattgacgttgtagtggtatgcgacgagagcaattctatttacccttgggacgctgtgaaaaactttctggagaaatttgtccagggactcgacatcggccctactaaaacacaggtcggcctaattcagtatgctaataatcctcgtgttgtgttcaatctgaacacgtataagacaaaagaagagatgattgtggctactagccagacctctcagtacgggggagacttaactaacacctttggcgcgattcagtacgctcgtaagtacgcgtattcagctgcaagtggaggccggcggtctgccactaaagtcatggtagtcgtgaccgatggagaaagccacgatggatctatgctcaaggctgtgatcgatcaatgcaaccacgacaacattttacgcttcgggatcgcagtactggggtatctgaaccgaaacgccttggatacaaaaaacctcataaaagagatcaaagccatcgcgtcgatccctactgagcggtactttttcaacgtaagcgatgaggccgctctcctggaaaaagctgggaccttgggcgagcagatattctctatagagggtactgttcagggcggcgataactttcagatggagatgtctcaggtgggattttccgctgactattccagtcagaatgacatcctcatgctgggggccgtcggagctttcggttggagcggcacgattgtgcagaaaacgagtcatggacacctgatcttccccaagcaggcttttgatcaaattcttcaagaccgaaatcacagctcatatcttggatacagtgttgccgctatctctactggcgaatcaacgcatttcgtagcaggcgccccaagagcgaattacacaggtcagattgtcttgtacagcgtgaacgaaaatggaaatatcacggtcattcaagcccaccgtggtgaccaaatcggctcctactttggcagcgttttatgcagtgtcgacgttgacaaggatacaattacagatgtgcttcttgtgggggctcctatgtacatgagcgatctgaagaaggaggagggacgagtctacttattcactatcaaagaggggatcctgggacaacatcaattcctggagggacccgaggggatcgaaaacacccggtttggcagcgcaattgccgccttgtccgatattaatatggacggcttcaatgacgtcattgtggggagcccactcgaaaatcagaacagtggagccgtttacatctacaatggacaccaggggaccatcagaactaaatacagccaaaaaatattaggctcggacggagcgtttagatcccacctccagtacttcggccgcagtttggatggttatggagatctgaacggcgactcaataaccgatgtgagcattggcgccttcggccaggtggttcagctttggagccaaagcatagctgatgtagctatcgaagcgtctttcacgccggaaaagattacgcttgtgaacaagaatgctcagatcatattgaaactctgctttagcgcaaagtttcggcctaccaaacagaataatcaggtagctatcgtttataatattacactcgacgcagacggcttctcgagccgggtgacgtccaggggtctctttaaggagaacaatgagagatgcctacagaaaaatatggttgttaaccaggcccaatcctgcccagagcacatcatctacattcaagagccgagcgatgtagtgaacagtctggacctgcgagtggacatcagcctagagaaccctgggacctcccccgctctggaggcatactccgaaactgctaaggtgtttagtatccccttccacaaagactgtggtgaggacggactgtgtattagcgatctggtgttagacgtaaggcaaattcctgctgctcaggaacagccgtttattgtctccaaccagaacaaaagacttacattttctgtgactttgaagaataagcgtgagtcagcctataatacaggaattgtggtggatttctctgagaatcttttcttcgccagtttttctcttcctgtggacggaacagaagtcacatgccaagttgctgcaagtcagaaaagcgttgcatgtgatgtgggttatcctgctctgaaaagggaacagcaggttacattcaccataaattttgacttcaacctgcagaacttgcaaaatcaagcaagtctgtcgttccaggccctgtcagaatctcaggaggaaaacaaggccgataacctcgtgaatctgaagattcccttgctgtacgatgctgaaatacaccttacccgatag

SEQ ID NO: 126498 - DNA, 3546 bp, Artificial Sequence
  derived and/or modified sequence
atggggcctgaaagaaccggcgctgcccctctcccactcttactggttctggctctgagtcagggcattctgaactgctgcctggcttacaatgtgggcctgccagaggctaagattttcagcggtcccagcagcgagcaattcggatacgccgttcagcagtttattaacccaaaagggaattggttacttgtgggctctccatggtccggctttcctgagaaccggatgggtgacgtttataaatgtccagtggacctttctacagccacttgtgagaagttgaacctgcagacgtccacctctatacccaacgttaccgagatgaagacaaacatgagcctgggtctgatcttaaccaggaacatgggaaccggcggattcctgacgtgtggccctctgtgggcacagcagtgtgggaaccaatattatacgacaggcgtgtgcagcgacatcagcccagacttccagctctcagcctctttttcgcctgcaactcagccctgcccttcgctgatcgacgtcgtggtagtgtgcgacgaaagcaatagtatctatccatgggacgccgtaaaaaactttctggaaaaatttgtccagggactagacatcggcccaacaaaaacccaagtgggcctgatccagtacgctaataacccacgggttgtgtttaacctaaacacttacaagactaaggaagaaatgattgttgctacttctcagactagccagtatggcggtgacctgactaataccttcggggcaatccagtacgcgcgaaagtacgcgtacagtgcggcatccggcggaagacggagtgccaccaaagttatggtggtcgtcaccgacggtgagtcccatgatggatcgatgctgaaggcagtgattgatcaatgcaatcacgataacattttaaggtttggcatcgccgtccttggctatttgaatagaaacgcactggatactaaaaacttaatcaaagaaataaaggcaattgcatcaattccgaccgagaggtattttttcaatgtatctgatgaggccgctcttctggaaaaagctggaactttgggcgagcagatcttttctattgaggggacggtgcaagggggagacaattttcagatggagatgagtcaggtgggcttctcagccgattattcttcccagaacgacatcctcatgctgggcgcagtcggcgcatttgggtggtccgggaccatcgtgcagaagacctctcacggccatttaatcttccccaaacaggcattcgaccaaatccttcaggataggaaccactcttcatatctaggatactctgtagctgctatctcgaccggagaaagcacacattttgtggctggcgctcccagagctaattatacagggcagattgtcctttactctgtgaacgaaaatggcaatattacggtgattcaggcacacagaggcgatcagattggaagttacttcgggagcgtgctatgtagcgtcgatgtggacaaagataccataacagacgtcctgctagttggcgcacctatgtatatgagcgacctgaagaaagaggaaggacgcgtgtatctgttcactatcaaagaaggaatattggggcaacatcagttcttggagggtcctgagggtatcgaaaatacccgttttggcagcgcgatcgccgctctgtccgacatcaatatggatggttttaatgatgtaatagtcgggtcacctctggaaaatcagaactcgggcgcagtgtacatttacaatgggcatcaggggaccataaggactaagtatagccaaaagatactgggttcagacggtgccttcagaagccacttgcagtactttggccgttctctggatggctatggcgatttgaatggcgactccattaccgacgtatccatcggcgctttcgggcaagtggttcagttatggagtcagtcaatcgccgatgtggctatcgaagcatcatttacaccagaaaagatcacattggtgaataagaacgcccagatcattctgaagctgtgtttctctgcaaaatttagacctacgaagcaaaataaccaggtggctatagtttataacatcaccttggacgccgacggcttttctagtcgggtgacctcgcgcggtctgttcaaagagaacaacgagcgctgtctgcagaagaacatggtggtgaaccaagcccagtcttgtcccgaacatatcatctacatccaggaacctagcgatgttgtgaattccttggacctaagggtcgacatatcattggagaatccaggaacctctcctgccttagaggcttactctgaaacggcaaaagtgttctctatacctttccacaaggattgcggggaagacggtttgtgcatttcagatctcgtgttagatgttcgtcagattcccgcagcgcaggagcagcctttcattgtcagcaatcagaacaagagactcaccttctctgtgacacttaaaaacaaacgcgagtcggcttacaatacaggaatagtggttgacttcagtgagaacttgttttttgctagcttttccctgcctgtcgacggaaccgaagtgacatgccaagtagcagcaagccagaagtccgtagcctgcgacgtagggtatccggcactcaagcgtgagcaacaagtgacgtttactattaatttcgatttcaatcttcaaaatttacagaatcaggctagcttaagctttcaggcactgtccgagagccaagaagagaacaaggcggacaatttggtgaatctgaaaatccccctgttgtacgatgccgaaatacacctgacccgctccacaaacatcaatttctacgaaatttcaagcgacggcaatgtgccaagtatcgtccactcgtttgaagatgtgggtcctaagttcatattctcccttaaggtcaccacagggagcgtcccggttagcatggcaacggtgatcattcacatcccccaatacacaaaagagaaaaacccactgatgtaccttaccggggtgcagaccgataaggcaggcgatatttcgtgcaatgcggatattaaccccctgaaaatcggacagacgagctctagtgtatctttcaaaagcgaaaattttcgacataccaaggagttgaactgtagaaccgctagctgctccaacgtgacttgctggttgaaggacgtgcatatgaagggcgaatacttcgtgaatgtgaccacccgaatctggaacgggacatttgcaagcagcacttttcagacggtgcagctcacggctgccgctgagattaacacctacaatccagagatctacgtgattgaggacaacacagttacaattccactcatgattatgaaacctgatgagaaagccgaagtgccaacgggggttatcatcggatcgattatcgctgggatattactgctgttggctctagtggcaatcttgtggaagcttggctttttcaagcgtaagtacgaaaagatgaccaaaaaccctgacgagatagatgagacaactgagctctccagttag

SEQ ID NO: 126499 - DNA, 2448 bp, Artificial Sequence
  derived and/or modified sequence
atggggccagaacgaactggcgctgctccactgcctctccttctggtgttggctttatctcagggcatactcaactgttgcttagcctataacgtgggtttgcccgaagccaagattttctccggcccatcctcggaacaatttggttacgcagtgcaacagttcatcaaccctaaaggaaactggttgctcgtaggtagcccttggtcaggcttccctgaaaaccgcatgggcgatgtctacaagtgtcctgtggatctgagtacggccacatgcgaaaagctgaacttgcaaacaagcacatccattcctaacgttaccgagatgaagactaatatgagcctcggcttgatcttgaccagaaatatggggactggcggatttttgacttgcggcccactttgggcgcagcagtgcggcaaccaatattacacaactggggtgtgttctgacatttccccagacttccaactcagtgcttccttctcccccgctacccagccctgcccaagtttgattgacgtagtagtggtctgcgacgagagtaattcaatttacccctgggacgccgtcaaaaattttttggagaaatttgtgcaaggcctcgatatcgggccaaccaaaacacaggtgggacttattcagtatgctaataaccctcgggtcgtattcaatttaaatacctataaaaccaaagaggagatgattgtcgcaacctctcaaacctcccagtatggaggggacttgacaaatacttttggcgcaatacagtacgccaggaaatatgcctactctgccgctagtgggggtaggcgatccgctactaaggttatggtcgtggtaaccgacggggaaagccatgatggtagtatgctcaaggccgtgatcgatcagtgtaaccatgataatattctgagattcgggattgccgtgcttgggtacctaaaccgaaacgcgttagacactaagaatcttatcaaagagattaaagctatagcctccatccctacagagagatattttttcaatgtcagcgacgaagccgctctccttgagaaagctgggacactaggcgagcaaatcttttcgatcgaaggcaccgtccagggcggagacaacttccagatggaaatgagccaggtcgggttctctgccgactactcctcccagaatgacatcctaatgctgggagcggttggggcatttgggtggtctggcacgatcgttcaaaagacaagtcacgggcatctcatctttcccaagcaggcttttgaccaaatcttgcaggaccgcaatcactcctcctaccttggctattctgtggccgctatcagcacaggcgaaagcactcatttcgtggccggtgcccctcgggctaactacaccggtcaaattgttctatactccgtcaatgaaaacgggaatatcaccgtgattcaggcccatcggggtgaccagattgggtcatatttcggcagcgtgttatgtagcgttgacgtagacaaggacactattaccgatgtgcttctcgtgggagcaccaatgtacatgtctgaccttaagaaagaggagggaagggtttacttgtttactataaaggagggaatacttggacagcaccagtttctcgaaggcccagaagggatcgaaaacaccagattcggcagcgccattgccgctctttcggacataaatatggatgggtttaacgatgtgattgttggtagccctcttgaaaatcaaaattctggtgctgtatacatttacaacggacaccagggcactataagaacaaagtactcccaaaagatcctgggctccgatggtgcatttaggagccacctgcagtatttcgggaggtcactggacggatatggcgatctgaacggcgattcaataacagacgtgagtatcggcgcattcggccaggtggtgcagttgtggtcccagagtatagccgacgtggcgattgaggcctctttcactccagagaagatcacccttgtgaataagaacgcccaaatcattctgaagctctgtttttccgcgaagtttaggcctactaaacagaataatcaggttgcaattgtgtataacattacactggatgcggacggtttttctagccgagtgaccagtaggggcttgttcaaggaaaacaatgagcgctgtttgcagaaaaatatggtagtgaaccaagcacagagctgtccagaacatatcatatatattcaggaaccttcagatgttgtgaatagcctggacttaagagtcgatatcagcttggagaaccctggaacgagtccagcactcgaggcttatagcgagacagctaaagtgttttctattccattccataaagattgtggagaggatgggctgtgtattagcgatttagtcctcgacgtcaggcagatcccagcagcacaactcatgggccagaagtag

SEQ ID NO: 126500 - DNA, 1926 bp, Artificial Sequence
  derived and/or modified sequence
atggggcctgaacggacaggggctgcccctctcccgttgcttctcgtgttggctctgtcccaaggtattcttaactgttgccttgcatacaatgtggggctccccgaggccaagatcttttcaggtccctctagtgagcagtttggatatgctgtgcaacagttcataaatcccaagggcaactggctactggtgggatctccttggtccggctttccggagaaccggatgggagatgtgtataagtgccccgtggatctgagtaccgccacctgcgaaaagctgaatctccaaacatctacctcgattcccaacgtaactgaaatgaaaaccaatatgagtctgggtctgatactgacacgcaatatgggcactgggggatttttaacatgtggtccgctttgggctcagcagtgcggcaatcagtattatactacaggcgtgtgctctgacatcagtcccgatttccagctgtccgcatcattctccccggctactcagccctgtccctccctgattgatgtggtggtggtctgtgacgaatccaacagcatctatccctgggacgcagttaagaactttctagagaagttcgtgcagggcctggacataggacccacgaagactcaggtcggtctaattcagtatgcgaataacccaagagttgtctttaacctgaacacctataaaactaaggaggagatgatcgtggcaacatcgcagacctcacagtacggcggagatctgaccaacactttcggcgctatacaatatgctcgcaagtacgcttactccgcggcttcaggtggtcggcgatcagcaactaaagttatggtagtcgtcacagacggcgagagtcacgatggcagcatgttgaaggcggtcatcgatcagtgtaatcacgacaacattcttcgctttggcattgcagttctcgggtacctgaacaggaatgctttggacacaaagaacctgattaaggaaatcaaggcaatcgcctccatccctacggagcggtactttttcaacgtctccgacgaagcagcactgttggagaaggctggaacactgggcgaacaaatctttagcatcgagggcaccgtgcaggggggtgacaattttcaaatggagatgtcccaggtgggcttctcagccgactactcgagccagaatgatatcctgatgctaggtgcggttggggctttcggatggagtggcacaattgtgcagaaaacttcgcacggtcatttgatttttccaaaacaggcttttgatcagatcctgcaggaccgtaatcactcctcttacttgggctacagtgtcgcagcaatctcaaccggcgaaagcacccattttgttgctggtgcgcctcgcgcaaattacaccggccagatagttctgtacagtgtcaatgagaatggtaacattacggttatacaagctcaccggggtgatcagatcgggtcatacttcggtagtgttctttgtagcgtggacgtcgataaagataccatcacagacgtcttgctcgtgggggctcccatgtacatgtctgatttgaaaaaggaggagggtagggtttatctttttacaatcaaggagggcatccttggccagcaccaatttctcgaaggtcctgagggcatcgaaaacaccagatttggatctgctattgccgctctctcagacatcaacatggacgggttcaatgatgtaattgtcgggtcaccgctagagaatcaaaactcaggagccgtgtatatctacaatggacaccagggcaccatcagaacgaagtatagccaactcctctgcacgatcattagctgccagacctgctctttccgcaagagctgggatccgatggagcccctcggcgctattagctcaactcttgggggaccctggatggccatggagatctag

SEQ ID NO: 126501 - DNA, 2829 bp, Artificial Sequence
  derived and/or modified sequence
atggggccagaacgtacaggggcagcacccctgccgttgctgctggtgttggcactgagccagggaattctaaactgttgcctagcatataatgttgggctgccggaggcaaaaattttctctggtccttctagcgagcaatttggctatgctgtgcagcaatttatcaatcctaaaggaaattggcttttggtaggctctccctggtctgggtttcctgagaacaggatgggagacgtgtacaaatgcccagtggatctcagcaccgccacatgcgaaaaattaaaccttcaaacctcgacatccatccctaatgtaaccgaaatgaaaacaaacatgagcctgggcctcattctaacacggaacatgggcacagggggatttctgacgtgcggacccctgtgggcacaacagtgtggtaatcaatactacacaacgggcgtatgttccgacatctctcctgatttccagctgtcagcatcttttagtccagccacccagccttgtccatctttgatagatgtggtggtggtctgcgacgagtctaatagtatctatccttgggacgcagtgaagaacttcctcgagaagttcgttcagggactggacattggcccaaccaagacacaggtgggactgatccagtacgctaataacccaagagttgtatttaacttgaatacctataagactaaggaggagatgatcgtggccactagccagacaagccagtatgggggtgacctcacgaacactttcggggcaatacagtatgcacggaagtatgcttacagcgcagcgtcaggcggacggcgatcggctactaaagtaatggtggttgtgaccgatggggagtcccatgatggaagcatgttaaaggcagtaatcgatcaatgcaatcacgataatatcctccggtttggaatagctgtgctcggatacctcaatcggaatgccctggacaccaaaaatctgatcaaggaaatcaaggcaatcgcctcaatacccacggaacggtattttttcaatgtgtcagatgaagctgcccttctagaaaaggcaggcactctcggggaacaaatcttttctatcgaagggactgtgcagggaggggacaactttcagatggagatgtcccaggttggattctccgctgattactcctcccagaacgatatcctgatgctgggcgctgtgggtgcatttggctggtcgggaacaatcgttcagaaaaccagtcatgggcatctgatatttcctaaacaggccttcgaccagattctccaagacaggaatcacagctcttatctggggtacagcgtggcagccatttctaccggtgagagcacacacttcgtcgctggagccccacgcgctaattacacaggtcagattgtgctctattccgtgaatgaaaacggcaatatcactgtgatccaggctcatagaggcgaccagatcggaagttattttgggagtgtcttgtgctccgtggacgtagataaagacacaataacggacgtgctgctggtcggagcacccatgtacatgtccgatcttaagaaggaggaggggcgtgtgtatctctttaccatcaaagaggggatccttggacagcaccaatttctcgagggtcccgagggcattgagaacaccaggttcggttccgccatcgctgccttaagcgacattaacatggacggcttcaacgacgtaatcgttgggagtcccctagagaatcagaatagcggcgcagtgtatatttataatggtcaccaaggcacaattcggactaaatattcccagaaaatattgggctctgacggcgctttcagatcacacttgcagtacttcggacgaagtctcgatggatacggggatctaaatggcgactctatcacggacgttagcattggtgccttcggtcaggtggtgcagctatggagccagtccatcgctgatgtcgctattgaggccagcttcacgcccgaaaaaattaccctggtgaataaaaacgctcagataattcttaaactctgcttctcggcaaagttcagacccaccaaacaaaacaatcaggtggccattgtgtataacataactctggacgctgatggattctcatctcgcgttacttctcgcggtctattcaaggaaaataacgaaagatgcctgcagaagaatatggtggtgaaccaggcccaatcatgcccggagcatatcatctacattcaagagccatctgacgtggtgaattccctggacctgagggttgatatctctctggagaacccaggcacatctcccgctctggaagcatatagcgagacggccaaagtgtttagtatcccatttcacaaagactgcggcgaggatggcctgtgtatatcagacttggtactggacgtccgtcagatccctgcggctcaggagcagccatttatcgtgtccaatcaaaacaaacggctgaccttcagcgtgaccctcaagaacaaacgcgagtctgcctacaacaccgggattgtcgtagactttagcgagaacttattctttgcctcgttctctctccccgttgatgggacagaggtgacgtgtcaggtcgccgcatcccaaaaatctgtagcatgcgacgttggctatccagcactgaaaagagagcagcaggtcacttttaccattaacttcgattttaatctccagaacctgcaaaatcaggcgtctttgtccttccaggccctttcagagagtcaggaggagaacaaggctgacaacttggtgaacctcaaaatccccctactgtatgatgctgaaattcacctgaccaggtag

SEQ ID NO: 126502 - DNA, 3546 bp, Artificial Sequence
  derived and/or modified sequence
atgggccccgagagaaccggcgccgcccccctgcccctgctgctggtgctggccctgagccagggcatcctgaactgctgcctggcctacaacgtgggcctgcccgaggccaagatcttcagcggccccagcagcgagcagttcggctacgccgtgcagcagttcatcaaccccaagggcaactggctgctggtgggcagcccctggagcggcttccccgagaacagaatgggcgacgtgtacaagtgccccgtggacctgagcaccgccacctgcgagaagctgaacctgcagaccagcaccagcatccccaacgtgaccgagatgaagaccaacatgagcctgggcctgatcctgaccagaaacatgggcaccggcggcttcctgacctgcggccccctgtgggcccagcagtgcggcaaccagtactacaccaccggcgtgtgcagcgacatcagccccgacttccagctgagcgccagcttcagccccgccacccagccctgccccagcctgatcgacgtggtggtggtgtgcgacgagagcaacagcatctacccctgggacgccgtgaagaacttcctggagaagttcgtgcagggcctggacatcggccccaccaagacccaggtgggcctgatccagtacgccaacaaccccagagtggtgttcaacctgaacacctacaagaccaaggaggagatgatcgtggccaccagccagaccagccagtacggcggcgacctgaccaacaccttcggcgccatccagtacgccagaaagtacgcctacagcgccgccagcggcggcagaagaagcgccaccaaggtgatggtggtggtgaccgacggcgagagccacgacggcagcatgctgaaggccgtgatcgaccagtgcaaccacgacaacatcctgagattcggcatcgccgtgctgggctacctgaacagaaacgccctggacaccaagaacctgatcaaggagatcaaggccatcgccagcatccccaccgagagatacttcttcaacgtgagcgacgaggccgccctgctggagaaggccggcaccctgggcgagcagatcttcagcatcgagggcaccgtgcagggcggcgacaacttccagatggagatgagccaggtgggcttcagcgccgactacagcagccagaacgacatcctgatgctgggcgccgtgggcgccttcggctggagcggcaccatcgtgcagaagaccagccacggccacctgatcttccccaagcaggccttcgaccagatcctgcaggacagaaaccacagcagctacctgggctacagcgtggccgccatcagcaccggcgagagcacccacttcgtggccggcgcccccagagccaactacaccggccagatcgtgctgtacagcgtgaacgagaacggcaacatcaccgtgatccaggcccacagaggcgaccagatcggcagctacttcggcagcgtgctgtgcagcgtggacgtggacaaggacaccatcaccgacgtgctgctggtgggcgcccccatgtacatgagcgacctgaagaaggaggagggcagagtgtacctgttcaccatcaaggagggcatcctgggccagcaccagttcctggagggccccgagggcatcgagaacaccagattcggcagcgccatcgccgccctgagcgacatcaacatggacggcttcaacgacgtgatcgtgggcagccccctggagaaccagaacagcggcgccgtgtacatctacaacggccaccagggcaccatcagaaccaagtacagccagaagatcctgggcagcgacggcgccttcagaagccacctgcagtacttcggcagaagcctggacggctacggcgacctgaacggcgacagcatcaccgacgtgagcatcggcgccttcggccaggtggtgcagctgtggagccagagcatcgccgacgtggccatcgaggccagcttcacccccgagaagatcaccctggtgaacaagaacgcccagatcatcctgaagctgtgcttcagcgccaagttcagacccaccaagcagaacaaccaggtggccatcgtgtacaacatcaccctggacgccgacggcttcagcagcagagtgaccagcagaggcctgttcaaggagaacaacgagagatgcctgcagaagaacatggtggtgaaccaggcccagagctgccccgagcacatcatctacatccaggagcccagcgacgtggtgaacagcctggacctgagagtggacatcagcctggagaaccccggcaccagccccgccctggaggcctacagcgagaccgccaaggtgttcagcatccccttccacaaggactgcggcgaggacggcctgtgcatcagcgacctggtgctggacgtgagacagatccccgccgcccaggagcagcccttcatcgtgagcaaccagaacaagagactgaccttcagcgtgaccctgaagaacaagagagagagcgcctacaacaccggcatcgtggtggacttcagcgagaacctgttcttcgccagcttcagcctgcccgtggacggcaccgaggtgacctgccaggtggccgccagccagaagagcgtggcctgcgacgtgggctaccccgccctgaagagagagcagcaggtgaccttcaccatcaacttcgacttcaacctgcagaacctgcagaaccaggccagcctgagcttccaggccctgagcgagagccaggaggagaacaaggccgacaacctggtgaacctgaagatccccctgctgtacgacgccgagatccacctgaccagaagcaccaacatcaacttctacgagatcagcagcgacggcaacgtgcccagcatcgtgcacagcttcgaggacgtgggccccaagttcatcttcagcctgaaggtgaccaccggcagcgtgcccgtgagcatggccaccgtgatcatccacatcccccagtacaccaaggagaagaaccccctgatgtacctgaccggcgtgcagaccgacaaggccggcgacatcagctgcaacgccgacatcaaccccctgaagatcggccagaccagcagcagcgtgagcttcaagagcgagaacttcagacacaccaaggagctgaactgcagaaccgccagctgcagcaacgtgacctgctggctgaaggacgtgcacatgaagggcgagtacttcgtgaacgtgaccaccagaatctggaacggcaccttcgccagcagcaccttccagaccgtgcagctgaccgccgccgccgagatcaacacctacaaccccgagatctacgtgatcgaggacaacaccgtgaccatccccctgatgatcatgaagcccgacgagaaggccgaggtgcccaccggcgtgatcatcggcagcatcatcgccggcatcctgctgctgctggccctggtggccatcctgtggaagctgggcttcttcaagagaaagtacgagaagatgaccaagaaccccgacgagatcgacgagaccaccgagctgagcagctag

SEQ ID NO: 126503 - DNA, 2448 bp, Artificial Sequence
  derived and/or modified sequence
atgggccccgagagaaccggcgccgcccccctgcccctgctgctggtgctggccctgagccagggcatcctgaactgctgcctggcctacaacgtgggcctgcccgaggccaagatcttcagcggccccagcagcgagcagttcggctacgccgtgcagcagttcatcaaccccaagggcaactggctgctggtgggcagcccctggagcggcttccccgagaacagaatgggcgacgtgtacaagtgccccgtggacctgagcaccgccacctgcgagaagctgaacctgcagaccagcaccagcatccccaacgtgaccgagatgaagaccaacatgagcctgggcctgatcctgaccagaaacatgggcaccggcggcttcctgacctgcggccccctgtgggcccagcagtgcggcaaccagtactacaccaccggcgtgtgcagcgacatcagccccgacttccagctgagcgccagcttcagccccgccacccagccctgccccagcctgatcgacgtggtggtggtgtgcgacgagagcaacagcatctacccctgggacgccgtgaagaacttcctggagaagttcgtgcagggcctggacatcggccccaccaagacccaggtgggcctgatccagtacgccaacaaccccagagtggtgttcaacctgaacacctacaagaccaaggaggagatgatcgtggccaccagccagaccagccagtacggcggcgacctgaccaacaccttcggcgccatccagtacgccagaaagtacgcctacagcgccgccagcggcggcagaagaagcgccaccaaggtgatggtggtggtgaccgacggcgagagccacgacggcagcatgctgaaggccgtgatcgaccagtgcaaccacgacaacatcctgagattcggcatcgccgtgctgggctacctgaacagaaacgccctggacaccaagaacctgatcaaggagatcaaggccatcgccagcatccccaccgagagatacttcttcaacgtgagcgacgaggccgccctgctggagaaggccggcaccctgggcgagcagatcttcagcatcgagggcaccgtgcagggcggcgacaacttccagatggagatgagccaggtgggcttcagcgccgactacagcagccagaacgacatcctgatgctgggcgccgtgggcgccttcggctggagcggcaccatcgtgcagaagaccagccacggccacctgatcttccccaagcaggccttcgaccagatcctgcaggacagaaaccacagcagctacctgggctacagcgtggccgccatcagcaccggcgagagcacccacttcgtggccggcgcccccagagccaactacaccggccagatcgtgctgtacagcgtgaacgagaacggcaacatcaccgtgatccaggcccacagaggcgaccagatcggcagctacttcggcagcgtgctgtgcagcgtggacgtggacaaggacaccatcaccgacgtgctgctggtgggcgcccccatgtacatgagcgacctgaagaaggaggagggcagagtgtacctgttcaccatcaaggagggcatcctgggccagcaccagttcctggagggccccgagggcatcgagaacaccagattcggcagcgccatcgccgccctgagcgacatcaacatggacggcttcaacgacgtgatcgtgggcagccccctggagaaccagaacagcggcgccgtgtacatctacaacggccaccagggcaccatcagaaccaagtacagccagaagatcctgggcagcgacggcgccttcagaagccacctgcagtacttcggcagaagcctggacggctacggcgacctgaacggcgacagcatcaccgacgtgagcatcggcgccttcggccaggtggtgcagctgtggagccagagcatcgccgacgtggccatcgaggccagcttcacccccgagaagatcaccctggtgaacaagaacgcccagatcatcctgaagctgtgcttcagcgccaagttcagacccaccaagcagaacaaccaggtggccatcgtgtacaacatcaccctggacgccgacggcttcagcagcagagtgaccagcagaggcctgttcaaggagaacaacgagagatgcctgcagaagaacatggtggtgaaccaggcccagagctgccccgagcacatcatctacatccaggagcccagcgacgtggtgaacagcctggacctgagagtggacatcagcctggagaaccccggcaccagccccgccctggaggcctacagcgagaccgccaaggtgttcagcatccccttccacaaggactgcggcgaggacggcctgtgcatcagcgacctggtgctggacgtgagacagatccccgccgcccagctgatgggccagaagtag

SEQ ID NO: 126504 - DNA, 1926 bp, Artificial Sequence
  derived and/or modified sequence
atgggccccgagagaaccggcgccgcccccctgcccctgctgctggtgctggccctgagccagggcatcctgaactgctgcctggcctacaacgtgggcctgcccgaggccaagatcttcagcggccccagcagcgagcagttcggctacgccgtgcagcagttcatcaaccccaagggcaactggctgctggtgggcagcccctggagcggcttccccgagaacagaatgggcgacgtgtacaagtgccccgtggacctgagcaccgccacctgcgagaagctgaacctgcagaccagcaccagcatccccaacgtgaccgagatgaagaccaacatgagcctgggcctgatcctgaccagaaacatgggcaccggcggcttcctgacctgcggccccctgtgggcccagcagtgcggcaaccagtactacaccaccggcgtgtgcagcgacatcagccccgacttccagctgagcgccagcttcagccccgccacccagccctgccccagcctgatcgacgtggtggtggtgtgcgacgagagcaacagcatctacccctgggacgccgtgaagaacttcctggagaagttcgtgcagggcctggacatcggccccaccaagacccaggtgggcctgatccagtacgccaacaaccccagagtggtgttcaacctgaacacctacaagaccaaggaggagatgatcgtggccaccagccagaccagccagtacggcggcgacctgaccaacaccttcggcgccatccagtacgccagaaagtacgcctacagcgccgccagcggcggcagaagaagcgccaccaaggtgatggtggtggtgaccgacggcgagagccacgacggcagcatgctgaaggccgtgatcgaccagtgcaaccacgacaacatcctgagattcggcatcgccgtgctgggctacctgaacagaaacgccctggacaccaagaacctgatcaaggagatcaaggccatcgccagcatccccaccgagagatacttcttcaacgtgagcgacgaggccgccctgctggagaaggccggcaccctgggcgagcagatcttcagcatcgagggcaccgtgcagggcggcgacaacttccagatggagatgagccaggtgggcttcagcgccgactacagcagccagaacgacatcctgatgctgggcgccgtgggcgccttcggctggagcggcaccatcgtgcagaagaccagccacggccacctgatcttccccaagcaggccttcgaccagatcctgcaggacagaaaccacagcagctacctgggctacagcgtggccgccatcagcaccggcgagagcacccacttcgtggccggcgcccccagagccaactacaccggccagatcgtgctgtacagcgtgaacgagaacggcaacatcaccgtgatccaggcccacagaggcgaccagatcggcagctacttcggcagcgtgctgtgcagcgtggacgtggacaaggacaccatcaccgacgtgctgctggtgggcgcccccatgtacatgagcgacctgaagaaggaggagggcagagtgtacctgttcaccatcaaggagggcatcctgggccagcaccagttcctggagggccccgagggcatcgagaacaccagattcggcagcgccatcgccgccctgagcgacatcaacatggacggcttcaacgacgtgatcgtgggcagccccctggagaaccagaacagcggcgccgtgtacatctacaacggccaccagggcaccatcagaaccaagtacagccagctgctgtgcaccatcatcagctgccagacctgcagcttcagaaagagctgggaccccatggagcccctgggcgccatcagcagcaccctgggcggcccctggatggccatggagatctag

SEQ ID NO: 126505 - DNA, 2829 bp, Artificial Sequence
  derived and/or modified sequence
atgggccccgagagaaccggcgccgcccccctgcccctgctgctggtgctggccctgagccagggcatcctgaactgctgcctggcctacaacgtgggcctgcccgaggccaagatcttcagcggccccagcagcgagcagttcggctacgccgtgcagcagttcatcaaccccaagggcaactggctgctggtgggcagcccctggagcggcttccccgagaacagaatgggcgacgtgtacaagtgccccgtggacctgagcaccgccacctgcgagaagctgaacctgcagaccagcaccagcatccccaacgtgaccgagatgaagaccaacatgagcctgggcctgatcctgaccagaaacatgggcaccggcggcttcctgacctgcggccccctgtgggcccagcagtgcggcaaccagtactacaccaccggcgtgtgcagcgacatcagccccgacttccagctgagcgccagcttcagccccgccacccagccctgccccagcctgatcgacgtggtggtggtgtgcgacgagagcaacagcatctacccctgggacgccgtgaagaacttcctggagaagttcgtgcagggcctggacatcggccccaccaagacccaggtgggcctgatccagtacgccaacaaccccagagtggtgttcaacctgaacacctacaagaccaaggaggagatgatcgtggccaccagccagaccagccagtacggcggcgacctgaccaacaccttcggcgccatccagtacgccagaaagtacgcctacagcgccgccagcggcggcagaagaagcgccaccaaggtgatggtggtggtgaccgacggcgagagccacgacggcagcatgctgaaggccgtgatcgaccagtgcaaccacgacaacatcctgagattcggcatcgccgtgctgggctacctgaacagaaacgccctggacaccaagaacctgatcaaggagatcaaggccatcgccagcatccccaccgagagatacttcttcaacgtgagcgacgaggccgccctgctggagaaggccggcaccctgggcgagcagatcttcagcatcgagggcaccgtgcagggcggcgacaacttccagatggagatgagccaggtgggcttcagcgccgactacagcagccagaacgacatcctgatgctgggcgccgtgggcgccttcggctggagcggcaccatcgtgcagaagaccagccacggccacctgatcttccccaagcaggccttcgaccagatcctgcaggacagaaaccacagcagctacctgggctacagcgtggccgccatcagcaccggcgagagcacccacttcgtggccggcgcccccagagccaactacaccggccagatcgtgctgtacagcgtgaacgagaacggcaacatcaccgtgatccaggcccacagaggcgaccagatcggcagctacttcggcagcgtgctgtgcagcgtggacgtggacaaggacaccatcaccgacgtgctgctggtgggcgcccccatgtacatgagcgacctgaagaaggaggagggcagagtgtacctgttcaccatcaaggagggcatcctgggccagcaccagttcctggagggccccgagggcatcgagaacaccagattcggcagcgccatcgccgccctgagcgacatcaacatggacggcttcaacgacgtgatcgtgggcagccccctggagaaccagaacagcggcgccgtgtacatctacaacggccaccagggcaccatcagaaccaagtacagccagaagatcctgggcagcgacggcgccttcagaagccacctgcagtacttcggcagaagcctggacggctacggcgacctgaacggcgacagcatcaccgacgtgagcatcggcgccttcggccaggtggtgcagctgtggagccagagcatcgccgacgtggccatcgaggccagcttcacccccgagaagatcaccctggtgaacaagaacgcccagatcatcctgaagctgtgcttcagcgccaagttcagacccaccaagcagaacaaccaggtggccatcgtgtacaacatcaccctggacgccgacggcttcagcagcagagtgaccagcagaggcctgttcaaggagaacaacgagagatgcctgcagaagaacatggtggtgaaccaggcccagagctgccccgagcacatcatctacatccaggagcccagcgacgtggtgaacagcctggacctgagagtggacatcagcctggagaaccccggcaccagccccgccctggaggcctacagcgagaccgccaaggtgttcagcatccccttccacaaggactgcggcgaggacggcctgtgcatcagcgacctggtgctggacgtgagacagatccccgccgcccaggagcagcccttcatcgtgagcaaccagaacaagagactgaccttcagcgtgaccctgaagaacaagagagagagcgcctacaacaccggcatcgtggtggacttcagcgagaacctgttcttcgccagcttcagcctgcccgtggacggcaccgaggtgacctgccaggtggccgccagccagaagagcgtggcctgcgacgtgggctaccccgccctgaagagagagcagcaggtgaccttcaccatcaacttcgacttcaacctgcagaacctgcagaaccaggccagcctgagcttccaggccctgagcgagagccaggaggagaacaaggccgacaacctggtgaacctgaagatccccctgctgtacgacgccgagatccacctgaccagatag

SEQ ID NO: 126506 - protein, 1066 aa, Artificial Sequence
  derived and/or modified sequence
MGPGPSRAPRAPRLMLCALALMVAAGGCVVSAFNLDTRFLVVKEAGNPGSLFGYSVALHRQTERQQRYLLLAGAPRELAVPDGYTNRTGAVYLCPLTAHKDDCERMNITVKNDPGHHIIEDMWLGVTVASQGPAGRVLVCAHRYTQVLWSGSEDQRRMVGKCYVRGNDLELDSSDDWQTYHNEMCNSNTDYLETGMCQLGTSGGFTQNTVYFGAPGAYNWKGNSYMIQRKEWDLSEYSYKDPEDQGNLYIGYTMQVGSFILHPKNITIVTGAPRHRHMGAVFLLSQEAGGDLRRRQVLEGSQVGAYFGSAIALADLNNDGWQDLLVGAPYYFERKEEVGGAIYVFMNQAGTSFPAHPSLLLHGPSGSAFGLSVASIGDINQDGFQDIAVGAPFEGLGKVYIYHSSSKGLLRQPQQVIHGEKLGLPGLATFGYSLSGQMDVDENFYPDLLVGSLSDHIVLLRARPVINIVHKTLVPRPAVLDPALCTATSCVQVELCFAYNQSAGNPNYRRNITLAYTLEADRDRRPPRLRFAGSESAVFHGFFSMPEMRCQKLELLLMDNLRDKLRPIIISMNYSLPLRMPDRPRLGLRSLDAYPILNQAQALENHTEVQFQKECGPDNKCESNLQMRAAFVSEQQQKLSRLQYSRDVRKLLLSINVTNTRTSERSGEDAHEALLTLVVPPALLLSSVRPPGACQANETIFCELGNPFKRNQRMELLIAFEVIGVTLHTRDLQVQLQLSTSSHQDNLWPMILTLLVDYTLQTSLSMVNHRLQSFFGGTVMGESGMKTVEDVGSPLKYEFQVGPMGEGLVGLGTLVLGLEWPYEVSNGKWLLYPTEITVHGNGSWPCRPPGDLINPLNLTLSDPGDRPSSPQRRRRQLDPGGGQGPPPVTLAAAKKAKSETVLTCATGRAHCVWLECPIPDAPVVTNVTVKARVWNSTFIEDYRDFDRVRVNGWATLFLRTSIPTINMENKTTWFSVDIDSELVEELPAEIELWLVLVAVGAGLLLLGLIILLLWKCDFFKRTRYYQIMPKYHAVRIREEERYPPPGSTLPTKKHWVTSWQTRDQYY

SEQ ID NO: 126507 - protein, 1051 aa, Artificial Sequence
  derived and/or modified sequence
MGPGPSRAPRAPRLMLCALALMVAAGGCVVSAFNLDTRFLVVKEAGNPGSLFGYSVALHRQTERQQRYLLLAGAPRELAVPDGYTNRTGAVYLCPLTAHKDDCERMNITVKNDPGHHIIEDMWLGVTVASQGPAGRVLVCAHRYTQVLWSGSEDQRRMVGKCYVRGNDLELDSSDDWQTYHNEMCNSNTDYLETGMCQLGTSGGFTQNTVYFGAPGAYNWKGNSYMIQRKEWDLSEYSYKDPEDQGNLYIGYTMQVGSFILHPKNITIVTGAPRHRHMGAVFLLSQEAGGDLRRRQVLEGSQVGAYFGSAIALADLNNDGWQDLLVGAPYYFERKEEVGGAIYVFMNQAGTSFPAHPSLLLHGPSGSAFGLSVASIGDINQDGFQDIAVGAPFEGLGKVYIYHSSSKGLLRQPQQVIHGEKLGLPGLATFGYSLSGQMDVDENFYPDLLVGSLSDHIVLLRARPVINIVHKTLVPRPAVLDPALCTATSCVQVELCFAYNQSAGNPNYRRNITLAYTLEADRDRRPPRLRFAGSESAVFHGFFSMPEMRCQKLELLLMDNLRDKLRPIIISMNYSLPLRMPDRPRLGLRSLDAYPILNQAQALENHTEVQFQKECGPDNKCESNLQMRAAFVSEQQQKLSRLQYSRDVRKLLLSINVTNTRTSERSGEDAHEALLTLVVPPALLLSSVRPPGACQANETIFCELGNPFKRNQRMELLIAFEVIGVTLHTRDLQVQLQLSTSSHQDNLWPMILTLLVDYTLQTSLSMVNHRLQSFFGGTVMGESGMKTVEDVGSPLKYEFQVGPMGEGLVGLGTLVLGLEWPYEVSNGKWLLYPTEITVHGNGSWPCRPPGDLINPLNLTLSDPGDRPSSPQRRRRQLDPGGGQGPPPVTLAAAKKAKSETVLTCATGRAHCVWLECPIPDAPVVTNVTVKARVWNSTFIEDYRDFDRVRVNGWATLFLRTSIPTINMENKTTWFSVDIDSELVEELPAEIELWLVLVAVGAGLLLLGLIILLLWKCGFFKRARTRALYEAKRQKAEMKSQPSETERLTDDY

SEQ ID NO: 126508 - protein, 1037 aa, Artificial Sequence
  derived and/or modified sequence
MLCALALMVAAGGCVVSAFNLDTRFLVVKEAGNPGSLFGYSVALHRQTERQQRYLLLAGAPRELAVPDGYTNRTGAVYLCPLTAHKDDCERMNITVKNDPGHHIIEDMWLGVTVASQGPAGRVLVCAHRYTQVLWSGSEDQRRMVGKCYVRGNDLELDSSDDWQTYHNEMCNSNTDYLETGMCQLGTSGGFTQNTVYFGAPGAYNWKGNSYMIQRKEWDLSEYSYKDPEDQGNLYIGYTMQVGSFILHPKNITIVTGAPRHRHMGAVFLLSQEAGGDLRRRQVLEGSQVGAYFGSAIALADLNNDGWQDLLVGAPYYFERKEEVGGAIYVFMNQAGTSFPAHPSLLLHGPSGSAFGLSVASIGDINQDGFQDIAVGAPFEGLGKVYIYHSSSKGLLRQPQQVIHGEKLGLPGLATFGYSLSGQMDVDENFYPDLLVGSLSDHIVLLRARPVINIVHKTLVPRPAVLDPALCTATSCVQVELCFAYNQSAGNPNYRRNITLAYTLEADRDRRPPRLRFAGSESAVFHGFFSMPEMRCQKLELLLMDNLRDKLRPIIISMNYSLPLRMPDRPRLGLRSLDAYPILNQAQALENHTEVQFQKECGPDNKCESNLQMRAAFVSEQQQKLSRLQYSRDVRKLLLSINVTNTRTSERSGEDAHEALLTLVVPPALLLSSVRPPGACQANETIFCELGNPFKRNQRMELLIAFEVIGVTLHTRDLQVQLQLSTSSHQDNLWPMILTLLVDYTLQTSLSMVNHRLQSFFGGTVMGESGMKTVEDVGSPLKYEFQVGPMGEGLVGLGTLVLGLEWPYEVSNGKWLLYPTEITVHGNGSWPCRPPGDLINPLNLTLSDPGDRPSSPQRRRRQLDPGGGQGPPPVTLAAAKKAKSETVLTCATGRAHCVWLECPIPDAPVVTNVTVKARVWNSTFIEDYRDFDRVRVNGWATLFLRTSIPTINMENKTTWFSVDIDSELVEELPAEIELWLVLVAVGAGLLLLGLIILLLWKCGFFKRARTRALYEAKRQKAEMKSQPSETERLTDDY

SEQ ID NO: 126509 - protein, 294 aa, Artificial Sequence
  derived and/or modified sequence
MIQRKEWDLSEYSYKDPEDQGNLYIGYTMQVGSFILHPKNITIVTGAPRHRHMGAVFLLSQEAGGDLRRRQVLEGSQVGAYFGSAIALADLNNDGWQDLLVGAPYYFERKEEVGGAIYVFMNQAGTSFPAHPSLLLHGPSGSAFGLSVASIGDINQDGFQDIAVGAPFEGLGKVYIYHSSSKGLLRQPQQVIHGEKLGLPGLATFGYSLSGQMDVDENFYPDLLVGSLSDHIVLLRARPVINIVHKTLVPRPAVLDPALCTATSCVQVELCFAYNQSAGNPNYRRNISECWGAA

SEQ ID NO: 126510 - DNA, 3201 bp, Artificial Sequence
  derived and/or modified sequence
atgggtcccgggcccagcagagcaccacgtgcccctaggctcatgctctgtgctctggctctgatggtagccgcaggtggttgtgtggtgtcagcgtttaacctcgacacaagattcctcgtggtcaaggaggcgggaaatccgggaagcctgtttggctattcagttgctctgcatcgccaaaccgagagacagcagaggtacctgctgctggccggcgcccctagggaattggcagtcccagatgggtacaccaaccgaaccggcgccgtatatctctgtcccctcaccgcgcataaggatgactgtgaacgcatgaacataactgtcaagaacgatcccggccaccacatcattgaggacatgtggctgggtgtcactgttgcttctcaggggccggccggccgggtgctggtgtgtgcccatcgctatacacaggtcctttggtcagggtcagaagaccagcgccgcatggtaggcaaatgttatgtgcgtggcaatgacttagaactggacagttctgacgactggcagacatatcacaacgagatgtgtaactcaaacaccgactatctggaaacaggaatgtgtcagctaggtacctcgggaggttttactcagaatacagtttactttggagcacccggcgcttataattggaaaggtaattcatatatgattcagaggaaggagtgggacctgtctgagtactcctataaagatccagaagatcagggcaatctttatattggatatacaatgcaggtcggttccttcattctccaccctaagaatattacaattgttaccggggcacctaggcaccgacatatgggggccgtgttcctgctctcgcaggaagcaggcggggatctgaggcggaggcaggttctggagggctcccaggtcggagcctacttcggaagcgccatcgccctcgctgacctgaataatgacggctggcaggatctcctcgtgggtgcaccttactactttgagaggaaagaggaggtcgggggcgccatctatgttttcatgaaccaagctggcacctcgtttccagctcatccatcgcttcttttgcatggaccctcaggctccgcattcggactaagtgtcgctagcattggcgatattaatcaggatggcttccaggacatcgcagtcggggccccttttgaggggctgggcaaagtgtacatctaccactcaagctccaagggtctactccgccaaccacagcaggtgatccacggggagaaacttgggctgcctggactggccacctttggctactctctttcaggacagatggatgttgatgagaacttttatcctgaccttctagtgggttctctgagcgatcacattgtgctgctcagggctcggccagttatcaacattgtacacaagaccctggtgccacgtcccgctgtcctggaccctgcgctctgtactgctactagctgtgtgcaggtggaactgtgctttgcctataatcagagcgccggcaacccaaattaccgccggaacatcacactggcttataccctcgaagccgaccgcgacagacgaccccctcggttacgttttgccggatccgagtctgcggtgttccacggattctttagcatgccagaaatgaggtgccagaagctcgagcttctcctcatggataatctaagggacaagctgcgacctattatcatctccatgaactacagtctcccactgaggatgcccgacagacctcgcctgggactccggtcactggacgcttaccccattcttaaccaggcacaggccctggagaaccacacggaggtccagttccaaaaagaatgcgggcctgataacaaatgtgagagcaatctgcaaatgcgagccgcattcgtgtcagaacagcaacaaaagttgtctagactccagtactcccgggatgtgagaaagctgctactgtcgattaatgtcaccaatacacgaactagcgagagatcgggggaagatgcccatgaggctttactgacactagtagttccgcctgctctccttctgtcaagtgtcaggccgccaggcgcatgtcaggctaatgagaccattttctgtgagctcggaaatccatttaaacggaatcagcgcatggagctacttatcgcttttgaagtaatcggcgtaaccctgcacacacgtgatttacaagttcagctgcagctgtctacgtctagccatcaggataatctctggcccatgatcctaacactactcgtcgactacacactgcagacttccctctctatggttaatcaccgcctgcagagcttttttggaggaacagtcatgggtgagtcgggcatgaaaacagtggaagacgttgggtcacctctgaagtatgagttccaggtgggccctatgggagagggcctggtggggttaggcactctggtgcttggtctggagtggccatacgaagtgtcaaacggcaagtggctcctgtatcccaccgaaataactgtgcacgggaacggttcctggccttgtcgacctccaggtgatctgataaacccactcaatttgacgctatccgatcctggagacagaccaagctccccgcagagaagacgaagacaactggatcctggcggcggtcagggtcctccaccagtgacccttgcggccgccaaaaaggctaagtctgagaccgtgctcacatgtgccacaggacgcgctcattgcgtgtggctcgagtgtccaatccccgatgcaccagtcgtaaccaatgtgaccgtgaaagccagggtctggaactccaccttcatcgaggactatcgggatttcgaccgggtgcgcgttaacggctgggcgacattgttcttacgcacaagcatcccaacaataaatatggaaaacaagaccacatggtttagtgtggatatcgattccgaactagtggaggaactccccgccgaaattgaactctggctggttctcgtagctgtgggcgctggactgctgttgctgggcttgattattctgctattgtggaagtgtgacttttttaagagaactaggtactaccagatcatgcctaaatatcacgcggtcaggatccgcgaggaggaaaggtacccaccccccgggagcaccctccctacaaagaagcattgggtgacctcttggcagactcgggaccagtattactag

SEQ ID NO: 126511 - DNA, 3156 bp, Artificial Sequence
  derived and/or modified sequence
atggggccagggcctagccgcgcgcccagagcaccaagactgatgctgtgtgccttggctttgatggtggccgcaggcggctgcgtggtttcggcctttaatttagatacacgattccttgtggtgaaggaagccgggaaccccgggtcactgttcgggtacagtgtggccctccatcggcagacagagcgacagcaaaggtatctgctgctcgcaggggctccacgggaattagcggtccccgatggatacacaaacaggacgggcgccgtgtatttatgccccctcaccgcccataaggatgattgcgagcgcatgaatataactgtaaagaatgaccccggccatcacataattgaggatatgtggctgggtgtgaccgtcgccagccaaggtcccgcaggtcgagtgttagtgtgtgctcaccggtatacgcaggtgttgtggagcgggagcgaggaccagaggagaatggtaggaaagtgttacgtgagaggcaacgatctggagcttgatagttccgacgactggcagacctaccacaacgagatgtgcaacagcaatacggactatctggaaacagggatgtgccagctgggaacctcaggggggttcacacagaataccgtatattttggtgcccctggagcatacaattggaagggaaattcatatatgattcaacgtaaagagtgggatctgagtgagtattcttacaaggatcctgaggatcaggggaacctgtatatcggatataccatgcaggtcggctcctttatcctacatccaaagaacatcacgatcgtcaccggagcgccccgacaccggcacatgggggccgttttcctcctaagccaagaggctggcggagatttacgccggcggcaggtgttggagggatctcaagtgggtgcatatttcggcagcgccatcgctctggccgacctgaataacgacgggtggcaagacctactggtgggtgccccttactacttcgaacgaaaagaagaagtcgggggggccatttatgtgttcatgaatcaggccgggacatcatttccggctcaccccagccttcttctccacggcccctcaggctctgcattcggattgagtgtggcgagcattggcgatattaaccaggatggatttcaagatattgccgtgggggccccctttgaaggcctgggcaaagtgtatatataccatagcagcagcaaaggcctgctgcgacagcctcagcaggtgattcatggcgaaaaactcggcctgccggggctcgctactttcgggtatagcctgagtgggcagatggacgtagacgaaaacttttatcccgatctcctggtcgggagcctctcagaccatatcgtgctcctgcgcgcacgcccggttataaacattgtgcataaaaccttagtgccacgtccagccgtgctagaccctgccctgtgtacagctacctcatgcgtccaggtggagctgtgttttgcctataatcagagcgcaggcaatcccaattatcgcagaaatattaccctggcttacacactcgaggccgacagggatagaaggccccctcgactgcggtttgccggtagcgaaagtgcagtgttccacgggtttttttccatgcccgaaatgcgctgccagaagctggagttgctgttaatggataacctgagagataaattgcgacctatcattatctcaatgaattatagcttacctctgaggatgccagacaggccccgcttaggtctgaggagcctggacgcctaccccatactaaaccaggctcaggcgctcgaaaaccatacagaagttcagtttcagaaggaatgcggtcccgataacaagtgtgaatcaaatctccagatgcgtgctgcattcgtctcagagcagcagcaaaagctgtcccgcctgcaatacagtcgcgatgtccggaaactactgctatctatcaatgttactaatactcgcactagcgagaggtctggcgaggatgcacatgaggcgctcctcactctggtagtgccccccgctcttctgctttcatccgtgcgcccgcccggagcatgtcaggctaacgaaacaatcttctgcgaattggggaatccatttaagagaaaccaacggatggagctcctcatcgccttcgaggtcattggggtcacactgcatactcgggatcttcaggtgcaactgcagttgtcgacatcatcacaccaagataacttgtggcccatgatcttgacactgctggtagactacactcttcagaccagcctctcaatggtaaaccacagactgcaatccttttttggtgggactgtgatgggtgagtctggaatgaagaccgtcgaggacgtcgggagcccgttgaagtacgagttccaggtgggaccaatgggcgagggcctggtgggcctaggaacccttgtcctgggtctggagtggccttacgaggtctccaatggcaaatggctattgtacccaactgaaattacagtccacggaaatggttcttggccttgtcgtccccctggggacttgataaacccactaaacctgaccttgagcgatcccggagaccggccaagctcgccgcagcgtcggcggcgccagctggacccgggaggtggccaggggccacctcccgtgactctggcagcagcgaaaaaggctaagtccgagaccgtgctgacttgtgcaactggtcgtgcacactgtgtgtggctcgaatgccccataccggatgctccagtcgtgactaatgtaaccgtgaaggcccgcgtgtggaattctactttcatcgaggattatcgggacttcgaccgagtgagagttaatggctgggccaccttgtttctgcgcacatctattcctactatcaacatggaaaataagactacctggttctctgtggatattgactcagagcttgttgaggaattgcctgcagaaatcgagttatggctggttttggttgcagtgggggctggactgctcctgctcgggctgattatcttactgctgtggaaatgtggctttttcaagcgagcacgtacgcgtgctctgtacgaagcaaaacgccagaaagctgaaatgaaatcacagcccagcgagacagaacggctgactgacgactactag

SEQ ID NO: 126512 - DNA, 3114 bp, Artificial Sequence
  derived and/or modified sequence
atgctgtgtgccctggccctgatggtagccgcaggaggctgtgtggtttccgccttcaacttggacacacgtttcctggtagtcaaggaggcagggaatccagggtctctgttcggttattctgtcgctttgcacaggcagacagagagacagcagcgctacctgctgctggcaggtgcacctagggagctggccgtcccagatggctatactaaccgcactggcgcggtgtatctttgccctctgaccgcacataaagacgactgtgaaagaatgaatattaccgtaaaaaatgaccctggccaccacataatagaagacatgtggcttggcgtgactgtggcctcccaaggccctgcaggacgagtcctggtatgtgctcataggtatacccaggtattgtggtccggtagcgaagaccagcgcagaatggtgggcaaatgctatgttcgcggtaatgacctggagcttgacagttctgatgattggcagacttatcacaacgagatgtgcaatagcaatacagactacctcgagacgggaatgtgtcagctgggaacctcgggcggcttcactcagaatactgtatacttcggtgcacctggggcctacaactggaaaggcaattcctatatgattcagagaaaagagtgggatctgtccgaatactcctacaaagaccccgaggatcagggcaacttgtacataggttacacgatgcaggtgggaagttttattcttcatcctaaaaatatcaccattgttacaggggccccacgccaccggcacatgggcgccgtattcttgctatctcaggaagcgggaggtgatctccggcgaaggcaagtattggaaggaagtcaggttggagcgtactttggttccgccatcgctctagctgacttaaacaatgacggctggcaggacctgttagtgggcgccccctattattttgaaaggaaggaggaggtggggggtgctatatacgtattcatgaatcaggccgggacaagctttccagcccatccatccctgctgctgcacgggccgagcgggtctgcgtttggacttagtgtggctagtatcggggatatcaatcaggacggttttcaggatatcgccgtgggcgctccctttgaaggactgggtaaggtatacatctatcatagctcatcgaaaggccttcttcggcagccccagcaagtaattcacggagagaagcttgggctgcctgggctggcaactttcgggtactccctgtccggccagatggacgtggatgaaaacttttaccctgatctgttagtcggctcactgagtgaccacatcgttctcctcagagcaaggcctgtgatcaacatagttcacaagacactggtgcctcgacctgccgttttggatccggccctctgtacggccacgagttgtgtacaggtagaactgtgttttgcttataatcagtctgccggcaaccccaactaccggagaaacattactctggcttatactcttgaggccgatagggatcgcagacccccccgattgagatttgccgggtcagagagcgccgtttttcacggcttcttttcgatgcctgaaatgcgatgtcaaaaactggagcttctgctcatggacaatctcagggacaaactgcgaccaataatcatcagcatgaactattccctgccactgagaatgccagacagacccaggcttggattacgctctctggatgcttaccctatccttaaccaggctcaggctcttgaaaatcataccgaggtgcagtttcagaaagagtgcggacccgacaataagtgcgagtctaacctccagatgcgtgcggctttcgttagtgagcaacagcagaagctgagtagactccaatactcaagggatgttcggaaacttctgttgtcaataaacgtgaccaatacacggaccagtgagagatctggagaggatgcacacgaggccctcctgaccctggtggtgcctcctgcactactcctcagttccgtgcggccaccgggagcttgtcaagcaaatgagactattttctgtgagctgggaaatcccttcaaacggaaccagcgtatggagctactcattgcattcgaggtgattggtgtgactctgcacacccgcgatctgcaggtacagcttcagctctcgactagcagccaccaggacaatctgtggccaatgattctcacattactggtggattatacactgcagacctcgttaagtatggtcaatcacagactccagtcattcttcggcggcaccgttatgggagagtccggcatgaagacagtggaggacgtgggtagtcctctgaaatacgagttccaggtcggacccatgggggagggcctcgtcggcctcgggaccttagtattggggctcgaatggccatacgaggtgtccaatggaaagtggctcctctatccaaccgaaatcactgtgcacggtaacgggtcctggccatgccgcccaccaggtgatttaattaacccattaaacctcacgctgagtgacccaggggacagacccagcagccctcagcgaaggagacgccagttggaccccgggggaggccaggggcccccgcctgtaaccttagccgcagcaaagaaagccaagagcgaaacagtcctaacctgtgcgaccggccgtgctcattgcgtgtggctggaatgccctatccccgacgctcccgtggtaacaaacgtgacagtaaaggctagggtgtggaattccacattcattgaggactacagagactttgaccgggtgcgggtgaatggttgggcaaccctgttcctaaggacttccatcccaactatcaatatggagaacaagacaacctggttttccgtagacattgattccgagctcgtggaagagctgccagccgaaatcgaactttggctggtgttggtcgcggtgggtgccgggctgcttctgctgggcctcataatcctgcttctgtggaagtgcggcttttttaagcgggctcggacaagggccctctatgaggcgaagaggcaaaaagccgaaatgaaatctcagccaagcgaaacggagcggttgaccgacgattactag

SEQ ID NO: 126513 - DNA, 885 bp, Artificial Sequence
  derived and/or modified sequence
atgatccagcggaaggagtgggatctctctgaatactcctacaaggacccagaagaccaaggcaatctgtacattggatatactatgcaggttggctcctttatcctccacccaaagaatatcactattgtgactggtgccccaaggcaccgccatatgggagctgtatttctcctcagccaggaagcagggggagatctgcgccgcagacaggttctggaaggtagccaggttggcgcatattttggctcagcaatcgccctcgctgacctgaacaacgatggctggcaggacctcttggtgggtgctccttactactttgagagaaaggaggaggtggggggagccatatacgtgtttatgaaccaggcaggaacctctttccccgcacatccatcacttctgttgcacggaccttcaggctccgcttttggtctttccgtcgcatctattggcgatattaaccaggatggattccaggatatcgcggtgggagccccctttgagggactcggcaaggtgtatatttatcattcttcatccaaaggtttgctcagacagccccagcaagttatccacggcgaaaagctgggattgcctggcctggctacgttcggctatagcctcagcgggcaaatggacgtcgatgagaatttttaccccgacctgcttgtgggctccctgtcagaccatatcgtactgttacgggcccgccctgtgataaatattgtacacaagactctggttcctagacccgcagttctggatcctgccctgtgtaccgccacttcctgcgtgcaggttgaactctgttttgcttacaaccaaagtgctgggaaccccaactatcgcagaaatattagcgaatgttggggagccgcctag

SEQ ID NO: 126514 - DNA, 4884 bp, Artificial Sequence
  derived and/or modified sequence
tttccccggaaggaaagcgcagcccgggctgggctcgcaaggtggggaggtgcgggactgggcgtggggaggcggggcgcgcgccgggggacccctccctcctgtcctccttgcggtcgaccggtgcgcttgccagatccgccgcgaagccgggatcgaaggcgacagcgcggccaagggggcgcggccgggacaagctgggggccggttgcccggggcagggacggcggcgacccggccgctggggaggcaggaagatagacccacggatcttaggaagggatccgagagcgcagctgtgaaactggctggggctgggggcacgaaaccgatcagcgctacggagcgcagcggccggcgggttccagtgtcctccggcggcgcggggagcaggtgaacaggtcctcacgcccagctccgcgccctcacgcgctctcgccgggaccccgcttccgctggcagccatgggccccggccccagccgcgcgccccgcgccccacgcctgatgctctgtgcgctcgccttgatggtggcggccggcggctgcgtcgtctccgccttcaacctggatacccgattcctggtagtgaaggaggccgggaacccgggcagcctcttcggctactcggtcgccctccatcggcagacagagcggcagcagcgctacctgctcctggctggtgccccccgggagctcgctgtgcccgatggctacaccaaccggactggtgctgtgtacctgtgcccactcactgcccacaaggatgactgtgagcggatgaacatcacagtgaaaaatgaccctggccatcacattattgaggacatgtggcttggagtgactgtggccagccagggccctgcaggcagagttctggtctgtgcccaccgctacacccaggtgctgtggtcagggtcagaagaccagcggcgcatggtgggcaagtgctacgtgcgaggcaatgacctagagctggactccagtgatgactggcagacctaccacaacgagatgtgcaatagcaacacagactacctggagacgggcatgtgccagctgggcaccagcggtggcttcacccagaacactgtgtacttcggcgcccccggtgcctacaactggaaaggaaacagctacatgattcagcgcaaggagtgggacttatctgagtatagttacaaggacccagaggaccaaggaaacctctatattgggtacacgatgcaggtaggcagcttcatcctgcaccccaaaaacatcaccattgtgacaggtgccccacggcaccgacatatgggcgcggtgttcttgctgagccaggaggcaggcggagacctgcggaggaggcaggtgctggagggctcgcaggtgggcgcctattttggcagcgccattgccctggcagacctgaacaatgatgggtggcaggacctcctggtgggcgccccctactacttcgagaggaaagaggaagtagggggtgccatctatgtcttcatgaaccaggcgggaacctccttccctgctcacccctcactccttcttcatggccccagtggctctgcctttggtttatctgtggccagcattggtgacatcaaccaggatggatttcaggatattgctgtgggagctccgtttgaaggcttgggcaaagtgtacatctatcacagtagctctaaggggctccttagacagccccagcaggtaatccatggagagaagctgggactgcctgggttggccaccttcggctattccctcagtgggcagatggatgtggatgagaacttctacccagaccttctagtgggaagcctgtcagaccacattgtgctgctgcgggcccggcccgtcatcaacatcgtccacaagaccttggtgcccaggccagctgtgctggaccctgcactttgcacggccacctcttgtgtgcaagtggagctgtgctttgcttacaaccagagtgccgggaaccccaactacaggcgaaacatcaccctggcctacactctggaggctgacagggaccgccggccgccccggctccgctttgccggcagtgagtccgctgtcttccacggcttcttctccatgcccgagatgcgctgccagaagctggagctgctcctgatggacaacctccgtgacaaactccgccccatcatcatctccatgaactactctttacctttgcggatgcccgatcgcccccggctggggctgcggtccctggacgcctacccgatcctcaaccaggcacaggctctggagaaccacactgaggtccagttccagaaggagtgcgggcctgacaacaagtgtgagagcaacttgcagatgcgggcagccttcgtgtcagagcagcagcagaagctgagcaggctccagtacagcagagacgtccggaaattgctcctgagcatcaacgtgacgaacacccggacctcggagcgctccggggaggacgcccacgaggcgctgctcaccctggtggtgcctcccgccctgctgctgtcctcagtgcgcccccccggggcctgccaagctaatgagaccatcttttgcgagctggggaaccccttcaaacggaaccagaggatggagctgctcatcgcctttgaggtcatcggggtgaccctgcacacaagggaccttcaggtgcagctgcagctctccacgtcgagtcaccaggacaacctgtggcccatgatcctcactctgctggtggactatacactccagacctcgcttagcatggtaaatcaccggctacaaagcttctttggggggacagtgatgggtgagtctggcatgaaaactgtggaggatgtaggaagccccctcaagtatgaattccaggtgggcccaatgggggaggggctggtgggcctggggaccctggtcctaggtctggagtggccctacgaagtcagcaatggcaagtggctgctgtatcccacggagatcaccgtccatggcaatgggtcctggccctgccgaccacctggagaccttatcaaccctctcaacctcactctttctgaccctggggacaggccatcatccccacagcgcaggcggcgacagctggatccagggggaggccagggccccccacctgtcactctggctgctgccaaaaaagccaagtctgagactgtgctgacctgtgccacagggcgtgcccactgtgtgtggctagagtgccccatccctgatgcccccgttgtcaccaacgtgactgtgaaggcacgagtgtggaacagcaccttcatcgaggattacagagactttgaccgagtccgggtaaatggctgggctaccctattcctccgaaccagcatccccaccatcaacatggagaacaagaccacgtggttctctgtggacattgactcggagctggtggaggagctgccggccgaaatcgagctgtggctggtgctggtggccgtgggtgcagggctgctgctgctggggctgatcatcctcctgctgtggaagtgtgacttctttaagcggacccgctattatcagatcatgcccaagtaccacgcagtgcggatccgggaggaggagcgctacccacctccagggagcaccctgcccaccaagaagcactgggtgaccagctggcagactcgggaccaatactactgacgtcctccctgatcccaccccctcctcccccagtgtcccctttcttcctatttatcataagttatgcctctgacagtccacaggggccaccacctttggctggtagcagcaggctcaggcacatacacctcgtcaagagcatgcacatgctgtctggccctggggatcttcccacaggagggccagcgctgtggaccttacaacgccgagtgcactgcattcctgtgccctagatgcacgtggggcccactgctcgtggactgtgctggtgcatcacggatggtgcatgggctcgccgtgtctcagcctctgccagcgccaaaacaagccaaagagcctcccaccagagccgggaggaaaaggcccctgcaatgtggtgacacctccccctttcacactggatccatcttgagccacagtcactggattgactttgctgtcaaaactactgacagggagcagcccccgggccgctggctggtgggcccccaatgacacccatgccagagaggtggggatcctgcctaaggttgtctacgggggcacttggaggacctggcgtgctcagacccaacagcaaaggaactagaaagaaggacccagaacggcttgctttcctgcatctctgtgaagcctctctccttggccacagactgaactcgcagggaatgcagcaggaaggaacaaagacaggcaaacggcaacgtagcctgggctcactgtgctggggcacggcgggatcctccacagagaggaggggaccaattctggacagacagatgttgggaggatacagaggagatgccacttctcactcaccactaccagccagcctcagaaggccccagagagaccctgcaagaccacggagggagcgacacttgaatgtagaataggcagggggccctgccccaccccatccagccagaccccacgctgaccatgcgtcaggggcctagaggtggagttcttagctatccttggctttcagagccagcctggctctgccccctcccccatgggctgtgtcctaaggcccatttgagaagctgaggctagttccagaaaacctctcctgacccctgcctgttggcaggcccactccccagccccagccccttccatggtactgtagcaggggaattccctccccctccttgtgccttctttgtatataggcttctcacggcgaccaataaacagctcccagtttgtatgc

SEQ ID NO: 126515 - DNA, 4888 bp, Artificial Sequence
  derived and/or modified sequence
agatccgccgcgaagccgggatcgaaggcgacagcgcggccaagggggcgcggccgggacaagctgggggccggttgcccggggcagggacggcggcgacccggccgctggggaggcaggaagatagacccacggatcttaggaagggatccgagagcgcagctgtgaaactggctggggctgggggcacgaaaccgatcagcgctacggagcgcagcggccggcgggttccagtgtcctccggcggcgcggggagcaggtgaacaggtcctcacgcccagctccgcgccctcacgcgctctcgccgggaccccgcttccgctggcagccatgggccccggccccagccgcgcgccccgcgccccacgcctgatgctctgtgcgctcgccttgatggtggcggccggcggctgcgtcgtctccgccttcaacctggatacccgattcctggtagtgaaggaggccgggaacccgggcagcctcttcggctactcggtcgccctccatcggcagacagagcggcagcagcgctacctgctcctggctggtgccccccgggagctcgctgtgcccgatggctacaccaaccggactggtgctgtgtacctgtgcccactcactgcccacaaggatgactgtgagcggatgaacatcacagtgaaaaatgaccctggccatcacattattgaggacatgtggcttggagtgactgtggccagccagggccctgcaggcagagttctggtctgtgcccaccgctacacccaggtgctgtggtcagggtcagaagaccagcggcgcatggtgggcaagtgctacgtgcgaggcaatgacctagagctggactccagtgatgactggcagacctaccacaacgagatgtgcaatagcaacacagactacctggagacgggcatgtgccagctgggcaccagcggtggcttcacccagaacactgtgtacttcggcgcccccggtgcctacaactggaaaggaaacagctacatgattcagcgcaaggagtgggacttatctgagtatagttacaaggacccagaggaccaaggaaacctctatattgggtacacgatgcaggtaggcagcttcatcctgcaccccaaaaacatcaccattgtgacaggtgccccacggcaccgacatatgggcgcggtgttcttgctgagccaggaggcaggcggagacctgcggaggaggcaggtgctggagggctcgcaggtgggcgcctattttggcagcgccattgccctggcagacctgaacaatgatgggtggcaggacctcctggtgggcgccccctactacttcgagaggaaagaggaagtagggggtgccatctatgtcttcatgaaccaggcgggaacctccttccctgctcacccctcactccttcttcatggccccagtggctctgcctttggtttatctgtggccagcattggtgacatcaaccaggatggatttcaggatattgctgtgggagctccgtttgaaggcttgggcaaagtgtacatctatcacagtagctctaaggggctccttagacagccccagcaggtaatccatggagagaagctgggactgcctgggttggccaccttcggctattccctcagtgggcagatggatgtggatgagaacttctacccagaccttctagtgggaagcctgtcagaccacattgtgctgctgcgggcccggcccgtcatcaacatcgtccacaagaccttggtgcccaggccagctgtgctggaccctgcactttgcacggccacctcttgtgtgcaagtggagctgtgctttgcttacaaccagagtgccgggaaccccaactacaggcgaaacatcaccctggcctacactctggaggctgacagggaccgccggccgccccggctccgctttgccggcagtgagtccgctgtcttccacggcttcttctccatgcccgagatgcgctgccagaagctggagctgctcctgatggacaacctccgtgacaaactccgccccatcatcatctccatgaactactctttacctttgcggatgcccgatcgcccccggctggggctgcggtccctggacgcctacccgatcctcaaccaggcacaggctctggagaaccacactgaggtccagttccagaaggagtgcgggcctgacaacaagtgtgagagcaacttgcagatgcgggcagccttcgtgtcagagcagcagcagaagctgagcaggctccagtacagcagagacgtccggaaattgctcctgagcatcaacgtgacgaacacccggacctcggagcgctccggggaggacgcccacgaggcgctgctcaccctggtggtgcctcccgccctgctgctgtcctcagtgcgcccccccggggcctgccaagctaatgagaccatcttttgcgagctggggaaccccttcaaacggaaccagaggatggagctgctcatcgcctttgaggtcatcggggtgaccctgcacacaagggaccttcaggtgcagctgcagctctccacgtcgagtcaccaggacaacctgtggcccatgatcctcactctgctggtggactatacactccagacctcgcttagcatggtaaatcaccggctacaaagcttctttggggggacagtgatgggtgagtctggcatgaaaactgtggaggatgtaggaagccccctcaagtatgaattccaggtgggcccaatgggggaggggctggtgggcctggggaccctggtcctaggtctggagtggccctacgaagtcagcaatggcaagtggctgctgtatcccacggagatcaccgtccatggcaatgggtcctggccctgccgaccacctggagaccttatcaaccctctcaacctcactctttctgaccctggggacaggccatcatccccacagcgcaggcggcgacagctggatccagggggaggccagggccccccacctgtcactctggctgctgccaaaaaagccaagtctgagactgtgctgacctgtgccacagggcgtgcccactgtgtgtggctagagtgccccatccctgatgcccccgttgtcaccaacgtgactgtgaaggcacgagtgtggaacagcaccttcatcgaggattacagagactttgaccgagtccgggtaaatggctgggctaccctattcctccgaaccagcatccccaccatcaacatggagaacaagaccacgtggttctctgtggacattgactcggagctggtggaggagctgccggccgaaatcgagctgtggctggtgctggtggccgtgggtgcagggctgctgctgctggggctgatcatcctcctgctgtggaagtgcggcttcttcaagcgagcccgcactcgcgccctgtatgaagctaagaggcagaaggcggagatgaagagccagccgtcagagacagagaggctgaccgacgactactgagggggcagccccccgcccccggcccacctggtgtgacttctttaagcggacccgctattatcagatcatgcccaagtaccacgcagtgcggatccgggaggaggagcgctacccacctccagggagcaccctgcccaccaagaagcactgggtgaccagctggcagactcgggaccaatactactgacgtcctccctgatcccaccccctcctcccccagtgtcccctttcttcctatttatcataagttatgcctctgacagtccacaggggccaccacctttggctggtagcagcaggctcaggcacatacacctcgtcaagagcatgcacatgctgtctggccctggggatcttcccacaggagggccagcgctgtggaccttacaacgccgagtgcactgcattcctgtgccctagatgcacgtggggcccactgctcgtggactgtgctggtgcatcacggatggtgcatgggctcgccgtgtctcagcctctgccagcgccaaaacaagccaaagagcctcccaccagagccgggaggaaaaggcccctgcaatgtggtgacacctccccctttcacactggatccatcttgagccacagtcactggattgactttgctgtcaaaactactgacagggagcagcccccgggccgctggctggtgggcccccaatgacacccatgccagagaggtggggatcctgcctaaggttgtctacgggggcacttggaggacctggcgtgctcagacccaacagcaaaggaactagaaagaaggacccagaacggcttgctttcctgcatctctgtgaagcctctctccttggccacagactgaactcgcagggaatgcagcaggaaggaacaaagacaggcaaacggcaacgtagcctgggctcactgtgctggggcacggcgggatcctccacagagaggaggggaccaattctggacagacagatgttgggaggatacagaggagatgccacttctcactcaccactaccagccagcctcagaaggccccagagagaccctgcaagaccacggagggagcgacacttgaatgtagaataggcagggggccctgccccaccccatccagccagaccccacgctgaccatgcgtcaggggcctagaggtggagttcttagctatccttggctttcagagccagcctggctctgccccctcccccatgggctgtgtcctaaggcccatttgagaagctgaggctagttccagaaaacctctcctgacccctgcctgttggcaggcccactccccagccccagccccttccatggtactgtagcaggggaattccctccccctccttgtgccttctttgtatataggcttctcacggcgaccaataaacagctcccagtttgt

SEQ ID NO: 126516 - DNA, 3448 bp, Artificial Sequence
  derived and/or modified sequence
tttccccggaaggaaagcgcagcccgggctgggctcgcaaggtggggaggtgcgccccacgcctgatgctctgtgcgctcgccttgatggtggcggccggcggctgcgtcgtctccgccttcaacctggatacccgattcctggtagtgaaggaggccgggaacccgggcagcctcttcggctactcggtcgccctccatcggcagacagagcggcagcagcgctacctgctcctggctggtgccccccgggagctcgctgtgcccgatggctacaccaaccggactggtgctgtgtacctgtgcccactcactgcccacaaggatgactgtgagcggatgaacatcacagtgaaaaatgaccctggccatcacattattgaggacatgtggcttggagtgactgtggccagccagggccctgcaggcagagttctggtctgtgcccaccgctacacccaggtgctgtggtcagggtcagaagaccagcggcgcatggtgggcaagtgctacgtgcgaggcaatgacctagagctggactccagtgatgactggcagacctaccacaacgagatgtgcaatagcaacacagactacctggagacgggcatgtgccagctgggcaccagcggtggcttcacccagaacactgtgtacttcggcgcccccggtgcctacaactggaaaggaaacagctacatgattcagcgcaaggagtgggacttatctgagtatagttacaaggacccagaggaccaaggaaacctctatattgggtacacgatgcaggtaggcagcttcatcctgcaccccaaaaacatcaccattgtgacaggtgccccacggcaccgacatatgggcgcggtgttcttgctgagccaggaggcaggcggagacctgcggaggaggcaggtgctggagggctcgcaggtgggcgcctattttggcagcgccattgccctggcagacctgaacaatgatgggtggcaggacctcctggtgggcgccccctactacttcgagaggaaagaggaagtagggggtgccatctatgtcttcatgaaccaggcgggaacctccttccctgctcacccctcactccttcttcatggccccagtggctctgcctttggtttatctgtggccagcattggtgacatcaaccaggatggatttcaggatattgctgtgggagctccgtttgaaggcttgggcaaagtgtacatctatcacagtagctctaaggggctccttagacagccccagcaggtaatccatggagagaagctgggactgcctgggttggccaccttcggctattccctcagtgggcagatggatgtggatgagaacttctacccagaccttctagtgggaagcctgtcagaccacattgtgctgctgcgggcccggcccgtcatcaacatcgtccacaagaccttggtgcccaggccagctgtgctggaccctgcactttgcacggccacctcttgtgtgcaagtggagctgtgctttgcttacaaccagagtgccgggaaccccaactacaggcgaaacatcaccctggcctacactctggaggctgacagggaccgccggccgccccggctccgctttgccggcagtgagtccgctgtcttccacggcttcttctccatgcccgagatgcgctgccagaagctggagctgctcctgatggacaacctccgtgacaaactccgccccatcatcatctccatgaactactctttacctttgcggatgcccgatcgcccccggctggggctgcggtccctggacgcctacccgatcctcaaccaggcacaggctctggagaaccacactgaggtccagttccagaaggagtgcgggcctgacaacaagtgtgagagcaacttgcagatgcgggcagccttcgtgtcagagcagcagcagaagctgagcaggctccagtacagcagagacgtccggaaattgctcctgagcatcaacgtgacgaacacccggacctcggagcgctccggggaggacgcccacgaggcgctgctcaccctggtggtgcctcccgccctgctgctgtcctcagtgcgcccccccggggcctgccaagctaatgagaccatcttttgcgagctggggaaccccttcaaacggaaccagaggatggagctgctcatcgcctttgaggtcatcggggtgaccctgcacacaagggaccttcaggtgcagctgcagctctccacgtcgagtcaccaggacaacctgtggcccatgatcctcactctgctggtggactatacactccagacctcgcttagcatggtaaatcaccggctacaaagcttctttggggggacagtgatgggtgagtctggcatgaaaactgtggaggatgtaggaagccccctcaagtatgaattccaggtgggcccaatgggggaggggctggtgggcctggggaccctggtcctaggtctggagtggccctacgaagtcagcaatggcaagtggctgctgtatcccacggagatcaccgtccatggcaatgggtcctggccctgccgaccacctggagaccttatcaaccctctcaacctcactctttctgaccctggggacaggccatcatccccacagcgcaggcggcgacagctggatccagggggaggccagggccccccacctgtcactctggctgctgccaaaaaagccaagtctgagactgtgctgacctgtgccacagggcgtgcccactgtgtgtggctagagtgccccatccctgatgcccccgttgtcaccaacgtgactgtgaaggcacgagtgtggaacagcaccttcatcgaggattacagagactttgaccgagtccgggtaaatggctgggctaccctattcctccgaaccagcatccccaccatcaacatggagaacaagaccacgtggttctctgtggacattgactcggagctggtggaggagctgccggccgaaatcgagctgtggctggtgctggtggccgtgggtgcagggctgctgctgctggggctgatcatcctcctgctgtggaagtgcggcttcttcaagcgagcccgcactcgcgccctgtatgaagctaagaggcagaaggcggagatgaagagccagccgtcagagacagagaggctgaccgacgactactgagggggcagccccccgcccccggcccacctggtgtgacttctttaagcggacccgctattatcagatcatgcccaagtaccacgcagtgcggatccgggaggaggagcgctacccacctccagggagcaccctgcccaccaagaagcactgggtgaccagctggcagactcgggaccaatactactgacgtcctccctgatcccaccccctcctcccccagtgtcccctttcttcctatttatcataagttatgcctctgacagtccaca

SEQ ID NO: 126517 - DNA, 1810 bp, Artificial Sequence
  derived and/or modified sequence
ctttccccggaaggaaagcgcagcccgggctgggctcgcaagccatgggccccggccccagccgcgcgccccgcgccccacgcctgatgctctgtgcgctcgccttgatggtggcggccggcggctgcgtcgtctccgccttcaacctggatacccgattcctggtagtgaaggaggccgggaacccgggcagcctcttcggctactcggtcgccctccatcggcagacagagcggcagcagcgctacctgctcctggctggtgccccccgggagctcgctgtgcccgatggctacaccaaccggactggtgctgtgtacctgtgcccactcactgcccacaaggatgactgtgagcggatgaacatcacagtgaaaaatgaccctggccatcacattattgaggacatgtggcttggagtgactgtggccagccagggccctgcaggcagagttctggaaacagctacatgattcagcgcaaggagtgggacttatctgagtatagttacaaggacccagaggaccaaggaaacctctatattgggtacacgatgcaggtaggcagcttcatcctgcaccccaaaaacatcaccattgtgacaggtgccccacggcaccgacatatgggcgcggtgttcttgctgagccaggaggcaggcggagacctgcggaggaggcaggtgctggagggctcgcaggtgggcgcctattttggcagcgccattgccctggcagacctgaacaatgatgggtggcaggacctcctggtgggcgccccctactacttcgagaggaaagaggaagtagggggtgccatctatgtcttcatgaaccaggcgggaacctccttccctgctcacccctcactccttcttcatggccccagtggctctgcctttggtttatctgtggccagcattggtgacatcaaccaggatggatttcaggatattgctgtgggagctccgtttgaaggcttgggcaaagtgtacatctatcacagtagctctaaggggctccttagacagccccagcaggtaatccatggagagaagctgggactgcctgggttggccaccttcggctattccctcagtgggcagatggatgtggatgagaacttctacccagaccttctagtgggaagcctgtcagaccacattgtgctgctgcgggcccggcccgtcatcaacatcgtccacaagaccttggtgcccaggccagctgtgctggaccctgcactttgcacggccacctcttgtgtgcaagtggagctgtgctttgcttacaaccagagtgccgggaaccccaactacaggcgaaacatcagtgagtgctggggtgcagcgtaaaaggggtacgctcccctgtccccttgctgaccaccctgtctacctgtagccctggcctacactctggaggctgacagggaccgccggccgccccggctccgctttgccggcagtgagtccgctgtcttccacggcttcttctccatgcccgagatgcgctgccagaagctggagctgctcctgatggacaacctccgtgacaaactccgccccatcatcatctccatgaactactctttacctttgcggatgcccgatcgcccccggctggggctgcggtccctggacgcctacccgatcctcaaccaggcacaggctctggagaaccacactgaggtccagttccagaaggagtgcgggcctgacaacaagtgtgagagcaacttgcagatgcgggcagccttcgtgtcagagcagcagcagaagctgagcaggctccagtacagcagagacgtc

SEQ ID NO: 126518 - DNA, 3201 bp, Artificial Sequence
  derived and/or modified sequence
atgggccctggccccagccgggccccccgggccccccggctgatgctgtgtgccctggccctgatggtggccgccggcggctgtgtggtgtctgccttcaacctggacacccgcttcctggtggtgaaggaggccggcaaccctggcagcctgtttggctacagcgtggccctgcaccggcagacagagcggcagcagcgctacctgctgctggccggggccccccgggagctggccgtgcctgatggctacaccaacagaactggagctgtgtacctgtgccccctgacagcccacaaggatgactgtgagaggatgaacatcaccgtgaagaatgaccccggccaccacatcatcgaggacatgtggctgggcgtgacagtggccagccagggccctgctggccgggtgctggtgtgtgcccaccgctacacccaggtgctgtggagcggcagcgaggaccagaggaggatggtgggcaaatgttatgtgagaggaaatgacctggagctggacagcagtgatgactggcagacctaccacaatgagatgtgcaacagcaacacagactacctggagaccggcatgtgccagctgggcaccagcggcggcttcacccagaacacagtgtactttggagcccctggggcctacaactggaagggcaacagctacatgatccagaggaaggagtgggacctgtctgagtacagctacaaggaccctgaggaccagggcaacctgtacatcggctacaccatgcaggtgggcagcttcatcctgcaccccaagaacatcaccatcgtgactggagcccccaggcaccgccacatgggcgctgtgttcctgctgagccaggaggccggcggggacctgcggcggcggcaggtgctggagggcagccaggtgggcgcctactttggaagtgccatcgccctggccgacctgaacaatgatggctggcaggacctgctggtgggcgccccctactactttgagaggaaggaggaggtgggcggggccatctacgtgttcatgaaccaggccggcaccagcttccctgcccaccccagcctgctgctgcacggccccagcggcagcgccttcggcctgtctgtggccagcatcggggacatcaaccaggacggcttccaggacattgctgtgggcgccccctttgagggcctgggcaaggtgtacatctaccacagcagcagcaagggcctgctgcggcagccccagcaggtgatccacggggagaagctgggcctgcccggcctggccaccttcggctacagcctgagcggccagatggatgtggatgagaacttctacccagacctgctggtgggcagcctgagtgaccacatcgtgctgctgcgggcccggcctgtgatcaacatcgtgcacaagaccctggtgcccaggcctgctgtgctggaccctgccctgtgcacagccaccagctgtgtgcaggtggagctgtgctttgcctacaaccagagcgctggcaaccccaactacagaagaaacatcaccctggcctacaccctggaggccgaccgggaccggcggcccccccggctgcgctttgctggcagcgagagcgctgtgttccacggcttcttctccatgcctgagatgcgctgccagaagctggagctgctgctgatggacaacctgcgggacaagctgcggcccatcatcatctccatgaactacagcctgcccctgaggatgccagaccggccccggctgggcctgcggagcctggatgcctaccccatcctgaaccaggcccaggccctggagaaccacacagaggtgcagttccagaaggaatgtggccctgacaacaagtgtgagagcaacctgcagatgagagctgcctttgtgtctgagcagcagcagaagctgagccggctgcagtacagcagagatgtgaggaagctgctgctgagcatcaacgtgaccaacaccaggaccagcgagaggtctggagaagatgcccacgaggccctgctgaccctggtggtgcccccagccctgctgctgagctctgtgcggcccccaggggcctgccaggccaatgagaccatcttctgtgagctgggcaaccccttcaagaggaaccagaggatggagctgctgattgcctttgaggtgattggagtgaccctgcacacccgggacctgcaggtgcagctgcagctgagcaccagcagccaccaggacaacctgtggcccatgatcctgaccctgctggtggactacaccctgcagaccagcctgtccatggtgaaccaccggctgcagagcttctttggaggcaccgtgatgggagagagcggcatgaagacagtggaggatgtgggcagccccctgaagtatgagttccaggtgggccccatgggagagggcctggtgggcctgggcaccctggtgctgggcctggagtggccctatgaggtgtccaatggcaagtggctgctgtaccccacagagatcaccgtgcatggaaatggctcctggccctgccggcccccaggggacctgatcaaccccctgaacctgaccctgagtgaccccggggaccggcccagcagcccccagaggagaagacggcagctggaccccggcggcggccagggccccccacctgtgaccctggccgccgccaagaaggccaagtctgagaccgtgctgacctgtgccaccggccgggcccactgtgtgtggctggagtgccccatcccagatgcccctgtggtgaccaacgtgacagtgaaggcccgggtgtggaacagcaccttcatcgaggactacagagactttgacagagtgcgggtgaatggctgggccaccctcttcctgcggaccagcatccccaccatcaacatggagaacaagaccacctggttctctgtggacatcgacagcgagctggtggaggagctgcctgctgagattgagctgtggctggtgctggtggccgtgggcgccggcctgctgctgctgggcctcatcatcctgctgctgtggaagtgtgacttcttcaagaggacccgctactaccagatcatgcccaagtaccacgctgtgcgcatccgggaggaggagcgctacccacctcctggcagcaccctgcccaccaagaagcactgggtgacctcctggcagacccgggaccagtactactag

SEQ ID NO: 126519 - DNA, 3156 bp, Artificial Sequence
  derived and/or modified sequence
atgggccctggccccagccgggccccccgggccccccggctgatgctgtgtgccctggccctgatggtggccgccggcggctgtgtggtgtctgccttcaacctggacacccgcttcctggtggtgaaggaggccggcaaccctggcagcctgtttggctacagcgtggccctgcaccggcagacagagcggcagcagcgctacctgctgctggccggggccccccgggagctggccgtgcctgatggctacaccaacagaactggagctgtgtacctgtgccccctgacagcccacaaggatgactgtgagaggatgaacatcaccgtgaagaatgaccccggccaccacatcatcgaggacatgtggctgggcgtgacagtggccagccagggccctgctggccgggtgctggtgtgtgcccaccgctacacccaggtgctgtggagcggcagcgaggaccagaggaggatggtgggcaaatgttatgtgagaggaaatgacctggagctggacagcagtgatgactggcagacctaccacaatgagatgtgcaacagcaacacagactacctggagaccggcatgtgccagctgggcaccagcggcggcttcacccagaacacagtgtactttggagcccctggggcctacaactggaagggcaacagctacatgatccagaggaaggagtgggacctgtctgagtacagctacaaggaccctgaggaccagggcaacctgtacatcggctacaccatgcaggtgggcagcttcatcctgcaccccaagaacatcaccatcgtgactggagcccccaggcaccgccacatgggcgctgtgttcctgctgagccaggaggccggcggggacctgcggcggcggcaggtgctggagggcagccaggtgggcgcctactttggaagtgccatcgccctggccgacctgaacaatgatggctggcaggacctgctggtgggcgccccctactactttgagaggaaggaggaggtgggcggggccatctacgtgttcatgaaccaggccggcaccagcttccctgcccaccccagcctgctgctgcacggccccagcggcagcgccttcggcctgtctgtggccagcatcggggacatcaaccaggacggcttccaggacattgctgtgggcgccccctttgagggcctgggcaaggtgtacatctaccacagcagcagcaagggcctgctgcggcagccccagcaggtgatccacggggagaagctgggcctgcccggcctggccaccttcggctacagcctgagcggccagatggatgtggatgagaacttctacccagacctgctggtgggcagcctgagtgaccacatcgtgctgctgcgggcccggcctgtgatcaacatcgtgcacaagaccctggtgcccaggcctgctgtgctggaccctgccctgtgcacagccaccagctgtgtgcaggtggagctgtgctttgcctacaaccagagcgctggcaaccccaactacagaagaaacatcaccctggcctacaccctggaggccgaccgggaccggcggcccccccggctgcgctttgctggcagcgagagcgctgtgttccacggcttcttctccatgcctgagatgcgctgccagaagctggagctgctgctgatggacaacctgcgggacaagctgcggcccatcatcatctccatgaactacagcctgcccctgaggatgccagaccggccccggctgggcctgcggagcctggatgcctaccccatcctgaaccaggcccaggccctggagaaccacacagaggtgcagttccagaaggaatgtggccctgacaacaagtgtgagagcaacctgcagatgagagctgcctttgtgtctgagcagcagcagaagctgagccggctgcagtacagcagagatgtgaggaagctgctgctgagcatcaacgtgaccaacaccaggaccagcgagaggtctggagaagatgcccacgaggccctgctgaccctggtggtgcccccagccctgctgctgagctctgtgcggcccccaggggcctgccaggccaatgagaccatcttctgtgagctgggcaaccccttcaagaggaaccagaggatggagctgctgattgcctttgaggtgattggagtgaccctgcacacccgggacctgcaggtgcagctgcagctgagcaccagcagccaccaggacaacctgtggcccatgatcctgaccctgctggtggactacaccctgcagaccagcctgtccatggtgaaccaccggctgcagagcttctttggaggcaccgtgatgggagagagcggcatgaagacagtggaggatgtgggcagccccctgaagtatgagttccaggtgggccccatgggagagggcctggtgggcctgggcaccctggtgctgggcctggagtggccctatgaggtgtccaatggcaagtggctgctgtaccccacagagatcaccgtgcatggaaatggctcctggccctgccggcccccaggggacctgatcaaccccctgaacctgaccctgagtgaccccggggaccggcccagcagcccccagaggagaagacggcagctggaccccggcggcggccagggccccccacctgtgaccctggccgccgccaagaaggccaagtctgagaccgtgctgacctgtgccaccggccgggcccactgtgtgtggctggagtgccccatcccagatgcccctgtggtgaccaacgtgacagtgaaggcccgggtgtggaacagcaccttcatcgaggactacagagactttgacagagtgcgggtgaatggctgggccaccctcttcctgcggaccagcatccccaccatcaacatggagaacaagaccacctggttctctgtggacatcgacagcgagctggtggaggagctgcctgctgagattgagctgtggctggtgctggtggccgtgggcgccggcctgctgctgctgggcctcatcatcctgctgctgtggaagtgtggcttcttcaagagggcccggacccgggccctgtatgaggccaagaggcagaaggccgagatgaagagccagcccagcgagacagagcggctgacagatgactactag

SEQ ID NO: 126520 - DNA, 3114 bp, Artificial Sequence
  derived and/or modified sequence
atgctgtgtgccctggccctgatggtggccgccggcggctgtgtggtgtctgccttcaacctggacacccgcttcctggtggtgaaggaggccggcaaccctggcagcctgtttggctacagcgtggccctgcaccggcagacagagcggcagcagcgctacctgctgctggccggggccccccgggagctggccgtgcctgatggctacaccaacagaactggagctgtgtacctgtgccccctgacagcccacaaggatgactgtgagaggatgaacatcaccgtgaagaatgaccccggccaccacatcatcgaggacatgtggctgggcgtgacagtggccagccagggccctgctggccgggtgctggtgtgtgcccaccgctacacccaggtgctgtggagcggcagcgaggaccagaggaggatggtgggcaaatgttatgtgagaggaaatgacctggagctggacagcagtgatgactggcagacctaccacaatgagatgtgcaacagcaacacagactacctggagaccggcatgtgccagctgggcaccagcggcggcttcacccagaacacagtgtactttggagcccctggggcctacaactggaagggcaacagctacatgatccagaggaaggagtgggacctgtctgagtacagctacaaggaccctgaggaccagggcaacctgtacatcggctacaccatgcaggtgggcagcttcatcctgcaccccaagaacatcaccatcgtgactggagcccccaggcaccgccacatgggcgctgtgttcctgctgagccaggaggccggcggggacctgcggcggcggcaggtgctggagggcagccaggtgggcgcctactttggaagtgccatcgccctggccgacctgaacaatgatggctggcaggacctgctggtgggcgccccctactactttgagaggaaggaggaggtgggcggggccatctacgtgttcatgaaccaggccggcaccagcttccctgcccaccccagcctgctgctgcacggccccagcggcagcgccttcggcctgtctgtggccagcatcggggacatcaaccaggacggcttccaggacattgctgtgggcgccccctttgagggcctgggcaaggtgtacatctaccacagcagcagcaagggcctgctgcggcagccccagcaggtgatccacggggagaagctgggcctgcccggcctggccaccttcggctacagcctgagcggccagatggatgtggatgagaacttctacccagacctgctggtgggcagcctgagtgaccacatcgtgctgctgcgggcccggcctgtgatcaacatcgtgcacaagaccctggtgcccaggcctgctgtgctggaccctgccctgtgcacagccaccagctgtgtgcaggtggagctgtgctttgcctacaaccagagcgctggcaaccccaactacagaagaaacatcaccctggcctacaccctggaggccgaccgggaccggcggcccccccggctgcgctttgctggcagcgagagcgctgtgttccacggcttcttctccatgcctgagatgcgctgccagaagctggagctgctgctgatggacaacctgcgggacaagctgcggcccatcatcatctccatgaactacagcctgcccctgaggatgccagaccggccccggctgggcctgcggagcctggatgcctaccccatcctgaaccaggcccaggccctggagaaccacacagaggtgcagttccagaaggaatgtggccctgacaacaagtgtgagagcaacctgcagatgagagctgcctttgtgtctgagcagcagcagaagctgagccggctgcagtacagcagagatgtgaggaagctgctgctgagcatcaacgtgaccaacaccaggaccagcgagaggtctggagaagatgcccacgaggccctgctgaccctggtggtgcccccagccctgctgctgagctctgtgcggcccccaggggcctgccaggccaatgagaccatcttctgtgagctgggcaaccccttcaagaggaaccagaggatggagctgctgattgcctttgaggtgattggagtgaccctgcacacccgggacctgcaggtgcagctgcagctgagcaccagcagccaccaggacaacctgtggcccatgatcctgaccctgctggtggactacaccctgcagaccagcctgtccatggtgaaccaccggctgcagagcttctttggaggcaccgtgatgggagagagcggcatgaagacagtggaggatgtgggcagccccctgaagtatgagttccaggtgggccccatgggagagggcctggtgggcctgggcaccctggtgctgggcctggagtggccctatgaggtgtccaatggcaagtggctgctgtaccccacagagatcaccgtgcatggaaatggctcctggccctgccggcccccaggggacctgatcaaccccctgaacctgaccctgagtgaccccggggaccggcccagcagcccccagaggagaagacggcagctggaccccggcggcggccagggccccccacctgtgaccctggccgccgccaagaaggccaagtctgagaccgtgctgacctgtgccaccggccgggcccactgtgtgtggctggagtgccccatcccagatgcccctgtggtgaccaacgtgacagtgaaggcccgggtgtggaacagcaccttcatcgaggactacagagactttgacagagtgcgggtgaatggctgggccaccctcttcctgcggaccagcatccccaccatcaacatggagaacaagaccacctggttctctgtggacatcgacagcgagctggtggaggagctgcctgctgagattgagctgtggctggtgctggtggccgtgggcgccggcctgctgctgctgggcctcatcatcctgctgctgtggaagtgtggcttcttcaagagggcccggacccgggccctgtatgaggccaagaggcagaaggccgagatgaagagccagcccagcgagacagagcggctgacagatgactactag

SEQ ID NO: 126521 - DNA, 885 bp, Artificial Sequence
  derived and/or modified sequence
atgatccagaggaaggagtgggacctgtctgagtacagctacaaggaccctgaggaccagggcaacctgtacatcggctacaccatgcaggtgggcagcttcatcctgcaccccaagaacatcaccatcgtgactggagcccccaggcaccgccacatgggcgctgtgttcctgctgagccaggaggccggcggggacctgcggcggcggcaggtgctggagggcagccaggtgggcgcctacttcggcagcgccatcgccctggccgacctgaacaatgatggctggcaggacctgctggtgggcgccccctactactttgagaggaaggaggaggtgggcggggccatctacgtgttcatgaaccaggccggcaccagcttccctgcccaccccagcctgctgctgcacggccccagcggcagcgccttcggcctgtctgtggccagcattggagacatcaaccaggacggcttccaggacattgctgtgggcgccccctttgagggcctgggcaaggtgtacatctaccacagcagcagcaagggcctgctgcggcagccccagcaggtgattcatggagagaagctgggcctgcccggcctggccaccttcggctacagcctgagcggccagatggatgtggatgagaacttctacccagacctgctggtgggcagcctgagtgaccacatcgtgctgctgcgggcccggcctgtgatcaacatcgtgcacaagaccctggtgcccaggcctgctgtgctggaccctgccctgtgcacagccaccagctgtgtgcaggtggagctgtgctttgcctacaaccagagcgctggcaaccccaactacagaagaaacatcagcgagtgctggggcgccgcctag

SEQ ID NO: 126522 - DNA, 3201 bp, Artificial Sequence
  derived and/or modified sequence
atgggccccggccccagccgggccccccgggccccccggctgatgttgtgtgccctagctcttatggtggctgcaggcggatgtgtcgtaagcgcctttaatctggacaccaggttcctggtcgtgaaagaggcagggaatcctgggtcacttttcggatatagtgtggcgttacacaggcagacagagcggcagcaaagatacctactgctcgccggagcccctcgcgagctcgcagtgcctgacggatatactaatcgcacaggcgcagtgtatctttgccctctgaccgcacataaggacgactgcgagcgtatgaacattaccgtgaagaacgaccctggtcaccacatcatcgaggacatgtggctgggagtcaccgtcgcctcacaaggtcccgccgggcgggtgctggtgtgcgcgcatcgctacacccaagtactgtggagcgggtcagaggaccagaggagaatggtcggaaagtgttacgtcagaggaaatgacctggagttagactcatccgacgattggcagacctatcataacgagatgtgtaactctaacacagattacctggagacaggcatgtgccagcttggcacaagcggcggcttcactcagaacacggtgtacttcggcgctcctggcgcttacaattggaaaggcaactcatacatgatacagcgtaaggaatgggacctgtctgagtacagctataaagatcctgaggatcagggcaatctctacattgggtacacgatgcaggtgggaagttttatcctgcaccccaagaatattactatagtcacgggcgctccgcgacacagacacatgggcgccgtttttctgcttagtcaagaagccgggggggacctacggagaaggcaggtcctggagggaagtcaggtcggggcttatttcggcagtgctattgcactggccgacctgaacaacgatggctggcaagatctgctggtgggcgccccgtattatttcgagcgtaaagaggaagtcggtggtgctatatatgtgtttatgaatcaggccggaactagtttccccgctcatccctctttgctactccacggccctagcggcagtgccttcggtctgtcagtggcgtccattggggacatcaaccaggatggcttccaggatattgcggtaggtgctcccttcgaagggctggggaaagtttatatataccacagtagcagcaagggcttgttgcgacaaccacagcaggtaatacatggggagaagctcggcctgcctggcctggctacctttggctattccctgtcaggccagatggatgttgacgagaacttttacccggatctgttggtggggtccctgtccgatcatattgttttgctgagggcgcggcccgttattaatattgttcacaagacactggtgccccgacccgccgtgttggacccagcactgtgtactgccacaagttgcgttcaggtggaactatgcttcgcctacaatcaatccgccggaaatcctaattaccggcgtaacataacccttgcttacacccttgaggccgacagagacagacgcccccccaggctgagattcgccggatctgagtctgcagtttttcatggctttttctccatgcctgagatgcgctgtcagaaactcgagctcctgcttatggataatttacgggacaagttgcgacccataattatctcaatgaactattctttgcctctccgcatgccagacaggcccagactgggcttgcggtcactggatgcttatccgatcctgaatcaggcccaggctctagaaaatcacacagaggtccagttccagaaggagtgcggtccagataataaatgcgaatctaacctgcaaatgcgagccgcctttgttagcgagcagcaacagaaattaagtcgtcttcagtacagtcgcgatgttcgcaaactcttgctatccataaatgttacgaacacacggacgagtgagcggagtggggaggatgcacacgaggccttgttgactctggtggtacctccagccctgctgctgtcttccgtgaggccccctggcgcctgccaagccaatgaaaccatcttctgcgaacttgggaacccgtttaagaggaatcagcgcatggaactcctgattgccttcgaagtgattggcgtcactctgcacacacgtgacctacaagtccagctgcagctttcaaccagcagccaccaggataatctgtggcctatgattctgaccctgctcgttgattatacactgcagacctcactaagcatggtgaatcacaggctgcagtctttcttcggcggcacagttatgggggagagcggcatgaaaacagtggaggatgtcggctcccctctcaagtacgaatttcaagtgggccctatgggagaggggctggtgggcctcggcaccctggttcttggcttggagtggccatacgaggtgagcaacggcaaatggttgctgtatcccacagagatcaccgtgcacgggaatggctcctggccttgcaggcccccgggcgatttgattaacccactgaacctgaccttgtccgatccaggtgatcgtccaagcagcccccagaggcggaggcgccagctggacccgggcggcggccagggcccgccccccgtgaccctggccgccgctaagaaggcgaaaagcgaaacagttctaacatgcgcaacaggccgcgcccactgtgtatggcttgaatgccctataccggacgccccggtggtgacaaatgtaacggttaaggcccgtgtttggaacagcacctttatagaagactacagagacttcgatagggttagggttaatggttgggctacactttttcttcggacgagcatcccaacaattaacatggaaaataaaaccacctggttcagcgtggacatcgacagcgagttagtggaagaattaccagccgagatcgagctgtggctggtgctggtcgccgtgggcgctggcctgttattactgggcctgattattttgctgttatggaaatgtgacttcttcaaaagaactagatattaccaaatcatgccgaagtaccacgcggtcagaattcgtgaggaggagcgctacccaccacctggcagcactctccccaccaagaagcactgggttacttcctggcagacacgcgaccagtattattag

SEQ ID NO: 126523 - DNA, 3156 bp, Artificial Sequence
  derived and/or modified sequence
atgggccccggccccagccgggccccccgggccccccggctgatgctatgcgcactggccttgatggtcgcagctggcggctgcgttgtatctgctttcaatctggatacaagatttctggtggtcaaggaagccggcaacccagggagcctgtttggctattccgtcgcgcttcacaggcagaccgaaaggcagcagcgatacctcctgcttgccggggctcccagggaactggctgtcccggacgggtatacaaaccggacgggcgccgtgtacctctgtccattaactgcacacaaggacgactgcgagagaatgaacattacggtgaagaatgaccctggccatcatataatagaagacatgtggctcggcgtgaccgtggcttcacaaggccctgccggtagggtgttagtctgtgctcacaggtatacccaggtgttatggtcagggagtgaagatcagcgaaggatggtggggaaatgctacgtcagaggcaacgacctagagctggactcctcggacgattggcaaacatatcacaatgagatgtgcaattccaatactgactacctggaaacagggatgtgccagctcggtacttccggaggttttacccagaacactgtgtatttcggcgcccccggggcctataactggaaaggcaacagttacatgatccagagaaaggagtgggatttgtctgagtattcttataaagatcccgaggaccaaggcaacctttatataggctacaccatgcaggtcggaagtttcattctgcaccccaagaacattacaattgtgactggcgctcctcggcatcgtcacatgggggctgtctttcttctttctcaggaagccggcggtgatctgcgccgcaggcaggtgttggagggctcacaggtcggagcctatttcgggtccgcaattgcgttggctgacctgaataacgacggctggcaggacttactcgtaggagccccttattactttgagcgcaaggaggaagtggggggcgctatctatgtctttatgaaccaggccggtactagtttccctgcgcatccctccctgttgttgcatggaccgtccggaagtgcatttgggctgagtgtggcatccataggagatatcaaccaggacggctttcaagatattgcggtcggcgccccctttgaaggattaggcaaagtttacatctaccacagctcctctaagggtctgttgagacagccccagcaggtgatccatggcgaaaagctggggctacctgggttggcgacatttgggtacagtctgtccgggcaaatggatgttgacgaaaacttttacccagatcttttggtcgggtctctgagcgatcacattgtcttgcttagagcccggccggtgatcaatatcgtgcacaagacccttgtacccaggcctgcagtgctagacccagctctctgcaccgctacaagctgcgtccaggtcgagctttgctttgcttacaatcagtccgccggcaatcccaattacagaaggaatatcaccctcgcttacacactggaagcagatcgcgatcggaggccaccgaggttacgattcgcgggttctgagtctgccgtgttccacgggttcttttcaatgcccgagatgcgttgccaaaagctcgagttactgctgatggataatctccgtgacaagcttagacctataattatcagtatgaactactctctgccactgcggatgccggatcgtccaaggctagggctgaggtccctcgacgcttaccccatcttgaatcaggcccaagccctggaaaaccacacagaagtacagtttcagaaagaatgtggtccagacaacaagtgtgagagcaatcttcagatgcgagctgctttcgtgtctgagcaacagcaaaagttaagtcgcttacagtattctagggatgtaaggaagttgctgctgagtattaacgtcacaaatactcgtacaagtgaacggagcggcgaagatgcacatgaggcacttcttactctggtggttcccccagccctgctgctaagttctgtccgacctcctggagcctgccaggctaacgaaaccatattttgcgagctgggaaatcctttcaaaagaaaccaaagaatggagctgttaatcgcgtttgaggtgatcggcgttacccttcacacacgggatttacaggtgcagctgcagctgtcaacctcatctcaccaggataacctgtggcctatgatactgacgctccttgtcgactatacgcttcagaccagcctgagcatggtcaaccaccggttgcagagctttttcggtggtactgtgatgggcgagtcaggtatgaagacagtcgaggacgttgggtcacccttgaagtacgagtttcaggttggaccgatgggcgagggcctcgtcggtttaggcacgcttgtgctaggacttgaatggccatacgaagtgtccaacgggaagtggctgctctatccaacagagataaccgtccacgggaatggcagttggccttgcagaccaccaggggacttaatcaaccctctcaacctcaccctgtcagacccaggggacagaccgtccagcccccagaggaggaggcggcagctggatcccggggggggacaggggcctcctcctgtgaccctcgcggccgcgaaaaaggctaaatccgaaacagtcctgacctgtgccactggtagagcccactgtgtgtggctggagtgcccaatcccagacgcacctgttgttacaaacgtcactgtgaaggctagagtgtggaactcaacatttattgaggattatcgggatttcgatagagtgagagtgaatggctgggccactctctttctgagaacctctatcccgactattaacatggagaataagacaacctggttttcggtagacattgatagtgagttagtcgaagagctgcctgccgaaatagagctgtggcttgtgctggtggctgtgggcgcgggtctgttgctgcttggcttgatcatacttctgctgtggaaatgcggattctttaaacgcgcgcgaacaagagctttatacgaagcgaagcgtcaaaaggccgagatgaagtcgcagccaagcgaaacagaacggttgaccgatgattactag

SEQ ID NO: 126524 - DNA, 3114 bp, Artificial Sequence
  derived and/or modified sequence
atgctgtgcgccctggccctgatggtggccgccggcggctgcgtggtctcggcatttaatttagacacacggtttttagttgtaaaagaagcggggaacccagggagtctgtttggctactctgtggccctccataggcagacggagcggcaacagagatacttgcttttagccggcgcgccccgggagttggccgtccctgatggttataccaatcgcacaggcgctgtgtacctgtgtccccttactgctcacaaggatgactgtgaacgcatgaatattacagtaaagaatgacccagggcaccacataatcgaggacatgtggcttggcgtcaccgtcgcttcccagggccccgctggtcgtgtgctggtgtgcgcccaccggtatacgcaggttctctggtctggatccgaggatcaacgacgcatggtcgggaagtgttacgtgagagggaatgacttggaattggactcctctgatgattggcagacttatcacaacgaaatgtgtaactcaaacacagattacctagaaacaggcatgtgccagttgggtactagtggcgggttcacacagaacactgtctattttggtgcccctggcgcatataactggaaggggaactcatacatgatacaaaggaaggagtgggacctgtctgagtattcctacaaggacccagaagaccaagggaatctttacataggctataccatgcaggttggatcctttattctacaccccaaaaacatcaccatcgtgactggggctccccgccacagacacatgggtgcagtcttcctgcttagccaagaagccggaggcgacctgcgcaggcggcaagttctggagggctcacaagtgggagcctattttgggtccgccatcgctctcgctgatctcaacaacgacggctggcaggatctactggtaggggccccatattacttcgaaaggaaagaagaggtgggcggagcaatttacgtattcatgaatcaagctgggacctctttcccggcgcatccaagcctgttacttcacggtccatctggctccgcattcgggctcagtgtagctagcatcggagacatcaaccaggatggctttcaggatattgctgtgggcgccccatttgaaggcctgggcaaggtgtatatatatcactcctcatcgaagggtctgctgcggcagccccagcaggtaattcacggcgaaaagctaggattgcctggactggctacatttggttattcactctccggtcagatggatgtggacgaaaacttctatccagacttactggtcgggagcctcagtgaccatattgtgctcttaagggcccgcccagtgatcaatatcgttcataaaacgctggtccctcgtccagcagttctcgaccccgctctgtgcaccgccacaagctgcgtccaggtggaactgtgcttcgcatacaatcagtctgctggcaacccgaactacaggagaaatataaccttagcatatacactcgaggctgaccgagataggcggccaccccggctgcgtttcgcagggtccgaaagcgccgtattccacggctttttctccatgccagagatgaggtgtcagaaactggaattattactgatggataacctcagggataagctgcggccgataataattagcatgaattacagcctgccgttacgcatgccagaccgtcccagactgggtctgcggagcttagacgcctatcccatccttaatcaagcacaggccctagaaaaccataccgaggtgcaatttcagaaagagtgtgggccagataataaatgtgagagcaacctgcagatgcgcgccgctttcgtctcagagcagcaacagaagctctcccgactccagtatagccgtgatgtgagaaaactgctgctgtcaattaacgttacgaacacacggacctccgaaaggtccggagaagacgcacacgaagctcttctgaccctggtggtgcctccggcattgctcctgagctccgttcgacctcccggggcttgtcaagcaaacgagacaattttttgtgaactaggcaaccccttcaagcgcaaccaacgcatggagttacttatcgcattcgaagtgattggggttactcttcacacgcgggacctacaggtgcagttgcaactctccacgtccagccaccaagacaatttatggcccatgatactcaccctgctcgtggattatacactgcagaccagcctatcaatggttaaccatcgcttgcaaagctttttcggtgggacagtgatgggcgagtccggtatgaaaactgtggaggatgtggggagccctctgaaatacgaatttcaggtgggacctatgggcgaaggactggtgggtctgggtaccctggtattaggcttggagtggccatacgaggtgagtaatggcaagtggcttctgtacccaactgagataaccgtgcatggcaacggatcatggccctgtaggccccctggtgacctgataaacccactgaaccttacactctcggacccaggagacagaccgtcctccccgcagaggcgaagacgacaacttgatcccggggggggccaaggacccccccctgttaccttggcagccgctaaaaaagcaaagtcagagaccgtgttgacgtgcgcaaccgggcgcgcccattgtgtgtggcttgagtgcccaattcccgatgcacccgtcgtgaccaacgtgaccgtaaaggctagagtctggaacagcaccttcatcgaggattacagagactttgacagggtgcgggtgaatggatgggccaccttgtttctccgaacaagtatcccaaccatcaatatggagaataaaacaacatggtttagtgtcgatattgattcggagctcgtggaggaacttcctgctgagattgaactctggctggttctggtcgcagtcggagctgggctgcttctgctgggcctgattatattgctgttatggaagtgtggattctttaagcgggcccgaacccgggccctctacgaagcaaaacggcagaaggccgagatgaagagccagccaagcgagaccgaacggctcaccgacgactactag

SEQ ID NO: 126525 - DNA, 885 bp, Artificial Sequence
  derived and/or modified sequence
atgatccagcggaaggagtgggacctgagcgagtacagctacaaggacccagaagaccagggaaatctatatatcggttatactatgcaggtgggatccttcatcctgcatcctaagaatattactattgtcaccggtgcaccgaggcatcgccacatgggcgcggtgtttctgttgagtcaagaggccggaggcgatctcagacgccgccaagtgttggagggtagccaagtgggcgcctattttggatctgctatcgccttagctgatctcaataacgacgggtggcaggacctcctggtgggcgcaccttactattttgagcgaaaggaggaggtcgggggcgccatctacgtattcatgaatcaggccgggaccagttttcccgcccacccatcactgctacttcacggcccatccggatccgccttcggacttagcgtggccagcattggagatattaatcaggacggcttccaggatatcgcagtaggggctcctttcgaaggcttgggcaaggtgtacatatatcacagcagctccaagggtcttctacgccagccccagcaggtgatccacggagagaaattagggttgcccggactcgcaacttttggatacagtctgagcggacagatggacgtagacgagaatttctatcccgatttgctggtcggtagcctgtccgaccacatagtgctgttaagggctcgaccagtaattaacatcgtgcacaagacgctggtgccacgccctgcggttctggaccccgctttatgtacggctacatcctgtgttcaagttgagctttgcttcgcctataaccaatccgctggaaaccccaattatcgaagaaacatttcggagtgctggggtgcggcttag

SEQ ID NO: 126526 - DNA, 3201 bp, Artificial Sequence
  derived and/or modified sequence
atggggcctggacctagtcgagcccctagggcacctaggctgatgctgtgtgccctcgctctaatggtggcggctgggggttgtgtggtcagtgcctttaatttggacacccgttttttggtagtgaaagaggccggaaatcctgggagtctgtttggttattccgtcgcgctacataggcagaccgagcgccaacaacgctacctcttattggctggagctcccagagagctggctgttcctgacgggtacacgaatcggaccggggctgtttacctgtgtcccttgaccgcgcacaaggacgactgcgagcggatgaatattaccgtgaaaaacgatccaggacaccacatcattgaggatatgtggctgggagtaactgtggcgtcccaaggcccagctggcagggtgcttgtgtgcgcccacagatacacccaggtgctgtggagtggttccgaggatcagcgacgcatggtaggaaagtgctacgttcggggtaatgatctggagctggattccagtgacgactggcagacataccataatgagatgtgcaattctaacacggactacctggaaactggaatgtgccagctgggaacaagtgggggattcactcaaaataccgtgtactttggggctcccggagcatataactggaaggggaactcgtacatgattcagaggaaggaatgggatctctctgaatactcttataaggatccggaagatcaaggcaatctctatattggctacactatgcaagtcggctctttcattttacaccctaaaaatattaccatagtgaccggagcgccacgccacagacatatgggagctgtcttcctgttatcccaggaggccggaggcgatctgcgtcgacggcaggtgttagagggcagtcaagtcggcgcttacttcggatccgctattgccctggccgacttgaacaacgatgggtggcaggacctactggtgggggctccctactattttgaacggaaagaagaggtgggcggagctatctatgtgttcatgaatcaggccggtacctcattcccggcacacccctctttgctgctgcatggccctagcggtagcgcgtttgggctttccgtagcctcgatcggagacatcaaccaggatgggtttcaagacatcgccgtgggcgctccgttcgagggactgggaaaagtctacatttatcattcctccagcaaaggacttctgagacaacctcaacaggtgatccatggcgaaaaacttggcctgcccggattagccacgttcggatactctctcagcgggcagatggatgtagatgaaaacttttacccagaccttctggttggcagcctgtccgaccatatcgtcctgctacgggctagacccgtgatcaatatagtgcacaagaccctggtcccaagaccagcagtgctggatcccgcattatgcactgcaaccagctgtgtgcaggtcgagctgtgcttcgcttataatcagtctgcaggcaaccccaactatagaagaaacattacactcgcctatacgctagaagccgatcgcgaccgtcgtccccctcgcctccggtttgccggttctgagagtgctgtgttccatggctttttctccatgccggaaatgcggtgtcagaagctagagctgctgctcatggacaatctacgggataaactgcgacccattattatctcaatgaattactccttgccactgcgcatgccggaccgaccccgtctgggactgagaagtttggacgcttacccaatccttaaccaggctcaggccctcgaaaatcatactgaggtccaatttcaaaaggaatgtgggcctgataacaaatgtgagtccaatctgcaaatgagggcagcgttcgtttctgagcagcaacagaaactgtctcgattgcagtattcccgcgacgtgcgcaaactgctgttaagtattaacgtaactaatacgcggacctcggaacgtagtggcgaggatgcccacgaggccctcttgactctggtcgtacctccggcactgcttctatcctcagtgcggccacccggtgcatgtcaggccaacgagacaattttttgcgagttgggaaatccttttaagcgcaaccaacgtatggagttactgattgccttcgaagtgatcggagtcacccttcacacgagagacctccaggtgcagctgcagctttcgacaagctcccatcaggataatttgtggccaatgatcctgaccctgttggttgattataccctccagactagcttgagcatggttaaccatcggctccaaagctttttcggaggcacggttatgggggagagcggcatgaagactgtcgaggacgtcggaagccccctgaagtacgaattccaggtggggccaatgggcgaaggattagtgggcctgggaaccttggtacttggactggaatggccctacgaggtttctaatggtaaatggctcttgtacccaacagagatcaccgtccacggtaatgggagctggccctgcaggccccctggcgacttgatcaaccccctcaatctgaccctgtcagatcctggcgaccgtccttcatccccacagagaagaagacgacaactcgacccaggcggaggacaggggccaccacctgtgactctcgccgcagctaaaaaggccaagtccgaaaccgtcctgacgtgcgctactgggcgtgctcattgcgtgtggcttgaatgtccaatacccgacgcacctgttgtgacaaatgtgacagtaaaggcacgggtgtggaactcaacattcatcgaggactatagggacttcgatcgtgtgcgcgttaatggatgggcgaccctcttcctcaggacatcgatcccgaccataaacatggaaaataagacaacctggtttagtgtggacatagactcagaactcgtggaggaacttccggctgaaatagagttatggcttgtgttagtggccgtgggcgcagggctgctgttgctcgggttgattatcctgttactttggaagtgcgatttcttcaagaggacacgatactaccagatcatgcctaagtaccacgcagttagaatacgcgaggaagagaggtacccgccacccggatcaactctgcctaccaagaagcactgggtgacaagctggcaaacccgggaccagtattattag

SEQ ID NO: 126527 - DNA, 3156 bp, Artificial Sequence
  derived and/or modified sequence
atgggccctggcccaagccgggcaccacgggcacctagactcatgctctgtgccctggctctgatggtcgctgcaggtggctgcgtggtttctgcctttaatctagatacacgattcctggtggtcaaagaagccggaaatcccggatctcttttcgggtacagcgtcgccctgcaccgccagacagagcggcagcaaagatacctgttattagcaggcgctccaagggagctggcagtgccagatgggtacacaaataggaccggagctgtttatctctgtcctctgacagcgcataaagacgactgcgaacgaatgaatattactgttaaaaatgatccaggccatcacatcattgaggatatgtggttgggagtgacggtggcctctcagggaccagccggacgcgtcctggtgtgtgctcaccggtatacccaggtgctgtggagcggcagtgaggaccagcggagaatggttggcaagtgctacgtgagaggcaatgacctggagctggactcttccgacgattggcagacttatcacaacgagatgtgtaatagtaatacagactacttggaaaccgggatgtgccaactcggtacaagcgggggattcactcaaaataccgtgtactttggtgcccctggggcatataactggaagggcaactcatacatgattcagcgcaaagagtgggacctgagcgagtacagctacaaggatcctgaggatcaaggtaacttgtatatcggttacacaatgcaagtgggttcattcattctgcaccctaagaacattactatcgtgacgggcgcacccagacatcgtcatatgggagcagtctttctcttgtcacaagaagcaggcggagacctgcgcagaagacaagttctcgaaggctcccaggttggcgcatacttcgggtctgcaatagcattggccgatctgaataacgacgggtggcaggacctgctggtgggagccccatactatttcgaacgaaaagaggaagtcggtggtgccatctacgtgttcatgaaccaagccggaacttccttccccgcacatcctagcctgctgctgcatggcccatctggaagcgccttcggcctgagcgtggcctctataggggatattaaccaagacggttttcaggatatcgccgtcggcgctccattcgaaggactaggaaaagtgtacatttaccatagtagctctaaagggctgcttaggcagccacagcaagttattcacggcgagaagctcggccttcctggactcgctactttcgggtattctctcagcggccagatggatgttgacgagaatttttaccctgacctgctggtgggtagtctgtccgatcacattgttctgctccgtgccaggccagtgattaatatagtccacaaaactcttgtgccccgtcccgctgtactcgaccccgctctctgtacggccaccagttgcgtgcaggttgaactctgctttgcatacaaccagagcgcaggaaatcctaactaccgaaggaatatcaccctcgcgtacacgctggaggcagatcgggatcgcagacctccgcgtctcagattcgcgggatccgagagcgccgtatttcacgggttcttttctatgcctgaaatgagatgtcagaaactagagctcctactgatggataatctcagggacaagcttagacctatcattatttccatgaactattcgctgcctctgagaatgcctgatcgccctcgtttgggattgcgctccctcgacgcttaccccatccttaaccaggcccaagctctcgagaaccataccgaggtgcagttccagaaggagtgcgggccagataacaaatgcgagagtaatctgcagatgagggccgcttttgtgtccgagcagcagcagaaactctcgcgcctccagtacagtcgtgacgtgagaaagttgctgctgagtatcaacgtgacaaacacacgcacgtcagagcggtctggcgaggacgcgcacgaagcactcctgaccctggttgtaccccctgccttgcttctatcgtcagtcaggccacccggagcttgtcaggctaatgagaccatattctgcgagttgggaaacccctttaaacgtaaccagcgaatggaactgcttatcgcctttgaagtcatcggagttaccctgcatactcgcgacctccaagtacagttacagcttagtacctcaagtcaccaagataacttgtggcccatgatcctgaccttactggtcgattacacattgcagactagtctcagcatggtcaaccaccgcttgcagtccttctttggcggaactgtaatgggcgagagcgggatgaagactgttgaggacgtcggcagcccattgaagtatgagttccaggtggggcctatgggggagggactggttggcctcgggaccttggtcctcggtctggagtggccctacgaggtgagcaatgggaaatggctgttgtaccctacagaaattacagtgcacggcaatggcagctggccatgtcgacccccaggggacctcattaaccctttgaacctgactttatccgatccgggagatagaccgtcatcaccccagcgcagaaggaggcagcttgatcctggtggcggtcaagggcctcctcccgtgaccctcgccgctgcgaaaaaagcaaaatctgaaactgtcctgacatgcgcgacaggacgtgctcattgcgtgtggctggagtgtccgattcctgacgcccctgtcgtgaccaacgtcactgtgaaagccagggtgtggaatagcacatttatcgaagactacagggattttgatagggtccgggtgaatggttgggcaacactgtttttacgcacatccatcccaaccatcaacatggagaataaaacaacctggttttctgtggacatcgactcagaacttgtggaggagctcccggcagagatcgaactgtggctcgtcctagtggccgtcggcgctgggctgctcctcctaggcctcatcatcctgctgctctggaagtgcggcttcttcaagagggctcggacgcgggcattgtacgaggctaaaaggcagaaggcggagatgaagtcacaaccctccgagactgaacgtctcactgacgactactag

SEQ ID NO: 126528 - DNA, 3114 bp, Artificial Sequence
  derived and/or modified sequence
atgctctgtgccctcgcactaatggtggccgctggcggttgcgtcgtgtcggcttttaacctggatactcgttttctagttgtcaaggaagccggaaatccaggtagcctgttcggttattccgttgctcttcacagacagacagaacgccagcagagatacttgctgctcgccggagctcctagagagctggcagtaccagacggatatacaaatcgcaccggagccgtgtacctatgcccactaaccgcacacaaagatgactgcgagcggatgaacattacagtgaaaaatgatcctggtcatcatatcatcgaagacatgtggttgggggtgaccgtcgcgagccagggacccgcagggagggtgctggtttgtgcccatcggtacacacaggtcctttggagcgggagtgaagaccaacgcaggatggtgggtaagtgctacgtacggggtaacgacctggagctggactcgtccgatgactggcagacctaccacaatgagatgtgcaactcgaataccgactaccttgagactggtatgtgtcagctgggcacctccggaggctttactcagaatacagtctactttggtgctcctggcgcttataattggaaaggaaacagctatatgatccagcggaaagagtgggacttgtctgaatactcttataaggaccctgaggatcagggaaatttatatatagggtatactatgcaagttggatccttcatactccatcctaagaatattactatcgttaccggcgctcccaggcataggcatatgggggctgtcttcctgctgagccaggaagctggcggtgacttaaggagacgccaagtcctagaggggtcccaggtaggggcttacttcggcagtgctatagcgctggccgacctgaataacgacgggtggcaggatctattagttggtgccccttactactttgaaagaaaagaggaggtcggcggagccatttatgttttcatgaaccaggccggaacaagctttcccgctcatccttcactcctgcttcacgggccatccgggagcgccttcgggttgtccgttgcaagcatcggtgacattaaccaggatggattccaggatattgccgtgggggcacctttcgaagggctgggcaaggtgtatatctaccacagtagtagcaaaggattgctccggcagccacagcaagtgatccacggagaaaaactgggccttccaggactggcaaccttcggttactccctgtctggccaaatggacgtggacgaaaacttttatcccgacctccttgtagggtccctatctgatcatatcgtgctccttagggccaggcctgttattaacatcgtgcacaagacactggtgccaagaccggctgtgttagacccagccctttgtacagccacatcctgtgtgcaagtggaactgtgctttgcctacaatcagtccgcaggtaatcccaattaccgcagaaacatcactcttgcttacacgctagaggccgacagggacagaagacctcccaggttgagattcgctggaagcgaaagcgctgtatttcatggctttttctccatgcctgagatgaggtgccagaagctagagctcctactaatggataaccttagagacaaactgcgccctattataattagtatgaactactccctcccactccgaatgccagatcgacccaggctcgggctgaggagcctcgatgcgtacccaatactaaatcaggcccaggccctggagaaccacaccgaagtccagtttcagaaagagtgcggcccagataataaatgcgagtctaacctccagatgcgcgctgcgtttgtctccgaacagcagcagaaactgtcccgtctccaatactcacgagatgtacggaagctgctgctctctatcaatgtgactaatactagaacctctgaacgcagcggagaggacgcacacgaggcactcctgaccctagtcgttcctcctgctctgctgctttcctccgttcgccctccaggcgcatgtcaggcaaatgaaacgatcttctgcgaattggggaatccatttaaacggaaccagcgtatggagcttctgatcgcttttgaagtcataggcgtgacactccacaccagggatctgcaggtacagctccagctctccaccagctcccatcaggacaatctgtggccaatgatcctaacactgttagtggactacacactacagaccagcctgagcatggtgaaccaccgccttcaatctttttttgggggtacagtcatgggggaaagtggtatgaaaaccgttgaggatgtgggcagcccacttaagtacgagttccaggtgggacccatgggtgaaggccttgtgggcctcggaactctcgtccttggtttagaatggccgtatgaagtcagtaacggaaagtggctgctgtatcccacagagatcactgtacacggaaacggaagctggccttgtagaccaccaggagatctgataaaccctctcaaccttaccctgtcagacccaggcgatcggccttcttcaccacagcgtaggcggcgacagctcgatccagggggaggacaggggcctccccctgttactctggctgccgcaaagaaagctaaatcagagactgttctgacatgcgctactgggagggcacactgcgtgtggctcgaatgtcccatccccgacgcccctgtagtgaccaatgtgacagtcaaagctcgtgtgtggaactccaccttcattgaggactatcgtgactttgatagagtgagggtcaacggttgggctacccttttccttcggacgtctatccccactattaatatggagaataaaacgacttggttcagtgtcgatatagacagcgaactggtggaagaactaccagcggaaatcgagctctggcttgtactggtggctgttggagccggattacttctcctcggtctcataattctccttctctggaagtgcggcttctttaaaagggccaggacaagagccctgtacgaggccaagcggcagaaggccgagatgaagagccaacccagcgagacagagcgcctgacggatgactactag

SEQ ID NO: 126529 - DNA, 885 bp, Artificial Sequence
  derived and/or modified sequence
atgatacagaggaaggaatgggacttatcggagtattcgtataaagatcccgaggaccaggggaacctctacatcggttacactatgcaagttggctcgttcatccttcacccaaagaatataacgatcgtgacaggagctcccagacatcggcatatgggcgcagtgttcctactgtctcaggaagcagggggagacctcagacggcgacaagtattggagggctcccaggtcggggcttattttggctccgccatcgctttggctgaccttaataatgatggctggcaggatctgcttgtgggcgctccttactactttgaacgaaaggaggaagtcggaggcgcaatctatgtgttcatgaatcaggccggaactagctttccggcacaccccagccttctgctgcacggtcctagcgggtctgcttttggtctgtccgtggcatccatcggggacatcaatcaggacgggtttcaggatattgcggtgggtgccccttttgagggactggggaaagtctacatctatcactccagctccaagggtcttttaaggcaacctcaacaggtgatacacggcgaaaaactcggactcccaggactggcaacatttggctattcactcagtggacagatggacgttgatgagaatttctaccctgacctgctagtgggaagtctcagcgatcacattgtcctcctgagagcaagacccgtgatcaatatagtccacaaaacattagtccctcgccctgcggtactggatcccgctctgtgcactgccacttcctgcgtgcaggtggagctctgcttcgcctacaaccagtccgccggtaatccaaattaccgaagaaatatttcagagtgttggggggctgcgtag

SEQ ID NO: 126530 - DNA, 3201 bp, Artificial Sequence
  derived and/or modified sequence
atgggccccggccctagtcgtgccccacgggcccccaggctgatgctgtgtgcacttgccctaatggtcgccgcaggaggttgtgtcgtgagcgccttcaacctggacacaagattcctcgtggtgaaggaagccggaaatcctgggtctctgttcggttacagcgtggccctccacagacagacggagcgacaacagcggtatttgctcctcgccggggcgccacgcgagcttgctgtgcccgatgggtacaccaatcgaacaggagctgtttacttatgccctctgacagcgcacaaagacgactgtgaaaggatgaacattaccgttaagaacgacccaggccaccacatcatagaggacatgtggctgggcgttactgtggcttcccagggacctgccgggcgagtgttagtttgtgcacatcggtacactcaggtgctgtggagcggatctgaggaccagaggcgaatggtggggaaatgttacgtgcgtgggaatgatctagagttggatagcagtgatgattggcagacctaccacaatgagatgtgcaatagtaatacagactacctagagaccgggatgtgccagctcggtacttcaggggggtttacacaaaacacggtctactttggggccccgggcgcgtacaattggaaaggtaattcctacatgattcaacggaaagagtgggacctgagtgagtatagctataaggatccagaggaccaagggaacctgtacattggatatacaatgcaggttggttcattcatactacatcccaagaatataacgatcgttaccggtgcacctcgacaccgtcatatgggtgctgtgtttctactgtcgcaggaagctggaggtgacctccggcgacggcaggtactggaggggtcccaggtgggggcctatttcgggtcagctatcgcccttgccgatttaaataacgacggatggcaggatctgcttgtgggagccccatactacttcgaacggaaggaggaagtcggcggcgctatctacgtgttcatgaaccaggcaggcacaagttttccagcccacccctcgctgctgctgcacggaccaagcgggtccgcgttcggattaagcgtggcctccataggtgacattaatcaagatggcttccaagatatcgccgtcggggccccctttgagggcctgggcaaagtctacatctaccacagctcgagcaagggtctcttgcggcaaccacaacaggtaatacacggagagaaactgggattgcccgggctcgccactttcggatacagtttatccgggcagatggacgttgatgagaacttctacccagatctactggtgggttctctgtccgaccatatcgtcctgctgagggcaagacccgtcattaatatagtccataaaactctggtgccccggcctgcagtgctagatcctgctctctgtaccgccacctcatgtgtgcaggtggaattgtgcttcgcctacaaccagtccgcagggaatcctaattatagacggaatatcacattggcctatacccttgaggccgatagagacaggcgaccaccgcgactccgcttcgccggctcagaatcagccgtctttcacggattcttctccatgcctgaaatgcgctgtcagaagctggaacttctgctcatggacaacctacgtgacaagctgagacccataattatatcgatgaattattctcttcctctcaggatgccggaccgtccacggttagggcttagaagcctggacgcctatcccatcctcaaccaagcccaagccctcgaaaatcataccgaagtgcagttccagaaggagtgcggtccagataacaagtgtgaatcaaacttacagatgagggcggcatttgtctccgagcaacagcagaaactgagcagacttcaatacagccgcgacgtgcgcaagctgcttcttagcataaacgtgaccaatacccgcacttccgagcgttctggcgaggatgcccatgaggcgctcctgacactggtcgttccccctgccctacttctgtccagcgtgcgtcccccgggtgcatgtcaggctaacgagaccatattctgtgaactgggcaaccccttcaagcgcaatcagagaatggaactcctaatcgcatttgaagtgataggggtcaccttacacacacgagatctgcaggtccagttgcagctaagtacctcttcacaccaagataatctctggcctatgatcctgacactcttagtcgactataccctccagaccagcttgagcatggtgaaccatagacttcagagtttttttggcggcaccgtcatgggcgaaagcggtatgaagactgtggaggatgtcggcagtcctctcaaatacgagtttcaggtaggacccatgggtgagggattggttggtctcggcaccctcgtgctcgggcttgagtggccctatgaagtgtcaaatggcaagtggttgctgtatcccaccgaaataacagttcacggcaatggatcatggccctgcaggccccccggagacctcatcaaccctctgaatttaaccctgagcgacccaggggaccggccatcttccccacagcgccggcgcaggcaactggatcccgggggggggcagggaccaccacccgtgaccttagccgccgctaaaaaagcgaaaagtgaaaccgttttgacatgtgctactggaagggctcactgcgtttggcttgaatgcccaatccctgatgcccctgttgtgacaaacgttacagtgaaagctagggtgtggaattccacttttattgaggattatcgagatttcgaccgcgtgcgagttaacggatgggctaccctcttcctccgaacaagcatcccaacgattaatatggagaacaagacaacatggtttagcgttgatattgattctgagctggtggaggaattgccggctgagattgaactgtggttagtacttgtggccgtcggagcgggtctgctactattgggacttatcatcttattgctttggaaatgcgacttctttaagcgcacacgctactatcagattatgccaaagtatcatgctgttcgcattcgagaagaagagaggtatccaccccctggatccacactgcccacaaagaaacattgggtgacgtcctggcagactcgggaccagtactactag

SEQ ID NO: 126531 - DNA, 3201 bp, Artificial Sequence
  derived and/or modified sequence
atgggacccggaccttctagagctccccgggcccctcgtctcatgctgtgcgcgttggcgctgatggtcgctgccggaggatgcgtggtctccgcttttaacctggatactcgtttccttgttgtcaaagaagcaggaaaccccggatcattgttcgggtactccgttgcacttcaccggcaaacagaacgacagcaaagatatttgctgctggctggggcaccacgtgagctggcggtccccgatggttatacaaataggactggagctgtctacctatgccccttgacagcccacaaagatgactgcgagcgaatgaacattacagtgaaaaacgatcccggacaccacattattgaagatatgtggctgggcgtgacagtggcatcgcaagggccggctgggcgagtgctggtgtgcgcacacagatatacacaagttctctggtcgggatctgaggaccagcggaggatggtgggaaaatgttatgttcgcggcaatgatctcgaacttgacagttccgacgattggcaaacttatcacaacgaaatgtgtaattccaataccgattacttagagacagggatgtgccaactggggacctctggcgggttcacacagaacacggtttattttggtgctccgggagcatataactggaaggggaactcctatatgattcagcgcaaggagtgggacctgtctgaatattcttataaggatccagaggaccaaggaaatctatacatcggatatacaatgcaagtggggagcttcatccttcacccaaagaacatcacgatagtcacaggcgctccaagacacagacacatgggtgcagttttcctcttgtcccaggaggccgggggcgatctccgacgacgacaggtgctggaaggtagtcaagtaggtgcttattttggatccgcaatcgctctagcagatttgaataatgacgggtggcaggacctgttggtgggtgccccatattacttcgaacgcaaagaggaggttggcggcgctatttatgtatttatgaaccaggcagggacaagcttccccgctcatcccagtctacttctgcacgggccctctggttctgcgtttggactcagcgtcgccagtattggtgatattaatcaggacggatttcaggatattgccgtaggcgcacctttcgagggattggggaaggtttacatctatcattcttcttctaagggacttttacgccagccccaacaagtcatccatggtgaaaagctggggctccccggtctggctactttcggatattcactgagtgggcaaatggacgtcgacgaaaatttctatcctgatctgttggttggtagcctgtctgaccatatcgttctgttaagggccagacctgtaattaatatcgtgcataaaactctggtaccaagaccggcagtgttagaccccgccttgtgcacggcgacttcctgcgtgcaggtagaactgtgtttcgcctacaaccagtctgctggaaacccgaattataggaggaacataactctcgcttatacgttggaagcagatcgtgaccgccgtccgccccggctacgattcgctggctccgagtctgctgttttccacggcttcttttcaatgccagaaatgagatgccagaagctcgaactcctgctgatggacaacctgcgggacaagctgcggccaattattatctccatgaactacagtctaccattacgaatgcctgacagacctagactgggcctgcgtagtctcgacgcgtaccccatattgaaccaagcccaggccctggaaaaccacacagaagtacagttccagaaagagtgtggccccgacaacaaatgtgaatcaaacttgcaaatgagagccgcctttgtatcagagcagcagcaaaagctcagtaggctgcagtactccagagatgtaagaaagttacttctatccatcaatgtaacaaatacccgaaccagcgagaggtctggcgaggacgcccatgaggccctgctcaccctggtagttccccccgcgttgcttttaagtagcgtcagacctcctggtgcatgccaagccaatgagaccatcttttgcgagctcggaaatccatttaaaaggaatcagcgaatggaactgttgattgcgttcgaagtgatcggagttaccctgcacactagagatctccaagttcagctgcaactatccacgagttctcaccaggacaacctgtggcctatgatcctcacacttctcgtggattacaccctgcagacttccctaagtatggttaatcaccggctccagtcctttttcggaggaacagttatgggtgaatctggaatgaaaactgtcgaagacgtgggatcacctttaaagtacgaatttcaggtgggaccgatgggcgaagggctcgtgggattgggcactttagttctcggacttgaatggccttatgaagtgtcgaatggaaaatggcttctatatcccaccgaaatcacagtacacggaaatgggtcctggccatgcaggcctcccggagatctgattaaccccctgaatctcacattaagcgatcctggcgacagacctagctcaccacagcggagacggaggcagctcgatccgggcggcggtcagggacctcctccagtcacgctggcagccgcgaaaaaagccaaatccgaaaccgttttgacatgtgctactggaagggctcactgcgtttggcttgaatgcccaatccctgatgcccctgttgtgacaaacgttacagtgaaagctagggtgtggaattccacttttattgaggattatcgagatttcgaccgcgtgcgagttaacggatgggctaccctcttcctccgaacaagcatcccaacgattaatatggagaacaagacaacatggtttagcgttgatattgattctgagctggtggaggaattgccggctgagattgaactgtggttagtacttgtggccgtcggagccgggcttttactattgggacttattattctccttttgtggaaatgcgatttctttaaacgaactcggtattaccagattatgcctaaatatcacgccgtcagaatacgcgaagaggaaagatacccgccacctggttccaccttacccaccaagaagcactgggtgacgtcctggcagactagagatcagtattattag

SEQ ID NO: 126532 - DNA, 3201 bp, Artificial Sequence
  derived and/or modified sequence
atgggccccggccccagcagagcccccagagcccccagactgatgctgtgcgccctggccctgatggtggccgccggcggctgcgtggtgagcgccttcaacctggacaccagattcctggtggtgaaggaggccggcaaccccggcagcctgttcggctacagcgtggccctgcacagacagaccgagagacagcagagatacctgctgctggccggcgcccccagagagctggccgtgcccgacggctacaccaacagaaccggcgccgtgtacctgtgccccctgaccgcccacaaggacgactgcgagagaatgaacatcaccgtgaagaacgaccccggccaccacatcatcgaggacatgtggctgggcgtgaccgtggccagccagggccccgccggcagagtgctggtgtgcgcccacagatacacccaggtgctgtggagcggcagcgaggaccagagaagaatggtgggcaagtgctacgtgagaggcaacgacctggagctggacagcagcgacgactggcagacctaccacaacgagatgtgcaacagcaacaccgactacctggagaccggcatgtgccagctgggcaccagcggcggcttcacccagaacaccgtgtacttcggcgcccccggcgcctacaactggaagggcaacagctacatgatccagagaaaggagtgggacctgagcgagtacagctacaaggaccccgaggaccagggcaacctgtacatcggctacaccatgcaggtgggcagcttcatcctgcaccccaagaacatcaccatcgtgaccggcgcccccagacacagacacatgggcgccgtgttcctgctgagccaggaggccggcggcgacctgagaagaagacaggtgctggagggcagccaggtgggcgcctacttcggcagcgccatcgccctggccgacctgaacaacgacggctggcaggacctgctggtgggcgccccctactacttcgagagaaaggaggaggtgggcggcgccatctacgtgttcatgaaccaggccggcaccagcttccccgcccaccccagcctgctgctgcacggccccagcggcagcgccttcggcctgagcgtggccagcatcggcgacatcaaccaggacggcttccaggacatcgccgtgggcgcccccttcgagggcctgggcaaggtgtacatctaccacagcagcagcaagggcctgctgagacagccccagcaggtgatccacggcgagaagctgggcctgcccggcctggccaccttcggctacagcctgagcggccagatggacgtggacgagaacttctaccccgacctgctggtgggcagcctgagcgaccacatcgtgctgctgagagccagacccgtgatcaacatcgtgcacaagaccctggtgcccagacccgccgtgctggaccccgccctgtgcaccgccaccagctgcgtgcaggtggagctgtgcttcgcctacaaccagagcgccggcaaccccaactacagaagaaacatcaccctggcctacaccctggaggccgacagagacagaagaccccccagactgagattcgccggcagcgagagcgccgtgttccacggcttcttcagcatgcccgagatgagatgccagaagctggagctgctgctgatggacaacctgagagacaagctgagacccatcatcatcagcatgaactacagcctgcccctgagaatgcccgacagacccagactgggcctgagaagcctggacgcctaccccatcctgaaccaggcccaggccctggagaaccacaccgaggtgcagttccagaaggagtgcggccccgacaacaagtgcgagagcaacctgcagatgagagccgccttcgtgagcgagcagcagcagaagctgagcagactgcagtacagcagagacgtgagaaagctgctgctgagcatcaacgtgaccaacaccagaaccagcgagagaagcggcgaggacgcccacgaggccctgctgaccctggtggtgccccccgccctgctgctgagcagcgtgagaccccccggcgcctgccaggccaacgagaccatcttctgcgagctgggcaaccccttcaagagaaaccagagaatggagctgctgatcgccttcgaggtgatcggcgtgaccctgcacaccagagacctgcaggtgcagctgcagctgagcaccagcagccaccaggacaacctgtggcccatgatcctgaccctgctggtggactacaccctgcagaccagcctgagcatggtgaaccacagactgcagagcttcttcggcggcaccgtgatgggcgagagcggcatgaagaccgtggaggacgtgggcagccccctgaagtacgagttccaggtgggccccatgggcgagggcctggtgggcctgggcaccctggtgctgggcctggagtggccctacgaggtgagcaacggcaagtggctgctgtaccccaccgagatcaccgtgcacggcaacggcagctggccctgcagaccccccggcgacctgatcaaccccctgaacctgaccctgagcgaccccggcgacagacccagcagcccccagagaagaagaagacagctggaccccggcggcggccagggccccccccccgtgaccctggccgccgccaagaaggccaagagcgagaccgtgctgacctgcgccaccggcagagcccactgcgtgtggctggagtgccccatccccgacgcccccgtggtgaccaacgtgaccgtgaaggccagagtgtggaacagcaccttcatcgaggactacagagacttcgacagagtgagagtgaacggctgggccaccctgttcctgagaaccagcatccccaccatcaacatggagaacaagaccacctggttcagcgtggacatcgacagcgagctggtggaggagctgcccgccgagatcgagctgtggctggtgctggtggccgtgggcgccggcctgctgctgctgggcctgatcatcctgctgctgtggaagtgcgacttcttcaagagaaccagatactaccagatcatgcccaagtaccacgccgtgagaatcagagaggaggagagataccccccccccggcagcaccctgcccaccaagaagcactgggtgaccagctggcagaccagagaccagtactactag

SEQ ID NO: 126533 - DNA, 3156 bp, Artificial Sequence
  derived and/or modified sequence
atgggccccggccccagcagagcccccagagcccccagactgatgctgtgcgccctggccctgatggtggccgccggcggctgcgtggtgagcgccttcaacctggacaccagattcctggtggtgaaggaggccggcaaccccggcagcctgttcggctacagcgtggccctgcacagacagaccgagagacagcagagatacctgctgctggccggcgcccccagagagctggccgtgcccgacggctacaccaacagaaccggcgccgtgtacctgtgccccctgaccgcccacaaggacgactgcgagagaatgaacatcaccgtgaagaacgaccccggccaccacatcatcgaggacatgtggctgggcgtgaccgtggccagccagggccccgccggcagagtgctggtgtgcgcccacagatacacccaggtgctgtggagcggcagcgaggaccagagaagaatggtgggcaagtgctacgtgagaggcaacgacctggagctggacagcagcgacgactggcagacctaccacaacgagatgtgcaacagcaacaccgactacctggagaccggcatgtgccagctgggcaccagcggcggcttcacccagaacaccgtgtacttcggcgcccccggcgcctacaactggaagggcaacagctacatgatccagagaaaggagtgggacctgagcgagtacagctacaaggaccccgaggaccagggcaacctgtacatcggctacaccatgcaggtgggcagcttcatcctgcaccccaagaacatcaccatcgtgaccggcgcccccagacacagacacatgggcgccgtgttcctgctgagccaggaggccggcggcgacctgagaagaagacaggtgctggagggcagccaggtgggcgcctacttcggcagcgccatcgccctggccgacctgaacaacgacggctggcaggacctgctggtgggcgccccctactacttcgagagaaaggaggaggtgggcggcgccatctacgtgttcatgaaccaggccggcaccagcttccccgcccaccccagcctgctgctgcacggccccagcggcagcgccttcggcctgagcgtggccagcatcggcgacatcaaccaggacggcttccaggacatcgccgtgggcgcccccttcgagggcctgggcaaggtgtacatctaccacagcagcagcaagggcctgctgagacagccccagcaggtgatccacggcgagaagctgggcctgcccggcctggccaccttcggctacagcctgagcggccagatggacgtggacgagaacttctaccccgacctgctggtgggcagcctgagcgaccacatcgtgctgctgagagccagacccgtgatcaacatcgtgcacaagaccctggtgcccagacccgccgtgctggaccccgccctgtgcaccgccaccagctgcgtgcaggtggagctgtgcttcgcctacaaccagagcgccggcaaccccaactacagaagaaacatcaccctggcctacaccctggaggccgacagagacagaagaccccccagactgagattcgccggcagcgagagcgccgtgttccacggcttcttcagcatgcccgagatgagatgccagaagctggagctgctgctgatggacaacctgagagacaagctgagacccatcatcatcagcatgaactacagcctgcccctgagaatgcccgacagacccagactgggcctgagaagcctggacgcctaccccatcctgaaccaggcccaggccctggagaaccacaccgaggtgcagttccagaaggagtgcggccccgacaacaagtgcgagagcaacctgcagatgagagccgccttcgtgagcgagcagcagcagaagctgagcagactgcagtacagcagagacgtgagaaagctgctgctgagcatcaacgtgaccaacaccagaaccagcgagagaagcggcgaggacgcccacgaggccctgctgaccctggtggtgccccccgccctgctgctgagcagcgtgagaccccccggcgcctgccaggccaacgagaccatcttctgcgagctgggcaaccccttcaagagaaaccagagaatggagctgctgatcgccttcgaggtgatcggcgtgaccctgcacaccagagacctgcaggtgcagctgcagctgagcaccagcagccaccaggacaacctgtggcccatgatcctgaccctgctggtggactacaccctgcagaccagcctgagcatggtgaaccacagactgcagagcttcttcggcggcaccgtgatgggcgagagcggcatgaagaccgtggaggacgtgggcagccccctgaagtacgagttccaggtgggccccatgggcgagggcctggtgggcctgggcaccctggtgctgggcctggagtggccctacgaggtgagcaacggcaagtggctgctgtaccccaccgagatcaccgtgcacggcaacggcagctggccctgcagaccccccggcgacctgatcaaccccctgaacctgaccctgagcgaccccggcgacagacccagcagcccccagagaagaagaagacagctggaccccggcggcggccagggccccccccccgtgaccctggccgccgccaagaaggccaagagcgagaccgtgctgacctgcgccaccggcagagcccactgcgtgtggctggagtgccccatccccgacgcccccgtggtgaccaacgtgaccgtgaaggccagagtgtggaacagcaccttcatcgaggactacagagacttcgacagagtgagagtgaacggctgggccaccctgttcctgagaaccagcatccccaccatcaacatggagaacaagaccacctggttcagcgtggacatcgacagcgagctggtggaggagctgcccgccgagatcgagctgtggctggtgctggtggccgtgggcgccggcctgctgctgctgggcctgatcatcctgctgctgtggaagtgcggcttcttcaagagagccagaaccagagccctgtacgaggccaagagacagaaggccgagatgaagagccagcccagcgagaccgagagactgaccgacgactactag

SEQ ID NO: 126534 - DNA, 3114 bp, Artificial Sequence
  derived and/or modified sequence
atgctgtgcgccctggccctgatggtggccgccggcggctgcgtggtgagcgccttcaacctggacaccagattcctggtggtgaaggaggccggcaaccccggcagcctgttcggctacagcgtggccctgcacagacagaccgagagacagcagagatacctgctgctggccggcgcccccagagagctggccgtgcccgacggctacaccaacagaaccggcgccgtgtacctgtgccccctgaccgcccacaaggacgactgcgagagaatgaacatcaccgtgaagaacgaccccggccaccacatcatcgaggacatgtggctgggcgtgaccgtggccagccagggccccgccggcagagtgctggtgtgcgcccacagatacacccaggtgctgtggagcggcagcgaggaccagagaagaatggtgggcaagtgctacgtgagaggcaacgacctggagctggacagcagcgacgactggcagacctaccacaacgagatgtgcaacagcaacaccgactacctggagaccggcatgtgccagctgggcaccagcggcggcttcacccagaacaccgtgtacttcggcgcccccggcgcctacaactggaagggcaacagctacatgatccagagaaaggagtgggacctgagcgagtacagctacaaggaccccgaggaccagggcaacctgtacatcggctacaccatgcaggtgggcagcttcatcctgcaccccaagaacatcaccatcgtgaccggcgcccccagacacagacacatgggcgccgtgttcctgctgagccaggaggccggcggcgacctgagaagaagacaggtgctggagggcagccaggtgggcgcctacttcggcagcgccatcgccctggccgacctgaacaacgacggctggcaggacctgctggtgggcgccccctactacttcgagagaaaggaggaggtgggcggcgccatctacgtgttcatgaaccaggccggcaccagcttccccgcccaccccagcctgctgctgcacggccccagcggcagcgccttcggcctgagcgtggccagcatcggcgacatcaaccaggacggcttccaggacatcgccgtgggcgcccccttcgagggcctgggcaaggtgtacatctaccacagcagcagcaagggcctgctgagacagccccagcaggtgatccacggcgagaagctgggcctgcccggcctggccaccttcggctacagcctgagcggccagatggacgtggacgagaacttctaccccgacctgctggtgggcagcctgagcgaccacatcgtgctgctgagagccagacccgtgatcaacatcgtgcacaagaccctggtgcccagacccgccgtgctggaccccgccctgtgcaccgccaccagctgcgtgcaggtggagctgtgcttcgcctacaaccagagcgccggcaaccccaactacagaagaaacatcaccctggcctacaccctggaggccgacagagacagaagaccccccagactgagattcgccggcagcgagagcgccgtgttccacggcttcttcagcatgcccgagatgagatgccagaagctggagctgctgctgatggacaacctgagagacaagctgagacccatcatcatcagcatgaactacagcctgcccctgagaatgcccgacagacccagactgggcctgagaagcctggacgcctaccccatcctgaaccaggcccaggccctggagaaccacaccgaggtgcagttccagaaggagtgcggccccgacaacaagtgcgagagcaacctgcagatgagagccgccttcgtgagcgagcagcagcagaagctgagcagactgcagtacagcagagacgtgagaaagctgctgctgagcatcaacgtgaccaacaccagaaccagcgagagaagcggcgaggacgcccacgaggccctgctgaccctggtggtgccccccgccctgctgctgagcagcgtgagaccccccggcgcctgccaggccaacgagaccatcttctgcgagctgggcaaccccttcaagagaaaccagagaatggagctgctgatcgccttcgaggtgatcggcgtgaccctgcacaccagagacctgcaggtgcagctgcagctgagcaccagcagccaccaggacaacctgtggcccatgatcctgaccctgctggtggactacaccctgcagaccagcctgagcatggtgaaccacagactgcagagcttcttcggcggcaccgtgatgggcgagagcggcatgaagaccgtggaggacgtgggcagccccctgaagtacgagttccaggtgggccccatgggcgagggcctggtgggcctgggcaccctggtgctgggcctggagtggccctacgaggtgagcaacggcaagtggctgctgtaccccaccgagatcaccgtgcacggcaacggcagctggccctgcagaccccccggcgacctgatcaaccccctgaacctgaccctgagcgaccccggcgacagacccagcagcccccagagaagaagaagacagctggaccccggcggcggccagggccccccccccgtgaccctggccgccgccaagaaggccaagagcgagaccgtgctgacctgcgccaccggcagagcccactgcgtgtggctggagtgccccatccccgacgcccccgtggtgaccaacgtgaccgtgaaggccagagtgtggaacagcaccttcatcgaggactacagagacttcgacagagtgagagtgaacggctgggccaccctgttcctgagaaccagcatccccaccatcaacatggagaacaagaccacctggttcagcgtggacatcgacagcgagctggtggaggagctgcccgccgagatcgagctgtggctggtgctggtggccgtgggcgccggcctgctgctgctgggcctgatcatcctgctgctgtggaagtgcggcttcttcaagagagccagaaccagagccctgtacgaggccaagagacagaaggccgagatgaagagccagcccagcgagaccgagagactgaccgacgactactag

SEQ ID NO: 126535 - DNA, 885 bp, Artificial Sequence
  derived and/or modified sequence
atgatccagagaaaggagtgggacctgagcgagtacagctacaaggaccccgaggaccagggcaacctgtacatcggctacaccatgcaggtgggcagcttcatcctgcaccccaagaacatcaccatcgtgaccggcgcccccagacacagacacatgggcgccgtgttcctgctgagccaggaggccggcggcgacctgagaagaagacaggtgctggagggcagccaggtgggcgcctacttcggcagcgccatcgccctggccgacctgaacaacgacggctggcaggacctgctggtgggcgccccctactacttcgagagaaaggaggaggtgggcggcgccatctacgtgttcatgaaccaggccggcaccagcttccccgcccaccccagcctgctgctgcacggccccagcggcagcgccttcggcctgagcgtggccagcatcggcgacatcaaccaggacggcttccaggacatcgccgtgggcgcccccttcgagggcctgggcaaggtgtacatctaccacagcagcagcaagggcctgctgagacagccccagcaggtgatccacggcgagaagctgggcctgcccggcctggccaccttcggctacagcctgagcggccagatggacgtggacgagaacttctaccccgacctgctggtgggcagcctgagcgaccacatcgtgctgctgagagccagacccgtgatcaacatcgtgcacaagaccctggtgcccagacccgccgtgctggaccccgccctgtgcaccgccaccagctgcgtgcaggtggagctgtgcttcgcctacaaccagagcgccggcaaccccaactacagaagaaacatcagcgagtgctggggcgccgcctag

SEQ ID NO: 126536 - protein, 1049 aa, Artificial Sequence
  derived and/or modified sequence
MGSRTPESPLHAVQLRWGPRRRPPLLPLLLLLLPPPPRVGGFNLDAEAPAVLSGPPGSFFGFSVEFYRPGTDGVSVLVGAPKANTSQPGVLQGGAVYLCPWGASPTQCTPIEFDSKGSRLLESSLSSSEGEEPVEYKSLQWFGATVRAHGSSILACAPLYSWRTEKEPLSDPVGTCYLSTDNFTRILEYAPCRSDFSWAAGQGYCQGGFSAEFTKTGRVVLGGPGSYFWQGQILSATQEQIAESYYPEYLINLVQGQLQTRQASSIYDDSYLGYSVAVGEFSGDDTEDFVAGVPKGNLTYGYVTILNGSDIRSLYNFSGEQMASYFGYAVAATDVNGDGLDDLLVGAPLLMDRTPDGRPQEVGRVYVYLQHPAGIEPTPTLTLTGHDEFGRFGSSLTPLGDLDQDGYNDVAIGAPFGGETQQGVVFVFPGGPGGLGSKPSQVLQPLWAASHTPDFFGSALRGGRDLDGNGYPDLIVGSFGVDKAVVYRGRPIVSASASLTIFPAMFNPEERSCSLEGNPVACINLSFCLNASGKHVADSIGFTVELQLDWQKQKGGVRRALFLASRQATLTQTLLIQNGAREDCREMKIYLRNESEFRDKLSPIHIALNFSLDPQAPVDSHGLRPALHYQSKSRIEDKAQILLDCGEDNICVPDLQLEVFGEQNHVYLGDKNALNLTFHAQNVGEGGAYEAELRVTAPPEAEYSGLVRHPGNFSSLSCDYFAVNQSRLLVCDLGNPMKAGASLWGGLRFTVPHLRDTKKTIQFDFQILSKNLNNSQSDVVSFRLSVEAQAQVTLNGVSKPEAVLFPVSDWHPRDQPQKEEDLGPAVHHVYELINQGPSSISQGVLELSCPQALEGQQLLYVTRVTGLNCTTNHPINPKGLELDPEGSLHHQQKREAPSRSSASSGPQILKCPEAECFRLRCELGPLHQQESQSLQLHFRVWAKTFLQREHQPFSLQCEAVYKALKMPYRILPRQLPQKERQVATAVQWTKAEGSYGVPLWIIILAILFGLLLLGLLIYILYKLGFFKRSLPYGTAMEKAQLKPPATSDA

SEQ ID NO: 126537 - DNA, 3150 bp, Artificial Sequence
  derived and/or modified sequence
atgggcagcagaacccccgagagccccctgcacgccgtgcagctgagatggggccccagaagaagaccccccctgctgcccctgctgctgctgctgctgccccccccccccagagtgggcggcttcaacctggacgccgaggcccccgccgtgctgagcggcccccccggcagcttcttcggcttcagcgtggagttctacagacccggcaccgacggcgtgagcgtgctggtgggcgcccccaaggccaacaccagccagcccggcgtgctgcagggcggcgccgtgtacctgtgcccctggggcgccagccccacccagtgcacccccatcgagttcgacagcaagggcagcagactgctggagagcagcctgagcagcagcgagggcgaggagcccgtggagtacaagagcctgcagtggttcggcgccaccgtgagagcccacggcagcagcatcctggcctgcgcccccctgtacagctggagaaccgagaaggagcccctgagcgaccccgtgggcacctgctacctgagcaccgacaacttcaccagaatcctggagtacgccccctgcagaagcgacttcagctgggccgccggccagggctactgccagggcggcttcagcgccgagttcaccaagaccggcagagtggtgctgggcggccccggcagctacttctggcagggccagatcctgagcgccacccaggagcagatcgccgagagctactaccccgagtacctgatcaacctggtgcagggccagctgcagaccagacaggccagcagcatctacgacgacagctacctgggctacagcgtggccgtgggcgagttcagcggcgacgacaccgaggacttcgtggccggcgtgcccaagggcaacctgacctacggctacgtgaccatcctgaacggcagcgacatcagaagcctgtacaacttcagcggcgagcagatggccagctacttcggctacgccgtggccgccaccgacgtgaacggcgacggcctggacgacctgctggtgggcgcccccctgctgatggacagaacccccgacggcagaccccaggaggtgggcagagtgtacgtgtacctgcagcaccccgccggcatcgagcccacccccaccctgaccctgaccggccacgacgagttcggcagattcggcagcagcctgacccccctgggcgacctggaccaggacggctacaacgacgtggccatcggcgcccccttcggcggcgagacccagcagggcgtggtgttcgtgttccccggcggccccggcggcctgggcagcaagcccagccaggtgctgcagcccctgtgggccgccagccacacccccgacttcttcggcagcgccctgagaggcggcagagacctggacggcaacggctaccccgacctgatcgtgggcagcttcggcgtggacaaggccgtggtgtacagaggcagacccatcgtgagcgccagcgccagcctgaccatcttccccgccatgttcaaccccgaggagagaagctgcagcctggagggcaaccccgtggcctgcatcaacctgagcttctgcctgaacgccagcggcaagcacgtggccgacagcatcggcttcaccgtggagctgcagctggactggcagaagcagaagggcggcgtgagaagagccctgttcctggccagcagacaggccaccctgacccagaccctgctgatccagaacggcgccagagaggactgcagagagatgaagatctacctgagaaacgagagcgagttcagagacaagctgagccccatccacatcgccctgaacttcagcctggacccccaggcccccgtggacagccacggcctgagacccgccctgcactaccagagcaagagcagaatcgaggacaaggcccagatcctgctggactgcggcgaggacaacatctgcgtgcccgacctgcagctggaggtgttcggcgagcagaaccacgtgtacctgggcgacaagaacgccctgaacctgaccttccacgcccagaacgtgggcgagggcggcgcctacgaggccgagctgagagtgaccgccccccccgaggccgagtacagcggcctggtgagacaccccggcaacttcagcagcctgagctgcgactacttcgccgtgaaccagagcagactgctggtgtgcgacctgggcaaccccatgaaggccggcgccagcctgtggggcggcctgagattcaccgtgccccacctgagagacaccaagaagaccatccagttcgacttccagatcctgagcaagaacctgaacaacagccagagcgacgtggtgagcttcagactgagcgtggaggcccaggcccaggtgaccctgaacggcgtgagcaagcccgaggccgtgctgttccccgtgagcgactggcaccccagagaccagccccagaaggaggaggacctgggccccgccgtgcaccacgtgtacgagctgatcaaccagggccccagcagcatcagccagggcgtgctggagctgagctgcccccaggccctggagggccagcagctgctgtacgtgaccagagtgaccggcctgaactgcaccaccaaccaccccatcaaccccaagggcctggagctggaccccgagggcagcctgcaccaccagcagaagagagaggcccccagcagaagcagcgccagcagcggcccccagatcctgaagtgccccgaggccgagtgcttcagactgagatgcgagctgggccccctgcaccagcaggagagccagagcctgcagctgcacttcagagtgtgggccaagaccttcctgcagagagagcaccagcccttcagcctgcagtgcgaggccgtgtacaaggccctgaagatgccctacagaatcctgcccagacagctgccccagaaggagagacaggtggccaccgccgtgcagtggaccaaggccgagggcagctacggcgtgcccctgtggatcatcatcctggccatcctgttcggcctgctgctgctgggcctgctgatctacatcctgtacaagctgggcttcttcaagagaagcctgccctacggcaccgccatggagaaggcccagctgaagccccccgccaccagcgacgcctag

SEQ ID NO: 126538 - DNA, 3150 bp, Artificial Sequence
  derived and/or modified sequence
atgggatcgaggactccagaaagtcctctgcacgccgttcagctgcggtggggacctcggaggagacctccactactcccgcttctgcttctactacttccacctccgccaagagtgggcgggtttaacctcgatgccgaggcccccgccgttctgagtggacctcccgggtcgttctttgggttctctgtggaattctaccgacccggtacggatggtgtgagtgtgctcgtcggggcccccaaagctaataccagccaacctggggtacttcagggcggcgccgtctacctgtgcccttggggcgcgtctccaacccagtgcactccaatcgagtttgactccaaggggagtagactgctggaaagtagtctctcgtcatcagaaggggaggaacctgtcgagtataaatctttacaatggttcggcgccaccgttagggcacacgggtcctctatactggcgtgtgccccactgtattcctggcgcaccgaaaaggaacctctgtcggaccccgtggggacgtgctacttgagtaccgataacttcactaggatcctggagtacgcaccatgcagatctgatttcagttgggctgctggtcagggatactgccagggcggattttctgcagaatttacaaagactggaagggtggtactgggcggcccaggatcctatttctggcaagggcagatcttgtcagccacccaggaacagatcgctgagtcctactatcccgaatatttgatcaatttggtgcaaggccagcttcaaacccgacaggcctctagtatctacgacgatagttacttggggtacagtgtggctgtgggcgagttctcgggagatgatacggaagattttgttgcaggcgttcctaagggcaatctcacctacggctacgtgactatcttgaatggctctgacattcgtagcctgtataattttagtggtgagcagatggccagctacttcgggtacgcggtggccgcgacagacgtgaacggcgatggcctagatgacctactggtaggtgccccactccttatggatagaacacccgacggtagaccccaggaagtcggtagggtctacgtgtatttgcaacatcccgcggggatcgagcctacgccaacgcttacattgacggggcacgacgaattcggacgattcggctcatcactgactccgctcggcgatcttgatcaagacggttataatgacgtggcaattggcgcccctttcggaggcgagacacagcagggagtcgtgttcgtgtttcctggaggcccaggcgggctcggatctaagccttcccaagtacttcaacccttgtgggccgcaagccatactcccgattttttcggttctgcgctcaggggaggtagggatctcgacggaaatggataccccgacctgattgtgggctcctttggcgttgataaggccgtggtttacagagggcggcccatcgttagtgcaagcgccagcttgacaatcttcccagccatgttcaaccccgaggaacgcagttgttctcttgagggcaatcccgtggcgtgcatcaatctctcattctgtcttaacgcaagcgggaaacacgtggccgatagcataggattcacagttgagttgcagctcgactggcaaaaacaaaaagggggagtcaggcgcgctttgtttctggctagtcgccaggctacactgacccagacccttctaatccaaaacggagcacgcgaggactgtcgcgagatgaagatctacctgcggaacgaatcagagttcagggacaagctgagtccaatccatattgctctgaacttttccctggacccgcaagcccctgtcgactcccacggccttagacctgccctgcattaccaaagcaagagtcgaatagaagataaggcgcaaatcctactcgactgcggcgaggataacatctgcgttccagacctccagctggaggtcttcggcgaacagaatcatgtttacctcggtgataaaaacgccctgaatctcacctttcatgcccagaacgtcggcgaaggcggtgcatacgaggcagagctcagagttacagctccccctgaggctgaatactccggcctagtccgccatccggggaacttttcatcactgtcatgcgattactttgcggttaaccagtctagactgctcgtgtgcgatctcggcaaccctatgaaggcaggggcttcactgtgggggggacttaggttcaccgtgcctcacctgcgcgacactaagaagacaatacaattcgactttcagattctgagcaagaatctaaataattctcaaagcgatgtcgtctctttcagactcagtgttgaggcccaggcccaggtcacactgaatggggtgtctaagcctgaggcggtcctctttcccgtcagcgattggcaccctagggatcagccacaaaaagaagaggacctaggcccagccgtacaccacgtctatgagctcatcaatcaaggcccttcctccatcagtcagggcgtgcttgagctgtcctgcccacaggctttggagggccagcaattactgtacgtgacgagggtgaccggcctgaattgtacaacaaaccatcctatcaaccccaaagggctggagcttgaccccgagggcagtttgcatcatcaacaaaaaagggaggccccaagccgctcctccgcgtcatccggaccccagattcttaaatgtcctgaggcggagtgttttaggctgcgatgcgagcttgggcctttacatcagcaggaatcccagtctctgcagctgcacttccgggtgtgggcaaaaacctttcttcagagagaacatcagcctttttctctgcagtgtgaagccgtctataaggcgctgaaaatgccctaccggatccttccgcgtcagcttccccagaaggagaggcaagtggccacagcagtccagtggactaaagcagaagggtcctatggagtacccttgtggatcattatcctggcaattctctttggattactgcttctgggtttgctgatttacatcttgtataagctcgggttcttcaagaggagtctcccttatggcactgcaatggagaaggctcagctcaaaccgccagcaacgagcgacgcgtag

SEQ ID NO: 126539 - DNA, 3150 bp, Artificial Sequence
  derived and/or modified sequence
atgggcagcaggaccccagagagccccctgcatgctgtgcagctgcgctggggccccaggagaagaccacccctgctgcccctgctgctgctgctgctgcccccaccaccccgggtgggcggcttcaacctggatgctgaggccccagctgtgctgagcggccccccaggcagcttcttcggcttctctgtggagttctacagacctggaacagatggagtgtctgtgctggtgggcgcccccaaggccaacaccagccagcccggggtgctgcagggcggcgctgtgtacctgtgcccctggggcgccagccccacccagtgcacccccattgaatttgacagcaagggcagccggctgctggagagcagcctgagcagcagcgagggggaggagcctgtggagtacaagagcctgcagtggtttggagccaccgtgcgggcccacggcagcagcatcctggcctgtgcccccctgtacagctggaggacagagaaggagcccctgagtgaccctgtgggcacctgctacctgagcacagacaacttcacccgcatcctggagtatgccccctgccgcagtgacttctcctgggccgccggccagggctactgccagggcggcttctctgctgagttcaccaagacaggccgggtggtgctgggcggccctggcagctacttctggcagggccagatcctgagcgccacccaggagcagattgctgagagctactacccagagtacctgatcaacctggtgcagggccagctgcagacccggcaggccagcagcatctatgatgacagctacctgggctacagcgtggccgtgggggagttctctggagatgacacagaagattttgtggccggcgtgcccaagggcaacctgacctacggctacgtgaccatcctgaatggaagtgacatccgcagcctgtacaacttcagcggggagcagatggccagctacttcggctatgctgtggccgccacagatgtgaatggagatggcctggatgacctgctggtgggcgcccccctgctgatggacaggaccccagatggccggccccaggaggtgggccgggtgtatgtgtacctgcagcaccctgctggcatcgagcccacccccaccctgaccctgaccggccatgatgaatttggccgcttcggcagcagcctgacccccctgggggacctggaccaggacggctacaatgatgtggccatcggggccccctttggaggagagacccagcagggcgtggtgtttgtgtttcctgggggccctgggggcctgggcagcaagcccagccaggtgctgcagcccctgtgggccgccagccacaccccagacttcttcggcagcgccctgcggggcggccgggacctggatggaaatggctacccagacctgattgtgggcagctttggagtggacaaggctgtggtgtaccggggccggcccatcgtgtctgccagcgccagcctgaccatcttccctgccatgttcaaccctgaggagaggagctgcagcctggagggcaaccctgtggcctgcatcaacctgtccttctgcctgaatgccagcggcaagcacgtggccgacagcatcggcttcaccgtggagctgcagctggactggcagaagcagaagggcggcgtgcggcgggccctcttcctggccagccggcaggccaccctgacccagaccctgctgatccagaatggagcccgggaggactgccgggagatgaagatctacctgagaaatgaaagtgagttccgggacaagctgagccccatccacatcgccctgaacttcagcctggacccccaggcccctgtggacagccacggcctgcggcctgccctgcactaccagagcaagagcagaattgaggacaaggcccagatcctgctggactgtggggaggacaacatctgtgtgcctgacctgcagctggaggtgtttggagagcagaaccacgtgtacctgggggacaagaatgccctgaacctgaccttccacgcccagaatgtgggggagggcggggcctatgaagctgagctgcgggtgacagcccctcctgaggccgagtacagcggcctggtgcgccaccctggcaacttcagcagcctgagctgtgactactttgctgtgaaccagagccggctgctggtgtgtgacctgggcaaccccatgaaggccggggccagcctgtggggcggcctgcgcttcaccgtgccccacctgcgggacaccaagaagaccatccagtttgacttccagatcctgagcaagaacctgaacaacagccagagtgatgtggtgtccttccggctgtctgtggaggcccaggcccaggtgaccctgaatggagtgtccaagccagaggccgtgctcttccctgtgtctgactggcacccccgggaccagccccagaaggaggaggacctgggccctgctgtgcaccacgtgtatgagctgatcaaccagggccccagcagcatcagccagggcgtgctggagctgagctgcccccaggccctggagggccagcagctgctgtatgtgaccagggtgacaggcctgaactgcaccaccaaccaccccatcaaccccaagggcctggagctggaccctgagggcagcctgcaccaccagcagaagcgggaggcccccagccgcagcagcgccagcagcggcccccagatcctgaagtgcccagaggccgagtgcttccggctgcgctgtgagctgggccccctgcaccagcaggagagccagagcctgcagctgcacttccgggtgtgggccaagaccttcctgcagcgggagcaccagcccttcagcctgcagtgtgaggccgtgtacaaggccctgaagatgccctaccgcatcctgccccggcagctgccccagaaggagcggcaggtggccacagctgtgcagtggaccaaggccgagggcagctatggagtgcccctgtggatcatcatcctggccatcctgtttggcctgctgctgctgggcctgctgatctacatcctgtacaagctgggcttcttcaagaggagcctgccctacggcacagccatggagaaggcccagctgaagcccccagccaccagtgatgcctag

SEQ ID NO: 126540 - DNA, 4444 bp, Artificial Sequence
  derived and/or modified sequence
agtccagacaaccggcttccagctggggctggggaaagggggttggaggggtgcgccccccccccacgccccttaggggtgggggacgcgggctcagagttccagggacccaggaatgcccccccgccagccccctcggcaggcggggggagggctcagccgggagtttggcaaactcctccccgcgttgagtcattcgcctctgggaggtttaggaagcggctccgggtcggtggccccaggacagggaagagcgggcgctatggggagccggacgccagagtcccctctccacgccgtgcagctgcgctggggcccccggcgccgacccccgctgctgccgctgctgttgctgctgctgccgccgccacccagggtcgggggcttcaacttagacgcggaggccccagcagtactctcggggcccccgggctccttcttcggattctcagtggagttttaccggccgggaacagacggggtcagtgtgctggtgggagcacccaaggctaataccagccagccaggagtgctgcagggtggtgctgtctacctctgtccttggggtgccagccccacacagtgcacccccattgaatttgacagcaaaggctctcggctcctggagtcctcactgtccagctcagagggagaggagcctgtggagtacaagtccttgcagtggttcggggcaacagttcgagcccatggctcctccatcttggcatgcgctccactgtacagctggcgcacagagaaggagccactgagcgaccccgtgggcacctgctacctctccacagataacttcacccgaattctggagtatgcaccctgccgctcagatttcagctgggcagcaggacagggttactgccaaggaggcttcagtgccgagttcaccaagactggccgtgtggttttaggtggaccaggaagctatttctggcaaggccagatcctgtctgccactcaggagcagattgcagaatcttattaccccgagtacctgatcaacctggttcaggggcagctgcagactcgccaggccagttccatctatgatgacagctacctaggatactctgtggctgttggtgaattcagtggtgatgacacagaagactttgttgctggtgtgcccaaagggaacctcacttacggctatgtcaccatccttaatggctcagacattcgatccctctacaacttctcaggggaacagatggcctcctactttggctatgcagtggccgccacagacgtcaatggggatgggctggatgacttgctggtgggggcacccctgctcatggatcggacccctgacgggcggcctcaggaggtgggcagggtctacgtctacctgcagcacccagccggcatagagcccacgcccacccttaccctcactggccatgatgagtttggccgatttggcagctccttgacccccctgggggacctggaccaggatggctacaatgatgtggccatcggggctccctttggtggggagacccagcagggagtagtgtttgtatttcctgggggcccaggagggctgggctctaagccttcccaggttctgcagcccctgtgggcagccagccacaccccagacttctttggctctgcccttcgaggaggccgagacctggatggcaatggatatcctgatctgattgtggggtcctttggtgtggacaaggctgtggtatacaggggccgccccatcgtgtccgctagtgcctccctcaccatcttccccgccatgttcaacccagaggagcggagctgcagcttagaggggaaccctgtggcctgcatcaaccttagcttctgcctcaatgcttctggaaaacacgttgctgactccattggtttcacagtggaacttcagctggactggcagaagcagaagggaggggtacggcgggcactgttcctggcctccaggcaggcaaccctgacccagaccctgctcatccagaatggggctcgagaggattgcagagagatgaagatctacctcaggaacgagtcagaatttcgagacaaactctcgccgattcacatcgctctcaacttctccttggacccccaagccccagtggacagccacggcctcaggccagccctacattatcagagcaagagccggatagaggacaaggctcagatcttgctggactgtggagaagacaacatctgtgtgcctgacctgcagctggaagtgtttggggagcagaaccatgtgtacctgggtgacaagaatgccctgaacctcactttccatgcccagaatgtgggtgagggtggcgcctatgaggctgagcttcgggtcaccgcccctccagaggctgagtactcaggactcgtcagacacccagggaacttctccagcctgagctgtgactactttgccgtgaaccagagccgcctgctggtgtgtgacctgggcaaccccatgaaggcaggagccagtctgtggggtggccttcggtttacagtccctcatctccgggacactaagaaaaccatccagtttgacttccagatcctcagcaagaatctcaacaactcgcaaagcgacgtggtttcctttcggctctccgtggaggctcaggcccaggtcaccctgaacggtgtctccaagcctgaggcagtgctattcccagtaagcgactggcatccccgagaccagcctcagaaggaggaggacctgggacctgctgtccaccatgtctatgagctcatcaaccaaggccccagctccattagccagggtgtgctggaactcagctgtccccaggctctggaaggtcagcagctcctatatgtgaccagagttacgggactcaactgcaccaccaatcaccccattaacccaaagggcctggagttggatcccgagggttccctgcaccaccagcaaaaacgggaagctccaagccgcagctctgcttcctcgggacctcagatcctgaaatgcccggaggctgagtgtttcaggctgcgctgtgagctcgggcccctgcaccaacaagagagccaaagtctgcagttgcatttccgagtctgggccaagactttcttgcagcgggagcaccagccatttagcctgcagtgtgaggctgtgtacaaagccctgaagatgccctaccgaatcctgcctcggcagctgccccaaaaagagcgtcaggtggccacagctgtgcaatggaccaaggcagaaggcagctatggcgtcccactgtggatcatcatcctagccatcctgtttggcctcctgctcctaggtctactcatctacatcctctacaagcttggattcttcaaacgctccctcccatatggcaccgccatggaaaaagctcagctcaagcctccagccacctctgatgcctgagtcctcccaatttcagactcccattcctgaagaaccagtccccccaccctcattctactgaaaaggaggggtctgggtacttcttgaaggtgctgacggccagggagaagctcctctccccagcccagagacatacttgaagggccagagccaggggggtgaggagctggggatccctcccccccatgcactgtgaaggacccttgtttacacataccctcttcatggatgggggaactcagatccagggacagaggccccagcctccctgaagcctttgcattttggagagtttcctgaaacaacttggaaagataactaggaaatccattcacagttctttgggccagacatgccacaaggacttcctgtccagctccaacctgcaaagatctgtcctcagccttgccagagatccaaaagaagcccccagctaagaacctggaacttggggagttaagacctggcagctctggacagccccaccctggtgggccaacaaagaacactaactatgcatggtgccccaggaccagctcaggacagatgccacacaaggatagatgctggcccagggcccagagcccagctccaaggggaatcagaactcaaatggggccagatccagcctggggtctggagttgatctggaacccagactcagacattggcacctaatccaggcagatccaggactatatttgggcctgctccagacctgatcctggaggcccagttcaccctgatttaggagaagccaggaatttcccaggaccctgaaggggccatgatggcaacagatctggaacctcagcctggccagacacaggccctccctgttccccagagaaaggggagcccactgtcctgggcctgcagaatttgggttctgcctgccagctgcactgatgctgcccctcatctctctgcccaacccttccctcaccttggcaccagacacccaggacttatttaaactctgttgcaagtgcaataaatctgacccagtgcccccactgaccagaactagaa

SEQ ID NO: 126541 - DNA, 3150 bp, Artificial Sequence
  derived and/or modified sequence
atgggcagccggacccccgagagccccctgcacgccgtgcagctgcggtggggacctcgccgtcgtccacctctactaccgctgctccttctgctgcttccacccccaccaagggtaggtggctttaatctggacgccgaagcacccgctgtcttaagtggacccccggggtcctttttcggattctccgtggagttctatcgacccgggactgacggggtgtccgttctggttggggccccgaaggcaaatactagtcagccaggggtactgcaggggggggctgtttacttgtgcccatggggtgcatcacctactcaatgtacacctatcgagtttgacagcaaagggagtcggctacttgaatcatccctatcctcctccgagggggaggagcctgtggaatacaagtcactgcaatggttcggagctacagtaagagctcatggctcttcaatcctcgcatgtgcccccctgtatagttggaggacagagaaagaaccgcttagtgaccccgtaggcacttgctacttgagcactgacaacttcacccgtattctcgaatacgcaccatgccgatccgatttctcttgggcggccggtcagggttactgccagggaggattttccgcagagttcacaaagaccgggagggtagtgctgggcggtcccggttcttatttctggcagggtcagatcctttctgccacccaagagcaaattgcagagtcatactaccctgaatacttgattaatttggtgcagggacagctgcaaacgcgccaggcctcaagcatttatgacgactcctacttggggtattctgtcgctgttggggagttttctggagacgatacggaagattttgtggcaggtgtgcctaagggcaatcttacttacggctacgtgaccatcctcaacggttccgacatcagatccctttacaatttcagcggcgaacagatggcatcgtacttcggctacgccgtggctgctacagacgtcaacggagacgggttagacgatctccttgtaggagccccacttctgatggaccggaccccagacggcaggccccaggaggttggccgcgtttatgtttacctacagcacccagccggtatcgagcctactccaactctcaccctgactggccacgacgagttcgggcgatttggatctagtctgaccccactcggagacttggaccaagatggctacaacgacgtggctattggtgccccattcggtggagagactcagcagggagtggtcttcgtgttccctgggggacctggcggcctgggaagtaaaccctcacaggttcttcagcccctgtgggctgcgtcacacaccccggatttttttggtagtgccctcagaggtggccgtgacctggacggaaatggctatcctgatttgattgtaggctctttcggagtggacaaggccgtcgtctacaggggcaggcctattgtgtccgcttctgccagtctcacaatcttccctgccatgttcaaccccgaagagcggtcatgtagcctcgaaggaaacccagtcgcctgtatcaatctttctttttgcctcaatgcttcagggaaacacgtcgctgattcaatcggtttcacggtggaactgcagctcgattggcagaaacagaaaggtggagttaggcgggcactattccttgcaagcagacaggcaacgctgactcagactctgttaatccagaacggcgctcgcgaagactgtcgtgagatgaaaatctacctgaggaacgagtctgaattcagggacaagctgagtccgatccacatcgccctgaacttcagtttagatccccaagcacccgttgattcccacggcttgcggccggcacttcattaccagtccaaaagcagaattgaagataaagctcaaatcttgcttgattgtggagaagataatatctgcgtacccgatctgcagctggaagtgttcggcgagcaaaatcacgtgtatctgggagataaaaatgctctgaatctgacgttccatgcacagaatgtgggcgaaggcggtgcatacgaggccgaactgcgggttaccgcaccaccggaggcagagtacagcggcctggtgcgccaccccggcaatttcagtagcctgtcttgcgattatttcgctgttaaccagagtagactgctggtttgcgacttgggcaacccgatgaaagctggcgcgtctctgtggggaggcctgcggtttacagttccacatctgagagacaccaaaaagaccatccagttcgattttcagattctctcaaaaaacctgaacaatagtcaatccgacgtagtttcttttcgtctcagcgtagaagctcaagctcaggtcacactgaacggggtttcaaaacctgaagccgtgttgtttccagtgtccgattggcaccccagagaccagccccaaaaagaagaagacctgggcccagcagtacaccacgtttatgagttgatcaatcaggggccctccagtatttcgcagggagtgctggagctgtcatgtccccaggccttagaaggacagcaactgctctatgtgacacgagtgactgggctgaactgcacaaccaaccacccaattaaccctaaaggtctggaactggatcccgaaggctcattgcaccaccagcagaagcgcgaggctccgagtcgatccagcgcttctagcggcccacaaattttgaagtgccccgaagccgaatgtttcaggctgcggtgtgagctgggccccctgcaccaacaggagtcccagtcacttcaactccattttcgcgtatgggcaaaaacattcctccaacgggaacaccagcccttcagtcttcaatgcgaggccgtatacaaggccctgaaaatgccctaccggatccttccccgtcagctgccccagaaggagcgtcaggtggctacagcagtgcagtggactaaagctgaaggatcgtacggggtgcccttatggatcatcattctggctattctgtttggattattactcctaggattgctaatctatatcctgtataaattggggttcttcaagcgtagcctcccttacgggaccgccatggagaaggctcagttgaagccccctgccactagcgatgcatag

SEQ ID NO: 126542 - DNA, 3150 bp, Artificial Sequence
  derived and/or modified sequence
atgggttctcgaacccccgaatcacctctgcatgccgtacagctcaggtgggggcctaggcgaagaccgccattactccccttgctcctcttgctgctgccccctccacccagagtgggcggattcaatctcgatgcagaggccccagcagttctgtccgggccacccggttcgttcttcgggttctcggtagagttttaccgtccgggtacagacggcgtgtctgtgctagttggagcaccaaaagccaacacctcgcagcctggtgtgctgcagggcggagccgtgtacctctgcccatggggcgcttcaccaacccagtgtaccccaatagagtttgatagcaaaggcagccgcctgctcgaatcatctctcagtagctcagaaggcgaagaacccgtggagtacaaaagtctgcagtggttcggggcaacggtcagggcacatggcagttccattttagcttgcgcccctttgtacagctggcgtaccgagaaggaacccttgtcagatccggtgggcacgtgctacctctcaactgacaattttacgcggattttggaatatgccccatgtcggagtgactttagttgggccgcaggccagggctattgccaaggcggattcagcgccgagtttaccaagacgggacgcgtggtgttaggtggacccggatcatacttctggcagggtcagatcctatctgcaacacaagagcagatcgctgagagctattatccagagtatcttatcaatctcgtccagggtcaactccagactagacaagctagttcaatttatgacgattcttacctaggctacagcgtggctgtgggggagttctccggcgacgacacggaagacttcgtagccggtgtccccaaaggaaacctcacctacggatatgtgacaatcctgaacggaagtgatattcgatctctgtacaacttctcaggggagcagatggcatcttattttggctacgcggtggctgccactgacgttaatggagatgggctcgacgaccttctcgttggtgcccctctactcatggatcgcacccccgacggtagacctcaggaggtgggacgggtctacgtctatctgcaacatccggctggcattgaaccgacccccactttgaccctcacaggccacgatgagttcggccgttttggcagcagcctcacaccactgggcgacctggaccaggatgggtataatgacgtggccatcggtgccccattcggcggagagacgcagcagggtgtggtgttcgtctttcctggcggtccaggaggtcttggatcgaaaccatcacaagttctccaaccactgtgggccgctagtcacacacctgacttctttggtagcgcacttcgcggtggaagggacctggatggaaatggctaccccgaccttatcgttgggtcttttggagtcgataaagcggtcgtgtatcggggaagaccaattgtgtccgcctccgcaagcctgacgatctttccagccatgtttaatcctgaagaacggtcatgctccctcgagggaaatccagtggcctgcataaaccttagtttctgtcttaatgcctcgggaaagcacgtggctgacagcatcggctttaccgtggagttacaactcgactggcagaaacagaagggcggagtgcgcagggcgctgttcctagcttctcggcaggcgacgctgacacaaacactcttgattcagaacggagccagagaggattgcagagagatgaaaatatacttgagaaacgagtctgagtttagagataagctatctcccatacatatcgccctcaactttagcttggatccgcaggccccagttgacagccacggcctgcgtcccgctcttcattatcagagcaaatcccgcatcgaggataaggcgcagatactgctggactgcggggaggataatatctgtgtgccggacttgcagcttgaggtctttggagagcagaaccatgtctatctgggcgataaaaatgcactcaacctcacttttcacgcacagaacgtgggggagggtggggcttacgaagccgagctgcgcgtcaccgctccccctgaagctgagtatagcggcctcgtgcgtcaccctggtaactttagtagcctgtcctgcgattatttcgccgtgaaccagtcgaggctgctcgtgtgcgatttgggcaatcccatgaaagccggagccagtctttggggaggtttgcgctttaccgtgccccatctgcgcgacactaagaaaaccatacaatttgactttcaaatcctcagtaaaaatctcaataactcccaaagtgatgttgtcagcttccggctttccgtggaggctcaggcacaggtgaccctgaacggcgtaagcaagcctgaggctgtgctgttccctgtgagcgactggcacccacgtgatcagccccagaaagaggaggatttaggtccagccgtgcaccacgtgtatgaactgatcaaccaagggccttcatccatttcacagggagtgttggagctgtcctgtccacaggccttggagggacaacagctcttgtacgttacgcgggttactggactgaactgtacaaccaaccacccgattaaccctaagggcctggagttggatcccgagggcagtctccatcaccagcagaaaagggaggctcccagtcgcagctccgcctcttctggtcctcagatactcaagtgtccagaggccgagtgcttccgattgcggtgtgagctgggacccctgcaccagcaggagagccagagcctccagctgcactttcgcgtgtgggccaagacattccttcagcgggaacatcagccgttttcactgcagtgcgaagccgtatataaggcacttaaaatgccataccggattctcccaaggcagctcccacaaaaagagcggcaggtggccaccgctgtgcagtggaccaaggcggaaggcagctacggagtaccgctttggatcatcattctcgcaattctctttggcctgctgctattgggcctcctgatctatatcctgtataaactcgggtttttcaaaaggtccctgccatacgggaccgccatggaaaaggcccaactcaagccgcctgctacgtctgacgcctag

SEQ ID NO: 126543 - protein, 1137 aa, Artificial Sequence
  derived and/or modified sequence
MAGARSRDPWGASGICYLFGSLLVELLFSRAVAFNLDVMGALRKEGEPGSLFGFSVALHRQLQPRPQSWLLVGAPQALALPGQQANRTGGLFACPLSLEETDCYRVDIDQGADMQKESKENQWLGVSVRSQGPGGKIVTCAHRYEARQRVDQILETRDMIGRCFVLSQDLAIRDELDGGEWKFCEGRPQGHEQFGFCQQGTAAAFSPDSHYLLFGAPGTYNWKGLLFVTNIDSSDPDQLVYKTLDPADRLPGPAGDLALNSYLGFSIDSGKGLVRAEELSFVAGAPRANHKGAVVILRKDSASRLVPEVMLSGERLTSGFGYSLAVADLNSDGWPDLIVGAPYFFERQEELGGAVYVYLNQGGHWAGISPLRLCGSPDSMFGISLAVLGDLNQDGFPDIAVGAPFDGDGKVFIYHGSSLGVVAKPSQVLEGEAVGIKSFGYSLSGSLDMDGNQYPDLLVGSLADTAVLFRARPILHVSHEVSIAPRSIDLEQPNCAGGHSVCVDLRVCFSYIAVPSSYSPTVALDYVLDADTDRRLRGQVPRVTFLSRNLEEPKHQASGTVWLKHQHDRVCGDAMFQLQENVKDKLRAIVVTLSYSLQTPRLRRQAPGQGLPPVAPILNAHQPSTQRAEIHFLKQGCGEDKICQSNLQLVRARFCTRVSDTEFQPLPMDVDGTTALFALSGQPVIGLELMVTNLPSDPAQPQADGDDAHEAQLLVMLPDSLHYSGVRALDPAEKPLCLSNENASHVECELGNPMKRGAQVTFYLILSTSGISIETTELEVELLLATISEQELHPVSARARVFIELPLSIAGMAIPQQLFFSGVVRGERAMQSERDVGSKVKYEVTVSNQGQSLRTLGSAFLNIMWPHEIANGKWLLYPMQVELEGGQGPGQKGLCSPRPNILHLDVDSRDRRRRELEPPEQQEPGERQEPSMSWWPVSSAEKKKNITLDCARGTANCVVFSCPLYSFDRAAVLHVWGRLWNSTFLEEYSAVKSLEVIVRANITVKSSIKNLMLRDASTVIPVMVYLDPMAVVAEGVPWWVILLAVLAGLLVLALLVLLLWKMGFFKRAKHPEATVPQYHAVKIPREDRQQFKEEKTGTILRNNWGSPRREGPDAHPILAADGHPELGPDGHPGPGTA

SEQ ID NO: 126544 - DNA, 3414 bp, Artificial Sequence
  derived and/or modified sequence
atggccggcgccagaagcagagacccctggggcgccagcggcatctgctacctgttcggcagcctgctggtggagctgctgttcagcagagccgtggccttcaacctggacgtgatgggcgccctgagaaaggagggcgagcccggcagcctgttcggcttcagcgtggccctgcacagacagctgcagcccagaccccagagctggctgctggtgggcgccccccaggccctggccctgcccggccagcaggccaacagaaccggcggcctgttcgcctgccccctgagcctggaggagaccgactgctacagagtggacatcgaccagggcgccgacatgcagaaggagagcaaggagaaccagtggctgggcgtgagcgtgagaagccagggccccggcggcaagatcgtgacctgcgcccacagatacgaggccagacagagagtggaccagatcctggagaccagagacatgatcggcagatgcttcgtgctgagccaggacctggccatcagagacgagctggacggcggcgagtggaagttctgcgagggcagaccccagggccacgagcagttcggcttctgccagcagggcaccgccgccgccttcagccccgacagccactacctgctgttcggcgcccccggcacctacaactggaagggcctgctgttcgtgaccaacatcgacagcagcgaccccgaccagctggtgtacaagaccctggaccccgccgacagactgcccggccccgccggcgacctggccctgaacagctacctgggcttcagcatcgacagcggcaagggcctggtgagagccgaggagctgagcttcgtggccggcgcccccagagccaaccacaagggcgccgtggtgatcctgagaaaggacagcgccagcagactggtgcccgaggtgatgctgagcggcgagagactgaccagcggcttcggctacagcctggccgtggccgacctgaacagcgacggctggcccgacctgatcgtgggcgccccctacttcttcgagagacaggaggagctgggcggcgccgtgtacgtgtacctgaaccagggcggccactgggccggcatcagccccctgagactgtgcggcagccccgacagcatgttcggcatcagcctggccgtgctgggcgacctgaaccaggacggcttccccgacatcgccgtgggcgcccccttcgacggcgacggcaaggtgttcatctaccacggcagcagcctgggcgtggtggccaagcccagccaggtgctggagggcgaggccgtgggcatcaagagcttcggctacagcctgagcggcagcctggacatggacggcaaccagtaccccgacctgctggtgggcagcctggccgacaccgccgtgctgttcagagccagacccatcctgcacgtgagccacgaggtgagcatcgcccccagaagcatcgacctggagcagcccaactgcgccggcggccacagcgtgtgcgtggacctgagagtgtgcttcagctacatcgccgtgcccagcagctacagccccaccgtggccctggactacgtgctggacgccgacaccgacagaagactgagaggccaggtgcccagagtgaccttcctgagcagaaacctggaggagcccaagcaccaggccagcggcaccgtgtggctgaagcaccagcacgacagagtgtgcggcgacgccatgttccagctgcaggagaacgtgaaggacaagctgagagccatcgtggtgaccctgagctacagcctgcagacccccagactgagaagacaggcccccggccagggcctgccccccgtggcccccatcctgaacgcccaccagcccagcacccagagagccgagatccacttcctgaagcagggctgcggcgaggacaagatctgccagagcaacctgcagctggtgagagccagattctgcaccagagtgagcgacaccgagttccagcccctgcccatggacgtggacggcaccaccgccctgttcgccctgagcggccagcccgtgatcggcctggagctgatggtgaccaacctgcccagcgaccccgcccagccccaggccgacggcgacgacgcccacgaggcccagctgctggtgatgctgcccgacagcctgcactacagcggcgtgagagccctggaccccgccgagaagcccctgtgcctgagcaacgagaacgccagccacgtggagtgcgagctgggcaaccccatgaagagaggcgcccaggtgaccttctacctgatcctgagcaccagcggcatcagcatcgagaccaccgagctggaggtggagctgctgctggccaccatcagcgagcaggagctgcaccccgtgagcgccagagccagagtgttcatcgagctgcccctgagcatcgccggcatggccatcccccagcagctgttcttcagcggcgtggtgagaggcgagagagccatgcagagcgagagagacgtgggcagcaaggtgaagtacgaggtgaccgtgagcaaccagggccagagcctgagaaccctgggcagcgccttcctgaacatcatgtggccccacgagatcgccaacggcaagtggctgctgtaccccatgcaggtggagctggagggcggccagggccccggccagaagggcctgtgcagccccagacccaacatcctgcacctggacgtggacagcagagacagaagaagaagagagctggagccccccgagcagcaggagcccggcgagagacaggagcccagcatgagctggtggcccgtgagcagcgccgagaagaagaagaacatcaccctggactgcgccagaggcaccgccaactgcgtggtgttcagctgccccctgtacagcttcgacagagccgccgtgctgcacgtgtggggcagactgtggaacagcaccttcctggaggagtacagcgccgtgaagagcctggaggtgatcgtgagagccaacatcaccgtgaagagcagcatcaagaacctgatgctgagagacgccagcaccgtgatccccgtgatggtgtacctggaccccatggccgtggtggccgagggcgtgccctggtgggtgatcctgctggccgtgctggccggcctgctggtgctggccctgctggtgctgctgctgtggaagatgggcttcttcaagagagccaagcaccccgaggccaccgtgccccagtaccacgccgtgaagatccccagagaggacagacagcagttcaaggaggagaagaccggcaccatcctgagaaacaactggggcagccccagaagagagggccccgacgcccaccccatcctggccgccgacggccaccccgagctgggccccgacggccaccccggccccggcaccgcctag

SEQ ID NO: 126545 - DNA, 3414 bp, Artificial Sequence
  derived and/or modified sequence
atggcgggagctcggtctagagacccgtggggagcctcagggatttgctatctgttcgggagtctcctggtcgaattactcttcagcagagcggtagctttcaatctggatgtcatgggcgccttgcgcaaagaaggtgagcctggatctctatttgggttttcggtggcactccaccgccagctgcaaccaaggccgcaatcctggctgctggtgggtgctcctcaggcgctggccctgccaggtcagcaggctaacagaactggcggcctttttgcttgcccactgtcactggaagagactgactgttaccgtgtggatatcgatcagggagccgacatgcagaaggagagcaaggagaatcaatggctcggtgtgtccgtgaggagtcaaggccctggaggcaaaatcgtcacctgcgctcaccgatacgaggcccggcaacgcgttgatcagatcctggaaacccgggacatgataggcaggtgcttcgtgctgtcgcaggatctcgctatccgggacgagttagacgggggggagtggaaattttgtgaaggccgaccccaggggcacgaacagttcggcttttgtcaacagggaaccgctgccgcgtttagtccagactcccactacttgctatttggcgctcctgggacttataactggaagggcctcctattcgtaaccaatatcgactcctccgaccccgatcagttggtgtacaaaacactcgaccccgctgacaggcttcccggcccagccggagatctagcgctgaattcttatttaggtttttctattgactcggggaaaggcctggtgagagccgaagagctgagttttgtcgcgggagctccaagggctaaccataagggagccgtcgtgatcttacggaaggactctgctagcagattggtaccagaagtgatgctgagcggggaacggctaacaagcggcttcgggtatagcctggccgtggctgatctgaatagcgatgggtggcctgatctgatcgttggtgctccctacttcttcgaacgtcaggaggagcttggaggagctgtctacgtgtacctgaaccaagggggtcattgggccggaattagccctctgaggctgtgtggcagcccggattcaatgtttgggatttccctcgcagttctgggcgatctgaaccaggatggatttccggatatagccgtgggggctccgttcgatggcgacggcaaggtatttatctaccacggcagttccctaggcgttgtggccaagccctcccaagtccttgagggagaggcagtgggcattaagtcttttgggtactctctctctggtagcctggacatggacggcaaccagtatccagacctgttggtggggtccctggcggacaccgccgttttgtttagagcaaggccaatcttacacgttagtcatgaagtatctatcgcgccaagatcgatcgacctggaacaacccaattgtgccggggggcactccgtatgtgtggatctaagagtatgtttctcttacattgcggtccctagctcttactcccccaccgtagctctagactatgtgttggacgctgataccgacagacgcctacggggacaggtgccacgggttacattcctttcccgaaatcttgaagagcctaagcaccaggcatctggcactgtatggctgaaacaccaacacgacagggtttgtggcgatgccatgttccagttacaggaaaacgtaaaggataagcttcgggcgattgtggtgaccctctcttatagcctgcagacgccacggctccggcgccaggcgccaggccaagggttgccccccgtcgctcccatcctcaacgcccatcagccttctactcagagggctgagatacacttcctgaaacagggctgcggcgaagataagatttgtcagtccaacctgcagcttgtgcgcgcccggttctgcacaagagtatcagacactgaatttcagccgctgcctatggatgttgatgggaccaccgcactatttgctctgtctggccagcccgtgatagggctcgagctgatggtgacaaatctgccaagcgatcctgcccagccacaggctgatggggatgatgcgcatgaggcgcagttgctggtcatgctgcccgacagtcttcactatagcggcgtcagagcgctcgaccccgcagagaaacctctgtgtctctccaacgaaaacgccagccacgtcgaatgcgagcttgggaatcccatgaaacgcggggcccaggtcacgttttacttaatattgagcacatccggcataagcatcgagaccacagaattggaagttgaactcttgttagccacaattagtgagcaagaactccaccctgtcagcgcgcgtgcaagagtgtttattgaattgcctctatctattgctggcatggctatcccccaacagctgttcttttccggcgtggtgaggggagagagggctatgcagtccgagcgtgatgttggctccaaagtgaagtacgaagtgacagtcagtaatcaaggccaaagcctgcgcacattgggaagcgcatttttgaatataatgtggccacatgaaatcgccaatgggaaatggcttctttacccaatgcaggttgagttagagggtgggcaaggccccggacagaaaggcttgtgctcacccagacccaatatcctccatctagatgtagattctagagatcgtaggcgcagagagcttgaaccaccggaacagcaagagcccggcgaaagacaagaaccatccatgagttggtggccagtcagttcagccgaaaagaagaagaacataacccttgattgtgctaggggaactgccaattgcgtcgtgttctcctgtcctctctacagttttgacagggccgccgtgctgcacgtttggggccgcctgtggaattcaacttttctagaggagtattccgctgtgaagagcttagaggtgattgttcgtgctaatatcactgtgaagtcctctattaagaatctgatgcttagagacgcgtcaaccgtgattccggttatggtatatctggatcccatggctgtagtagctgagggggttccttggtgggtgattttacttgccgtactcgctggacttctcgtccttgcccttctggtgttactcctgtggaagatgggcttttttaagagggccaaacacccggaggccaccgtccctcagtaccatgcagtcaaaatacctcgcgaggacagacagcaattcaaggaggagaagaccggaacaatcctccgcaacaactggggctccccgagaagagaaggcccagatgcccaccccatcctggccgctgacgggcaccccgagcttggccccgatggccaccctggcccggggactgcgtag

SEQ ID NO: 126546 - DNA, 3414 bp, Artificial Sequence
  derived and/or modified sequence
atggccggggcccggagccgggacccctggggcgccagcggcatctgctacctgtttggcagcctgctggtggagctgctcttcagcagagctgtggccttcaacctggatgtgatgggcgccctgaggaaggagggggagcccggcagcctgtttggcttctctgtggccctgcaccggcagctgcagccccggccccagagctggctgctggtgggcgccccccaggccctggccctgcccggccagcaggccaacagaactggaggcctgtttgcctgccccctgagcctggaggagacagactgctacagagtggacatcgaccagggcgctgacatgcagaaggagagcaaggagaaccagtggctgggcgtgtctgtgcgcagccagggccctgggggcaagatcgtgacctgtgcccacagatatgaggcccggcagagggtggaccagatcctggagacccgggacatgattggccgctgctttgtgctgagccaggacctggccatcagagatgagctggatggaggagagtggaagttctgtgagggccggccccagggccacgagcagtttggcttctgccagcagggcacagctgctgccttctccccagacagccactacctgctgtttggagcccctggcacctacaactggaagggcctgctgtttgtgaccaacatcgacagcagtgaccctgaccagctggtgtacaagaccctggaccctgctgaccggctgcccggccctgctggggacctggccctgaacagctacctgggcttcagcattgattctgggaagggcctggtgcgggcagaggagctgagctttgtggccggggccccccgggccaaccacaagggagctgtggtgatcctgaggaaggacagcgccagccggctggtgcctgaggtgatgctgagcggggagcggctgaccagcggcttcggctacagcctggccgtggccgacctgaacagtgatggctggccagacctgattgtgggcgccccctacttctttgagcggcaggaggagctgggcggcgctgtgtatgtgtacctgaaccagggcggccactgggccggcatcagccccctgcggctgtgtggcagcccagacagcatgtttggcatcagcctggccgtgctgggggacctgaaccaggacggcttcccagacattgctgtgggcgccccctttgatggagatggcaaggtgttcatctaccacggcagcagcctgggcgtggtggccaagcccagccaggtgctggagggggaggccgtgggcatcaagagctttggctacagcctgagcggcagcctggacatggatggcaaccagtacccagacctgctggtgggcagcctggccgacacagctgtgctcttccgggcccggcccatcctgcacgtgtcccatgaggtgtccatcgcccccaggagcattgacctggagcagcccaactgtgccggcggccacagcgtgtgtgtggacctgcgggtgtgcttctcctacatcgctgtgcccagcagctacagccccaccgtggccctggactatgtgctggatgctgacacagaccggcggctgcggggccaggtgccccgggtgaccttcctgagcaggaacctggaggagcccaagcaccaggccagcggcaccgtgtggctgaagcaccagcacgacagagtgtgtggagatgccatgttccagctgcaggagaatgtgaaggacaagctgcgggccatcgtggtgaccctgagctacagcctgcagaccccccggctgcggcggcaggcccctggccagggcctgccccctgtggcccccatcctgaatgcccaccagcccagcacccagagagctgagatccacttcctgaagcagggctgtggggaggacaagatctgccagagcaacctgcagctggtgcgggcccgcttctgcaccagggtgtctgacacagagttccagcccctgcccatggatgtggatggcaccacagccctgtttgccctgagcggccagcctgtgattggcctggagctgatggtgaccaacctgcccagcgaccctgcccagccccaggctgatggagatgatgcccacgaggcccagctgctggtgatgctgcctgacagcctgcactacagcggcgtgcgggccctggaccctgctgagaagcccctgtgcctgagcaatgaaaatgccagccacgtggagtgtgagctgggcaaccccatgaagagaggagcccaggtgaccttctacctgatcctgagcaccagcggcatcagcattgagaccacagagctggaggtggagctgctgctggccaccatcagcgagcaggagctgcaccctgtgtctgcccgggcccgggtcttcatcgagctgcccctgagcattgctggcatggccatcccccagcagctgttcttctctggagtggtgcggggggagcgggccatgcagagcgagagagatgtgggcagcaaggtgaagtatgaggtgacagtgagcaaccagggccagagcctgcggaccctgggcagcgccttcctgaacatcatgtggccccatgaaattgccaacgggaagtggctgctgtaccccatgcaggtggagctggagggcggccagggccctggccagaagggcctgtgcagcccccggcccaacatcctgcacctggatgtggacagccgggacagaagaagaagagagctggagcccccagagcagcaggagcccggggagcggcaggagcccagcatgtcctggtggcctgtgtcctctgctgagaagaagaagaacatcaccctggactgtgcccggggcacagccaactgtgtggtgttcagctgccccctgtacagctttgacagagctgctgtgctgcacgtgtggggccgcctgtggaacagcaccttcctggaggagtacagcgctgtgaagagcctggaggtgattgtgcgggccaacatcaccgtgaagagcagcatcaagaacctgatgctgagagatgccagcaccgtcatccctgtgatggtgtacctggaccccatggctgtggtggccgagggcgtgccctggtgggtgatcctgctggccgtgctggccggcctgctggtgctggccctgctggtgctgctgctgtggaagatgggcttcttcaagagggccaagcaccctgaggccaccgtgccccagtaccacgctgtgaagatcccccgggaggaccggcagcagttcaaggaggagaagacaggcaccatcctgaggaacaactggggcagcccccggcgggagggcccagatgcccaccccatcctggccgcagatggccaccctgagctgggcccagatggccaccctggccctggaacagcctag

SEQ ID NO: 126547 - DNA, 4120 bp, Artificial Sequence
  derived and/or modified sequence
gccggagctgcggctgctgtagttgtcctagccggtgctggggcggcggggtggcggagcggcgggcgggcgggagggctggcggggcgaacgtctgggagacgtctgaaagaccaacgagactttggagaccagagacgcgcctggggggacctggggcttggggcgtgcgagatttcccttgcattcgctgggagctcgcgcagggatcgtcccatggccggggctcggagccgcgacccttggggggcctccgggatttgctacctttttggctccctgctcgtcgaactgctcttctcacgggctgtcgccttcaatctggacgtgatgggtgccttgcgcaaggagggcgagccaggcagcctcttcggcttctctgtggccctgcaccggcagttgcagccccgaccccagagctggctgctggtgggtgctccccaggccctggctcttcctgggcagcaggcgaatcgcactggaggcctcttcgcttgcccgttgagcctggaggagactgactgctacagagtggacatcgaccagggagctgatatgcaaaaggaaagcaaggagaaccagtggttgggagtcagtgttcggagccaggggcctgggggcaagattgttacctgtgcacaccgatatgaggcaaggcagcgagtggaccagatcctggagacgcgggatatgattggtcgctgctttgtgctcagccaggacctggccatccgggatgagttggatggtggggaatggaagttctgtgagggacgcccccaaggccatgaacaatttgggttctgccagcagggcacagctgccgccttctcccctgatagccactacctcctctttggggccccaggaacctataattggaaggggttgctttttgtgaccaacattgatagctcagaccccgaccagctggtgtataaaactttggaccctgctgaccggctcccaggaccagccggagacttggccctcaatagctacttaggcttctctattgactcggggaaaggtctggtgcgtgcagaagagctgagctttgtggctggagccccccgcgccaaccacaagggtgctgtggtcatcctgcgcaaggacagcgccagtcgcctggtgcccgaggttatgctgtctggggagcgcctgacctccggctttggctactcactggctgtggctgacctcaacagtgatggctggccagacctgatagtgggtgccccctacttctttgagcgccaagaagagctggggggtgctgtgtatgtgtacttgaaccaggggggtcactgggctgggatctcccctctccggctctgcggctcccctgactccatgttcgggatcagcctggctgtcctgggggacctcaaccaagatggctttccagatattgcagtgggtgccccctttgatggtgatgggaaagtcttcatctaccatgggagcagcctgggggttgtcgccaaaccttcacaggtgctggagggcgaggctgtgggcatcaagagcttcggctactccctgtcaggcagcttggatatggatgggaaccaataccctgacctgctggtgggctccctggctgacaccgcagtgctcttcagggccagacccatcctccatgtctcccatgaggtctctattgctccacgaagcatcgacctggagcagcccaactgtgctggcggccactcggtctgtgtggacctaagggtctgtttcagctacattgcagtccccagcagctatagccctactgtggccctggactatgtgttagatgcggacacagaccggaggctccggggccaggttccccgtgtgacgttcctgagccgtaacctggaagaacccaagcaccaggcctcgggcaccgtgtggctgaagcaccagcatgaccgagtctgtggagacgccatgttccagctccaggaaaatgtcaaagacaagcttcgggccattgtagtgaccttgtcctacagtctccagacccctcggctccggcgacaggctcctggccaggggctgcctccagtggcccccatcctcaatgcccaccagcccagcacccagcgggcagagatccacttcctgaagcaaggctgtggtgaagacaagatctgccagagcaatctgcagctggtccgcgcccgcttctgtacccgggtcagcgacacggaattccaacctctgcccatggatgtggatggaacaacagccctgtttgcactgagtgggcagccagtcattggcctggagctgatggtcaccaacctgccatcggacccagcccagccccaggctgatggggatgatgcccatgaagcccagctcctggtcatgcttcctgactcactgcactactcaggggtccgggccctggaccctgcggagaagccactctgcctgtccaatgagaatgcctcccatgttgagtgtgagctggggaaccccatgaagagaggtgcccaggtcaccttctacctcatccttagcacctccgggatcagcattgagaccacggaactggaggtagagctgctgttggccacgatcagtgagcaggagctgcatccagtctctgcacgagcccgtgtcttcattgagctgccactgtccattgcaggaatggccattccccagcaactcttcttctctggtgtggtgaggggcgagagagccatgcagtctgagcgggatgtgggcagcaaggtcaagtatgaggtcacggtttccaaccaaggccagtcgctcagaaccctgggctctgccttcctcaacatcatgtggcctcatgagattgccaatgggaagtggttgctgtacccaatgcaggttgagctggagggcgggcaggggcctgggcagaaagggctttgctctcccaggcccaacatcctccacctggatgtggacagtagggataggaggcggcgggagctggagccacctgagcagcaggagcctggtgagcggcaggagcccagcatgtcctggtggccagtgtcctctgctgagaagaagaaaaacatcaccctggactgcgcccggggcacggccaactgtgtggtgttcagctgcccactctacagctttgaccgcgcggctgtgctgcatgtctggggccgtctctggaacagcacctttctggaggagtactcagctgtgaagtccctggaagtgattgtccgggccaacatcacagtgaagtcctccataaagaacttgatgctccgagatgcctccacagtgatcccagtgatggtatacttggaccccatggctgtggtggcagaaggagtgccctggtgggtcatcctcctggctgtactggctgggctgctggtgctagcactgctggtgctgctcctgtggaagatgggattcttcaaacgggcgaagcaccccgaggccaccgtgccccagtaccatgcggtgaagattcctcgggaagaccgacagcagttcaaggaggagaagacgggcaccatcctgaggaacaactggggcagcccccggcgggagggcccggatgcacaccccatcctggctgctgacgggcatcccgagctgggccccgatgggcatccagggccaggcaccgcctaggttcccatgtcccagcctggcctgtggctgccctccatcccttccccagagatggctccttgggatgaagagggtagagtgggctgctggtgtcgcatcaagatttggcaggatcggcttcctcaggggcacagacctctcccacccacaagaactcctcccacccaacttccccttagagtgctgtgagatgagagtgggtaaatcagggacagggccatggggtagggtgagaagggcaggggtgtcctgatgcaaaggtggggagaagggatcctaatcccttcctctcccattcaccctgtgtaacaggaccccaaggacctgcctccccggaagtgccttaacctagagggtcggggaggaggttgtgtcactgactcaggctgctccttctctagtttcccctctcatctgaccttagtttgctgccatcagtctagtggtttcgtggtttcgtctatttattaaaaaatatttgagaacaaaa

SEQ ID NO: 126548 - DNA, 3414 bp, Artificial Sequence
  derived and/or modified sequence
atggccggcgcccggagccgggacccctggggcgccagcggcatctgctacctgttcggcagccttctcgtggaattactgttttcaagggcggtggctttcaacctggacgtgatgggggcactgagaaaagagggggaacctggcagcttatttgggtttagtgtagctctgcatcggcagctccagccacggccccagagttggctattggtcggtgccccacaggctctggccctccccgggcaacaggccaaccgcactggaggcctgttcgcatgtcctttgagcctagaggaaactgactgctatcgagtcgacatagatcaaggcgcagacatgcagaaagagtccaaggagaaccagtggctaggtgtaagtgtacggagtcagggccctggcgggaagatcgtcacctgcgcacatcgctacgaggcccggcagcgggtggatcagattctggaaacacgggacatgatagggagatgttttgtactcagtcaggaccttgccatccgggatgaattggatgggggcgaatggaaattctgtgaaggccggccgcagggacacgagcagtttgggttctgccagcagggaactgccgcagccttttctccggatagccactacctattgtttggggcgcccggtacctataactggaaaggtctcctgtttgtaacaaatattgactcctctgatccagatcagcttgtctacaaaaccctggaccctgccgacagactgcccggcccagccggggatctcgcactgaactcgtatcttgggttcagcattgatagcggcaagggcttagttcgggcggaggaattgtcattcgtcgctggcgctcccagggcgaatcacaaaggagccgtggtgatcttgcgcaaggactcagctagccgcctcgtccccgaagtcatgctaagcggcgagcgactgacatctgggttcggctactccttggctgtggccgaccttaacagcgacggttggccagacttgatcgttggcgccccttatttctttgaaagacaggaagaattaggaggcgcagtgtatgtgtacctgaaccagggaggccactgggctggtattagccctctgcgcctgtgtggcagtcccgacagcatgttcggcatctccctggccgtgctaggagacttaaaccaggacgggttcccggacattgctgtgggagccccattcgacggcgatgggaaggtgttcatctaccatggctcttccctgggggtggttgctaaaccatctcaagttttggagggggaggccgtgggcatcaaatcattcggctacagcttgagcggttctttggacatggacggaaatcagtatcctgatctgcttgttggcagcctagcggataccgccgttctgtttcgggccaggcctatactccacgtgtcccacgaagtgtccattgctccccgatccattgaccttgagcagccaaattgtgccggcggccactcagtttgtgttgacctacgcgtctgcttctcatacattgcggtgcccagtagttactctccaaccgtagctctggattatgtgttggacgccgatacagatagaagactgagaggccaggtgcccagagtcacctttctcagccgaaatctcgaagagccgaagcatcaagcctcaggaaccgtgtggttgaagcaccaacacgaccgtgtttgcggagatgcaatgtttcagctgcaggaaaacgtcaaagataaactgcgggctatcgtggtcactctgtcttactctctgcagacaccacggctgcggaggcaagcacccgggcagggtctcccccccgtggcgccaattttgaatgcccaccaaccaagtacccagagagccgaaatccatttcctcaagcagggatgtggggaagataagatctgtcaatccaatttacaactggtacgggcccggttttgtacacgagtttcggatactgagttccagcccctgcccatggatgtggatggcaccacggctctatttgccctgtccgggcagcccgtgatagggctggaactaatggtcacaaacctgccttcagaccctgcccagccgcaagcagacggcgacgacgcccacgaggcccagttactggtgatgctgcctgacagcctgcactatagtggggtaagggcacttgacccagccgaaaaaccactttgcctctctaatgagaatgcctcgcatgtggagtgcgagctggggaacccaatgaagagaggagcacaggtgaccttctacctgatcctttcaacttctggcatttcaattgaaaccacagagctggaggtggagctactcctagctacgatctctgagcaggagcttcatcccgtatcagcccgagcaagggtgtttatcgagctgcctctttcaatcgcaggaatggcgattccccagcagttgtttttcagtggggtcgtgagaggggagagggccatgcagtctgagcgcgatgtgggcagcaaggtgaaatatgaagtaaccgtgtctaaccaggggcaatccttgcgaaccctgggttccgccttcctcaatataatgtggccccatgagatcgccaatggtaagtggttactgtaccctatgcaggtggaattggaaggtggccaggggcctggacagaaaggcctctgctctcctcgccctaacatcctgcatctcgacgtcgatagtagagataggcgtcgtagggaattggagcccccagagcagcaggagcctggcgaacgtcaagagccctcgatgtcctggtggcctgtctcctctgctgagaagaagaagaacatcacgctggactgcgctcggggtactgcaaattgcgtcgtcttcagctgccctctctatagcttcgatcgagcagcggtccttcacgtatgggggcgcctttggaatagcaccttcctcgaagaatactctgcagtgaaatcactcgaggtgatcgtacgcgccaatataaccgtgaagagttctattaagaatctgatgctccgggacgctagcactgtaatccccgttatggtgtacctggaccctatggccgttgtggctgaaggcgttccatggtgggtgatcctgctggcagtactggcgggtctgctggtcttagctctgctcgtcctgttactttggaagatggggtttttcaagagagcaaagcacccggaggctactgtgccgcagtatcacgcagtcaagattccacgggaggatcggcagcagtttaaggaagaaaaaaccggtaccatcttacggaacaactggggaagcccacgaagggagggacctgacgcccaccctatcctcgccgccgatggtcacccagagctgggtcctgatggccatcccgggccgggcaccgcctag

SEQ ID NO: 126549 - DNA, 3414 bp, Artificial Sequence
  derived and/or modified sequence
atggcaggcgctagatcaagagacccttggggtgcatccggaatatgctacctattcgggtcgctgttggtggaactgctgttctctagagctgtcgctttcaacctggatgtaatgggcgcattgagaaaagagggtgaacccggaagtctcttcgggttttcggtcgccctacatcgacagctgcagcctcggccacagagctggctactggtcggcgctcctcaggcgctggccctgccaggccaacaggcgaatcgcacaggtgggcttttcgcctgccccctctcactcgaggagacagactgttatcgggtggacatcgatcaaggcgctgatatgcaaaaggaatcaaaggagaatcagtggctcggtgtctccgtgcggagccaaggaccagggggtaagatcgtaacctgtgcccatcgctatgaagccagacagcgcgttgaccagatccttgaaacacgagatatgatagggcgatgcttcgtactgagccaggacttggcaataagagatgaactggacggcggagaatggaaattttgtgagggccgtccacagggacatgagcagtttggcttttgccagcagggtactgccgcagctttttcgcctgattctcattaccttttgtttggcgcacctgggacatacaattggaaggggttactcttcgtaactaacattgactcttctgatcctgatcagctggtatacaaaactcttgaccccgctgatagactgcccggtccggctggcgatcttgctctaaactcctacctgggtttttccattgatagcggcaagggtttagtccgcgctgaggagctgtctttcgtcgctggggcaccaagggctaaccataagggtgcagttgttattctacgcaaggactcagctagcagactggtgccagaggtgatgctcagcggcgaaaggctgacctctggttttggatacagcctggccgtggcagatttgaactccgatggctggcctgatctgattgtgggcgctccatatttctttgaacgacaagaagaactgggaggcgctgtgtatgtgtacctcaaccagggaggacattgggccggaatctcaccattacggctctgcggcagccctgatagcatgttcggaataagcctggctgtgctgggtgacttaaaccaggatggcttccccgacatcgcggtcggcgctcccttcgatggagacggtaaggttttcatatatcatggcagctccctgggagtcgtcgcaaaacccagccaggtcttggagggggaagcagtggggattaagagtttcggatactctttatccggctctctggacatggatggcaatcagtaccccgatctgctcgttggcagtctcgcagatacagctgtgctctttcgggctagacctattctgcacgtgagccatgaggtatccatcgccccacgatccatcgacctggaacagcccaattgtgccggaggtcattcagtttgtgtggacctgcgcgtctgctttagttacatcgcagtcccctcatcttactctcccacggtcgcactggattacgtgctagacgccgacactgataggcgactgcggggacaggtaccaagggtaactttcttatccagaaatctggaagagccaaaacatcaggcttcaggcacggtgtggctgaagcatcaacacgaccgggtgtgcggagatgccatgtttcagttgcaagaaaacgtgaaggataagcttagagccatagtggtgaccctgtcgtacagcctgcagacgccacgcttacgcagacaggccccaggacaggggctgcccccagtcgcgcctatcctaaatgcacatcagccttccacccagagagcagagatccattttctgaagcaggggtgtggtgaggataaaatatgccagtcaaatctccaactcgttcgcgcaagattctgtacgcgtgtgtccgatactgagttccagcccctgccaatggatgttgatggcaccaccgccttatttgccttgtctggacaaccagttattggactggaactgatggtcactaacctgccctcggatcccgcacagccgcaagctgacggcgatgacgcccacgaggcccagctgctagttatgttgcctgactcgttgcactattctggcgttcgcgctctggacccagccgagaaacccctctgcctatccaatgagaatgcctctcacgtggagtgcgaactcgggaaccctatgaagaggggagcacaggtgaccttttatttgatcctgagtactagcggcatcagcatcgaaaccacagaactcgaggtggaattgctactcgcaactatcagtgaacaggagctgcaccccgtttcagcaagagccagggtgtttatcgagctgccccttagtatagccggtatggctatcccgcagcagctgttcttcagcggagttgtgcgaggggagcgggcaatgcagtctgaaagggacgtgggaagtaaggtgaaatatgaggtcactgtgagcaaccagggtcaaagcctcagaacattgggctccgcgttcctgaacataatgtggccacatgagatagcgaatggcaaatggcttctttatcccatgcaagtggagctggagggaggtcaaggccctggacagaaaggtctatgctcacctcgtcccaatattctgcatctggatgtggacagtcgggaccgtcgacgcagggagttggagcccccagaacagcaggaaccgggagagcgacaggagccttctatgagctggtggccggtgtcctcagctgagaagaaaaaaaacattacattggactgcgcacgtggcacagctaattgcgtggtttttagttgtcccttgtattcctttgatcgtgctgccgtgctccatgtttggggtcgcttgtggaatagtaccttcctagaggaatacagcgcggtgaagagtttggaagtgatagtcagagcaaacatcactgtgaaaagctccatcaaaaatctgatgctcagggatgcctctaccgtgattccagtgatggtgtatcttgaccctatggccgtcgtcgcagaaggggtcccctggtgggttatcctgttggcggtgttggctggattgttggtgctcgccctcctcgtcctgttgctgtggaagatggggttcttcaaaagagccaagcaccctgaagccactgtgccccagtaccatgcagttaagatcccgcgtgaggaccgccagcaattcaaagaagagaaaaccggcactatactgagaaataactggggctcccctcgtcgggaaggccctgatgcgcaccccattttggccgcagacggtcacccagagctgggtccggatggtcatcctgggccaggcaccgcctag

SEQ ID NO: 126550 - protein, 1035 aa, Artificial Sequence
  derived and/or modified sequence
MGGPAAPRGAGRLRALLLALVVAGIPAGAYNLDPQRPVHFQGPADSFFGYAVLEHFHDNTRWVLVGAPKADSKYSPSVKSPGAVFKCRVHTNPDRRCTELDMARGKNRGTSCGKTCREDRDDEWMGVSLARQPKADGRVLACAHRWKNIYYEADHILPHGFCYIIPSNLQAKGRTLIPCYEEYKKKYGEEHGSCQAGIAGFFTEELVVMGAPGSFYWAGTIKVLNLTDNTYLKLNDEVIMNRRYTYLGYAVTAGHFSHPSTIDVVGGAPQDKGIGKVYIFRADRRSGTLIKIFQASGKKMGSYFGSSLCAVDLNGDGLSDLLVGAPMFSEIRDEGQVTVYINRGNGALEEQLALTGDGAYNAHFGESIASLDDLDNDGFPDVAIGAPKEDDFAGAVYIYHGDAGGIVPQYSMKLSGQKINPVLRMFGQSISGGIDMDGNGYPDVTVGAFMSDSVVLLRARPVITVDVSIFLPGSINITAPQCHDGQQPVNCLNVTTCFSFHGKHVPGEIGLNYVLMADVAKKEKGQMPRVYFVLLGETMGQVTEKLQLTYMEETCRHYVAHVKRRVQDVISPIVFEAAYSLSEHVTGEEERELPPLTPVLRWKKGQKIAQKNQTVFERNCRSEDCAADLQLQGKLLLSSMDEKTLYLALGAVKNISLNISISNLGDDAYDANVSFNVSRELFFINMWQKEEMGISCELLESDFLKCSVGFPFMRSKSKYEFSVIFDTSHLSGEEEVLSFIVTAQSGNTERSESLHDNTLVLMVPLMHEVDTSITGIMSPTSFVYGESVDAANFIQLDDLECHFQPINITLQVYNTGPSTLPGSSVSISFPNRLSSGGAEMFHVQEMVVGQEKGNCSFQKNPTPCIIPQEQENIFHTIFAFFTKSGRKVLDCEKPGISCLTAHCNFSALAKEESRTIDIYMLLNTEILKKDSSSVIQFMSRAKVKVDPALRVVEIAHGNPEEVTVVFEALHNLEPRGYVVGWIIAISLLVGILIFLLLAVLLWKMGFFRRRYKEIIEAEKNRKENEDSWDWVQKNQ

SEQ ID NO: 126551 - DNA, 3108 bp, Artificial Sequence
  derived and/or modified sequence
atgggaggacccgctgcaccaagaggcgccggacgcctgagggctctgttattagctctggtggtggcgggaattcccgcaggggcgtacaatttggacccacagaggcccgtccactttcagggccctgctgactctttctttggctacgccgttctggagcactttcacgataacacgcgatgggttctcgtaggggctccaaaggcagattctaagtactcccccagcgtaaagagccctggcgctgtgttcaagtgccgggtacacactaatcctgatcgtaggtgtaccgagctggatatggctagaggaaagaatagagggaccagctgcggcaagacgtgtcgggaggacagggacgacgagtggatgggggtctcattagctcggcagccgaaggcggacggcagagtgcttgcatgcgcccacaggtggaaaaacatttactacgaggccgatcacatactgccacacggtttttgttatatcataccttctaatctgcaagccaaaggccgcaccctgatcccctgttacgaggagtacaagaagaaatacggagaggaacatggctcttgccaggccggtatcgctgggttttttaccgaggagctggtggtgatgggcgctccaggttctttttactgggcaggcacaattaaggtgctaaatctcactgacaacacttatctaaaactgaacgacgaagtgatcatgaaccgccgctacacttatctcgggtatgctgtgacagctggccactttagccatccttctacgatcgatgttgtcgggggcgcaccccaggacaaaggaattggcaaggtgtacatcttcagggccgatcgcagatcggggaccctcattaaaatattccaagcgagtggtaaaaaaatgggcagctacttcggaagctcgttatgcgccgttgacctcaatggcgacgggctgagcgacttgttggtgggcgcaccaatgtttagcgaaatcagggatgaggggcaggttaccgtctacatcaaccgcggtaacggagcactcgaggagcagttagcgctgaccggtgatggggcctataatgcccactttggcgagagcatcgcctcacttgacgacctcgataatgacggcttccctgatgtcgcaattggggctccaaaggaagacgacttcgcaggcgcggtgtacatttaccacggcgacgcaggaggtattgttccgcaatattctatgaaactgagcggccaaaagattaacccggtcctacgtatgtttggccaaagcatctcaggaggcatagatatggatggtaacggataccccgatgtcaccgtcggagccttcatgtccgacagcgttgttcttttacgtgcaaggcccgtaattaccgtcgatgtgagcatttttctgcctggcagcattaatattaccgctccacagtgccatgacggccagcaaccggtcaattgcctcaatgtgactacatgtttctctttccacgggaagcacgttccaggggagatcgggctcaattacgttctgatggccgacgtggcaaagaaagaaaagggacaaatgccaagagtttacttcgtcctattgggagagacaatgggtcaggtcactgaaaagctccagctgacgtatatggaagagacgtgccgccactacgtggcacacgttaagagaagagttcaagacgtgatctctccaattgtgttcgaagctgcttactctctgagcgagcacgtgacaggcgaggaggagagggagcttccccccctcacacccgtcctccgctggaaaaaggggcagaagattgctcagaagaaccagaccgtctttgaacgcaactgtagatcggaggattgcgcggccgaccttcagttacagggcaagctgttgttgagcagcatggacgaaaagacactctacctggccctgggggcggttaaaaatattagcctcaacatctcaataagcaacctgggagatgatgcctacgacgccaatgtgagttttaatgttagcagggagctcttcttcattaacatgtggcagaaagaggagatgggaattagctgtgagttgttggagtcggacttcctcaagtgttcagtggggtttccttttatgaggtctaaatcaaagtacgagttcagtgtaatcttcgatacatcgcacctgagtggcgaagaggaagtcctctcctttattgtcaccgcacagagcggaaacacggagcgctccgagtccctgcatgacaacactctggtgctgatggtccctctgatgcacgaggtggatacctctattacgggaattatgagtccaacctcctttgtctacggcgagagtgtggatgctgctaactttatacaattggatgatcttgagtgccatttccagccaattaacattaccttgcaggtgtataacaccggtcctagcaccttgcctggctccagtgtctccatcagcttccctaataggctttctagcgggggcgctgagatgtttcatgtccaagaaatggtcgttgggcaggagaagggaaattgcagttttcaaaagaacccaaccccttgcatcattccccaagagcaggaaaacatattccacactatcttcgcattttttacaaagtccggccgtaaggtgttggattgtgagaagccaggaatctcctgtctcactgcgcactgcaatttctccgccctggccaaggaggagtcccgcacaatcgacatttacatgttgctgaacaccgagattcttaagaaagacagtagctctgtcatccagtttatgagcagagcgaaagtgaaggtggacccagccctaagagttgtcgagatcgctcatggcaaccctgaggaagtgaccgtagttttcgaagccctccataatcttgagcctcggggctatgtcgtaggctggatcatagcgatttccctgcttgtaggcattttgattttcttgctcctggccgtgctgttatggaaaatgggcttcttcagacggcgctacaaagagattatcgaggctgagaaaaaccggaaggaaaacgaagactcatgggattgggtgcaaaagaaccaatag

SEQ ID NO: 126552 - DNA, 7889 bp, Artificial Sequence
  derived and/or modified sequence
ccggcccgggacccgctcgcgcagacttctcgggcggactgaggacgccgccgctcggggccgcccctgtgctcgccttcagcgcccgctcagcccgccgtccgcgccccggtggcgggcccgacgcccgcattccgcccgtgtccaggcgcagagctcccgccccggggagcttcctggccgtcggcgggccccgcggcccgcgcgctcggcgccctgctcgccgggcagaggggaaggcggcggccggctggggatgggcggcccggctgcgccgaggggcgccgggaggctccgcgcgctgctgctggcgctggtggtcgcggggatccccgcgggcgcctacaacctcgacccgcagcgccccgtgcacttccagggccccgctgactcgttcttcggctacgcagttctggagcatttccacgacaacacgcgctgggtccttgtgggcgcaccaaaggcagattccaaatacagcccttcagtgaagtctcctggggctgtgtttaagtgccgtgttcacaccaaccctgaccggagatgcaccgaactggacatggctcgagggaagaatcggggcacgtcctgcggaaagacctgccgggaagaccgcgatgatgagtggatgggggtgagcctggcccgacagcccaaggctgatggccgtgtgttggcctgtgctcatcgctggaagaacatctactatgaagccgaccacatcctaccccatggcttctgctacatcatcccctccaacctccaggccaaaggcaggacgctgatcccttgctatgaagagtataagaagaagtacggagaggaacacggctcctgccaggctgggatagcgggcttcttcaccgaggagctggtggtgatgggtgctccagggtcattttattgggctggaaccatcaaagtgctgaaccttacggacaacacctatttaaaactgaacgacgaagtgatcatgaacaggcggtacacctacctgggctacgcagtgaccgctggccacttctctcacccgtccaccattgatgtggtaggaggtgccccacaggacaaaggcatcggcaaggtttatattttcagagctgaccgaagatcaggcaccttaattaagatctttcaagcatcaggtaaaaagatgggctcttacttcggctcctccttgtgcgcagttgacctgaatggggacggcctctctgacctgctggtgggggcccccatgttttctgagatcagggatgagggacaggtcactgtctacatcaacagaggaaatggagccctcgaggagcagctggctctgactggggatggtgcctacaatgcgcactttggagagagcattgccagcctggacgatctggacaatgatgggttcccagatgtggccattggtgcacccaaggaggatgacttcgcaggggcggtctatatctatcatggtgatgccggtgggatagtccctcagtactcaatgaaactgtctgggcagaagataaatccagtgctccggatgtttggtcagtccatatcgggaggcattgatatggatggaaatggctatcctgatgtcactgttggagccttcatgtccgacagcgtggttcttctcagagcaaggcctgtcattacggtggatgtctccatcttcctcccgggctccatcaacatcacagcgcctcagtgtcacgacggacagcagcctgtgaactgcctgaacgtcaccacctgcttcagcttccatggcaaacacgttccaggagagattggcctgaattatgttctgatggctgacgtggccaaaaaggagaagggccagatgcccagggtctactttgtgctgctgggagagaccatgggtcaggtcacagagaagctgcagctgacttacatggaggagacgtgtcgtcactatgtggcccatgtgaagcggagggtgcaggacgtcatcagcccgatcgtgtttgaagcagcctacagcctcagtgagcatgtgactggagaggaggagagggaactgccgcctctgacaccagttctccgctggaaaaagggacaaaagattgcccaaaagaatcagactgtttttgaaaggaattgccgttcagaggactgtgccgcagacctgcagcttcagggtaaactgctgctctccagtatggatgagaaaaccctgtatctagctttgggggctgtgaagaacatctccctaaacatctctatctccaacctcggagatgatgcctatgatgccaacgtgtccttcaatgtttcccgggagctcttcttcatcaacatgtggcagaaggaggagatgggcatctcctgtgagctgctggaatcggacttcctcaaatgcagcgtgggatttcctttcatgaggtcaaagtcaaagtatgaattcagcgtgatctttgatacaagccacctgtctggggaagaggaagttctcagcttcattgttactgctcagagtggcaacacggagcgctctgaatccctgcatgacaacaccctcgtgctgatggtgccactgatgcacgaggtggacacgtccatcaccggaatcatgtctccaacctcctttgtatatggcgagtccgtggacgcagccaacttcattcagctggatgacctggagtgtcactttcagcccatcaatatcacccttcaggtctacaacactggcccaagcacccttccagggtcatctgtcagcatctctttccctaatcgactctcatctggtggtgcagagatgtttcatgtccaggaaatggtggtgggccaagagaagggaaactgctctttccagaaaaacccaactccctgcatcatccctcaagaacaagaaaatatcttccacacaatatttgcttttttcacaaagtctggaagaaaagtcttggactgtgaaaaaccaggaatttcttgcctaacagcacactgtaactttagtgctcttgctaaagaagaaagtcgtactatagacatttacatgctgctgaacacagaaatactgaaaaaggacagttcgtctgtcatccagttcatgtcccgcgccaaggtgaaggtggatcctgccctaagggtggtggaaatagctcatgggaacccagaagaggtgacggtggtcttcgaggccctgcacaatctggagccccgtggctacgtcgtggggtggatcatcgccatcagtttgttggtgggaatcctcatcttcctgctgctggccgtgctgctctggaagatgggcttctttcgccgaaggtacaaagaaattatcgaagctgagaagaaccggaaagagaatgaagacagttgggactgggtccagaaaaaccagtgagctgccacaccagtcacatgacctgatcactagcctgtcatccttggtctttgtatcttccatatttggaagaaaaaaatcttctccagatttttcggaggccccactgatgctgttctcttcttcattctatcaagcccaggtgccagcctgaggcagccacttcggccaggtcacacgaccggggccagcaccacttcctttaaagatgaactctgaactttggagagtgagctacagagccgagcaatatttatggatgcaacacgcatggtcaaccctcaggggaaaactgttacctaaagtatttttataaatataagccttttatactgattatgtcttttatatttgtatcgatgttttattatttctattaaatagttatataattcactcaagcactgatatctggcctaaaatcttggaagtacatgtccatgaatacaaattttaaaggatgaaaatcttaccgtactttggaacttgctgtttaaaaagacagatgaaataagttgaagaaacctcatgtaatgaatccaccaggctggcagtggtgcatataaactgtgggtgtggcaagaccccgaagacatttcacatctttatcgcctcgatcaagtgtggagtcacatgctaatgtgtgctaaagaactgtaagtgttttttcatatgtacttttcattggaagattcccaacaagaatttggatggaaaacctgatccctagcaagaagtctgctctgtatcacctttatatagcagacatgtcaccctgcttctacacagatgatggatgaaagcttggagcaatgccatgtggtcatctggtaaacctcagaatggcgtctcatcctggacatcctgcatcagagttcacacaccacaaggactaaatccttgtcccctaagcaaagaattgggtctgaatgctgtgagggattgcctttttgtggtaattttcattgagagatcttcatttcccctaccaccctggctgtcccagctagtggtgattgcagattccttcccagagaggacatttaaccgttttaaaaaaaatgtcttagattgggttcccaagaagcagtccctgaaacaaggatttgtgtgcaagtaacttattaaggaagtattcccaggggataccagtaagagagtgggggaagcaggacaaggaaggagacaaagccaggcaaatgtttgtcatttcagggagagctccatgaagtttagcctcagcctgatcaggggaactccggaggaaaagttaggcctcagaggtgtcccaacctgaatcaaggggctggctgcacccagaggagatgtaaacgttttattctcaattcctgctggcgtaatggctccagtagctcaggacagtcctctaaaggacaaccacagatgcatcctcagccaggggagacacagggaaatgatgcaaaagaaatgatgcaaaggatctgagcagaacactgcccctccccaccccctgaatgtgtgagtgctgagttacggccttcagtatccaagctctctgtttgacagtagatatattgtcagatgcactgtgctgcttagttttgagtgcagtgtgattttctgaaagggcaatgagatgatggatgtagcatgctcagcactgacctggcccatagtgatcactcaataactgttaacagctatggctgctattcctactgatggataaccatctaataagacagaaaacatggggctaagagcagggtctaacggagtcttaatggcttattacagcctgccaaagtgccagctacatacacatggcatccagtgcggatgaaacaatctataaaaccaagggtctttcttatagcaccttttttactggaagctaacacgttgggagtccgtgaacattgtcaaaaagacatcaaactcaacttctgggaagacagatttttaatacacatacttggctaatactcacaaacatatctaaagttttggcaaaattatgagggtgatgggtgggtactaacctggcatggagcaggtgtgtcttttggtttcttatgcagttgactctgctgcagggagattacagatgtaacctcatgcttctcttcctggtgaacatgggaatagaccaaaaaaatcaagggtcaatggcatgaactaagctgatcctggaaatcagggatgttgcatctaactgtgggatggaggcacagaggtagctacagggagcaggacgaggcaaagaaagcagctgtcactcagagttcgcttatgagttttatcaaaagcagcaagaaaagcagtcttgggtgggttttatcacttattaacagccatttatgaggcccctgctgtgtgtcaggcactgtgcaaggtgctggaggttccccagagaacacttcagggacattttgcctcagggtggcaaaatgcagtggcatgtggactttttgaatgggatgccatttgcagctttcctttgatggactcttgttcataatgccatgttttctttaatgaatcatttaggattcttaggtgatatttctggaacagcaccatcaacagctttggccacatgcacttagagcaactaacttgcctcctgccggggtgtaggtgcgttggtgacagtgtagaagggtgattcgcaggcccatgttctgcccaccagcaaagccccactggagaagggtagactcctgtgggcagtctcagagctgggacctatttgcttctgcttgattctgcgtgggtggacccacatgagcagctgtatacccaggaggtcactaagactttataaaggcaggttttaagaaaaccagccttggcatcaccaccagcagatactgaaagcctccccaggaacctgtctggggaaggatgatgcctctgctggtctgatcgtgctgagtagcaggtgggctacggggactggggagttaagcattttgtgcagtgatagagaagtcaagcatatcgttagcgctctctcaacttgggcagttcacaagctccttcccagctcagaagccctctctatgctctcaggggaagcagatggggtggatcagtacatctgtgttacccttccagaatattatttgaaaattctacagtatgttctactttctccccttcctgcttccatggtttcactgtggaatcctataagatattctcctgagcagtattatttcagtttccttcagcttttagttgaatcttcaatgtggttttaaccaactgttcagagaactgaaatggtttttaaatatgaaaaaggacctttgtaaaaatggagtaaaacagtgccccttttttaaaaaaagttttgcttatgcttaatttacataggactcaggagagtttggaacatcctccaagtgggccatagagctgtcacaaagaagaggccatgatgtttagaaacaaggggacactagcaggaggggcagggtccactggcttagtggcaactgacaggcatccattccgaataactcagcactgaggtttcctcaggcagttctttaggaaaactgtcagcatcatgggtactcagaggtatggtagaccttgtagaagatccactaggaagtcctccttcaccaaatcatgtagctactgcccttgagccaaaggcaatgaggtttaaaacaaaaacccaacagcactcctgggaacatcctgttttccatgcggaagcatagcagatccccagacgatccgtgtgctgtatgctacctgttgaaccctagcatggtggctttttaaaaggttatttatgacttttatttttgggtaaggcattatggccaggtgcatgcagttatgtctgggttacgtgtgaaacgtacatctggtgaactgtatacttggctcaaacttctcaaaatttagaggtgctggaaaggattgtcacttggagcctttagtagacaaaaggcagaaagtgagcatcatttcagaaatgctttagtatgcacacttttagctgatattttgatatatagaataataatatacacagtggagaatattcaaagagtggctgaagggagaatacagagccagtagggccaaaatgaaacttctaggatgtcttctgaattttcagcacatggggggaataagtgaacaaatttcccaacatcgtgcaatgctttatagcacaatgatctagatttcagactgtgttaaggttttttctttgttgatgttgttgttttaattctaatgtgcacggtgtgactggcagagtgagtttaaaagctttacgagtgattaattgcttggcaggcacccacgctatctgcatttccagaactttactgatgcatccatgtacatttccactgaggaattttggtgggtggggggaggttgtgctgcctcacaatgtcacgtgtattaaagtctaagcagtcacttctgattcacttgcactgtttgggaaatgtcaggtttacaaaaacatacatgtttggaataaaaaatggctgcaaacaattcagaa

SEQ ID NO: 126553 - DNA, 3108 bp, Artificial Sequence
  derived and/or modified sequence
atgggcggccctgctgcccccaggggggccggccgcctgcgggccctgctgctggccctggtggtggccggcatcccagctggggcctacaacctggacccccagaggcctgtgcacttccagggccctgctgacagcttcttcggctatgctgtgctggagcacttccatgacaacacccgctgggtgctggtgggcgcccccaaggctgacagcaagtacagccccagcgtgaagagccctggagctgtgttcaagtgccgggtgcacaccaacccagaccggcgctgcacagagctggacatggcccggggcaagaacagaggcaccagctgtgggaagacctgccgggaggacagagatgatgagtggatgggcgtgtccctggcccggcagcccaaggcagatggccgggtgctggcctgtgcccaccgctggaagaacatctactatgaagctgaccacatcctgccccacggcttctgctacatcatccccagcaacctgcaggccaagggccgcaccctcatcccctgctatgaggagtacaagaagaagtatggagaggagcacggcagctgccaggccggcattgctggcttcttcacagaggagctggtggtgatgggcgcccctggcagcttctactgggccggcaccatcaaggtgctgaacctgacagacaacacctacctgaagctgaatgatgaggtgatcatgaacagacgctacacctacctgggctatgctgtgacagctggccacttcagccaccccagcaccattgatgtggtgggcggggccccccaggacaagggcatcggcaaggtgtacatcttccgggctgaccggcgcagcggcaccctcatcaagatcttccaggccagcggcaagaagatgggcagctacttcggcagcagcctgtgtgctgtggacctgaatggagatggcctgagtgacctgctggtgggcgcccccatgttttctgagatcagagatgagggccaggtgacagtgtacatcaacagaggaaatggagccctggaggagcagctggccctgactggagatggagcctacaatgcccactttggagagagcatcgccagcctggatgacctggacaatgatggcttcccagatgtggccatcggggcccccaaggaggatgactttgctggagctgtgtacatctaccatggagatgctgggggcatcgtgccccagtacagcatgaagctgagcggccagaagatcaaccctgtgctgaggatgtttggccagagcatcagcggcggcatcgacatggatggaaatggctacccagatgtgacagtgggcgccttcatgtctgattctgtggtgctgctgcgggcccggcctgtgatcaccgtggatgtgtccatcttcctgcccggcagcatcaacatcacagccccccagtgccatgatggccagcagcctgtgaactgcctgaatgtgaccacctgcttctccttccacggcaagcacgtgcctggagaaattggcctgaactacgtgctgatggctgatgtggccaagaaggagaagggccagatgccccgggtgtactttgtgctgctgggggagaccatgggccaggtgacagagaagctgcagctgacctacatggaggagacctgccgccactacgtggcccacgtgaagagaagagtgcaggacgtcatcagccccatcgtgtttgaagctgcctacagcctgtctgagcacgtgactggagaggaggagcgggagctgccccccctgacccctgtgctgcgctggaagaagggccagaagatcgcccagaagaaccagacagtgtttgagaggaactgccgctctgaggactgtgccgctgacctgcagctgcagggcaagctgctgctgagctccatggatgagaagaccctgtacctggccctgggcgctgtgaagaacatcagcctgaacatcagcatcagcaacctgggagatgatgcctatgatgccaacgtgtccttcaacgtgtcccgggagctgttcttcatcaacatgtggcagaaggaggagatgggcatcagctgtgagctgctggagagtgacttcctgaagtgcagcgtgggcttccccttcatgaggagcaagagcaaatatgagttcagcgtcatctttgacaccagccacctgtctggagaggaggaggtgctgtccttcatcgtgacagcccagagcggcaacacagagaggtctgagagcctgcatgacaacaccctggtgctgatggtgcccctgatgcatgaggtggacaccagcatcaccggcatcatgagccccaccagctttgtgtatggagagagcgtggatgctgccaacttcatccagctggatgacctggagtgccacttccagcccatcaacatcaccctgcaggtgtacaacacaggccccagcaccctgcccggcagctctgtgtccatctccttccccaaccggctgagcagtggaggagctgagatgttccacgtgcaggagatggtggtgggccaggagaagggcaactgcagcttccagaagaaccccaccccctgcatcatcccccaggagcaggagaacatcttccacaccatctttgccttcttcaccaagagcggcaggaaggtgctggactgtgagaagccaggcatcagctgcctgacagcccactgcaacttcagcgccctggccaaggaggagagcaggaccatcgacatctacatgctgctgaacacagagatcctgaagaaggacagcagcagcgtcatccagttcatgagccgggccaaggtgaaggtggaccctgccctgcgggtggtggagatcgcccacggcaaccctgaggaggtgacagtggtgtttgaggccctgcacaacctggagccccggggctacgtggtgggctggatcatcgccatcagcctgctggtgggcatcctgatcttcctgctgctggccgtgctgctgtggaagatgggcttcttcagaagacgctacaaggagatcattgaagctgagaagaacagaaaagaaaatgaagattcctgggactgggtgcagaagaaccagtag

SEQ ID NO: 126554 - DNA, 3108 bp, Artificial Sequence
  derived and/or modified sequence
atgggcggccccgccgccccccggggcgccggccggctgcgggccctccttctggctctagtggtcgccgggatccctgccggagcctataacctagatccccagcgccctgtccacttccagggccctgccgatagcttctttggatacgcggtgttggagcacttccatgacaacaccaggtgggtgctcgtgggagcccccaaagccgactccaagtatagccccagcgtcaagtcacccggcgccgtttttaaatgtagggtgcacaccaatcctgatcgacgatgcacagaactggacatggccaggggaaagaaccgcgggacatcttgcggtaaaacctgccgggaagatcgagacgacgagtggatgggcgtgagcctggccagacaacccaaggctgatgggagggttcttgcatgtgctcaccgctggaagaatatctattacgaggcagatcatatcttgcctcatggcttctgctacatcattccgagtaatctgcaagctaaggggagaactctaattccctgctatgaagaatataaaaaaaaatacggtgaggaacatggcagctgtcaggccgggatagccggattcttcacagaagagctagtggtcatgggcgccccaggtagcttttattgggccggaacaattaaggtgctgaacttaaccgataatacatatctcaagctgaacgatgaggttatcatgaacagacggtatacgtatctcggttatgcggtcaccgccggacattttagtcatccaagcacgatcgatgtggtgggcggtgctccacaagataaggggatcggtaaagtgtacatctttcgggccgaccgaagatctggaacactgatcaagatctttcaggcttcaggaaagaagatgggtagctactttgggtctagcttgtgcgctgtggacctgaatggcgacggcctgagcgatctgctggtgggagcaccaatgttctcagagatcagagacgagggccaagtgaccgtatatattaatcgcggtaatggggctttggaagagcagttggcgctcacaggagacggggcctataatgcacactttggcgaaagcattgcgtccttggacgatttggataacgatgggtttcccgatgtagctattggagctccgaaggaggacgattttgctggggcagtgtatatttaccatggggacgcgggcggcatagtgccccagtacagcatgaagctgagtggccaaaagatcaatcctgtcctgagaatgttcggtcagtcgatcagcggcggcatcgacatggacggtaacgggtaccctgatgtgaccgtgggagctttcatgagcgattccgtggtgctcctaagagcaagaccagtaatcacagtggacgtgtccatattccttcctggctccattaatatcacggcacctcagtgtcatgacggccagcagccggtgaattgcctgaacgtgactacttgctttagctttcacggaaagcacgtcccgggcgaaataggactgaactacgtacttatggctgacgtggcaaaaaaggaaaaaggccagatgccccgcgtctacttcgtgctgctgggggaaacgatgggtcaagtgactgaaaagctacagctaacctacatggaagaaacatgccggcactacgtcgcacacgtcaaaagaagggtccaagatgttattagtccgatagtttttgaggctgcttattctctcagtgaacacgtgactggcgaggaagagcgggagctccctcctctgaccccagtccttaggtggaagaagggccaaaaaattgcccaaaagaaccagacggtgtttgagcgtaattgccggtccgaggattgtgcggctgatctacagttgcaaggtaagctcttgcttagcagcatggacgagaagacattatacctcgctctcggggctgtgaagaatatttccctgaacatcagcatctctaaccttggcgacgatgcgtacgatgccaatgtgtccttcaatgtgagcagggagttattcttcattaacatgtggcagaaggaagaaatgggtatttcctgcgagttactcgaatcagattttttaaaatgctccgtgggatttccattcatgcgcagtaaatcaaagtacgaattttccgtgatcttcgataccagccacttgtcaggggaagaagaggttctctcttttattgtgaccgctcagtccggaaataccgagagatcagagagcctgcacgataatactctggttctgatggtacccttgatgcacgaggtggataccagtataaccggtattatgtcgccgacgagtttcgtatatggtgaatctgtggatgccgccaattttatacagctagacgatctggagtgccatttccagcctataaacattacgctgcaagtgtataacacggggccctcaactctcccaggctcctctgtctcaatctcctttcccaacaggttatcttctggcggggccgagatgttccatgttcaagaaatggtcgttggccaagagaagggcaattgcagcttccaaaaaaaccctacgccttgtattattccacaagagcaggaaaatatcttccacactatcttcgccttcttcaccaagtcgggacgcaaagtgctcgactgtgagaaaccaggcatatcatgtctcacagcgcattgtaatttctctgccctggccaaagaagaatcacgaacaatcgacatctacatgctactcaacacagagatactgaaaaaagattcttcgtccgtcattcagttcatgtctcgagcaaaagtgaaggtagaccctgcactccgggtcgttgagatagcccacggcaaccccgaggaggttaccgtggtttttgaggccctacacaacttggagccaagagggtatgtggtgggatggattattgctatttcgctcctagtgggcatactaatattcttgctgctggccgtgctgctttggaagatggggtttttccgacggagatacaaggaaatcatcgaggctgagaaaaaccgcaaggagaacgaagattcttgggattgggtgcagaaaaaccaatag

SEQ ID NO: 126555 - DNA, 3108 bp, Artificial Sequence
  derived and/or modified sequence
atgggcggtcccgcagccccacgtggagctggccgtctgcgcgcacttttgctcgctctggtggtcgccggtattccagccggtgcctacaacctggacccccagcggccagtccacttccaggggccagcggatagcttcttcggctacgcagtcttggaacattttcacgacaacacaaggtgggtgttagtcggggctcctaaagctgattctaagtattcaccaagtgttaaaagtccaggagctgtgttcaagtgccgcgtccacaccaatcccgatagacgatgcaccgaactcgacatggctcggggtaagaatcggggaacttcctgcgggaaaacctgtcgggaagaccgagatgacgagtggatgggggtctcattggcaagacagcccaaagcagatggcagagtgctggcatgcgcacacaggtggaaaaatatctattacgaagctgatcacattttgcctcatggcttttgttatatcatcccatcaaacttgcaggccaaaggtagaacactgatcccttgttacgaagaatacaagaagaagtacggtgaagaacatgggtcctgtcaggcaggaattgccggattcttcactgaggaacttgttgtgatgggggcacctggctccttttactgggccggaacgataaaagtactgaacctgaccgataatacctacctgaagctaaacgacgaagtgattatgaaccggaggtacacatatctcggctacgcggtcactgcagggcacttctctcatccgtccactatcgacgtagtaggcggtgcccctcaagataaaggtattgggaaggtgtacatttttagggccgaccgacgaagtggcacactgatcaagattttccaggccagcggcaagaagatgggttcctatttcgggtccagcctatgcgcagtggatctcaacggagacggtctgagcgaccttcttgtgggggcacccatgtttagcgaaatccgtgatgagggacaggtgactgtgtacatcaatcgcggtaacggggctttagaagagcaactggctctgacgggagacggggcttataacgcccacttcggggaatcaatagcttctctcgacgatctggataacgacgggttccccgacgtggccattggcgcacctaaggaggacgacttcgctggggctgtatatatttatcatggggacgcaggcggaatagtgccccagtatagcatgaaactgagtggacaaaagatcaatcccgtgctcagaatgtttggccaatcaatctccggaggcatcgacatggacggcaatggatatccagatgttacggtcggtgccttcatgtccgattcagtcgtgcttctgagggccagacccgtcatcacggttgatgtgtcgatctttttacctggatctataaacattacagcccctcagtgtcacgacggccaacagcctgtgaattgtttgaatgtcaccacatgcttcagcttccacggtaagcatgtgcctggggagatcggcctcaactacgtcctgatggctgacgtggcaaagaaggagaaaggccagatgccacgagtctattttgtgctgttgggcgaaacgatgggacaggtaacggagaagctgcaactgacttatatggaagagacatgccggcactacgttgcccacgtaaaaaggagagtacaggacgtgatcagtcccatcgtgttcgaagccgcatacagcctcagtgagcatgtgactggggaggaggaacgggaactgcccccactgacccccgttctccgttggaaaaagggccagaagatcgcccagaagaaccaaacagtatttgaaagaaattgcagaagtgaagactgtgcagctgacctgcagctacagggcaagttactgctctcaagtatggatgaaaaaacgctatatctcgccctgggcgcagtgaaaaatatctctcttaatatttcaatctccaacctgggagacgatgcgtacgatgctaacgtaagctttaacgtcagtagagagttgttcttcatcaatatgtggcagaaggaagaaatggggataagctgtgaacttctggaaagcgacttcctaaaatgttcagttggcttccctttcatgcggtcaaaatctaaatatgagttctcagttatattcgacactagccacctttcaggcgaagaggaagtactgagttttattgtaaccgcccagtccggcaataccgagaggagtgaatctcttcacgataacaccctggtgttgatggtgccactgatgcatgaggtggacacatccatcacaggcattatgtctccaacaagcttcgtgtatggcgaatccgtggacgccgctaattttattcagttggacgatttggaatgtcatttccaacctatcaacattaccctgcaggtatataatacaggcccatcaacactgccaggaagcagtgtatctattagcttcccaaatcgtttgagttctggcggtgctgaaatgttccacgtgcaagagatggtggtgggccaggagaagggaaattgctccttccaaaaaaatcccacgccttgcatcattccacaggaacaagagaacatatttcataccatatttgcattctttacgaagagcggcaggaaggtcctggactgtgaaaagccaggcattagttgtctgacggctcactgcaatttttctgccctggccaaggaggaatccagaacgatcgatatctatatgctgctcaataccgaaattttgaagaaggattcaagttctgtcatacagttcatgtcccgcgctaaggttaaagtggacccagcactccgagtggtggagatcgctcatggaaaccccgaagaggtcaccgtcgtgttcgaggcccttcacaacctggagcctcggggatacgtggtaggctggatcatcgctatctccctgctggtcggcattctgatctttctgctgctggctgtgctcctttggaagatgggctttttccggaggcgctacaaggagattatcgaagcggaaaagaaccgcaaagaaaacgaggactcttgggactgggtgcagaagaatcagtag

SEQ ID NO: 126556 - DNA, 3108 bp, Artificial Sequence
  derived and/or modified sequence
atgggcggccccgccgcccccagaggcgccggcagactgagagccctgctgctggccctggtggtggccggcatccccgccggcgcctacaacctggacccccagagacccgtgcacttccagggccccgccgacagcttcttcggctacgccgtgctggagcacttccacgacaacaccagatgggtgctggtgggcgcccccaaggccgacagcaagtacagccccagcgtgaagagccccggcgccgtgttcaagtgcagagtgcacaccaaccccgacagaagatgcaccgagctggacatggccagaggcaagaacagaggcaccagctgcggcaagacctgcagagaggacagagacgacgagtggatgggcgtgagcctggccagacagcccaaggccgacggcagagtgctggcctgcgcccacagatggaagaacatctactacgaggccgaccacatcctgccccacggcttctgctacatcatccccagcaacctgcaggccaagggcagaaccctgatcccctgctacgaggagtacaagaagaagtacggcgaggagcacggcagctgccaggccggcatcgccggcttcttcaccgaggagctggtggtgatgggcgcccccggcagcttctactgggccggcaccatcaaggtgctgaacctgaccgacaacacctacctgaagctgaacgacgaggtgatcatgaacagaagatacacctacctgggctacgccgtgaccgccggccacttcagccaccccagcaccatcgacgtggtgggcggcgccccccaggacaagggcatcggcaaggtgtacatcttcagagccgacagaagaagcggcaccctgatcaagatcttccaggccagcggcaagaagatgggcagctacttcggcagcagcctgtgcgccgtggacctgaacggcgacggcctgagcgacctgctggtgggcgcccccatgttcagcgagatcagagacgagggccaggtgaccgtgtacatcaacagaggcaacggcgccctggaggagcagctggccctgaccggcgacggcgcctacaacgcccacttcggcgagagcatcgccagcctggacgacctggacaacgacggcttccccgacgtggccatcggcgcccccaaggaggacgacttcgccggcgccgtgtacatctaccacggcgacgccggcggcatcgtgccccagtacagcatgaagctgagcggccagaagatcaaccccgtgctgagaatgttcggccagagcatcagcggcggcatcgacatggacggcaacggctaccccgacgtgaccgtgggcgccttcatgagcgacagcgtggtgctgctgagagccagacccgtgatcaccgtggacgtgagcatcttcctgcccggcagcatcaacatcaccgccccccagtgccacgacggccagcagcccgtgaactgcctgaacgtgaccacctgcttcagcttccacggcaagcacgtgcccggcgagatcggcctgaactacgtgctgatggccgacgtggccaagaaggagaagggccagatgcccagagtgtacttcgtgctgctgggcgagaccatgggccaggtgaccgagaagctgcagctgacctacatggaggagacctgcagacactacgtggcccacgtgaagagaagagtgcaggacgtgatcagccccatcgtgttcgaggccgcctacagcctgagcgagcacgtgaccggcgaggaggagagagagctgccccccctgacccccgtgctgagatggaagaagggccagaagatcgcccagaagaaccagaccgtgttcgagagaaactgcagaagcgaggactgcgccgccgacctgcagctgcagggcaagctgctgctgagcagcatggacgagaagaccctgtacctggccctgggcgccgtgaagaacatcagcctgaacatcagcatcagcaacctgggcgacgacgcctacgacgccaacgtgagcttcaacgtgagcagagagctgttcttcatcaacatgtggcagaaggaggagatgggcatcagctgcgagctgctggagagcgacttcctgaagtgcagcgtgggcttccccttcatgagaagcaagagcaagtacgagttcagcgtgatcttcgacaccagccacctgagcggcgaggaggaggtgctgagcttcatcgtgaccgcccagagcggcaacaccgagagaagcgagagcctgcacgacaacaccctggtgctgatggtgcccctgatgcacgaggtggacaccagcatcaccggcatcatgagccccaccagcttcgtgtacggcgagagcgtggacgccgccaacttcatccagctggacgacctggagtgccacttccagcccatcaacatcaccctgcaggtgtacaacaccggccccagcaccctgcccggcagcagcgtgagcatcagcttccccaacagactgagcagcggcggcgccgagatgttccacgtgcaggagatggtggtgggccaggagaagggcaactgcagcttccagaagaaccccaccccctgcatcatcccccaggagcaggagaacatcttccacaccatcttcgccttcttcaccaagagcggcagaaaggtgctggactgcgagaagcccggcatcagctgcctgaccgcccactgcaacttcagcgccctggccaaggaggagagcagaaccatcgacatctacatgctgctgaacaccgagatcctgaagaaggacagcagcagcgtgatccagttcatgagcagagccaaggtgaaggtggaccccgccctgagagtggtggagatcgcccacggcaaccccgaggaggtgaccgtggtgttcgaggccctgcacaacctggagcccagaggctacgtggtgggctggatcatcgccatcagcctgctggtgggcatcctgatcttcctgctgctggccgtgctgctgtggaagatgggcttcttcagaagaagatacaaggagatcatcgaggccgagaagaacagaaaggagaacgaggacagctgggactgggtgcagaagaaccagtag

SEQ ID NO: 126557 - protein, 1179 aa, Artificial Sequence
  derived and/or modified sequence
MWLFHTLLCIASLALLAAFNVDVARPWLTPKGGAPFVLSSLLHQDPSTNQTWLLVTSPRTKRTPGPLHRCSLVQDEILCHPVEHVPIPKGRHRGVTVVRSHHGVLICIQVLVRRPHSLSSELTGTCSLLGPDLRPQAQANFFDLENLLDPDARVDTGDCYSNKEGGGEDDVNTARQRRALEKEEEEDKEEEEDEEEEEAGTEIAIILDGSGSIDPPDFQRAKDFISNMMRNFYEKCFECNFALVQYGGVIQTEFDLRDSQDVMASLARVQNITQVGSVTKTASAMQHVLDSIFTSSHGSRRKASKVMVVLTDGGIFEDPLNLTTVINSPKMQGVERFAIGVGEEFKSARTARELNLIASDPDETHAFKVTNYMALDGLLSKLRYNIISMEGTVGDALHYQLAQIGFSAQILDERQVLLGAVGAFDWSGGALLYDTRSRRGRFLNQTAAAAADAEAAQYSYLGYAVAVLHKTCSLSYIAGAPRYKHHGAVFELQKEGREASFLPVLEGEQMGSYFGSELCPVDIDMDGSTDFLLVAAPFYHVHGEEGRVYVYRLSEQDGSFSLARILSGHPGFTNARFGFAMAAMGDLSQDKLTDVAIGAPLEGFGADDGASFGSVYIYNGHWDGLSASPSQRIRASTVAPGLQYFGMSMAGGFDISGDGLADITVGTLGQAVVFRSRPVVRLKVSMAFTPSALPIGFNGVVNVRLCFEISSVTTASESGLREALLNFTLDVDVGKQRRRLQCSDVRSCLGCLREWSSGSQLCEDLLLMPTEGELCEEDCFSNASVKVSYQLQTPEGQTDHPQPILDRYTEPFAIFQLPYEKACKNKLFCVAELQLATTVSQQELVVGLTKELTLNINLTNSGEDSYMTSMALNYPRNLQLKRMQKPPSPNIQCDDPQPVASVLIMNCRIGHPVLKRSSAHVSVVWQLEENAFPNRTADITVTVTNSNERRSLANETHTLQFRHGFVAVLSKPSIMYVNTGQGLSHHKEFLFHVHGENLFGAEYQLQICVPTKLRGLQVVAVKKLTRTQASTVCTWSQERACAYSSVQHVEEWHSVSCVIASDKENVTVAAEISWDHSEELLKDVTELQILGEISFNKSLYEGLNAENHRTKITVVFLKDEKYHSLPIIIKGSVGGLLVLIVILVILFKCGFFKRKYQQLNLESIRKAQLKSENLLEEEN

SEQ ID NO: 126558 - DNA, 3540 bp, Artificial Sequence
  derived and/or modified sequence
atgtggctgttccacaccctgctgtgcatcgccagcctggccctgctggccgccttcaacgtggacgtggccagaccctggctgacccccaagggcggcgcccccttcgtgctgagcagcctgctgcaccaggaccccagcaccaaccagacctggctgctggtgaccagccccagaaccaagagaacccccggccccctgcacagatgcagcctggtgcaggacgagatcctgtgccaccccgtggagcacgtgcccatccccaagggcagacacagaggcgtgaccgtggtgagaagccaccacggcgtgctgatctgcatccaggtgctggtgagaagaccccacagcctgagcagcgagctgaccggcacctgcagcctgctgggccccgacctgagaccccaggcccaggccaacttcttcgacctggagaacctgctggaccccgacgccagagtggacaccggcgactgctacagcaacaaggagggcggcggcgaggacgacgtgaacaccgccagacagagaagagccctggagaaggaggaggaggaggacaaggaggaggaggaggacgaggaggaggaggaggccggcaccgagatcgccatcatcctggacggcagcggcagcatcgacccccccgacttccagagagccaaggacttcatcagcaacatgatgagaaacttctacgagaagtgcttcgagtgcaacttcgccctggtgcagtacggcggcgtgatccagaccgagttcgacctgagagacagccaggacgtgatggccagcctggccagagtgcagaacatcacccaggtgggcagcgtgaccaagaccgccagcgccatgcagcacgtgctggacagcatcttcaccagcagccacggcagcagaagaaaggccagcaaggtgatggtggtgctgaccgacggcggcatcttcgaggaccccctgaacctgaccaccgtgatcaacagccccaagatgcagggcgtggagagattcgccatcggcgtgggcgaggagttcaagagcgccagaaccgccagagagctgaacctgatcgccagcgaccccgacgagacccacgccttcaaggtgaccaactacatggccctggacggcctgctgagcaagctgagatacaacatcatcagcatggagggcaccgtgggcgacgccctgcactaccagctggcccagatcggcttcagcgcccagatcctggacgagagacaggtgctgctgggcgccgtgggcgccttcgactggagcggcggcgccctgctgtacgacaccagaagcagaagaggcagattcctgaaccagaccgccgccgccgccgccgacgccgaggccgcccagtacagctacctgggctacgccgtggccgtgctgcacaagacctgcagcctgagctacatcgccggcgcccccagatacaagcaccacggcgccgtgttcgagctgcagaaggagggcagagaggccagcttcctgcccgtgctggagggcgagcagatgggcagctacttcggcagcgagctgtgccccgtggacatcgacatggacggcagcaccgacttcctgctggtggccgcccccttctaccacgtgcacggcgaggagggcagagtgtacgtgtacagactgagcgagcaggacggcagcttcagcctggccagaatcctgagcggccaccccggcttcaccaacgccagattcggcttcgccatggccgccatgggcgacctgagccaggacaagctgaccgacgtggccatcggcgcccccctggagggcttcggcgccgacgacggcgccagcttcggcagcgtgtacatctacaacggccactgggacggcctgagcgccagccccagccagagaatcagagccagcaccgtggcccccggcctgcagtacttcggcatgagcatggccggcggcttcgacatcagcggcgacggcctggccgacatcaccgtgggcaccctgggccaggccgtggtgttcagaagcagacccgtggtgagactgaaggtgagcatggccttcacccccagcgccctgcccatcggcttcaacggcgtggtgaacgtgagactgtgcttcgagatcagcagcgtgaccaccgccagcgagagcggcctgagagaggccctgctgaacttcaccctggacgtggacgtgggcaagcagagaagaagactgcagtgcagcgacgtgagaagctgcctgggctgcctgagagagtggagcagcggcagccagctgtgcgaggacctgctgctgatgcccaccgagggcgagctgtgcgaggaggactgcttcagcaacgccagcgtgaaggtgagctaccagctgcagacccccgagggccagaccgaccacccccagcccatcctggacagatacaccgagcccttcgccatcttccagctgccctacgagaaggcctgcaagaacaagctgttctgcgtggccgagctgcagctggccaccaccgtgagccagcaggagctggtggtgggcctgaccaaggagctgaccctgaacatcaacctgaccaacagcggcgaggacagctacatgaccagcatggccctgaactaccccagaaacctgcagctgaagagaatgcagaagccccccagccccaacatccagtgcgacgacccccagcccgtggccagcgtgctgatcatgaactgcagaatcggccaccccgtgctgaagagaagcagcgcccacgtgagcgtggtgtggcagctggaggagaacgccttccccaacagaaccgccgacatcaccgtgaccgtgaccaacagcaacgagagaagaagcctggccaacgagacccacaccctgcagttcagacacggcttcgtggccgtgctgagcaagcccagcatcatgtacgtgaacaccggccagggcctgagccaccacaaggagttcctgttccacgtgcacggcgagaacctgttcggcgccgagtaccagctgcagatctgcgtgcccaccaagctgagaggcctgcaggtggtggccgtgaagaagctgaccagaacccaggccagcaccgtgtgcacctggagccaggagagagcctgcgcctacagcagcgtgcagcacgtggaggagtggcacagcgtgagctgcgtgatcgccagcgacaaggagaacgtgaccgtggccgccgagatcagctgggaccacagcgaggagctgctgaaggacgtgaccgagctgcagatcctgggcgagatcagcttcaacaagagcctgtacgagggcctgaacgccgagaaccacagaaccaagatcaccgtggtgttcctgaaggacgagaagtaccacagcctgcccatcatcatcaagggcagcgtgggcggcctgctggtgctgatcgtgatcctggtgatcctgttcaagtgcggcttcttcaagagaaagtaccagcagctgaacctggagagcatcagaaaggcccagctgaagagcgagaacctgctggaggaggagaactag

SEQ ID NO: 126559 - DNA, 3540 bp, Artificial Sequence
  derived and/or modified sequence
atgtggctgttccacactctgctctgtatagcaagtctggcgctcctggccgcttttaatgttgacgtggcccgtccttggttgactccaaaggggggcgccccttttgttctatcaagcttgttgcatcaagatccctcaacaaaccaaacctggctgctggtcaccagtcctagaaccaagaggacccctggcccattgcatcgctgcagcctggtccaggacgaaattctgtgccacccggtggaacatgtgcccatccctaaagggcgacaccgcggagtgaccgtcgttcgctcccaccatggagtgttaatctgcatccaggtgcttgtgcggcgcccccactctttgagcagcgaactcaccggtacgtgtagtctcctcggtccggacctgcggccacaagcccaggcaaacttctttgatcttgaaaacctgttggaccccgacgcccgcgtggatactggggattgttattctaataaggagggaggtggtgaggatgatgtgaatacggcacggcagagaagagccctggagaaggaggaggaggaggacaaggaggaagaagaggacgaggaggaggaggaggctggcaccgagattgcaatcatcctagacgggagcggttcgattgatccaccggatttccagcgcgccaaggacttcatttctaatatgatgaggaacttttacgagaagtgcttcgaatgcaatttcgctcttgtgcagtacggcggggtgatccagactgagttcgacctccgcgattcgcaggacgtgatggcatccttggctagggttcagaatattacacaagtgggtagcgtcacgaaaacagcatccgctatgcaacacgtgctggactccatatttacgtcatcacacgggtcacgcagaaaggccagcaaagtgatggtggtcctgacagatgggggcatcttcgaagatcccctaaacctgacaactgtcattaactctcctaagatgcagggcgtggaaaggttcgctattggggtgggagaagagttcaagtccgcccggactgctcgggagctgaatctgatcgctagcgatcctgacgaaacacatgctttcaaagttacaaattacatggctctcgatggactgctgagtaagttacggtacaatatcatcagtatggaggggactgtgggtgacgctttgcactaccagcttgcacaaatagggttttccgcacaaattttggacgaaagacaagtcctactgggcgcagtgggtgcattcgattggagcggaggggctttactgtacgataccaggagcaggagagggagattccttaaccaaaccgcagccgctgccgccgacgcggaggctgctcagtacagttaccttggttatgcggtggctgttctccataaaacatgcagcctctcttacatagccggagctccaaggtataagcatcatggagcagtgttcgagctacagaaggagggacgtgaagcctcttttctgcccgttctggagggcgagcagatggggtcttacttcggctctgaactgtgtcctgtggatatagacatggacggtagcacagactttttactggtggccgcccccttttaccacgtacacggcgaggagggtcgtgtctatgtgtaccgactatcagaacaagatgggtccttttccctcgctaggatcctctccggccatccagggttcaccaacgcgcgcttcggctttgccatggctgctatgggggatctttcgcaggataagctgacagatgtggcgatcggcgctcccctcgagggattcggtgcagacgacggcgcttcctttggtagcgtatacatctataatgggcactgggacgggctgtcagccagtcccagccagagaattcgggcctccactgttgctccaggactgcagtactttggtatgtccatggcgggcggttttgacatttccggagatggcctggctgacatcaccgttggaaccctgggacaggccgtggtttttcgcagccgtccagtggtgcgattgaaggtgagtatggccttcacacccagtgctctgcccattgggttcaacggcgtggtgaacgttcgtttatgtttcgaaatttcctccgtgacaaccgccagcgaaagcggactgcgcgaggcattgctgaacttcacacttgacgttgacgttggtaagcagaggagaaggttgcaatgctctgacgtgaggagttgcctcggatgtttacgggagtggagttcggggagccagctctgtgaagacctgctgctaatgcccacagaaggagagctgtgcgaagaggactgcttttcaaatgctagcgtcaaggtctcctatcagctccagaccccagaggggcagacagatcatccccaacctattctagatcggtataccgagccttttgccattttccaactaccctatgaaaaagcatgcaagaataagctattttgcgtggctgagctccagctggctactactgtttcacaacaggagttagtggtaggactgacaaaggaactcacgcttaacataaacctgactaatagtggggaggactcctacatgacttcaatggcattaaattacccgcggaacttgcagcttaagcgcatgcagaaaccaccatctcctaatattcagtgcgacgatccccagccagtcgcctccgtcctgataatgaactgtcgcatcggccatcccgtcctcaaacgatccagcgctcatgtgtccgtggtgtggcagctggaagagaacgcatttcccaaccgcacagctgatatcacagtaacggtgactaatagcaatgaacgcagaagcctggctaacgagacgcatacactgcagttccggcatggttttgtggcagttctgtctaagccatccattatgtacgtcaatacaggccaagggctgtcacaccacaaggagttcctctttcacgtgcacggagagaatctatttggagctgaataccagctccagatatgcgttccaactaagctgagaggactgcaagtggtcgccgtcaagaaactgactagaacccaggctagtaccgtgtgcacatggtcacaagagcgcgcttgcgcatacagctcagtccagcatgttgaggaatggcactccgtgtcctgcgtcatcgccagtgacaaggaaaacgtcacagtggctgcagagatcagctgggatcatagcgaggagctcttgaaagacgtaaccgaactccagatactgggtgaaatctcatttaataagtctttgtatgaaggcctaaacgccgagaatcacagaacaaaaatcacagtcgtgtttctgaaggacgagaagtaccatagtcttcccatcatcattaaagggtcggtgggtggcttattagtcctgatagtcattctagtcatcctgttcaagtgtgggttcttcaaaaggaagtatcagcaactgaacctagagtcaataaggaaagcgcagctgaaatcagagaatcttttggaggaagagaactag

SEQ ID NO: 126560 - DNA, 3540 bp, Artificial Sequence
  derived and/or modified sequence
atgtggctgttccacaccctgctgtgcatcgccagcctggccctgctggccgccttcaacgtggatgtggcccggccctggctgacccccaagggcggggccccctttgtgctgagcagcctgctgcaccaggaccccagcaccaaccagacctggctgctggtgaccagccccaggaccaagaggaccccaggccccctgcaccgctgcagcctggtgcaggatgagatcctgtgccaccctgtggagcacgtgcccatccccaagggccgccaccggggcgtgacagtggtgcgcagccaccacggcgtgctgatctgcatccaggtgctggtgagaagaccccacagcctgagcagcgagctgaccggcacctgcagcctgctgggccctgacctgcggccccaggcccaggccaacttctttgacctggagaacctgctggaccctgatgcccgggtggacaccggggactgctacagcaacaaggagggcggcggggaggatgatgtgaacacagcccggcagaggcgggccctggagaaggaggaggaggaggacaaggaggaggaggaggatgaggaggaggaggaggccggcacagaaattgccatcatcctggatggcagcggcagcattgatcctccagacttccagagggccaaggacttcatcagcaacatgatgaggaacttctatgaaaaatgttttgagtgcaactttgccctggtgcagtatggaggagtcatccagacagaatttgacctgcgggacagccaggatgtgatggccagcctggcccgggtgcagaacatcacccaggtgggctctgtgaccaagacagccagcgccatgcagcacgtgctggacagcatcttcaccagcagccacggcagcaggaggaaggccagcaaggtgatggtggtgctgacagatggcggcatctttgaggaccccctgaacctgaccaccgtcatcaacagccccaagatgcagggcgtggagagatttgccatcggcgtgggggaggagttcaagagcgccaggacagcccgggagctgaacctgattgccagtgaccctgatgagacccacgccttcaaggtgaccaactacatggccctggatggcctgctgagcaagctgcgctacaacatcatctccatggagggcaccgtgggagatgccctgcactaccagctggcccagatcggcttcagcgcccagatcctggatgagcggcaggtgctgctgggcgctgtgggcgcctttgactggagcggcggggccctgctgtatgacaccaggagccggcggggccgcttcctgaaccagacagctgctgctgctgctgatgctgaggccgcccagtacagctacctgggctatgctgtggccgtgctgcacaagacctgcagcctgagctacatcgccggggccccccgctacaagcaccacggggctgtgtttgagctgcagaaggagggccgggaggccagcttcctgcctgtgctggagggggagcagatgggcagctacttcggcagcgagctgtgccctgtggacatcgacatggatggcagcacagacttcctgctggtggccgcccccttctaccacgtgcacggggaggagggccgggtgtatgtgtaccgcctgtctgagcaggacggcagcttcagcctggcccgcatcctgagcggccaccctggcttcaccaatgccaggtttggatttgccatggccgccatgggagacctgagccaggacaagctgacagatgtggccatcggggcccccctggagggctttggagcagatgatggagccagctttggatctgtgtacatctacaacggccactgggatggcctgagcgccagccccagccagaggatccgggccagcacagtggcccctggcctgcagtacttcggcatgtccatggccggcggctttgacatctctggagatggcctggccgacatcaccgtgggcaccctgggccaggccgtggtgttccgcagcaggcctgtggtgcggctgaaggtgtccatggccttcaccccatctgccctgcccatcggcttcaacggggtggtgaatgtgcggctgtgctttgagatcagctctgtgaccacagccagcgagagcggcctgcgggaggccctgctgaacttcaccctggatgtggatgtgggcaagcagaggcggcggctgcagtgcagtgatgtgcgcagctgcctgggctgcctgcgggagtggagcagcggcagccagctgtgtgaggacctgctgctgatgcccacagaaggagagctgtgtgaggaggactgcttcagcaatgcctctgtgaaggtgtcctaccagctgcagaccccagagggccagacagaccacccccagcccatcctggaccgctacacagagccctttgccatcttccagctgccctatgagaaggcctgcaagaacaagctgttctgtgtggccgagctgcagctggccaccaccgtgtcccagcaggagctggtggtgggcctgaccaaggagctgaccctgaacatcaacctgaccaacagcggagaagattcctacatgacctccatggccctgaactaccccaggaacctgcagctgaagaggatgcagaagccacccagccccaacatccagtgtgatgacccccagcctgtggcctctgtgctgatcatgaactgcagaattggccaccctgtgctgaagaggagcagcgcccacgtgtctgtggtgtggcagctggaggagaatgccttccccaacagaacagctgacatcaccgtgacagtgaccaacagcaatgaaagaagaagcctggccaatgagacccacaccctgcagttcagacatggctttgtggccgtgctgagcaagcccagcatcatgtatgtgaacacaggccagggcctgagccaccacaaggagttcctgttccacgtgcacggggagaacctgtttggagctgagtaccagctgcagatctgtgtgcccaccaagctgcggggcctgcaggtggtggccgtgaagaagctgaccaggacccaggccagcacagtgtgcacctggagccaggagcgggcctgtgcctacagctctgtgcagcacgtggaggagtggcacagcgtgtcctgtgtgattgccagtgacaaggaaaatgtgacagtggccgctgagatctcctgggaccacagcgaggagctgctgaaggatgtgacagagctgcagatcctgggggagatctccttcaacaagagcctgtatgagggcctgaatgctgagaaccacaggaccaagatcaccgtggtgttcctgaaggatgagaagtaccacagcctgcccatcatcatcaagggctctgtgggcggcctgctggtgctgattgtcatcctggtgatcctcttcaagtgtggcttcttcaagaggaagtaccagcagctgaacctggagagcatcaggaaggcccagctgaagtctgagaacctgctggaggaggagaactag

SEQ ID NO: 126561 - DNA, 3540 bp, Artificial Sequence
  derived and/or modified sequence
atgtggctgttccacaccctgctgtgcatcgccagcctggccctgttagccgcatttaacgttgatgtagcacgcccctggctcacaccaaaggggggagcccccttcgtactttcttctctcctccaccaagatccatctactaatcagacatggctgctagtgacttcaccacgaaccaaaaggactcctggacccctgcataggtgctctttggttcaagacgagatcttatgccatcccgtcgagcatgtgcctataccaaaaggccgacaccgaggtgtcacggtcgtccggtcccaccatggagttctgatctgcatacaggtgctggtacgccgacctcattctctgtcttccgaattgacaggcacttgtagtctgctagggcctgaccttcgtcctcaggcacaagctaactttttcgatttagaaaacttacttgacccagacgcaagagtagacacaggggactgctatagcaacaaagaaggtggaggcgaagatgacgtgaataccgcccggcaaagacgggcgcttgaaaaagaggaggaagaagacaaagaggaagaggaggatgaggaggaggaggaggccggaacagagattgccattatccttgatggatcgggtagcatcgatcccccagacttccagcgcgctaaagattttatttctaacatgatgcgtaatttctatgaaaaatgtttcgagtgtaattttgccttagtccagtacggaggtgtaatccagactgaatttgacttgcgggacagccaggacgttatggctagtctggcccgggtacaaaatattacacaggttggcagtgtgaccaagactgcttcagcaatgcagcatgtgctcgacagtatatttacaagctctcacgggagcaggcggaaggccagcaaggtgatggtggtacttactgatggaggcattttcgaagatccactcaatttgactacagtcataaattcgcctaagatgcagggtgtggaaagatttgccatcggtgtaggtgaggagtttaagtccgcccgaactgctcgggagctaaatctcattgccagcgatcccgatgagacgcatgcttttaaggtgaccaattatatggccctggatggcttactctctaaactgagatacaatataatctcaatggaaggcaccgtcggggacgccctccactatcaactggcgcaaatcggcttctccgcacagatcctggatgagcgtcaggtgctgctgggtgccgtaggggcattcgactggtctggtggagcgctgctctacgataccaggagtcgccggggtcgctttctgaatcagacggccgctgccgcggccgacgctgaggcagcccagtactcctacctcggctatgcagtagctgtgcttcacaaaacctgttctttgtcctacatagccggggcccctcgctacaagcaccatggcgcagtgttcgaactccagaaggagggcagggaggcatcgttcctgcccgtgctcgaaggcgagcagatgggctcttatttcggatctgagttgtgtcccgtggatattgacatggacggctccaccgattttctcctggtcgctgccccattttaccacgtgcatggcgaggagggacgcgtgtatgtttaccggttgagtgaacaagacggctcattcagcctcgcccggattttatccggtcacccaggcttcactaatgcgcgtttcgggttcgccatggccgctatgggcgacctttcacaggataagttgacagatgtggcaattggggcacccctggaggggtttggcgcggacgatggcgcctcattcggttccgtttacatctataacggccactgggatgggcttagtgcttcaccatcccaacggatccgagctagcacagtcgccccgggcctgcaatattttggaatgtccatggccggaggcttcgacatcagcggcgacgggctcgccgacataaccgtgggcaccctaggacaggcagtcgtcttcagatcacgtcctgtcgtacgccttaaagtgtcaatggcttttactccaagtgctctccccataggatttaatggcgtcgtcaacgtgaggctgtgttttgagatatcctctgttacaactgccagtgagtcgggactgcgggaggctttactgaacttcaccctcgacgttgacgttggcaagcaacgcaggagattgcaatgctccgatgtgcggtcttgtctgggttgtttacgtgaatggagtagcggaagccagctttgtgaagacctgttgctcatgccaaccgagggcgagttgtgcgaggaagactgcttttccaacgctagcgtcaaggtctcttaccagctccaaaccccggaaggacagactgaccacccccagcccatcttagatcggtacacggaaccattcgccatcttccagctcccatatgagaaggcttgcaaaaacaagttgttttgcgtggctgagcttcaattagccacaactgtctcacagcaggagctcgtggtcgggctgaccaaagagttgacgctgaacattaacctgacaaactccggagaggatagctatatgacatcgatggccctaaattatcctcggaatttgcagctaaaaaggatgcagaagcctcctagtccaaacatccagtgtgacgatcctcaaccagtggcgtctgtactgataatgaattgccggatcggccaccctgtgttaaaaagatctagtgcccacgtgagtgtagtctggcagctagaagagaatgctttccccaaccgaacagccgacatcaccgttacagtaactaactccaatgagcggaggtctctggccaatgagacccatactctccagttcagacacggcttcgtggcggtgctgtccaaaccctcaatcatgtacgtcaacactggtcagggattgtcccaccacaaagagtttctattccacgtccatggcgagaacttgtttggcgcagagtatcagcttcagatctgtgtgccgaccaagctcaggggattacaggtcgtggccgttaagaaactcactcggacgcaggcttcaacagtgtgcacttggtcccaagagagagcttgtgcctacagctcagtccagcacgtagaggaatggcattctgtgtcttgtgtgatagcttctgataaagaaaacgtgaccgtcgcggcagagatttcctgggaccacagtgaggaattactgaaggacgtcaccgaattacagatcctgggcgaaatctcattcaacaagagtctgtacgaaggcctcaatgcagagaaccaccgcactaagattactgtggtttttttaaaggacgaaaagtaccattcactaccaataatcatcaaggggtccgtgggtggacttctcgtgctgatcgtgatccttgtgattctcttcaaatgtggttttttcaagcgtaagtaccaacagctcaatttagagtcgattcgcaaggcccaactcaagagcgagaatctcctggaagaggaaaactag

SEQ ID NO: 126562 - DNA, 3540 bp, Artificial Sequence
  derived and/or modified sequence
atgtggctgtttcacacactgctgtgtatcgcatctctcgctcttttggccgcttttaacgtcgacgtggccaggccctggctcacacccaaaggaggagcaccattcgttctgagctccttgctacaccaggatcctagcactaatcagacatggctgttagtgacatctcctaggacaaagcggacccctggcccactacaccggtgcagtctggtccaggacgagatcctctgtcacccagtcgagcatgtgccgatcccaaagggtcgccaccgaggcgtcactgtcgtacgtagccatcacggtgtgctcatctgcattcaagtactggttaggcgcccacactccctgagctctgagctcactggaacctgcagcctgctggggcctgatctacggcctcaggcacaggctaacttctttgacctggaaaacctgctggaccctgatgctcgcgtcgacactggtgattgctacagcaataaagagggtgggggtgaggacgacgtgaatacagccagacaaaggcgggctctggaaaaggaagaagaagaagacaaagaggaagaagaggatgaggaggaagaggaggccggtacggagattgctattatcttagatggttccggctctattgatccacctgatttccagagagctaaagactttatcagcaatatgatgagaaatttctacgaaaagtgttttgaatgcaattttgcgttagtccagtatggtggtgtaattcagaccgagtttgatttaagggatagccaggacgtcatggctagccttgccagagtgcagaacattacccaggtcggtagtgttaccaagaccgcatctgccatgcaacacgtgctcgattccatcttcacaagttcccacgggtcccggagaaaagcatccaaagttatggtggtgctgactgatggagggatctttgaagaccctcttaatctgacaaccgtcattaactctccgaaaatgcaaggggtggaaaggtttgccatcggcgttggagaggaatttaaaagtgccagaacagcgagagaacttaacctgatagcttccgatcctgacgagactcatgcctttaaggttactaattatatggcgctcgatggccttttgtctaagctgcggtataacatcatttctatggagggaacagtcggcgatgcactccactaccagcttgcccaaattggtttcagcgcccagatcctggacgaacggcaagtacttctcggagccgtgggggcttttgactggtctggcggagctctgctctacgacaccagaagccgtagaggacgcttcttgaaccagacagcagccgctgccgctgatgccgaagccgctcaatattcctacttggggtatgccgtggctgtgctccacaagacctgctcactgtcttatattgccggagcacccagatacaagcaccatggagctgtctttgaattgcaaaaggaaggcagagaggcgagcttcctgcccgtgctggaaggagagcagatgggctcttattttggctcagagttatgcccggttgacatcgatatggatggctctacggactttctgctcgtggccgcacccttctaccatgtgcacggggaagagggcagggtgtacgtctaccggctgagtgagcaggatggtagcttctcgcttgcccgaatactcagcggtcaccctggcttcacgaacgcgagatttggattcgcaatggctgcaatgggagatttaagtcaggataagctcacagatgtagctattggtgcgccactggaaggattcggcgctgatgacggggcaagtttcggaagcgtttacatctataacggccactgggatgggctctccgccagtcccagccagcgtataagggcgtcaacggtcgctcccggattgcagtattttggcatgtctatggctggcggattcgacatttctggggacggactcgctgacattactgtggggacactgggacaagccgttgtttttcgctctcgaccagttgtcagactgaaagttagcatggctttcaccccttctgccttgcctattgggtttaacggcgtggttaatgtgcggctctgcttcgaaatatcaagcgtaactaccgcgagtgaaagcggcctgagagaagcattgctgaattttactctggatgtagacgtgggaaagcagcggcgtaggcttcagtgttccgatgtccgctcctgtctgggttgtctccgtgagtggtcctctgggagtcagttgtgcgaggatttgctgctaatgcctacagagggagagttgtgtgaagaggactgcttttccaacgcgtccgttaaggtgtcataccagctgcagacccccgaaggccagacggaccatcctcagcctatattagaccggtataccgagcccttcgcaatttttcagttgccctatgaaaaggcttgcaaaaataagctgttctgcgtcgctgagttacagttggccactactgtttcccagcaggagctggtggtgggtttgaccaaggaactgacgctgaacattaatctgacaaattccggggaagacagctatatgacgtcaatggcccttaactatcctaggaacctgcaactgaagaggatgcaaaagcctcctagtcccaacatccagtgtgatgatccacaacctgtggcatccgtgctcatcatgaactgtcgaattgggcacccagtactaaagcgctcctcagctcacgtgagcgtggtgtggcagctagaagaaaacgcgttccctaatcgtaccgctgatatcactgtgacggtgacaaacagcaacgagcgacggtcattggccaatgaaacccatacattacaatttagacatggttttgtcgctgtcctttcgaagccatcaataatgtacgtcaatacaggccaagggttgtcccatcacaaggaatttctgttccacgtacatggggaaaatctgtttggtgccgagtaccagctgcagatctgcgtgccaaccaaattacgcggattgcaagtcgtggcagtgaagaagctcacccggacgcaggcctccaccgtgtgtacgtggagccaagagagagcatgcgcatacagctcagtgcagcacgtggaggaatggcacagtgtctcttgtgtgatcgcttctgacaaggaaaatgtgactgtggcggctgaaatcagttgggaccattctgaggaactattgaaggatgtgaccgaactacagattttgggggaaatctctttcaacaagagtctgtacgaaggtctgaacgccgaaaatcaccgcacaaaaatcacagtggtatttctgaaagatgaaaagtatcatagccttcctatcatcattaaagggagtgtgggtggactgctcgtgttgatcgtgattcttgtgatcctgttcaaatgtgggttctttaaacggaaatatcagcagttgaacctggaaagtattcgcaaagcccagttgaaatccgagaatttgctagaggaagaaaattag

SEQ ID NO: 126563 - protein, 1170 aa, Artificial Sequence
  derived and/or modified sequence
MKDSCITVMAMALLSGFFFFAPASSYNLDVRGARSFSPPRAGRHFGYRVLQVGNGVIVGAPGEGNSTGSLYQCQSGTGHCLPVTLRGSNYTSKYLGMTLATDPTDGSILACDPGLSRTCDQNTYLSGLCYLFRQNLQGPMLQGRPGFQECIKGNVDLVFLFDGSMSLQPDEFQKILDFMKDVMKKLSNTSYQFAAVQFSTSYKTEFDFSDYVKRKDPDALLKHVKHMLLLTNTFGAINYVATEVFREELGARPDATKVLIIITDGEATDSGNIDAAKDIIRYIIGIGKHFQTKESQETLHKFASKPASEFVKILDTFEKLKDLFTELQKKIYVIEGTSKQDLTSFNMELSSSGISADLSRGHAVVGAVGAKDWAGGFLDLKADLQDDTFIGNEPLTPEVRAGYLGYTVTWLPSRQKTSLLASGAPRYQHMGRVLLFQEPQGGGHWSQVQTIHGTQIGSYFGGELCGVDVDQDGETELLLIGAPLFYGEQRGGRVFIYQRRQLGFEEVSELQGDPGYPLGRFGEAITALTDINGDGLVDVAVGAPLEEQGAVYIFNGRHGGLSPQPSQRIEGTQVLSGIQWFGRSIHGVKDLEGDGLADVAVGAESQMIVLSSRPVVDMVTLMSFSPAEIPVHEVECSYSTSNKMKEGVNITICFQIKSLIPQFQGRLVANLTYTLQLDGHRTRRRGLFPGGRHELRRNIAVTTSMSCTDFSFHFPVCVQDLISPINVSLNFSLWEEEGTPRDQRAQGKDIPPILRPSLHSETWEIPFEKNCGEDKKCEANLRVSFSPARSRALRLTAFASLSVELSLSNLEEDAYWVQLDLHFPPGLSFRKVEMLKPHSQIPVSCEELPEESRLLSRALSCNVSSPIFKAGHSVALQMMFNTLVNSSWGDSVELHANVTCNNEDSDLLEDNSATTIIPILYPINILIQDQEDSTLYVSFTPKGPKIHQVKHMYQVRIQPSIHDHNIPTLEAVVGVPQPPSEGPITHQWSVQMEPPVPCHYEDLERLPDAAEPCLPGALFRCPVVFRQEILVQVIGTLELVGEIEASSMFSLCSSLSISFNSSKHFHLYGSNASLAQVVMKVDVVYEKQMLYLYVLSGIGGLLLLLLIFIVLYKVGFFKRNLKEKMEAGRGVPNGIPAEDSEQLASGQEAGDPGCLKPLHEKDSESGGGKD

SEQ ID NO: 126564 - protein, 162 aa, Artificial Sequence
  derived and/or modified sequence
MKDSCITVMAMALLSGFFFFAPASSYNLDVRGARSFSPPRAGRHFGYRVLQVGNGVIVGAPGEGNSTGSLYQCQSGTGHCLPVTLRGSNYTSKYLGMTLATDPTDGSILACDPGLSRTCDQNTYLSGLCYLFRQNLQGPMLQGRPGFQVCCCSVFHKLQNRI

SEQ ID NO: 126565 - DNA, 3513 bp, Artificial Sequence
  derived and/or modified sequence
atgaaagattcttgtataaccgttatggccatggccctactgtcagggtttttcttcttcgctccagccagctcctataatctggacgtaagaggtgccaggtcttttagtcctcctcgggccggcagacattttgggtatagagtgctccaagtgggcaacggcgtaattgttggcgcccccggcgagggaaattccaccggcagcctgtaccaatgtcagtctggaacaggacattgtctgcccgtcacactgcggggttctaactacacttcaaagtacctcgggatgacattggcaacagatcctactgatgggtccatattagcctgcgatccaggactgtcaaggacatgcgaccagaatacctatctcagtgggttgtgctatctgtttcgccagaatctgcagggtccgatgttacagggtaggcccggctttcaggaatgtattaaaggcaacgtcgacctagtgtttctgtttgacggcagtatgagtctgcagccagacgagtttcagaagatactcgatttcatgaaggacgtgatgaaaaaactttccaacaccagctatcaatttgctgctgtgcagtttagcacgagctacaaaacagaatttgacttctccgattatgtcaagcgcaaggaccccgatgccctgctgaaacacgttaaacacatgctcctgcttaccaacactttcggtgccatcaattatgtagccaccgaggtttttcgggaggagttaggcgccaggcccgatgctacaaaggtgctgatcattatcaccgatggcgaggcgaccgactccggaaacatcgatgcagccaaagacataatcaggtatatcatcgggattgggaagcactttcagacaaaagaatctcaggaaactctgcataagtttgccagcaaaccagcctctgagtttgtaaagatcctagatacatttgaaaaactgaaagacctctttaccgagctccagaagaagatctacgtgatcgaggggaccagtaaacaggatttaacctcttttaacatggaactgagctcctctggcatatctgccgacctctctaggggtcatgctgtggtgggggctgtaggtgctaaggactgggcaggcggctttctggatcttaaggccgatctgcaagacgatacgttcatagggaatgagccattgaccccagaggtgcgggcagggtaccttggttatactgtgacatggctgccgagtcgtcaaaagacttccttgctggcctcaggcgcccctagataccagcacatgggaagagtgttactgtttcaggaaccacaggggggcgggcattggtctcaagttcagactatccacggcacccaaattgggagttacttcgggggagaactatgtggggtggacgtggatcaagatggcgaaacagaactcctccttatcggagcccctctcttctatggcgaacagagaggagggagagtgttcatctatcaaagacgtcagctggggtttgaggaggttagtgaactacaaggcgatcctggctaccccttggggcgtttcggagaagcaatcacagcactgactgacataaatggcgatgggttggtggatgtggccgtgggcgcccctctggaggaacagggcgccgtgtacattttcaatggcaggcatggaggtctgtctcctcaaccatctcaacgtatcgagggcacgcaggtgttatcgggtatccagtggttcggtagatccatccacggcgtcaaggacctggagggagatggcctcgcagatgtcgctgttggcgcagaaagccaaatgattgtcctcagcagcaggcctgtggttgatatggtcacgctcatgtccttctcccccgctgagatccctgtgcatgaagtggaatgctcctactccacttccaataaaatgaaggaaggagtgaatatcacaatctgcttccagatcaagtccctgataccccaatttcagggtcgcctcgttgctaacctgacttatactcttcagctggatggccacagaacacgccgacgcggtctgtttcccggaggcaggcacgaacttcggaggaatatagctgtaaccacttcaatgtcatgtaccgacttttctttccacttcccagtctgtgttcaggatttaatttcgcccatcaacgtctcccttaacttttcgctctgggaagaagaaggaaccccaagggaccagagggcccagggtaaggatatcccacctattttgaggccgtccctccattccgagacttgggaaattccattcgaaaagaattgcggagaagacaagaagtgcgaagctaacctgagggtttctttctcaccagcaaggtctcgggcacttcggctgaccgccttcgcgtccctgagcgttgaactcagcttgtcgaacctggaagaagatgcatactgggtacagctagacctgcactttccaccaggcctgagtttcagaaaggtggaaatgctcaagccgcactcccaaattcctgtatcatgtgaggagctcccagaagagtcaaggttgctgagcagagcgctctcatgcaacgtgagcagccctatcttcaaggccggacactcggtggccttgcagatgatgttcaacacattggtgaactctagttggggcgactcagtggaactgcatgcgaacgtaacttgtaacaacgaggacagcgatttgcttgaagataattcggccactaccattattcctattctatacccgattaacatactcatccaagaccaggaagattccacactctacgtgtccttcacaccaaaggggccgaagatccaccaagtcaagcatatgtaccaagtaaggatacagccgagcatccacgatcataacattcctactttagaagcagtggtgggggtgccccagccgccttcagaaggtcccatcacacatcagtggagtgtgcaaatggagccccctgtgccatgccactacgaagatctggagagactaccggacgccgccgaaccctgtctgcctggcgctctgtttaggtgtccagtggtatttaggcaagagatcctggtccaagtgatcgggactctggaattggtgggtgaaatagaagcgagttcaatgtttagcctctgtagtagcctgtctataagcttcaatagctctaaacacttccatctttatgggagtaacgcaagcctggcgcaggtggtcatgaaggtggacgtggtatacgagaagcaaatgttgtatctgtacgttttgtcagggataggtggcctcctcctgcttctgttgatctttattgtcctgtataaagtaggattctttaaacgtaacctgaaagagaagatggaggctggcagaggtgtgcccaatggaatccctgctgaggatagtgagcaattggccagtggccaagaggccggtgatcctggctgcctgaaacctctgcacgaaaaagactcggagagtggcggcggtaaggactag

SEQ ID NO: 126566 - DNA, 5208 bp, Artificial Sequence
  derived and/or modified sequence
acacctccctccccgcctgccagtgtcaccagcctgttgcctctgtgagaaagtaccactgtaagaggccaaagggcatgatcattttcctctttcaccctgtctaggttgccagcaaatcccacgggcctcctgacgctgcccctggggccacaggtccctcgagtgctggaaggatgaaggattcctgcatcactgtgatggccatggcgctgctgtctgggttctttttcttcgcgccggcctcgagctacaacctggacgtgcggggcgcgcggagcttctccccaccgcgcgccgggaggcactttggataccgcgtcctgcaggtcggaaacggggtcatcgtgggagctccaggggaggggaacagcacaggaagcctctatcagtgccagtcgggcacaggacactgcctgccagtcaccctgagaggttccaactatacctccaagtacttgggaatgaccttggcaacagaccccacagatggaagcattttggcctgtgaccctgggctgtctcgaacgtgtgaccagaacacctatctgagtggcctgtgttacctcttccgccagaatctgcagggtcccatgctgcaggggcgccctggttttcaggaatgtatcaagggcaacgtagacctggtatttctgtttgatggttcgatgagcttgcagccagatgaatttcagaaaattctggacttcatgaaggatgtgatgaagaaactcagcaacacttcgtaccagtttgctgctgttcagttttccacaagctacaaaacagaatttgatttctcagattatgttaaacggaaggaccctgatgctctgctgaagcatgtaaagcacatgttgctgttgaccaatacctttggtgccatcaattatgtcgcgacagaggtgttccgggaggagctgggggcccggccagatgccaccaaagtgcttatcatcatcacggatggggaggccactgacagtggcaacatcgatgcggccaaagacatcatccgctacatcatcgggattggaaagcattttcagaccaaggagagtcaggagaccctccacaaatttgcatcaaaacccgcgagcgagtttgtgaaaattctggacacatttgagaagctgaaagatctattcactgagctgcagaagaagatctatgtcattgagggcacaagcaaacaggacctgacttccttcaacatggagctgtcctccagcggcatcagtgctgacctcagcaggggccatgcagtcgtgggggcagtaggagccaaggactgggctgggggctttcttgacctgaaggcagacctgcaggatgacacatttattgggaatgaaccattgacaccagaagtgagagcaggctatttgggttacaccgtgacctggctgccctcccggcaaaagacttcgttgctggcctcgggagcccctcgataccagcacatgggccgagtgctgctgttccaagagccacagggcggaggacactggagccaggtccagacaatccatgggacccagattggctcttatttcggtggggagctgtgtggcgtcgacgtggaccaagatggggagacagagctgctgctgattggtgccccactgttctatggggagcagagaggaggccgggtgtttatctaccagagaagacagttggggtttgaagaagtctcagagctgcagggggaccccggctacccactcgggcggtttggagaagccatcactgctctgacagacatcaacggcgatgggctggtagacgtggctgtgggggcccctctggaggagcagggggctgtgtacatcttcaatgggaggcacggggggcttagtccccagccaagtcagcggatagaagggacccaagtgctctcaggaattcagtggtttggacgctccatccatggggtgaaggaccttgaaggggatggcttggcagatgtggctgtgggggctgagagccagatgatcgtgctgagctcccggcccgtggtggatatggtcaccctgatgtccttctctccagctgagatcccagtgcatgaagtggagtgctcctattcaaccagtaacaagatgaaagaaggagttaatatcacaatctgtttccagatcaagtctctcatcccccagttccaaggccgcctggttgccaatctcacttacactctgcagctggatggccaccggaccagaagacgggggttgttcccaggagggagacatgaactcagaaggaatatagctgtcaccaccagcatgtcatgcactgacttctcatttcatttcccggtatgtgttcaagacctcatctcccccatcaatgtttccctgaatttctctctttgggaggaggaagggacaccgagggaccaaagggcgcagggcaaggacataccgcccatcctgagaccctccctgcactcggaaacctgggagatcccttttgagaagaactgtggggaggacaagaagtgtgaggcaaacttgagagtgtccttctctcctgcaagatccagagccctgcgtctaactgcttttgccagcctctctgtggagctgagcctgagtaacttggaagaagatgcttactgggtccagctggacctgcacttccccccgggactctccttccgcaaggtggagatgctgaagccccatagccagatacctgtgagctgcgaggagcttcctgaagagtccaggcttctgtccagggcattatcttgcaatgtgagctctcccatcttcaaagcaggccactcggttgctctgcagatgatgtttaatacactggtaaacagctcctggggggactcggttgaattgcacgccaatgtgacctgtaacaatgaggactcagacctcctggaggacaactcagccactaccatcatccccatcctgtaccccatcaacatcctcatccaggaccaagaagactccacactctatgtcagtttcacccccaaaggccccaagatccaccaagtcaagcacatgtaccaggtgaggatccagccttccatccacgaccacaacatacccaccctggaggctgtggttggggtgccacagcctcccagcgaggggcccatcacacaccagtggagcgtgcagatggagcctcccgtgccctgccactatgaggatctggagaggctcccggatgcagctgagccttgtctccccggagccctgttccgctgccctgttgtcttcaggcaggagatcctcgtccaagtgatcgggactctggagctggtgggagagatcgaggcctcttccatgttcagcctctgcagctccctctccatctccttcaacagcagcaagcatttccacctctatggcagcaacgcctccctggcccaggttgtcatgaaggttgacgtggtgtatgagaagcagatgctctacctctacgtgctgagcggcatcggggggctgctgctgctgctgctcattttcatagtgctgtacaaggttggtttcttcaaacggaacctgaaggagaagatggaggctggcagaggtgtcccgaatggaatccctgcagaagactctgagcagctggcatctgggcaagaggctggggatcccggctgcctgaagcccctccatgagaaggactctgagagtggtggtggcaaggactgagtccaggcctgtgaggtgcagagtgcccagaactggactcaggatgcccagggccactctgcctctgcctgcattctgccgtgtgccctcgggcgagtcactgcctctccctggccctcagtttccctatctcgaacatggaactcattcctgcctgtctcctttgcaggctcatagggaagacctgctgagggaccagccaagagggctgcaaaagtgagggcttgtcattaccagacggttcaccagcctctcttggtttccttccttggaagagaatgtctgatctaaatgtggagaaactgtagtctcaggacctagggatgttctggccctcacccctgccctgggatgtccacagatgcctccaccccccagaacctgtccttgcacactcccctgcactggagtccagtctcttctgctggcagaaagcaaatgtgacctgtgtcactacgtgactgtggcacacgccttgttcttggccaaagaccaaattccttggcatgccttccagcaccctgcaaaatgagaccctcgtggccttccccagcctcttctagagccgtgatgcctccctgttgaagctctggtgacaccagcctttctcccaggccaggctccttcctgtcttcctgcattcacccagacagctccctctgcctgaaccttccatctcgccacccctccttccttgaccagcagatcccagctcacgtcacacttggttgggtcctcacatctttcacacttccaccagcctgcactactccctcaaagcacacgtcatgtttcttcatccggcagcctggatgttttttccctgtttaatgattgacgtacttagcagctatctctcagtgaactgtgagggtaaaggctatacttgtcttgttcaccttgggatgatgcctcatgatatgtcagggcgtgggacatctagtaggtgcttgacataatttcactgaattaatgacagagccagtgggaagatacagaaaaagaggggctgggctgggcgcggtggttcacgcctgtaatcccagcactttgggaggccaaggagggtggatcacctgaggtcaggagttagaggccagcctggcgaaaccccatctctactaaaaatacaaaatccaggcgtggtggcacacacctgtagtcccagctactcaggaggttgaggtaggagaattgcttgaacctgggaggtggaggttgcagtgagccaagattgcgccattgcactccagcctgggcaacacagcgagactccgtctcaaggaaaaaataaaaataaaaagcgggcacgggcccgtgacatccccacccttggaggctgtcttctcaggctctgccctgccctagctccacaccctctcccaggacccatcacgcctgtgcagtggcccccacagaaagactgagctcaaggtgggaaccacgtctgctaacttggagccccagtgccaagcacagtgcctgcatgtatttatccaataaatgtgaaattctgtcc

SEQ ID NO: 126567 - DNA, 833 bp, Artificial Sequence
  derived and/or modified sequence
cctctttcaccctgtctaggttgccagcaaatcccacgggcctcctgacgctgcccctggggccacaggtccctcgagtgctggaaggatgaaggattcctgcatcactgtgatggccatggcgctgctgtctgggttctttttcttcgcgccggcctcgagctacaacctggacgtgcggggcgcgcggagcttctccccaccgcgcgccgggaggcactttggataccgcgtcctgcaggtcggaaacggggtcatcgtgggagctccaggggaggggaacagcacaggaagcctctatcagtgccagtcgggcacaggacactgcctgccagtcaccctgagaggttccaactatacctccaagtacttgggaatgaccttggcaacagaccccacagatggaagcattttggcctgtgaccctgggctgtctcgaacgtgtgaccagaacacctatctgagtggcctgtgttacctcttccgccagaatctgcagggtcccatgctgcaggggcgccctggttttcaggtttgctgctgttcagttttccacaagctacaaaacagaatttgatttctcagattatgttaaacggaaggaccctgatgctctgctgaagcatgtaaagcacatgttgctgttgaccaatacctttggtgccatcaattatgtcgcgacagaggtgttccgggaggagctgggggcccggccagatgccaccaaagtgcttatcatcatcacggatggggaggccactgacagtggcaacatcgatgcggccaaagacatcatccgctacatcatcgggattggaaagcattttcagacc

SEQ ID NO: 126568 - DNA, 3513 bp, Artificial Sequence
  derived and/or modified sequence
atgaaggacagctgcatcaccgtgatggccatggccctgctgagcggcttcttcttctttgccccagccagcagctacaacctggatgtgcggggggcccgctccttcagcccccccagggctggccgccacttcggctacagagtgctgcaggtgggcaatggagtgattgtgggcgcccctggagagggcaacagcacaggcagcctgtaccagtgccagagcggcaccggccactgcctgcctgtgaccctgcggggcagcaactacaccagcaagtacctgggcatgaccctggccacagaccccacagatggcagcatcctggcctgtgaccccggcctgagcaggacctgtgaccagaacacctacctgagcggcctgtgctacctgttccggcagaacctgcagggccccatgctgcagggccggcccggcttccaggagtgcatcaagggaaatgtggacctggtgttcctgtttgatggctccatgagcctgcagccagatgagttccagaagatcctggacttcatgaaggatgtgatgaagaagctgagcaacaccagctaccagtttgctgctgtgcagttcagcaccagctacaagacagaatttgacttcagtgactatgtgaagaggaaggaccctgatgccctgctgaagcacgtgaagcacatgctgctgctgaccaacaccttcggggccatcaactacgtggccacagaggtgttccgggaggagctgggcgcccggccagatgccaccaaggtgctgatcatcatcacagatggagaggccacagacagcggcaacattgatgctgccaaggacatcatccgctacatcatcggcatcggcaagcacttccagaccaaggagagccaggagaccctgcacaagtttgccagcaagccagccagcgagtttgtgaagatcctggacacctttgagaagctgaaggacctcttcacagagctgcagaagaagatctacgtgattgagggcaccagcaagcaggacctgaccagcttcaacatggagctgagcagcagcggcatctctgctgacctgagccggggccatgctgtggtgggcgctgtgggcgccaaggactgggccggcggcttcctggacctgaaggctgacctgcaggatgacaccttcatcggaaatgagcccctgaccccagaggtgcgggccggctacctgggctacacagtgacctggctgcccagccggcagaagaccagcctgctggccagcggggccccccgctaccagcacatgggccgggtgctgctcttccaggagccccagggcggcggccactggagccaggtgcagaccatccacggcacccagatcggcagctactttggaggagagctgtgtggggtggatgtggaccaggatggagaaacagagctgctgctgattggagcccccctcttctacggggagcagagaggaggccgggtcttcatctaccagaggcggcagctgggctttgaggaggtgtctgagctgcagggcgaccccggctaccccctgggccgctttggagaggccatcacagccctgacagacatcaatggagatggcctggtggatgtggccgtgggcgcccccctggaggagcagggcgctgtgtacatcttcaacggccgccacggcggcctgagcccccagcccagccagagaattgagggcacccaggtgctgagcggcatccagtggtttggccgcagcatccacggcgtgaaggacctggagggagatggcctggctgatgtggccgtgggcgctgagagccagatgattgtgctgagcagcaggcctgtggtggacatggtgaccctgatgtccttcagccctgctgagatccctgtgcatgaggtggagtgcagctacagcaccagcaacaagatgaaggagggcgtgaacatcaccatctgcttccagatcaagagcctcatcccccagttccagggccgcctggtggccaacctgacctacaccctgcagctggatggccacaggacccggcggcggggcctcttccctgggggcagacatgagctgcggagaaatattgctgtgaccacctccatgagctgcacagacttctccttccacttccctgtgtgtgtgcaggacctgatcagccccatcaacgtgtccctgaacttcagcctgtgggaggaggagggcaccccccgggaccagagggcccagggcaaggacatcccccccatcctgcggcccagcctgcacagcgagacctgggagatcccctttgagaagaactgtggggaggacaagaagtgtgaggccaacctgcgggtgtccttctccccagcccggagccgggccctgcggctgacagcctttgccagcctgtctgtggagctgagcctgagcaacctggaggaggatgcctactgggtgcagctggacctgcacttccccccaggcctgtccttcaggaaggtggagatgctgaagccccacagccagatccctgtgtcctgtgaggagctgcctgaggagagccggctgctgagccgggccctgagctgcaatgtgagcagccccatcttcaaggccggccacagcgtggccctgcagatgatgttcaacaccctggtgaacagctcctggggagacagcgtggagctgcacgccaacgtgacctgcaacaatgaagattctgacctgctggaggacaacagcgccaccaccatcatccccatcctgtaccccatcaacatcctgatccaggaccaggaggacagcaccctgtatgtgtccttcacccccaagggccccaagatccaccaggtgaagcacatgtaccaggtgcgcatccagcccagcatccatgaccacaacatccccaccctggaggccgtggtgggcgtgccccagccccccagcgagggccccatcacccaccagtggagcgtgcagatggagccccctgtgccctgccactatgaggacctggagcggctgcctgatgctgctgagccctgcctgcccggggccctcttccgctgccctgtggtgttccggcaggagatcctggtgcaggtgattggcaccctggagctggtgggggagattgaggccagctccatgttcagcctgtgcagcagcctgagcatctccttcaacagcagcaagcacttccacctgtatggcagcaatgccagcctggcccaggtggtgatgaaggtggatgtggtgtatgagaagcagatgctgtacctgtatgtgctgagcggcatcggcggcctgctgctgctgctgctgatcttcatcgtgctgtacaaggtgggcttcttcaagaggaacctgaaggagaagatggaggccggccggggcgtgcccaacggcatcccagctgaggacagcgagcagctggccagcggccaggaggccggggaccccggctgcctgaagcccctgcacgagaaggacagcgagagcggcggcggcaaggactag

SEQ ID NO: 126569 - DNA, 3513 bp, Artificial Sequence
  derived and/or modified sequence
atgaaggacagctgcatcaccgtgatggccatggccctgctgagcggatttttttttttcgccccggctagtagttataacctcgatgtccgaggagctcgcagtttctctcccccgcgcgccgggcgccatttcggatacagggtcctacaggtcggcaatggggttatcgtcggagccccaggcgaaggcaactcaacaggatctttataccaatgtcagtcaggcacgggccattgtttgcctgtcaccctgcgtggaagcaactatacctcaaaatatctcggtatgaccttggctacagaccccactgatggaagcatcctagcctgcgatccggggctcagtaggacctgcgatcagaatacatacctgtcaggcctgtgttatctctttaggcaaaacctgcaggggcctatgctgcaaggtaggccaggctttcaggaatgtatcaagggaaatgttgaccttgtttttctcttcgatggcagtatgagccttcagcctgacgagtttcagaagattctcgatttcatgaaggacgtgatgaagaagctgtctaatacttcataccaatttgctgcggtacagttctcgacatcttacaaaacggaattcgacttctccgattatgtaaaacgaaaggatcccgacgctctgctcaaacacgtcaaacacatgctgctgttgacaaataccttcggtgccatcaattacgttgccacggaggtgtttcgggaggagttaggtgcaaggcctgatgcgacaaaagtactcataataatcacggatggagaggcaactgacagcgggaacattgatgccgccaaggatattatacgctatatcatcggaatcggaaagcatttccaaaccaaggaaagtcaggaaactctccacaaatttgcatctaaacccgcctccgagttcgtcaaaatcctggatacattcgagaagctgaaggacttatttaccgagctgcagaagaagatttacgtaatagaaggaacttcaaaacaggatctaacatcattcaatatggagctgtctagctccggaatctctgccgacctgagccgaggccacgctgtggtgggggcagtgggggctaaagattgggcgggcggttttctggacctcaaagccgatttgcaagatgacactttcataggtaacgaaccacttactcccgaagtgcgcgcaggctacctcgggtacaccgtgacctggctgcccagccggcagaaaaccagtctcctggcctctggagcaccacgttatcagcacatgggacgagtactcctctttcaggagccacagggcggaggtcactggtcccaggtgcagacaattcatggtacccaaattgggagctattttggtggtgagctctgcggtgtggacgtggatcaggacggtgaaacagagttgctgctaatcggggcacccctcttctatggtgagcagcgcgggggacgagtttttatctaccagagacgccagcttgggtttgaagaggtttccgagctacagggggatccagggtatcctctgggacggtttggtgaagctatcacagctctgactgatattaacggcgacggccttgttgacgtcgccgtcggcgcgcctctggaagagcaaggggctgtttacatttttaatggcagacatggcggattgtccccccagccatctcagcgcatcgaggggacgcaggttctttcaggaattcaatggtttggacgaagtattcacggagtgaaggatctggaaggcgacgggcttgctgatgtagcagttggcgcagagtcccagatgattgtgctatcctctcgacctgtggttgacatggttactctgatgagcttctcccctgctgagatccccgtgcatgaggtggagtgctcttatagtacctccaacaagatgaaagaaggtgttaacattacgatctgtttccagattaagtctctgattccccagtttcagggacgcctggtggccaatttgacgtacaccctgcagctggatggccataggacacgccgccgtggtttgttccctggggggaggcacgaacttagaagaaatatcgccgtcactacctctatgtcttgcacagacttcagtttccatttcccagtgtgtgtccaggatctgatcagtcccatcaacgtgtcccttaacttctcattgtgggaggaggagggaacaccccgcgatcagagggcccaggggaaagatattccacctattctgcggccatctttacatagcgagacttgggaaattcctttcgaaaaaaactgcggtgaagacaaaaaatgcgaggccaacctcagggtgtcattctcccctgcccgttcccgtgctctccggctgacagccttcgcttcactctccgtcgaactatcactgtctaatctcgaggaggatgcctactgggtgcagctggatctccattttccccctggactcagtttccggaaggtcgaaatgctcaagccacatagtcaaatcccagtgtcctgcgaggagctaccggaagagagccgcctgctttcccgcgcactgtcatgcaatgtgtcgagtccaatttttaaggcaggacattctgtggctttacagatgatgttcaataccctcgtgaactctagctggggcgattccgttgaactgcacgctaacgtgacctgcaataacgaggattctgatctacttgaggataactccgcaaccacaatcatccccatcctctatcccataaatatcctaatacaggaccaagaagacagcaccctctacgtgtcttttacccctaaggggcctaaaattcaccaggtgaaacacatgtaccaggttcgcatacagccatcaatccatgaccacaacattcccacactagaggcagtagtcggagtgcctcagccaccgtccgaaggacccatcactcaccaatggtctgtgcagatggagcccccggtgccgtgccattacgaggatctagagaggctgcccgacgcagctgagccatgcctcccaggcgctctgttccggtgtcccgttgtgttcaggcaggagatcctggtacaggtgattggaaccctggagttggtcggagagatcgaggctagctctatgtttagcctctgttcatctctaagcatatcatttaacagtagtaagcacttccacctatatggcagcaatgcctcactggcccaggtagtgatgaaggtcgatgttgtttatgaaaaacagatgctgtacctgtacgtgttaagcgggattggcgggctgctgctgctgctgttgatctttatcgtgctctacaaggtcggcttctttaagagaaacttaaaggagaaaatggaggccggtagaggcgtccctaacggcatcccagctgaggatagcgagcaactggcgagcggccaggaggcaggagacccgggctgcctgaagccgttacacgaaaaggattccgagtcaggaggtggcaaagactag

SEQ ID NO: 126570 - DNA, 3513 bp, Artificial Sequence
  derived and/or modified sequence
atgaaagactcatgcatcaccgtcatggctatggctctgctgtctggatttttcttctttgccccagcatcaagttataacttggacgtgaggggcgcaaggagcttttctcccccaagagcaggcaggcactttggctatcgggttctccaggtgggaaatggcgttattgtaggcgcaccaggtgaaggaaatagtaccggctcactgtaccagtgccaaagtgggaccggccattgcctgcccgtgaccctacgaggtagtaactatacctctaaatatctgggaatgacactcgcaactgacccaaccgacggctccattctcgcctgcgaccccggtctgtccaggacctgtgatcagaacacatacttaagcggtctctgttacttatttcgccaaaacctgcagggccctatgctgcagggacggcctggattccaggaatgcataaaggggaatgtggatcttgtgttcctcttcgacgggtcgatgtctctgcagccagacgagtttcagaagattctggattttatgaaggacgttatgaaaaaattgtcaaacacgagttatcagtttgccgcagtacagttcagcacaagctataagaccgagttcgatttttcagactatgttaagcggaaggaccccgacgctttgctcaagcacgttaaacatatgctgctgctgaccaatacttttggagcgatcaactatgtggccacagaggtgttcagagaagaattgggagctcgcccagacgccactaaagtgttaatcattataaccgatggggaggccacagactccggaaacattgatgctgcgaaagacattattaggtacatcattggaatcggaaaacacttccagacaaaggaaagccaggaaaccctgcacaagttcgcttctaagcctgcctcagagtttgttaagatcctggataccttcgagaaactcaaggacctgttcacggaactgcagaagaaaatctacgtaatcgaagggacgagcaaacaggacctgacgtccttcaacatggagctcagctcatcaggaatcagtgccgatctttcccgcggacatgcagtggtgggcgctgtaggcgcaaaggactgggcaggaggtttcctggacctgaaagccgacctccaggacgatacattcattgggaacgagccattgacaccggaggtgcgggcaggctatttaggctacacagtgacgtggctaccatctaggcagaaaacttctcttctcgcttccggggctccgagatatcagcatatggggagggtgcttcttttccaggagccccaggggggtgggcactggagccaggttcaaaccatacacggcactcagatcggctcctactttgggggagagttgtgcggagtggacgtcgaccaggacggagaaacggaattgttgctgattggggcaccactgttctacggtgagcagagaggaggcagggtgtttatctaccagcggaggcagctgggctttgaagaggtgagtgagcttcagggcgatcctggatatcctcttggaaggttcggcgaggctatcactgcccttaccgatatcaacggcgacggcctggtggatgttgcggtcggtgcaccgttggaagaacagggggctgtgtatatcttcaatgggaggcacgggggtcttagcccacagccctcccagaggatcgagggtacgcaggtgctttctggcatccagtggtttggaagaagcatccatggggtaaaggacctcgagggtgacggtctggcagatgtggccgtgggggcagagtcccagatgatcgtactcagtagccgcccagttgtggatatggttactctgatgtctttctcccccgcagagatccccgtacacgaggtggaatgtagctactctaccagcaataaaatgaaggaaggcgtgaatattaccatctgttttcaaattaaatctctgatcccccagttccaagggcgattggtggctaatctgacttacactcttcaactggatggtcatcgcacacgacggaggggcttgtttcctggcggaagacatgaactaagacgcaacattgccgtcacaacctctatgtcctgcacggatttttcattccacttcccagtgtgtgtacaggatctgatcagccccatcaatgtcagtttgaacttcagcttatgggaggaggaaggcactccccgagatcagcgtgcacaaggtaaagatatcccccctatcctgagaccaagtttacacagcgagacatgggaaatcccctttgaaaagaattgcggagaggataaaaagtgtgaggctaatctgcgtgtcagcttcagcccagcgcgttctagggccctgaggttgacagcatttgctagtctgtctgttgaattgagcctgagcaatctggaagaagatgcatattgggtccaattagacctacacttccctccgggtctcagttttagaaaggtggagatgctgaaacctcatagccaaatcccagttagctgtgaagagttacctgaggagtctaggctgctgagccgagccttgtcttgcaatgtcagcagtcccatatttaaggccggacactcggttgctcttcagatgatgttcaacactctcgtaaatagcagttggggtgatagtgtcgagttgcacgccaatgtgacatgcaataacgaggacagcgacctgctggaggacaatagcgccacaacaattatccccatcctgtacccaattaacattttaatacaggatcaggaagactccaccctgtacgtgagctttacccccaaaggccctaaaattcaccaagtaaaacacatgtatcaggtgagaatccagcccagcatccatgatcataatatccccacccttgaggcagtcgtcggcgttccgcagccaccgagcgagggcccaatcacccaccagtggtccgtgcagatggagccaccagtgccctgccattatgaggatctcgagagactcccagatgctgccgagccctgcctgcctggagctctctttcgttgtcctgttgtgtttcggcaggaaattctggtgcaggtgattggcactctggagctggtcggcgagatcgaagcttcctccatgttctcactctgttctagtctatccataagtttcaactcttcgaagcactttcacttgtacgggagcaacgcgagcctggctcaagtggtcatgaaagtcgacgtcgtatatgaaaagcagatgctctatctatacgttctgagtggtatcgggggtctcctgttacttctattgatctttatagtgctgtataaggtgggattttttaagaggaatcttaaggaaaagatggaggccggaagaggcgtgccaaatggtatcccagcagaggattccgaacagctggctagtggacaagaagcaggcgaccctggttgcctgaaaccactccacgaaaaggactccgaatcggggggtggaaaagattag

SEQ ID NO: 126571 - DNA, 3513 bp, Artificial Sequence
  derived and/or modified sequence
atgaaggacagctgcatcaccgtgatggccatggccctgctgagcggcttcttcttcttcgcccccgccagcagctacaacctggacgtgagaggcgccagaagcttcagcccccccagagccggcagacacttcggctacagagtgctgcaggtgggcaacggcgtgatcgtgggcgcccccggcgagggcaacagcaccggcagcctgtaccagtgccagagcggcaccggccactgcctgcccgtgaccctgagaggcagcaactacaccagcaagtacctgggcatgaccctggccaccgaccccaccgacggcagcatcctggcctgcgaccccggcctgagcagaacctgcgaccagaacacctacctgagcggcctgtgctacctgttcagacagaacctgcagggccccatgctgcagggcagacccggcttccaggagtgcatcaagggcaacgtggacctggtgttcctgttcgacggcagcatgagcctgcagcccgacgagttccagaagatcctggacttcatgaaggacgtgatgaagaagctgagcaacaccagctaccagttcgccgccgtgcagttcagcaccagctacaagaccgagttcgacttcagcgactacgtgaagagaaaggaccccgacgccctgctgaagcacgtgaagcacatgctgctgctgaccaacaccttcggcgccatcaactacgtggccaccgaggtgttcagagaggagctgggcgccagacccgacgccaccaaggtgctgatcatcatcaccgacggcgaggccaccgacagcggcaacatcgacgccgccaaggacatcatcagatacatcatcggcatcggcaagcacttccagaccaaggagagccaggagaccctgcacaagttcgccagcaagcccgccagcgagttcgtgaagatcctggacaccttcgagaagctgaaggacctgttcaccgagctgcagaagaagatctacgtgatcgagggcaccagcaagcaggacctgaccagcttcaacatggagctgagcagcagcggcatcagcgccgacctgagcagaggccacgccgtggtgggcgccgtgggcgccaaggactgggccggcggcttcctggacctgaaggccgacctgcaggacgacaccttcatcggcaacgagcccctgacccccgaggtgagagccggctacctgggctacaccgtgacctggctgcccagcagacagaagaccagcctgctggccagcggcgcccccagataccagcacatgggcagagtgctgctgttccaggagccccagggcggcggccactggagccaggtgcagaccatccacggcacccagatcggcagctacttcggcggcgagctgtgcggcgtggacgtggaccaggacggcgagaccgagctgctgctgatcggcgcccccctgttctacggcgagcagagaggcggcagagtgttcatctaccagagaagacagctgggcttcgaggaggtgagcgagctgcagggcgaccccggctaccccctgggcagattcggcgaggccatcaccgccctgaccgacatcaacggcgacggcctggtggacgtggccgtgggcgcccccctggaggagcagggcgccgtgtacatcttcaacggcagacacggcggcctgagcccccagcccagccagagaatcgagggcacccaggtgctgagcggcatccagtggttcggcagaagcatccacggcgtgaaggacctggagggcgacggcctggccgacgtggccgtgggcgccgagagccagatgatcgtgctgagcagcagacccgtggtggacatggtgaccctgatgagcttcagccccgccgagatccccgtgcacgaggtggagtgcagctacagcaccagcaacaagatgaaggagggcgtgaacatcaccatctgcttccagatcaagagcctgatcccccagttccagggcagactggtggccaacctgacctacaccctgcagctggacggccacagaaccagaagaagaggcctgttccccggcggcagacacgagctgagaagaaacatcgccgtgaccaccagcatgagctgcaccgacttcagcttccacttccccgtgtgcgtgcaggacctgatcagccccatcaacgtgagcctgaacttcagcctgtgggaggaggagggcacccccagagaccagagagcccagggcaaggacatcccccccatcctgagacccagcctgcacagcgagacctgggagatccccttcgagaagaactgcggcgaggacaagaagtgcgaggccaacctgagagtgagcttcagccccgccagaagcagagccctgagactgaccgccttcgccagcctgagcgtggagctgagcctgagcaacctggaggaggacgcctactgggtgcagctggacctgcacttcccccccggcctgagcttcagaaaggtggagatgctgaagccccacagccagatccccgtgagctgcgaggagctgcccgaggagagcagactgctgagcagagccctgagctgcaacgtgagcagccccatcttcaaggccggccacagcgtggccctgcagatgatgttcaacaccctggtgaacagcagctggggcgacagcgtggagctgcacgccaacgtgacctgcaacaacgaggacagcgacctgctggaggacaacagcgccaccaccatcatccccatcctgtaccccatcaacatcctgatccaggaccaggaggacagcaccctgtacgtgagcttcacccccaagggccccaagatccaccaggtgaagcacatgtaccaggtgagaatccagcccagcatccacgaccacaacatccccaccctggaggccgtggtgggcgtgccccagccccccagcgagggccccatcacccaccagtggagcgtgcagatggagccccccgtgccctgccactacgaggacctggagagactgcccgacgccgccgagccctgcctgcccggcgccctgttcagatgccccgtggtgttcagacaggagatcctggtgcaggtgatcggcaccctggagctggtgggcgagatcgaggccagcagcatgttcagcctgtgcagcagcctgagcatcagcttcaacagcagcaagcacttccacctgtacggcagcaacgccagcctggcccaggtggtgatgaaggtggacgtggtgtacgagaagcagatgctgtacctgtacgtgctgagcggcatcggcggcctgctgctgctgctgctgatcttcatcgtgctgtacaaggtgggcttcttcaagagaaacctgaaggagaagatggaggccggcagaggcgtgcccaacggcatccccgccgaggacagcgagcagctggccagcggccaggaggccggcgaccccggctgcctgaagcccctgcacgagaaggacagcgagagcggcggcggcaaggactag

SEQ ID NO: 126572 - protein, 1048 aa, Artificial Sequence
  derived and/or modified sequence
MAFPPRRRLRLGPRGLPLLLSGLLLPLCRAFNLDVDSPAEYSGPEGSYFGFAVDFFVPSASSRMFLLVGAPKANTTQPGIVEGGQVLKCDWSSTRRCQPIEFDATGNRDYAKDDPLEFKSHQWFGASVRSKQDKILACAPLYHWRTEMKQEREPVGTCFLQDGTKTVEYAPCRSQDIDADGQGFCQGGFSIDFTKADRVLLGGPGSFYWQGQLISDQVAEIVSKYDPNVYSIKYNNQLATRTAQAIFDDSYLGYSVAVGDFNGDGIDDFVSGVPRAARTLGMVYIYDGKNMSSLYNFTGEQMAAYFGFSVAATDINGDDYADVFIGAPLFMDRGSDGKLQEVGQVSVSLQRASGDFQTTKLNGFEVFARFGSAIAPLGDLDQDGFNDIAIAAPYGGEDKKGIVYIFNGRSTGLNAVPSQILEGQWAARSMPPSFGYSMKGATDIDKNGYPDLIVGAFGVDRAILYRARPVITVNAGLEVYPSILNQDNKTCSLPGTALKVSCFNVRFCLKADGKGVLPRKLNFQVELLLDKLKQKGAIRRALFLYSRSPSHSKNMTISRGGLMQCEELIAYLRDESEFRDKLTPITIFMEYRLDYRTAADTTGLQPILNQFTPANISRQAHILLDCGEDNVCKPKLEVSVDSDQKKIYIGDDNPLTLIVKAQNQGEGAYEAELIVSIPLQADFIGVVRNNEALARLSCAFKTENQTRQVVCDLGNPMKAGTQLLAGLRFSVHQQSEMDTSVKFDLQIQSSNLFDKVSPVVSHKVDLAVLAAVEIRGVSSPDHVFLPIPNWEHKENPETEEDVGPVVQHIYELRNNGPSSFSKAMLHLQWPYKYNNNTLLYILHYDIDGPMNCTSDMEINPLRIKISSLQTTEKNDTVAGQGERDHLITKRDLALSEGDIHTLGCGVAQCLKIVCQVGRLDRGKSAILYVKSLLWTETFMNKENQNHSYSLKSSASFNVIEFPYKNLPIEDITNSTLVTTNVTWGIQPAPMPVPVWVIILAVLAGLLLLAVLVFVMYRMGFFKRVRPPQEEQEREQLQPHENGEGNSET

SEQ ID NO: 126573 - protein, 482 aa, Artificial Sequence
  derived and/or modified sequence
MAFPPRRRLRLGPRGLPLLLSGLLLPLCRAFNLDVDSPAEYSGPEGSYFGFAVDFFVPSASSRMFLLVGAPKANTTQPGIVEGGQVLKCDWSSTRRCQPIEFDATGNRDYAKDDPLEFKSHQWFGASVRSKQDKILACAPLYHWRTEMKQEREPVGTCFLQDGTKTVEYAPCRSQDIDADGQGFCQGGFSIDFTKADRVLLGGPGSFYWQGQLISDQVAEIVSKYDPNVYSIKYNNQLATRTAQAIFDDSYLGYSVAVGDFNGDGIDDFVSGVPRAARTLGMVYIYDGKNMSSLYNFTGEQMAAYFGFSVAATDINGDDYADVFIGAPLFMDRGSDGKLQEVGQVSVSLQRASGDFQTTKLNGFEVFARFGSAIAPLGDLDQDGFNDIAIAAPYGGEDKKGIVYIFNGRSTGLNAVPSQILEGQWAARSMPPSFGYSMKGATDIDKNGYPDLIVGAFGVDRAILYRARPVIPIFVQLHHVVH

SEQ ID NO: 126574 - DNA, 3147 bp, Artificial Sequence
  derived and/or modified sequence
atggccttcccccccagaagaagactgagactgggccccagaggcctgcccctgctgctgagcggcctgctgctgcccctgtgcagagccttcaacctggacgtggacagccccgccgagtacagcggccccgagggcagctacttcggcttcgccgtggacttcttcgtgcccagcgccagcagcagaatgttcctgctggtgggcgcccccaaggccaacaccacccagcccggcatcgtggagggcggccaggtgctgaagtgcgactggagcagcaccagaagatgccagcccatcgagttcgacgccaccggcaacagagactacgccaaggacgaccccctggagttcaagagccaccagtggttcggcgccagcgtgagaagcaagcaggacaagatcctggcctgcgcccccctgtaccactggagaaccgagatgaagcaggagagagagcccgtgggcacctgcttcctgcaggacggcaccaagaccgtggagtacgccccctgcagaagccaggacatcgacgccgacggccagggcttctgccagggcggcttcagcatcgacttcaccaaggccgacagagtgctgctgggcggccccggcagcttctactggcagggccagctgatcagcgaccaggtggccgagatcgtgagcaagtacgaccccaacgtgtacagcatcaagtacaacaaccagctggccaccagaaccgcccaggccatcttcgacgacagctacctgggctacagcgtggccgtgggcgacttcaacggcgacggcatcgacgacttcgtgagcggcgtgcccagagccgccagaaccctgggcatggtgtacatctacgacggcaagaacatgagcagcctgtacaacttcaccggcgagcagatggccgcctacttcggcttcagcgtggccgccaccgacatcaacggcgacgactacgccgacgtgttcatcggcgcccccctgttcatggacagaggcagcgacggcaagctgcaggaggtgggccaggtgagcgtgagcctgcagagagccagcggcgacttccagaccaccaagctgaacggcttcgaggtgttcgccagattcggcagcgccatcgcccccctgggcgacctggaccaggacggcttcaacgacatcgccatcgccgccccctacggcggcgaggacaagaagggcatcgtgtacatcttcaacggcagaagcaccggcctgaacgccgtgcccagccagatcctggagggccagtgggccgccagaagcatgccccccagcttcggctacagcatgaagggcgccaccgacatcgacaagaacggctaccccgacctgatcgtgggcgccttcggcgtggacagagccatcctgtacagagccagacccgtgatcaccgtgaacgccggcctggaggtgtaccccagcatcctgaaccaggacaacaagacctgcagcctgcccggcaccgccctgaaggtgagctgcttcaacgtgagattctgcctgaaggccgacggcaagggcgtgctgcccagaaagctgaacttccaggtggagctgctgctggacaagctgaagcagaagggcgccatcagaagagccctgttcctgtacagcagaagccccagccacagcaagaacatgaccatcagcagaggcggcctgatgcagtgcgaggagctgatcgcctacctgagagacgagagcgagttcagagacaagctgacccccatcaccatcttcatggagtacagactggactacagaaccgccgccgacaccaccggcctgcagcccatcctgaaccagttcacccccgccaacatcagcagacaggcccacatcctgctggactgcggcgaggacaacgtgtgcaagcccaagctggaggtgagcgtggacagcgaccagaagaagatctacatcggcgacgacaaccccctgaccctgatcgtgaaggcccagaaccagggcgagggcgcctacgaggccgagctgatcgtgagcatccccctgcaggccgacttcatcggcgtggtgagaaacaacgaggccctggccagactgagctgcgccttcaagaccgagaaccagaccagacaggtggtgtgcgacctgggcaaccccatgaaggccggcacccagctgctggccggcctgagattcagcgtgcaccagcagagcgagatggacaccagcgtgaagttcgacctgcagatccagagcagcaacctgttcgacaaggtgagccccgtggtgagccacaaggtggacctggccgtgctggccgccgtggagatcagaggcgtgagcagccccgaccacgtgttcctgcccatccccaactgggagcacaaggagaaccccgagaccgaggaggacgtgggccccgtggtgcagcacatctacgagctgagaaacaacggccccagcagcttcagcaaggccatgctgcacctgcagtggccctacaagtacaacaacaacaccctgctgtacatcctgcactacgacatcgacggccccatgaactgcaccagcgacatggagatcaaccccctgagaatcaagatcagcagcctgcagaccaccgagaagaacgacaccgtggccggccagggcgagagagaccacctgatcaccaagagagacctggccctgagcgagggcgacatccacaccctgggctgcggcgtggcccagtgcctgaagatcgtgtgccaggtgggcagactggacagaggcaagagcgccatcctgtacgtgaagagcctgctgtggaccgagaccttcatgaacaaggagaaccagaaccacagctacagcctgaagagcagcgccagcttcaacgtgatcgagttcccctacaagaacctgcccatcgaggacatcaccaacagcaccctggtgaccaccaacgtgacctggggcatccagcccgcccccatgcccgtgcccgtgtgggtgatcatcctggccgtgctggccggcctgctgctgctggccgtgctggtgttcgtgatgtacagaatgggcttcttcaagagagtgagacccccccaggaggagcaggagagagagcagctgcagccccacgagaacggcgagggcaacagcgagacctag

SEQ ID NO: 126575 - DNA, 1449 bp, Artificial Sequence
  derived and/or modified sequence
atggccttcccccccagaagaagactgagactgggccccagaggcctgcccctgctgctgagcggcctgctgctgcccctgtgcagagccttcaacctggacgtggacagccccgccgagtacagcggccccgagggcagctacttcggcttcgccgtggacttcttcgtgcccagcgccagcagcagaatgttcctgctggtgggcgcccccaaggccaacaccacccagcccggcatcgtggagggcggccaggtgctgaagtgcgactggagcagcaccagaagatgccagcccatcgagttcgacgccaccggcaacagagactacgccaaggacgaccccctggagttcaagagccaccagtggttcggcgccagcgtgagaagcaagcaggacaagatcctggcctgcgcccccctgtaccactggagaaccgagatgaagcaggagagagagcccgtgggcacctgcttcctgcaggacggcaccaagaccgtggagtacgccccctgcagaagccaggacatcgacgccgacggccagggcttctgccagggcggcttcagcatcgacttcaccaaggccgacagagtgctgctgggcggccccggcagcttctactggcagggccagctgatcagcgaccaggtggccgagatcgtgagcaagtacgaccccaacgtgtacagcatcaagtacaacaaccagctggccaccagaaccgcccaggccatcttcgacgacagctacctgggctacagcgtggccgtgggcgacttcaacggcgacggcatcgacgacttcgtgagcggcgtgcccagagccgccagaaccctgggcatggtgtacatctacgacggcaagaacatgagcagcctgtacaacttcaccggcgagcagatggccgcctacttcggcttcagcgtggccgccaccgacatcaacggcgacgactacgccgacgtgttcatcggcgcccccctgttcatggacagaggcagcgacggcaagctgcaggaggtgggccaggtgagcgtgagcctgcagagagccagcggcgacttccagaccaccaagctgaacggcttcgaggtgttcgccagattcggcagcgccatcgcccccctgggcgacctggaccaggacggcttcaacgacatcgccatcgccgccccctacggcggcgaggacaagaagggcatcgtgtacatcttcaacggcagaagcaccggcctgaacgccgtgcccagccagatcctggagggccagtgggccgccagaagcatgccccccagcttcggctacagcatgaagggcgccaccgacatcgacaagaacggctaccccgacctgatcgtgggcgccttcggcgtggacagagccatcctgtacagagccagacccgtgatccccatcttcgtgcagctgcaccacgtggtgcactag

SEQ ID NO: 126576 - DNA, 3147 bp, Artificial Sequence
  derived and/or modified sequence
atggcctttcctccacgtagaaggcttcggttgggtccaaggggtttacccttgctgctgtcaggactgctgctgcccttgtgccgtgcctttaacctggatgtagattcgccggccgagtatagtggtccggaaggctcttatttcggttttgctgtcgacttcttcgttccctccgcctcgtcacggatgtttctgttagtaggcgcccctaaggccaacacgactcaacctgggatcgtggagggaggccaggtgctgaaatgtgattggtcttcaacacgacggtgtcaacccatagagtttgatgccacggggaacagagattacgccaaggatgacccccttgaattcaaaagccaccagtggtttggcgcttctgtgcgttcaaagcaggacaagattctagcatgtgcaccgctctaccattggaggacggagatgaaacaggagagagagcccgtgggtacctgttttctccaagatgggacaaagaccgtagaatatgctccatgtcggagtcaggacatagatgccgacggccagggcttttgccagggtggattctcaatcgacttcaccaaagccgaccgcgtgctgctgggcgggcctggctccttctactggcagggacagctcatcagcgatcaagtcgctgagatcgtcagtaaatatgacccgaatgtttattctatcaaatacaacaatcagttggcaacgcggacagcccaagcgatattcgatgatagctacttaggttatagtgtagccgtgggcgactttaacggggacggtatcgacgattttgttagtggggtgccacgagcagctcggactttaggtatggtgtacatctacgatggcaaaaacatgtcaagtttgtacaactttacgggcgaacaaatggctgcctattttgggttctccgttgctgctacagacattaatggggacgactacgccgacgtgttcataggtgcccctctgttcatggacaggggatctgacggcaagctccaggaagtgggacaggttagtgtatcactgcagcgcgccagcggggacttccaaactactaaattgaatggctttgaagtgttcgcccggttcgggtctgccattgctccactgggggacctcgatcaggacggctttaacgatatcgctattgctgctccctatggaggtgaggacaagaagggaatcgtgtacatttttaacggccggtcaacaggcttgaatgccgtccctagccagatcctggaaggtcagtgggctgccaggtccatgcccccgtccttcgggtattcgatgaagggagctacagatattgataaaaacggctatcctgacttaatcgtcggagcgttcggggtcgatcgagctatcctgtaccgagctcgcccagtgatcacggttaacgctggactggaggtttatcccagcattcttaaccaggacaataaaacatgcagtctacctggcactgctctgaaagtgtcctgcttcaatgtgcgattctgccttaaggcagacggtaagggcgttctcccaagaaaactcaatttccaggtcgaactgttactggataagttaaaacagaaaggggctatccgcagggctctgtttctgtactcgagaagccccagtcactccaagaacatgaccatctcaagaggcggtttgatgcaatgtgaagagttgatcgcatacctccgcgatgaaagcgagtttcgcgataagcttacacctattacaatctttatggaatatcgcctcgattaccggactgccgcagatactaccggcctccagcctattcttaatcaattcactcctgccaacatttctagacaggcgcacatactcctcgactgtggggaagataacgtgtgcaagccaaagttagaggtgtcagtggattccgaccagaaaaagatatacataggagacgataacccactaacattgattgtgaaggctcagaaccaaggggaaggggcctacgaggccgaattgatcgtgtccattcccttacaggccgactttataggcgtggtacggaataatgaagctctggccagattgagttgtgcctttaagaccgaaaatcagactagacaggtggtatgtgatctcggcaatccgatgaaagccggaacccaactgctggcagggttacgctttagtgtgcaccagcagagtgagatggatacctcagtgaagttcgacctgcagattcagtcaagcaaccttttcgacaaagtctcaccagtcgttagccataaagtggatctcgcagttttagctgcagtcgagattcgcggagtttcatctccggaccacgtgttcctgcctatccctaactgggagcataaggaaaatccggagacagaagaagacgtcggtcctgtagtgcagcacatttacgagctgaggaacaacggacctagctccttttccaaggccatgctacacctgcagtggccctacaaatacaataacaacaccctgctatacatcctgcactatgatatcgacgggccaatgaactgcacaagcgatatggagatcaacccgcttcggatcaaaatctctagccttcaaacaaccgagaagaacgacacagtggcaggacagggggagcgtgaccacttaataacaaagagagatctagcgctgtccgaaggagacattcacactcttgggtgtggcgtggctcagtgtcttaaaattgtgtgtcaggtaggacgactggatcggggtaaatcagcgattctctatgttaaaagcttgctttggactgaaactttcatgaacaaggaaaatcagaaccattcttactccctcaaatctagtgcctctttcaatgtgatagaattcccttacaaaaatctaccaatcgaggatatcacaaactctactttggttaccactaatgttacctgggggatccagcccgctcctatgcctgtgcctgtgtgggtgataatactggcggtgctggcaggcttattactgttggcagtgctcgtgtttgtaatgtatcggatggggttcttcaaaagagtcaggcccccacaggaggagcaggagagggaacagcttcagccccacgaaaacggagaggggaactctgagacctag

SEQ ID NO: 126577 - DNA, 1449 bp, Artificial Sequence
  derived and/or modified sequence
atggcgtttcctcctcgccggcggctgcgcctgggcccgagagggcttcctcttctgcttagtgggttgcttctgcccctctgccgggcatttaatcttgatgttgattctcccgcagagtattccggacccgaaggtagctatttcggtttcgcagtcgacttcttcgtgccgtcagcatcctctaggatgttcttattggtcggcgcccccaaagctaacactacacaacccggtatcgttgagggaggccaggtcctgaaatgcgattggtcctcgacaagacgttgtcagcctattgagtttgatgccactgggaacagggactacgccaaggatgatccattggagtttaagagccaccagtggtttggagcaagcgtacgctctaagcaggataaaattttagcctgtgcccccctatatcattggcgcaccgaaatgaagcaagaacgcgagcccgtgggcacttgcttcctgcaggacgggacaaaaacagtagaatatgccccatgccgctctcaggacatcgatgctgatggacaggggttctgtcagggaggcttctctatcgattttacaaaggccgaccgtgtgctcctaggaggacctggctcgttttactggcagggccagctgatttctgaccaggtggcagagatcgtttctaagtacgacccaaacgtgtatagcataaagtacaataatcagcttgcaacgcggaccgcccaagcaattttcgacgattcctatttggggtacagcgtggcggtcggcgactttaacggcgatgggatagacgactttgtgagcggcgtgcctagggccgctagaacactggggatggtgtatatatatgacggcaaaaatatgtcatccctgtataacttcacgggcgagcaaatggccgcgtacttcggcttttcagtcgccgccacagacatcaatggcgacgactacgccgatgtgttcattggagcccccttgttcatggaccgtggatcggatgggaagttacaggaggtggggcaggtgagcgtgtctctgcagcgcgcctccggggattttcagacgaccaagctgaacgggttcgaggtgtttgcccgattcggcagtgctatagcccctctgggggaccttgaccaagatggctttaacgatattgcaatcgccgccccatacgggggggaggataagaagggtatcgtgtatatattcaatggacgcagtactggtctaaacgcggtgccctcccagatcctggagggccagtgggccgcgaggagtatgcccccctcgtttgggtattctatgaaaggcgctaccgacatagataaaaatgggtacccggacctgattgtcggagcatttggagtggatcgtgcaattctgtacagggctagaccagttattccaattttcgtgcaattgcaccacgtggtgcactag

SEQ ID NO: 126578 - DNA, 3147 bp, Artificial Sequence
  derived and/or modified sequence
atggccttccccccccggcggcggctgcggctgggcccccggggcctgcccctgctgctgagcggcctgctgctgcccctgtgccgggccttcaacctggatgtggacagccctgctgagtacagcggccctgagggcagctactttggatttgctgtggacttctttgtgcccagcgccagcagcaggatgttcctgctggtgggcgcccccaaggccaacaccacccagcccggcatcgtggagggcggccaggtgctgaagtgtgactggagcagcacccggcgctgccagcccatcgagtttgatgccactggaaacagagattatgccaaggatgaccccctggagttcaagagccaccagtggtttggagcctctgtgcgcagcaagcaggacaagatcctggcctgtgcccccctgtaccactggaggacagagatgaagcaggagcgggagcctgtgggcacctgcttcctgcaggacggcaccaagacagtggagtatgccccctgccgcagccaggacattgatgctgatggccagggcttctgccagggcggcttcagcattgacttcaccaaggctgacagagtgctgctgggcggccctggcagcttctactggcagggccagctgatcagtgaccaggtggccgagatcgtgtccaaatatgaccccaacgtgtacagcatcaagtacaacaaccagctggccaccaggacagcccaggccatctttgatgacagctacctgggctacagcgtggccgtgggggacttcaatggagatggcattgatgactttgtgtctggagtgccccgggccgcccggaccctgggcatggtgtacatctatgatggcaagaacatgagcagcctgtacaacttcaccggggagcagatggccgcctacttcggcttctctgtggccgccacagacatcaatggagatgattatgcagatgtgttcatcggggcccccctcttcatggaccggggcagtgatggcaagctgcaggaggtgggccaggtgtctgtgtccctgcagagggccagcggggacttccagaccaccaagctgaatggatttgaggtgtttgcccgcttcggcagcgccatcgcccccctgggggacctggaccaggacggcttcaatgacatcgccatcgccgccccctatggaggagaggacaagaagggcatcgtgtacatcttcaacggccgcagcacaggcctgaatgctgtgcccagccagatcctggagggccagtgggccgcccgctccatgcctccttcctttggctacagcatgaagggggccacagacatcgacaagaatggctacccagacctgattgtgggcgcctttggagtggaccgggccatcctgtaccgggcccggcctgtgatcaccgtgaatgccggcctggaggtgtaccccagcatcctgaaccaggacaacaagacctgcagcctgcccggcacagccctgaaggtgtcctgcttcaacgtgcgcttctgcctgaaggcagatggcaagggcgtgctgcccaggaagctgaacttccaggtggagctgctgctggacaagctgaagcagaagggggccatcagaagagccctcttcctgtacagccgcagccccagccacagcaagaacatgaccatcagccggggcggcctgatgcagtgtgaggagctgattgcctacctgagagatgagagcgagttccgggacaagctgacccccatcaccatcttcatggagtaccgcctggactacagaacagctgctgacaccaccggcctgcagcccatcctgaaccagttcaccccagccaacatcagccggcaggcccacatcctgctggactgtggggaggacaacgtgtgcaagcccaagctggaggtgtctgtggacagcgaccagaagaagatctacatcggagatgacaaccccctgaccctcatcgtgaaggcccagaaccagggcgagggcgcctatgaagctgagctgattgtgtccatccccctgcaggccgacttcatcggcgtggtgaggaacaatgaggccctggcccggctgagctgtgccttcaagacagagaaccagacccggcaggtggtgtgtgacctgggcaaccccatgaaggccggcacccagctgctggccggcctgcgcttctctgtgcaccagcagagcgagatggacacctctgtgaagtttgacctgcagatccagagcagcaacctgtttgacaaggtgtcccctgtggtgagccacaaggtggacctggccgtgctggccgctgtggagatccggggcgtgagcagcccagaccacgtgttcctgcccatccccaactgggagcacaaggagaaccctgagacagaggaggatgtgggccctgtggtgcagcacatctatgagctgagaaataatggccccagcagcttcagcaaggccatgctgcacctgcagtggccctacaagtacaacaacaacaccctgctgtacatcctgcactatgacattgatggccccatgaactgcaccagtgacatggagatcaaccccctgcgcatcaagatcagcagcctgcagaccacagagaagaatgacacagtggccggccagggcgagcgggaccacctgatcaccaagagggacctggccctgtctgagggggacatccacaccctgggctgcggcgtggcccagtgcctgaagatcgtgtgccaggtgggccgcctggaccggggcaagagcgccatcctgtatgtgaagagcctgctgtggacagagaccttcatgaacaaggagaaccagaaccacagctacagcctgaagagcagcgccagcttcaacgtgattgagttcccctacaagaacctgcccatcgaggacatcaccaacagcaccctggtgaccaccaacgtgacctggggcatccagcctgcccccatgcctgtgcctgtgtgggtgatcatcctggccgtgctggccggcctgctgctgctggccgtgctggtgtttgtgatgtacaggatgggcttcttcaagagggtgcggcccccccaggaggagcaggagcgggagcagctgcagccccatgaaaatggagagggcaacagcgagacctag

SEQ ID NO: 126579 - DNA, 1449 bp, Artificial Sequence
  derived and/or modified sequence
atggccttccccccccggcggcggctgcggctgggcccccggggcctgcccctgctgctgagcggcctgctgctgcccctgtgccgggccttcaacctggatgtggacagccctgctgagtacagcggccctgagggcagctactttggatttgctgtggacttctttgtgcccagcgccagcagcaggatgttcctgctggtgggcgcccccaaggccaacaccacccagcccggcatcgtggagggcggccaggtgctgaagtgtgactggagcagcacccggcgctgccagcccatcgagtttgatgccactggaaacagagattatgccaaggatgaccccctggagttcaagagccaccagtggtttggagcctctgtgcgcagcaagcaggacaagatcctggcctgtgcccccctgtaccactggaggacagagatgaagcaggagcgggagcctgtgggcacctgcttcctgcaggacggcaccaagacagtggagtatgccccctgccgcagccaggacattgatgctgatggccagggcttctgccagggcggcttcagcattgacttcaccaaggctgacagagtgctgctgggcggccctggcagcttctactggcagggccagctgatcagtgaccaggtggccgagatcgtgtccaaatatgaccccaacgtgtacagcatcaagtacaacaaccagctggccaccaggacagcccaggccatctttgatgacagctacctgggctacagcgtggccgtgggggacttcaatggagatggcattgatgactttgtgtctggagtgccccgggccgcccggaccctgggcatggtgtacatctatgatggcaagaacatgagcagcctgtacaacttcaccggggagcagatggccgcctacttcggcttctctgtggccgccacagacatcaatggagatgattatgcagatgtgttcatcggggcccccctcttcatggaccggggcagtgatggcaagctgcaggaggtgggccaggtgtctgtgtccctgcagagggccagcggggacttccagaccaccaagctgaatggatttgaggtgtttgcccgcttcggcagcgccatcgcccccctgggggacctggaccaggacggcttcaatgacatcgccatcgccgccccctatggaggagaggacaagaagggcatcgtgtacatcttcaacggccgcagcacaggcctgaatgctgtgcccagccagatcctggagggccagtgggccgcccgctccatgcctccttcctttggctacagcatgaagggggccacagacatcgacaagaatggctacccagacctgattgtgggcgcctttggagtggaccgggccatcctgtaccgggcccggcctgtgatccccatctttgtgcagctgcaccacgtggtgcactag

SEQ ID NO: 126580 - DNA, 7030 bp, Artificial Sequence
  derived and/or modified sequence
cctcagacgctgcgtggagcggcggagccggagggaagcaaaggaccgtctgcgctgctgtccccgccccgcgcgctctgcgcccctcgtccctggcggtcgctccgaagctcagccctcttgcctgccccggagctgtcccgggctagccgagaagagagcggccggcaagtttgggcgcgcgcaggcggcgggccgcgggcactgggcgcctcgctggggcggggggaggtggctaccgctcccggcttggcgtcccgcgcgcacttcggcgatggcttttccgccgcggcgacggctgcgcctcggtccccgcggcctcccgcttcttctctcgggactcctgctacctctgtgccgcgccttcaacctagacgtggacagtcctgccgagtactctggccccgagggaagttacttcggcttcgccgtggatttcttcgtgcccagcgcgtcttcccggatgtttcttctcgtgggagctcccaaagcaaacaccacccagcctgggattgtggaaggagggcaggtcctcaaatgtgactggtcttctacccgccggtgccagccaattgaatttgatgcaacaggcaatagagattatgccaaggatgatccattggaatttaagtcccatcagtggtttggagcatctgtgaggtcgaaacaggataaaattttggcctgtgccccattgtaccattggagaactgagatgaaacaggagcgagagcctgttggaacatgctttcttcaagatggaacaaagactgttgagtatgctccatgtagatcacaagatattgatgctgatggacagggattttgtcaaggaggattcagcattgattttactaaagctgacagagtacttcttggtggtcctggtagcttttattggcaaggtcagcttatttcggatcaagtggcagaaatcgtatctaaatacgaccccaatgtttacagcatcaagtataataaccaattagcaactcggactgcacaagctatttttgatgacagctatttgggttattctgtggctgtcggagatttcaatggtgatggcatagatgactttgtttcaggagttccaagagcagcaaggactttgggaatggtttatatttatgatgggaagaacatgtcctccttatacaattttactggcgagcagatggctgcatatttcggattttctgtagctgccactgacattaatggagatgattatgcagatgtgtttattggagcacctctcttcatggatcgtggctctgatggcaaactccaagaggtggggcaggtctcagtgtctctacagagagcttcaggagacttccagacgacaaagctgaatggatttgaggtctttgcacggtttggcagtgccatagctcctttgggagatctggaccaggatggtttcaatgatattgcaattgctgctccatatgggggtgaagataaaaaaggaattgtttatatcttcaatggaagatcaacaggcttgaacgcagtcccatctcaaatccttgaagggcagtgggctgctcgaagcatgccaccaagctttggctattcaatgaaaggagccacagatatagacaaaaatggatatccagacttaattgtaggagcttttggtgtagatcgagctatcttatacagggccagaccagttatcactgtaaatgctggtcttgaagtgtaccctagcattttaaatcaagacaataaaacctgctcactgcctggaacagctctcaaagtttcctgttttaatgttaggttctgcttaaaggcagatggcaaaggagtacttcccaggaaacttaatttccaggtggaacttcttttggataaactcaagcaaaagggagcaattcgacgagcactgtttctctacagcaggtccccaagtcactccaagaacatgactatttcaagggggggactgatgcagtgtgaggaattgatagcgtatctgcgggatgaatctgaatttagagacaaactcactccaattactatttttatggaatatcggttggattatagaacagctgctgatacaacaggcttgcaacccattcttaaccagttcacgcctgctaacattagtcgacaggctcacattctacttgactgtggtgaagacaatgtctgtaaacccaagctggaagtttctgtagatagtgatcaaaagaagatctatattggggatgacaaccctctgacattgattgttaaggctcagaatcaaggagaaggtgcctacgaagctgagctcatcgtttccattccactgcaggctgatttcatcggggttgtccgaaacaatgaagccttagcaagactttcctgtgcatttaagacagaaaaccaaactcgccaggtggtatgtgaccttggaaacccaatgaaggctggaactcaactcttagctggtcttcgtttcagtgtgcaccagcagtcagagatggatacttctgtgaaatttgacttacaaatccaaagctcaaatctatttgacaaagtaagcccagttgtatctcacaaagttgatcttgctgttttagctgcagttgagataagaggagtctcgagtcctgatcatgtctttcttccgattccaaactgggagcacaaggagaaccctgagactgaagaagatgttgggccagttgttcagcacatctatgagctgagaaacaatggtccaagttcattcagcaaggcaatgctccatcttcagtggccttacaaatataataataacactctgttgtatatccttcattatgatattgatggaccaatgaactgcacttcagatatggagatcaaccctttgagaattaagatctcatctttgcaaacaactgaaaagaatgacacggttgccgggcaaggtgagcgggaccatctcatcactaagcgggatcttgccctcagtgaaggagatattcacactttgggttgtggagttgctcagtgcttgaagattgtctgccaagttgggagattagacagaggaaagagtgcaatcttgtacgtaaagtcattactgtggactgagacttttatgaataaagaaaatcagaatcattcctattctctgaagtcgtctgcttcatttaatgtcatagagtttccttataagaatcttccaattgaggatatcaccaactccacattggttaccactaatgtcacctggggcattcagccagcgcccatgcctgtgcctgtgtgggtgatcattttagcagttctagcaggattgttgctactggctgttttggtatttgtaatgtacaggatgggcttttttaaacgggtccggccacctcaagaagaacaagaaagggagcagcttcaacctcatgaaaatggtgaaggaaactcagaaacttaactgcagtttttaagttatgctacatcttgacccactagaattagcaactttattatagatttaaactttcttcatgaggagtaaaaatccaaggctttactgctgatagtgctaattggcattaaccacaaaatgagaattatatttgtcaaccttctccttataaataagttcagacatacatttaataacatagggtgacttgtgtttttaggtatttaaataataaaatttcaagggatagtttttattcaatgtatataagacaggtagtgcctgatttactactttatataaaatagtacctccttcagttactgtttctgatttaatgtacggaactttatttgttgttgttgttgttgttgttgttgttgttttaaagcagtccaaatttggaccttagcaatcatgtcttttgtataggtacttaatgttaatacatattacactacagtttacttttcagaatactaaagactttataactgcatgaacttggatttttttaatcactcatatggtagaattttataaacacatacatgataccatccaaattcttgcttttaataacaaaggtacaatattttgttttagtatgaaaatctggtagatcctattacacttctgtttatattaaatccacaatattttattacatttttaacttgtataaattttaggtcaaatccttcaagccaacctatactaaaaattagttccataatcacaaatggctcttttgtgtaattgtttaatttcacctgaatatcataatgcttaaagccatatggagttggaaattatttccaaagcatatttattccattgttttagtctggctatttacagtataaaaaaagcatttttattaaaatactgtgtagttctttgagatagttgcttatgcatatagtaagtattacattcttagagtagagcagagtttttagttagtattaatttattttcctccattcatgtacttttccttatatttccaaaactgttactgagaatgggtcaagatcagtgagaaatctttacagttgacaggaacctggaccccttaccccaactttatgagtaatgcttggaataaaaactcttaaggcaactcactgatttacttctagcaatagcatgatgttacaggaatattacctctgtttaagcaaggtaatgtgtaaaatcagtctcggctgtcagaataacttctaaaaggtatttttataagcagttcaagttactgaaaaccttttaaacctttctgaagttcgttagtataaattacttttctaggattattaataaaagccacataggtggcaagttgtagttttatatggctctgtagagtggtgaaccttctagaggaatatatgatttattcacagttcctcaaggcctggggatgatgatcagttatacctatttttgtgcaattacatcatgttgtacattagaaatggagagtttaatagctctttaactgctgtcctcattaggtaatgataaatatttcccttaaataattgactattttgctgtgttttaaaaatgattgaaatttatcttgccatatctcataatttcatgcacaagttgactgagctaatcttgagaatatattcgtaaaataggagcacatttagttgaggtatacaaggtaggactctagacaaaaccttctattttagctttagtgaatttcaaaagtaatgggtcttggagtatagatttttattagtagcttgaaagagcttaatcatatgcagtaagtatttttattaccaataaatttaaaattttttaagaaaaatatttttatcctagggccaagtgttgcctgccaccaatcagtaagttagtctataacaaattttaccctaacagttttaccacctagtaacagtcatttctgaaaatatgttggatagaaagtcactctttggcaaaagtgttagaatttgcttttgtgccatctattccttttatggcatctatcttgaaagtaatcttgtattggagattgaaagatgctgtaatttagaaattaacatgatatcttaaattacctttatgaaatatagttttgtataatagcatagattttccttcaaaaaatgaacatttatatatctacaaaaatatggagaagagtaatttgaaagcctactttctgaagaaaatggtgggatttttttttatcatgattaaatatcaaaaaattgccctatgaaaactttaaatctctaaaacatttgaaatactaccatatttgtgatttattgagaataaaaatccattttgaaatgtaaaatttttatgatctgattcagttttaagaaaacatgaatgaactagaagatattaaaaacatttgacattggtaagaaatattgatactgatattgatttttatataggtatttatttcagaattgatattttgagaaaaatacatgtgagtcattttttctgtttctcttttctcttaacgattatcactgtaattctgaatctgaaaggtaaaacaattagtcaaaatattattgccatcattctacctgtgttatgaaactacttattcatagttaattctcattaacacttacatttccataaagaaaactcaagtattaataaaagagactttactggcttaagagggctgtgaaagatttttgatagtgaatcatgaccctaagggagagatttgtgtgataaaagtattgtatataatagatcagcgatttttgtaaggcaaacagaatttgtaagttggcagatcttcctaagttgcaaaatgtaatgatgagcttggtggagaagaatgagtcgttcttggaatacctatgtgcagccactacccatctcaatgtcaccttgtttgcattcttggatagcttgtatatgtagtagtttgatgaataatttaaagaaaaacacctaaaatttgaaaaatgattgtaggatcaaaaaaggcagatgaaattacttaatactcagtgttttggagagtattccttttagtttgttggttggctggtttgaacgatagaaatatgcagcatgcaatatatgcttatatttcattttaatttctgatatataatgaacttcttgggagaggtactgaatctttgatgttttttgtcattgttctcaagtgcaatataacaatgtaaccaaatctagataatttcaaagttgtcattaatttagtaagcctaatataaacaaatatttgtattatttttgttagcaggaaagagtgattaagtgaggttatttacccctaaatggtccattctgcattgtatttcaggctggaaatgaattattctttaccagttttgaaacactttgaaatatcctaaggtaacttggaagctgtgtagtatatcaaattaatttgctacctaataacatagaaagtaaatatctttgtggtcacccacattgggtgagacagaaaatgaatctgttctaaaatttgtaatttgctaacttgatttgagttagtgaaaactggtacagtgttctgcttgatttacaacatgtaacttgtgactgtacaataaacataagcatatggtacca

SEQ ID NO: 126581 - DNA, 2271 bp, Artificial Sequence
  derived and/or modified sequence
agcctcagacgctgcgtggagcggcggagccggagggaagcaaaggaccgtctgcgctgctgtccccgccccgcgcgctctgcgcccctcgtccctggcggtcgctccgaagctcagccctcttgcctgccccggagctgtcccgggctagccgagaagagagcggccggcaagtttgggcgcgcgcaggcggcgggccgcgggcactgggcgcctcgctggggcggggggaggtggctaccgctcccggcttggcgtcccgcgcgcacttcggcgatggcttttccgccgcggcgacggctgcgcctcggtccccgcggcctcccgcttcttctctcgggactcctgctacctctgtgccgcgccttcaacctagacgtggacagtcctgccgagtactctggccccgagggaagttacttcggcttcgccgtggatttcttcgtgcccagcgcgtcttcccggatgtttcttctcgtgggagctcccaaagcaaacaccacccagcctgggattgtggaaggagggcaggtcctcaaatgtgactggtcttctacccgccggtgccagccaattgaatttgatgcaacaggcaatagagattatgccaaggatgatccattggaatttaagtcccatcagtggtttggagcatctgtgaggtcgaaacaggataaaattttggcctgtgccccattgtaccattggagaactgagatgaaacaggagcgagagcctgttggaacatgctttcttcaagatggaacaaagactgttgagtatgctccatgtagatcacaagatattgatgctgatggacagggattttgtcaaggaggattcagcattgattttactaaagctgacagagtacttcttggtggtcctggtagcttttattggcaaggtcagcttatttcggatcaagtggcagaaatcgtatctaaatacgaccccaatgtttacagcatcaagtataataaccaattagcaactcggactgcacaagctatttttgatgacagctatttgggttattctgtggctgtcggagatttcaatggtgatggcatagatgactttgtttcaggagttccaagagcagcaaggactttgggaatggtttatatttatgatgggaagaacatgtcctccttatacaattttactggcgagcagatggctgcatatttcggattttctgtagctgccactgacattaatggagatgattatgcagatgtgtttattggagcacctctcttcatggatcgtggctctgatggcaaactccaagaggtggggcaggtctcagtgtctctacagagagcttcaggagacttccagacgacaaagctgaatggatttgaggtctttgcacggtttggcagtgccatagctcctttgggagatctggaccaggatggtttcaatgatattgcaattgctgctccatatgggggtgaagataaaaaaggaattgtttatatcttcaatggaagatcaacaggcttgaacgcagtcccatctcaaatccttgaagggcagtgggctgctcgaagcatgccaccaagctttggctattcaatgaaaggagccacagatatagacaaaaatggatatccagacttaattgtaggagcttttggtgtagatcgagctatcttatacagggccagaccagttatacctatttttgtgcaattacatcatgttgtacattagaaatggagagtttaatagctctttaactgctgtcctcattaggtaatgataaatatttcccttaaataattgactattttgctgtgttttaaaaatgattgaaatttatcttgccatatctcataatttcatgcacaagttgactgagctaatcttgagaatatattcgtaaaataggagcacatttagttgaggtatacaaggtaggactctagacaaaaccttctattttagctttagtgaatttcaaaagtaatgggtcttggagtatagatttttattagtagcttgaaagagcttaatcatatgcagtaagtatttttattaccaataaatttaaaattttttaagaaaaatatttttatcctagggccaagtgttgcctgccaccaatcagtaagttagtctataacaaattttaccctaacagttttaccacctagtaacagtcatttctgaaaatatgttggatagaaagtcactctttggcaaaagtgttagaatttgcttttgtgccatctattccttttatggcatctatcttga

SEQ ID NO: 126582 - DNA, 3147 bp, Artificial Sequence
  derived and/or modified sequence
atggccttccccccccggcggcggctgcggctgggcccccggggcctgcccctgctcctctctggcctattgctgcctctgtgccgcgcttttaacttggacgtggattctcctgcggagtactcaggccccgagggttcctacttcggtttcgccgtggatttctttgttccatctgccagcagcaggatgttcttactggtcggagcgccaaaggctaataccacccagccaggtattgtagagggcgggcaggtgctcaagtgtgattggtccagtacgcggcgttgccagccaattgagttcgacgctaccgggaaccgggattatgccaaggacgaccccctggaattcaaaagccaccaatggttcggggcttcagtgagaagcaagcaggacaaaattctggcttgcgccccgctctaccactggagaaccgagatgaaacaagagcgggagccggtggggacctgctttctgcaggatggaaccaagactgtggaatacgccccttgcaggtctcaggatattgacgccgatggtcagggcttctgccagggcgggtttagtatcgactttacgaaggccgatcgagtacttctgggcggccctggaagcttctactggcagggccagttaatatccgaccaggttgctgagatcgtgtccaagtatgatccaaacgtctattcaatcaaatacaacaaccagctagcaacccggacagcccaggctatctttgatgattcttacctcggctactccgttgctgttggcgactttaatggggacgggatcgacgacttcgtatcgggagtcccacgggccgcccgcactttgggtatggtgtacatatacgacggcaagaacatgagctcgctttacaacttcacaggagaacagatggctgcatactttggctttagtgtggctgccacagatattaatggcgacgactacgccgacgtttttataggagctccactcttcatggacagaggaagcgacggcaagctacaggaagtcggacaggtctctgtgagccttcagcgcgcgtccggcgacttccaaacaacaaagcttaacggtttcgaggtcttcgccaggttcggttctgcgattgctcccctgggagacttagatcaggacggctttaatgatatcgcaattgccgccccatatggaggagaggacaagaagggaattgtgtacatttttaatggccggagtacgggattgaacgccgttccaagccagattttggaaggtcagtgggccgcacgtagcatgccaccttcttttggatactccatgaagggcgccacagacatcgacaaaaacggttacccagatctcatcgtcggcgcctttggggttgacagagctatcctgtaccgagccagacccgtgattacggtcaacgccggtctggaagtttacccatcaatcctaaaccaagacaataaaacatgctctctcccgggaaccgccctgaaggtgtcctgcttcaacgtgagattttgtctgaaagccgatgggaagggagtcctcccaaggaagctaaattttcaggtggaactgctcctagacaagcttaagcaaaagggggccatccggcgcgcactctttctgtacagccgcagcccctctcatagcaagaatatgactatcagcaggggggggctaatgcagtgcgaggaactgattgcctatctgagggacgaatcagaattccgcgacaagcttacccctatcactatcttcatggaataccgactggattataggactgcggccgacaccacggggctgcagcctatcctgaaccaatttaccccagccaacatcagtagacaggctcatatcctgctagattgtggtgaggacaatgtctgtaagcctaagctggaggtgtccgtggactcggaccagaaaaaaatctacatcggcgacgataatcctctaacactgatcgtcaaagcccagaatcagggcgagggagcatatgaagctgaactaattgtgtccatccctcttcaggccgatttcattggggtcgtgcgaaataacgaggcgctagcgcggctttcctgcgccttcaaaacagaaaatcaaactcggcaagttgtctgcgacttgggaaacccaatgaaggcaggcactcagctgcttgccgggcttcggtttagtgttcaccagcagtccgagatggatacgagtgtgaaatttgacctgcagattcagtcctcaaatctatttgataaggtcagtcctgtggtctcccacaaggtggacctcgccgtcctggctgccgtggaaattcgcggagtctctagcccagaccatgtgttcctccctatccctaattgggaacacaaagaaaatcccgagaccgaggaggatgtgggccctgtggtacagcacatttatgaactgcgaaataacgggccatcctctttctccaaagctatgttgcaccttcagtggccttacaaatataataataatactcttctctatatactccactatgacatcgatgggccaatgaattgtacgtctgacatggagatcaatcctctccggattaaaatctccagcctccagactacagaaaaaaatgacaccgttgccgggcagggtgaaagagaccacctcattactaagcgcgacttagcactgagcgagggtgatatacacacactgggttgcggggttgctcaatgtttgaaaatcgtgtgccaggtgggacgcttagacagaggaaagtcggcaattctatatgtgaagtccctactgtggactgagacattcatgaataaagaaaaccagaaccactcgtacagtcttaaatcatctgccagcttcaacgtcatcgagttcccatacaaaaatcttcctattgaggatataactaactctactctggttacaaccaatgtgacctggggcatccaacccgctcccatgcccgtccctgtttgggtgattattctggccgttctggccgggctcttgctcctggctgtgctggtgtttgtgatgtataggatgggattcttcaagagggtccgcccgccccaggaagaacaggagcgcgaacaactccagccccacgagaacggggaaggtaactcagagacatag

SEQ ID NO: 126583 - DNA, 1449 bp, Artificial Sequence
  derived and/or modified sequence
atggccttccccccccggcggcggctgcggctgggcccccggggcctgccccttctcctgagcggcctcctgcttccactgtgtagagcttttaatttggacgtcgactctccggctgagtattcaggaccagaaggttcttacttcgggttcgcagtcgacttttttgtaccctcagctagttctaggatgtttcttctcgtcggcgcgccaaaggccaatacgacgcaacctggcatcgtggagggtggccaggtgctgaaatgcgattggagttccacacgacgatgccaacctattgaattcgacgcaactggtaaccgagattacgccaaggacgatcctttggagttcaagtcacaccagtggttcggagcctctgtgagaagtaaacaagataaaatcctcgcatgcgcgccgttatatcattggcggacagagatgaagcaagaaagagagcccgtcgggacttgcttccttcaggatgggaccaaaactgtcgagtacgccccttgccggtctcaggacatagatgctgacgggcaaggcttctgtcaaggtggctttagcatcgatttcaccaaggccgaccgcgtgctgctgggaggaccaggttcattctattggcagggacagttgatttcggaccaggtggctgagatcgtgagtaaatacgacccgaatgtgtattctattaaatacaataatcaactggccactagaaccgcccaggcaatcttcgatgattcgtacctaggttacagtgttgctgtgggcgacttcaatggagacggaatagacgactttgttagtggagtgccccgcgccgcccgcactttaggtatggtctacatttacgatggtaagaacatgagttccttgtataacttcacaggggaacaaatggcggcctattttggcttctctgtggcagctaccgatatcaatggtgacgactatgccgacgttttcattggggccccacttttcatggataggggctccgatggaaagcttcaggaagtgggtcaagtgtcggtatctctgcagagggcttccggggatttccaaaccacgaagcttaacggattcgaggtgtttgcccgttttggctccgctatcgcaccattgggggatttagaccaggacggattcaacgatatcgccatagccgcaccctacggcggtgaagataaaaagggcattgtttatatctttaacggccgctcaaccggattaaatgccgtgccttctcagatcctggagggacagtgggccgccagatctatgcctccttcgtttggctatagcatgaagggtgctaccgacatcgataagaacggctatcctgaccttattgtcggagcttttggagtggatcgagcaatactgtacagagcgcgacctgtgattccaatcttcgttcagttacatcacgtggtccactag

SEQ ID NO: 126584 - DNA, 3147 bp, Artificial Sequence
  derived and/or modified sequence
atggcattccctcccagacgacgccttagactcggtccaaggggattaccgcttcttctgagtggcctgcttctccctctgtgccgcgcattcaatttggacgtcgactctcccgctgagtattcaggtcccgagggctcctatttcggcttcgcagtggattttttcgtaccctctgcctcctctcgcatgttcctcctggtgggggcaccaaaggcgaacaccacacaacctggtattgtggaaggtgggcaggtgcttaagtgcgattggtcctccacccggcgatgccagccaatcgaattcgacgctactggtaatcgcgattatgctaaggacgaccccctagaattcaaatctcaccaatggttcggcgctagcgtgcgttctaaacaagataagatcctggcttgtgcgccactgtaccactggaggaccgagatgaagcaagagcgtgaacccgttggtacttgttttctgcaggatggtacaaaaaccgtcgagtacgcaccatgcaggtcacaggatatcgatgcggatgggcagggtttttgccagggtggattcagtattgacttcacaaaagcagaccgagtactgctcggaggtcccggatctttctactggcagggccaactcatcagcgaccaggtggcagaaatagtgagcaagtacgatccaaatgtctactctatcaagtacaacaaccagctggctacacggacggctcaggcgatctttgatgactcctacttgggttattccgttgctgtcggggacttcaacggggatgggatcgacgactttgtttctggcgtgcccagggcagccagaaccctgggcatggtctacatatatgacgggaaaaatatgagctccctgtacaattttactggcgagcagatggctgcttacttcgggttctccgtggcggcaaccgatatcaatggcgatgactacgcagatgtatttataggcgcaccattgttcatggatagaggctctgacgggaagctgcaggaggtcggccaggtttctgtctccctccaacgtgcctctggggattttcagactacaaagctgaacggttttgaggtgttcgcacgctttgggagtgctattgctccactgggggacctggatcaagatgggttcaacgacatcgccatcgccgctccttatggaggcgaagataaaaaggggatagtgtatatctttaacggaagaagtaccggtctgaacgccgtgccgtctcagatactcgaagggcagtgggcagcgcgatccatgccaccttctttcggatattccatgaagggggcaactgatatagacaagaatggctacccggatctcattgtcggggcattcggagtcgaccgagctattctgtaccgggcacggcctgtcattacagtgaatgccggattagaggtgtacccctccatccttaatcaagacaacaagacgtgctcactgcccggaaccgcacttaaggttagctgctttaatgtgcgcttctgtctgaaagcggatggaaaaggcgttctaccccgaaagcttaacttccaggtagaactgttgttagataaattgaagcagaagggagccattcggagggctctctttctgtactcacggtccccttctcattccaagaatatgacaatcagtaggggtggactgatgcagtgcgaagaactgattgcctacctcagggatgagagcgaatttcgggataagctgacgcctattacaattttcatggaatatcgcctggactatcgaactgccgctgataccactggcctccagcctattctgaaccaatttacccctgcaaatatctctcgccaggctcatatcttactggactgtggagaggataacgtgtgtaagccaaagctcgaagtgagtgtcgactcagatcagaagaagatctacattggggacgacaacccgttgactctcattgtcaaagctcagaaccaaggggagggggcttatgaggcggagctgattgtgtcaattcctctgcaagcggattttattggtgtggtaagaaataatgaggctctggcacggctatcctgcgcattcaaaaccgaaaaccagacaaggcaggtcgtatgcgacctcggcaacccgatgaaggcaggcacacagcttctggccggattgagattttccgttcatcaacaatctgagatggatacgtccgttaagtttgatctgcagattcagtcatccaatttgttcgacaaagtatcaccagttgtgtcccataaggtggatctggccgtactggctgctgtggagataaggggggtttcctcacccgaccacgtctttctgcctatccctaactgggagcacaaggagaacccagaaacagaggaagacgtcggtcctgttgtccagcacatttacgagctcaggaataatggtccctcttcctttagcaaagccatgctacacctccagtggccatacaagtacaacaataatacactgttatacattttgcattacgacatcgacggacccatgaactgtacctctgatatggagattaaccccctgcgcattaagatctcctccctgcagaccacggagaagaatgacactgtcgctgggcagggggagcgagaccatctgattaccaaacgtgatctcgcccttagcgagggcgatattcatactctcggatgcggagttgcgcagtgcctcaagatagtctgccaggtgggtcggctagatagaggcaaatccgcaattctatacgtgaagagtctgctctggactgaaacctttatgaataaagaaaaccagaatcattcttatagcctcaagtcttccgctagctttaatgtaatagaatttccatacaagaatctgccgatagaagatatcacgaatagtactctcgtgactactaatgttacgtggggtattcagcccgctcctatgccagtgcccgtgtgggttataatactggctgtgcttgcgggactgctcttgttagcggtgctggtattcgtcatgtatcgaatggggttctttaagagagtaagaccaccccaagaagagcaggagagagagcagctgcagccccacgagaacggcgagggcaactcagagacatag

SEQ ID NO: 126585 - DNA, 1449 bp, Artificial Sequence
  derived and/or modified sequence
atggcttttccaccccgtaggcggctgcgcctggggccacgtggactgcccctgctactgtctggactgctgttgccactttgtcgggcatttaatctggacgtggatagccctgccgagtacagcggacccgaggggtcctactttgggtttgcggtggacttctttgttccttccgcctcctccaggatgttcctattggtgggggctccgaaagccaacactacccagccgggaattgtcgaaggcggacaagtgttgaaatgcgactggtcctctactaggaggtgtcagcccattgagttcgacgcaaccgggaaccgtgactatgccaaggacgatccactggaattcaagtcccaccagtggtttggcgcttctgtgcgttcgaagcaggacaaaatcctcgcgtgcgcaccactgtatcattggcgcaccgagatgaagcaggaacgggaacctgtagggacatgcttcctccaggatggaaccaagacggtggagtatgccccttgtcggagccaggacatcgatgctgatggccaagggttctgtcaggggggattctctatcgattttacgaaagcagatcgggtcctgttaggcggacctggctccttctactggcaggggcagttgatctctgaccaggttgctgagatagtaagcaagtacgaccctaacgtctattctattaagtacaataatcagttggcaacccgcacagcccaggccattttcgatgactcctacctgggatattctgtggcagtgggagactttaatggagatggtattgacgatttcgtttcaggcgttcctcgtgccgctcgaacccttggcatggtatatatctatgacggtaagaacatgtcttcgctctacaactttactggtgagcagatggccgcatacttcggattcagtgtcgctgccacagatatcaatggggacgactacgctgatgtcttcattggagcacctttgttcatggatcggggaagcgacggtaaactgcaagaagttgggcaggtgtcagtcagtctgcagcgcgcatctggcgacttccagacgactaaacttaatggattcgaagtgttcgcaagatttggcagcgctattgcgcctttaggcgacttggaccaggacggatttaatgatatcgctatcgccgcaccctacggaggggaagataagaagggtattgtctacatctttaacggtcgctccaccgggctgaatgctgttcctagtcaaattctcgagggccaatgggcggctcggagcatgccacctagttttggctactcaatgaagggcgcaaccgacattgataaaaatgggtacccggatctgatcgtgggagcgtttggtgtcgacagggccattttgtatcgcgctagacctgtaattcccatttttgtccagctgcaccatgtggtgcactag

SEQ ID NO: 126586 - protein, 799 aa, Artificial Sequence
  derived and/or modified sequence
MPRAPAPLYACLLGLCALLPRLAGLNICTSGSATSCEECLLIHPKCAWCSKEDFGSPRSITSRCDLRANLVKNGCGGEIESPASSFHVLRSLPLSSKGSGSAGWDVIQMTPQEIAVNLRPGDKTTFQLQVRQVEDYPVDLYYLMDLSLSMKDDLDNIRSLGTKLAEEMRKLTSNFRLGFGSFVDKDISPFSYTAPRYQTNPCIGYKLFPNCVPSFGFRHLLPLTDRVDSFNEEVRKQRVSRNRDAPEGGFDAVLQAAVCKEKIGWRKDALHLLVFTTDDVPHIALDGKLGGLVQPHDGQCHLNEANEYTASNQMDYPSLALLGEKLAENNINLIFAVTKNHYMLYKNFTALIPGTTVEILDGDSKNIIQLIINAYNSIRSKVELSVWDQPEDLNLFFTATCQDGVSYPGQRKCEGLKIGDTASFEVSLEARSCPSRHTEHVFALRPVGFRDSLEVGVTYNCTCGCSVGLEPNSARCNGSGTYVCGLCECSPGYLGTRCECQDGENQSVYQNLCREAEGKPLCSGRGDCSCNQCSCFESEFGKIYGPFCECDNFSCARNKGVLCSGHGECHCGECKCHAGYIGDNCNCSTDISTCRGRDGQICSERGHCLCGQCQCTEPGAFGEMCEKCPTCPDACSTKRDCVECLLLHSGKPDNQTCHSLCRDEVITWVDTIVKDDQEAVLCFYKTAKDCVMMFTYVELPSGKSNLTVLREPECGNTPNAMTILLAVVGSILLVGLALLAIWKLLVTIHDRREFAKFQSERSRARYEMASNPLYRKPISTHTVDFTFNKFNKSYNGTVD

SEQ ID NO: 126587 - DNA, 2400 bp, Artificial Sequence
  derived and/or modified sequence
atgcccagagcccccgcccccctgtacgcctgcctgctgggcctgtgcgccctgctgcccagactggccggcctgaacatctgcaccagcggcagcgccaccagctgcgaggagtgcctgctgatccaccccaagtgcgcctggtgcagcaaggaggacttcggcagccccagaagcatcaccagcagatgcgacctgagagccaacctggtgaagaacggctgcggcggcgagatcgagagccccgccagcagcttccacgtgctgagaagcctgcccctgagcagcaagggcagcggcagcgccggctgggacgtgatccagatgaccccccaggagatcgccgtgaacctgagacccggcgacaagaccaccttccagctgcaggtgagacaggtggaggactaccccgtggacctgtactacctgatggacctgagcctgagcatgaaggacgacctggacaacatcagaagcctgggcaccaagctggccgaggagatgagaaagctgaccagcaacttcagactgggcttcggcagcttcgtggacaaggacatcagccccttcagctacaccgcccccagataccagaccaacccctgcatcggctacaagctgttccccaactgcgtgcccagcttcggcttcagacacctgctgcccctgaccgacagagtggacagcttcaacgaggaggtgagaaagcagagagtgagcagaaacagagacgcccccgagggcggcttcgacgccgtgctgcaggccgccgtgtgcaaggagaagatcggctggagaaaggacgccctgcacctgctggtgttcaccaccgacgacgtgccccacatcgccctggacggcaagctgggcggcctggtgcagccccacgacggccagtgccacctgaacgaggccaacgagtacaccgccagcaaccagatggactaccccagcctggccctgctgggcgagaagctggccgagaacaacatcaacctgatcttcgccgtgaccaagaaccactacatgctgtacaagaacttcaccgccctgatccccggcaccaccgtggagatcctggacggcgacagcaagaacatcatccagctgatcatcaacgcctacaacagcatcagaagcaaggtggagctgagcgtgtgggaccagcccgaggacctgaacctgttcttcaccgccacctgccaggacggcgtgagctaccccggccagagaaagtgcgagggcctgaagatcggcgacaccgccagcttcgaggtgagcctggaggccagaagctgccccagcagacacaccgagcacgtgttcgccctgagacccgtgggcttcagagacagcctggaggtgggcgtgacctacaactgcacctgcggctgcagcgtgggcctggagcccaacagcgccagatgcaacggcagcggcacctacgtgtgcggcctgtgcgagtgcagccccggctacctgggcaccagatgcgagtgccaggacggcgagaaccagagcgtgtaccagaacctgtgcagagaggccgagggcaagcccctgtgcagcggcagaggcgactgcagctgcaaccagtgcagctgcttcgagagcgagttcggcaagatctacggccccttctgcgagtgcgacaacttcagctgcgccagaaacaagggcgtgctgtgcagcggccacggcgagtgccactgcggcgagtgcaagtgccacgccggctacatcggcgacaactgcaactgcagcaccgacatcagcacctgcagaggcagagacggccagatctgcagcgagagaggccactgcctgtgcggccagtgccagtgcaccgagcccggcgccttcggcgagatgtgcgagaagtgccccacctgccccgacgcctgcagcaccaagagagactgcgtggagtgcctgctgctgcacagcggcaagcccgacaaccagacctgccacagcctgtgcagagacgaggtgatcacctgggtggacaccatcgtgaaggacgaccaggaggccgtgctgtgcttctacaagaccgccaaggactgcgtgatgatgttcacctacgtggagctgcccagcggcaagagcaacctgaccgtgctgagagagcccgagtgcggcaacacccccaacgccatgaccatcctgctggccgtggtgggcagcatcctgctggtgggcctggccctgctggccatctggaagctgctggtgaccatccacgacagaagagagttcgccaagttccagagcgagagaagcagagccagatacgagatggccagcaaccccctgtacagaaagcccatcagcacccacaccgtggacttcaccttcaacaagttcaacaagagctacaacggcaccgtggactag

SEQ ID NO: 126588 - DNA, 2400 bp, Artificial Sequence
  derived and/or modified sequence
atgccgcgggcccccgcccccctatacgcctgccttcttggtctctgtgcccttcttccccgactggctgggcttaatatttgcacgtccggctctgccacttcctgcgaagaatgcctgctcatccatccaaaatgtgcttggtgtagcaaagaagattttgggtccccccgctccattaccagccgttgcgatctccgggccaaccttgtcaaaaacggatgcgggggagaaatcgagagtcccgcatcttccttccatgtgctcaggagccttcccctctcaagcaagggatcaggatcagctgggtgggacgtgattcaaatgacgccacaagaaatcgcggtgaacctcaggcccggcgacaagacgacattccagctgcaggtgcgacaggtcgaggattacccagtcgacttatactatctgatggacttgtctctgtcgatgaaagatgatctggataacatccgctccctcggaacgaagttggctgaggagatgcggaagctaacttctaactttcgcctagggttcggctctttcgttgataaagatattagtccattttcttataccgctccacgctatcagaccaatccttgcattgggtacaagctgtttccaaactgcgtgcccagttttggcttccgccacttacttccccttactgaccgtgtggacagctttaacgaggaggtcagaaaacaacgggtttcaagaaatcgtgacgctcccgagggaggattcgacgcggtgctccaagccgccgtttgcaaggaaaaaattggatggcgcaaagatgcgttgcacctcctcgtcttcactaccgacgacgtgccccacattgctctcgatggtaaactcggaggtctggtgcaaccccatgacggccaatgccatctgaacgaggcaaacgagtacacggcctccaaccagatggactacccctctctggcactgctcggcgagaagctggctgagaacaatatcaacttgatttttgccgtgacaaaaaaccactacatgctttacaagaactttaccgcactgattccaggtaccaccgtggagatcctagatggggactccaaaaacattatacagctgattataaatgcctacaactcaattcgctccaaggttgagctgtctgtctgggatcagccagaggacttaaacctgttcttcactgctacatgtcaggacggggtttcatatccagggcagagaaagtgtgaaggccttaaaattggggataccgctagtttcgaggtgtccttggaagctagaagctgcccatcgcgccataccgagcatgtctttgctctgaggcctgtggggttcagggattctcttgaggtgggcgtgacctataactgcacatgcgggtgctccgttggactcgagccgaactctgctcgatgtaacggttcgggcacctatgtctgtggactgtgcgagtgctccccaggttacctggggactcggtgtgaatgccaggacggtgaaaaccagtcagtttatcagaacttgtgtagagaagcagagggcaagcctctgtgctccggtaggggtgactgctcttgtaaccagtgctcttgttttgaaagcgaattcggcaagatttacgggcccttctgcgaatgcgacaacttctcttgtgctcggaataagggcgtgctctgttctggccatggggaatgccattgtggcgagtgcaagtgtcatgctggttatattggcgataactgcaattgctctactgacatttcaacctgcagaggaagggatggtcagatctgtagtgagcgcggacactgtctctgtggccaatgccagtgtacagaaccgggtgctttcggagagatgtgtgaaaagtgtccaacctgcccagacgcgtgctctacaaaacgggactgcgtggagtgcctcctgctccactctggtaagcctgataatcaaacctgccatagtttgtgtcgggatgaagtgatcacttgggtggatactatcgtcaaagatgatcaagaggcggtcttgtgtttctataagaccgccaaggattgtgtcatgatgttcacatatgtggagctgccctcaggcaagagcaacttgactgtgctgcgcgaacccgagtgcggcaacacaccaaacgccatgaccatattgctcgctgtggttgggagcattctgttagttggcctggccctgctggctatctggaagctgttggtcaccatacatgaccgacgagagttcgcaaaatttcaatccgaaaggagccgggccagatacgagatggcctccaacccgctctacagaaagcccatctcgactcatactgtggacttcacttttaataaatttaataaatcatacaatggtacagtcgactag

SEQ ID NO: 126589 - DNA, 4372 bp, Artificial Sequence
  derived and/or modified sequence
gcggagccagcccctcccctacccggagcagcccgctggggccgtcccgagcggcgacacactaggagtcccggccggccagccagggcagccgcggtcccgggactcggccgtgagtgctgcgggacggatggtggcggcggggcgcgggccagcgcgggcgccgtgagccggagctgcgcgcggggcatgcggctgcggcccccggccctcggcccccgcgctccggccccagccccggccgccggcccccgcggagtgcagcgaccgcgccgccgctgagggaggcgccccaccatgccgcgggccccggcgccgctgtacgcctgcctcctggggctctgcgcgctcctgccccggctcgcaggtctcaacatatgcactagtggaagtgccacctcatgtgaagaatgtctgctaatccacccaaaatgtgcctggtgctccaaagaggacttcggaagcccacggtccatcacctctcggtgtgatctgagggcaaaccttgtcaaaaatggctgtggaggtgagatagagagcccagccagcagcttccatgtcctgaggagcctgcccctcagcagcaagggttcgggctctgcaggctgggacgtcattcagatgacaccacaggagattgccgtgaacctccggcccggtgacaagaccaccttccagctacaggttcgccaggtggaggactatcctgtggacctgtactacctgatggacctctccctgtccatgaaggatgacttggacaatatccggagcctgggcaccaaactcgcggaggagatgaggaagctcaccagcaacttccggttgggatttgggtcttttgttgataaggacatctctcctttctcctacacggcaccgaggtaccagaccaatccgtgcattggttacaagttgtttccaaattgcgtcccctcctttgggttccgccatctgctgcctctcacagacagagtggacagcttcaatgaggaagttcggaaacagagggtgtcccggaaccgagatgcccctgaggggggctttgatgcagtactccaggcagccgtctgcaaggagaagattggctggcgaaaggatgcactgcatttgctggtgttcacaacagatgatgtgccccacatcgcattggatggaaaattgggaggcctggtgcagccacacgatggccagtgccacctgaacgaggccaacgagtacactgcatccaaccagatggactatccatcccttgccttgcttggagagaaattggcagagaacaacatcaacctcatctttgcagtgacaaaaaaccattatatgctgtacaagaattttacagccctgatacctggaacaacggtggagattttagatggagactccaaaaatattattcaactgattattaatgcatacaatagtatccggtctaaagtggagttgtcagtctgggatcagcctgaggatcttaatctcttctttactgctacctgccaagatggggtatcctatcctggtcagaggaagtgtgagggtctgaagattggggacacggcatcttttgaagtatcattggaggcccgaagctgtcccagcagacacacggagcatgtgtttgccctgcggccggtgggattccgggacagcctggaggtgggggtcacctacaactgcacgtgcggctgcagcgtggggctggaacccaacagcgccaggtgcaacgggagcgggacctatgtctgcggcctgtgtgagtgcagccccggctacctgggcaccaggtgcgagtgccaggatggggagaaccagagcgtgtaccagaacctgtgccgggaggcagagggcaagccactgtgcagcgggcgtggggactgcagctgcaaccagtgctcctgcttcgagagcgagtttggcaagatctatgggcctttctgtgagtgcgacaacttctcctgtgccaggaacaagggagtcctctgctcaggccatggcgagtgtcactgcggggaatgcaagtgccatgcaggttacatcggggacaactgtaactgctcgacagacatcagcacatgccggggcagagatggccagatctgcagcgagcgtgggcactgtctctgtgggcagtgccaatgcacggagccgggggcctttggggagatgtgtgagaagtgccccacctgcccggatgcatgcagcaccaagagagattgcgtcgagtgcctgctgctccactctgggaaacctgacaaccagacctgccacagcctatgcagggatgaggtgatcacatgggtggacaccatcgtgaaagatgaccaggaggctgtgctatgtttctacaaaaccgccaaggactgcgtcatgatgttcacctatgtggagctccccagtgggaagtccaacctgaccgtcctcagggagccagagtgtggaaacacccccaacgccatgaccatcctcctggctgtggtcggtagcatcctccttgttgggcttgcactcctggctatctggaagctgcttgtcaccatccacgaccggagggagtttgcaaagtttcagagcgagcgatccagggcccgctatgaaatggcttcaaatccattatacagaaagcctatctccacgcacactgtggacttcaccttcaacaagttcaacaaatcctacaatggcactgtggactgatgtttccttctccgaggggctggagcggggatctgatgaaaaggtcagactgaaacgccttgcacggctgctcggcttgatcacagctccctaggtaggcaccacagagaagaccttctagtgagcctgggccaggagcccacagtgcctgtacaggaaggtgcctggccatgtcacctggctgctaggccagagccatgccaggctgcgtccctccgagcttgggataaagcaaggggaccttggcgctctcagctttccctgccacatccagcttgttgtcccaatgaaatactgagatgctgggctgtctctcccttccaggaatgctgggcccccagcctggccagacaagaagactgtcaggaagggtcggagtctgtaaaaccagcatacagtttggcttttttcacattgatcatttttatatgaaataaaaagatcctgcatttatggtgtagttctgagtcctgagacttttctgcgtgatggctatgccttgcacacaggtgttggtgatggggctgttgagatgcctgttgaaggtacatcgtttgcaaatgtcagtttcctctcctgtccgtgtttgtttagtacttttataatgaaaagaaacaagattgtttgggattggaagtaaagattaaaaccaaaagaatttgtgtttgtctgatactctctgtgtgtttctttctttctgagcggacttaaaatggtgcccccagtggggattgaagcggccgtgtacttcctcagggatgggacacaggctggtctgatactccagactgcagcttgtcaagtaagcatgaggtgctcggggcagtgagggctgtgcaagggggaacactgagcagatacctttggccccttccagcttttactgacagagagttccaggctagacaccataaaaaccaccccttgttctgaggggctgaggctggaaatagattgtacagacaagcaagggttgagtggtggttcccacacgaagtcatctcttaatcatcattagcaatagcagttcccttccaaggcctcccctcactcccgaaacacttacgtcccatgcaggcccaatgcaaaaaaacacatttgagcttttttcccgcagggccatgaagtccccttaagttcccatatctaagatggttgactgaccctctccccttatgtacagaagaggaaactgattctcagagaggggaagtggcttgcccgagtgtttgttaggaggttactgaatgacaaactgttcctaagaccccatctcatgctggccagagggccagcctcctcattcctgcttgctcttagaaaatctttcactgatcattttttgtcactggaataacttcaaggttattatgctttcattccaaatggatctgtcctcagctctggacccaattccccttacttcattttggcaaacactaagtcaaatagtgaaatgcctgtcactacatagaacctattacctggggcaaatacgaacagattgagtttccttcatcttgtgtaaatatgatgaaacagagacctggtaacttggtgacactgttaaaccctttttgggataaagccaaatgtaaatgaaaacattaaacagataaattgtggtgttgagacttttctgaattgagaaaaataaatgtaattttggaagaaa

SEQ ID NO: 126590 - DNA, 2400 bp, Artificial Sequence
  derived and/or modified sequence
atgccccgggccccagcccccctgtatgcctgcctgctgggcctgtgtgccctgctgccccggctggccggcctgaacatctgcaccagcggcagcgccaccagctgtgaggagtgcctgctgatccaccccaagtgtgcctggtgcagcaaggaggactttggcagccccaggagcatcaccagccgctgtgacctgcgggccaacctggtgaagaatggctgcggcggggagattgagagccctgccagcagcttccacgtgctgcggagcctgcccctgagcagcaaaggaagtggcagcgctggctgggatgtgatccagatgaccccccaggagattgctgtgaacctgcggcctggggacaagaccaccttccagctgcaggtgcggcaggtggaggactaccctgtggacctgtactacctgatggacctgagcctgtccatgaaggatgacctggacaacatccgcagcctgggcaccaagctggccgaggagatgaggaagctgaccagcaacttccggctgggcttcggcagctttgtggacaaggacatcagccccttctcctacacagccccccgctaccagaccaacccctgcatcggctacaagctgttccccaactgtgtgcccagctttggcttccgccacctgctgcccctgacagacagagtggacagcttcaatgaggaggtgaggaagcagagggtgtccaggaacagagatgcccctgagggcggctttgatgctgtgctgcaggccgctgtgtgcaaggagaagattggctggaggaaggatgccctgcacctgctggtgttcaccacagatgatgtgccccacatcgccctggatggcaagctgggcggcctggtgcagccccatgatggccagtgccacctgaatgaggccaatgagtacacagccagcaaccagatggactaccccagcctggccctgctgggggagaagctggccgagaacaacatcaacctgatctttgctgtgaccaagaaccactacatgctgtacaagaacttcaccgccctgatccctggcaccaccgtggagatcctggatggagacagcaagaacatcatccagctgatcatcaatgcctacaacagcatccgcagcaaggtggagctgtctgtgtgggaccagcctgaggacctgaacctcttcttcaccgccacctgccaggatggagtgtcctacccaggccagaggaaatgtgagggcctgaagatcggggacacagccagctttgaggtgtccctggaggcccggagctgccccagccgccacacagagcacgtgtttgccctgcggcctgtgggcttccgggacagcctggaggtgggcgtgacctacaactgcacctgtggctgcagcgtgggcctggagcccaacagcgcccgctgcaatggaagtggcacctacgtgtgtggcctgtgtgagtgcagccctggctacctgggcacccgctgtgagtgccaggatggagagaaccagagcgtgtaccagaacctgtgccgggaggccgagggcaagcccctgtgcagcggccgcggggactgcagctgcaaccagtgcagctgctttgagagcgagtttgggaagatctacggccccttctgtgaatgtgacaacttcagctgtgccagaaataaaggagtgctgtgcagcggccacggggagtgccactgtggagaatgtaaatgtcatgctggctacatcggggacaactgcaactgcagcacagacatcagcacctgccggggcagagatggccagatctgcagcgagcggggccactgcctgtgtggccagtgccagtgcacagagcccggggcctttggagagatgtgtgagaagtgccccacctgcccagatgcctgcagcaccaagagggactgtgtggagtgcctgctgctgcacagcggcaagccagacaaccagacctgccacagcctgtgcagagatgaagtcatcacctgggtggacaccatcgtgaaggatgaccaggaggccgtgctgtgcttctacaagacagccaaggactgtgtgatgatgttcacctacgtggagctgcccagcggcaagagcaacctgactgtgctgcgggagccagaatgtggcaacaccccaaatgccatgaccatcctgctggccgtggtgggcagcatcctgctggtgggcctggccctgctggccatctggaagctgctggtgaccatccatgacagaagagaatttgccaagttccagagcgagaggagccgggcccgctatgagatggccagcaaccccctgtacaggaagcccatcagcacccacacagtggacttcaccttcaacaagttcaacaagagctacaatggaacagtggactag

SEQ ID NO: 126591 - DNA, 2400 bp, Artificial Sequence
  derived and/or modified sequence
atgccccgggcccccgcccccctgtacgcctgcctgctgggcctgtgtgccctgcttccgagacttgccggcttgaacatctgtaccagcgggagcgccacatcttgcgaggaatgtcttctaatccaccctaagtgtgcatggtgctccaaggaggatttcggtagcccaagaagcatcaccagtagatgtgatctaagagccaatttggtgaagaatggttgcggtggagaaattgagagccccgcatcaagcttccatgtattgcgctccttgcctctgtccagcaagggatccggcagtgctggctgggacgtgatccagatgacaccgcaggagattgccgtcaatctacggccaggggacaagactactttccaattgcaagttcgacaggtggaggactaccctgtggacttgtactacctcatggatttgtcactctctatgaaagatgatcttgacaacatcaggtcactcgggacaaagctggctgaagaaatgagaaaactgacttccaactttaggctcggcttcgggtctttcgttgacaaagatatatctccattcagctacacggcgccacggtaccagacgaacccttgcatcgggtacaagctgtttccaaactgtgtaccctcttttggtttccgccatctgcttcccctgaccgatcgggtcgattccttcaacgaggaggtgcgaaagcaacgggtttcaagaaacagggatgcgcctgaaggcggttttgacgccgtactgcaggccgccgtgtgtaaggaaaagataggctggagaaaagacgccttacacctgctcgtgttcacaacagacgatgtgccccatatcgcgcttgatgggaagttaggcggcctggtgcagcctcacgacggtcaatgtcatctcaacgaggcaaatgaatatacagccagcaaccagatggattatccaagcctcgccctgttgggcgaaaaactcgccgagaataacataaacctgatctttgctgtgacaaagaaccactatatgctttataagaattttactgcactcatcccaggtacgaccgtggagattctggacggtgacagtaagaatattatccagctgatcatcaatgcatacaatagcatacgatcaaaggtggagctttcagtctgggaccaacctgaggatctcaacctgtttttcaccgccacatgccaggacggagtatcatatcccggccagaggaaatgtgagggtctgaagataggcgacaccgcttcatttgaagtttcactggaggctcggagctgcccctccaggcacactgaacacgtgtttgcattgagacctgtggggttcagggattccttggaagtgggcgtgacctacaattgcacatgtgggtgctccgtgggcctggagcccaatagcgcccgctgcaatggctccggaacttatgtgtgcggactgtgtgaatgcagtcctggttatctgggcacgaggtgcgagtgtcaggacggagagaatcagagcgtgtatcagaacctatgccgtgaagccgagggtaaaccattgtgttctggacgtggagattgttcatgtaaccagtgtagctgtttcgagagtgagtttggcaagatctatggaccattctgtgagtgtgataatttctcttgcgcgaggaacaagggagtgctatgttccgggcacggcgagtgtcattgcggggaatgtaagtgccacgcgggctacattggagacaattgtaattgttctaccgacataagcacttgtagaggacgtgatgggcagatttgctccgaacgggggcattgtctgtgcggccaatgccagtgtacagaaccaggagcctttggcgagatgtgtgagaagtgtccaacatgccccgacgcatgtagtactaagcgggactgtgttgagtgcctccttttgcactcagggaaacccgacaaccagacctgccactcgctctgtcgtgacgaggttataacctgggtggacactatcgtgaaagacgaccaggaggcagtgttatgcttttacaaaactgcgaaggactgtgtgatgatgttcacatatgtagaactgccgtctgggaagtcaaacctgaccgttcttagggagcccgaatgtgggaatacacctaatgctatgacgattctcctagcagtggtcggcagtattctcctcgtcggtctcgcattgctggcaatctggaagctcctggtcacaatccacgatagacgggagtttgccaaattccagtctgagcgcagtcgggcccgctatgaaatggcctcaaatccattatacaggaaacctatttctacacacacagtcgattttacgtttaacaagttcaataagtcttacaacggcacagttgattag

SEQ ID NO: 126592 - DNA, 2400 bp, Artificial Sequence
  derived and/or modified sequence
atgccgagagcgcctgctccactctacgcctgcttactcggactgtgtgcactgctgccgaggctggccggtctcaatatttgtaccagcggcagtgcgacctcatgcgaggagtgccttctgatacatccaaaatgtgcgtggtgtagtaaagaggacttcggctccccgcgatccattacgtctcgatgcgatctgcgcgctaacttggtgaagaacggatgtggcggagaaatcgagagtcccgcttcctcctttcatgttttgcggagccttcctcttagtagtaagggtagtggctcagcaggatgggatgtgattcaaatgacgccacaagagatcgctgtcaacctgagaccaggcgataaaacaaccttccagctgcaagttcgtcaggttgaagactatcccgttgatctgtattatctcatggatttgtccttatccatgaaagacgacttggataatatacgatccctggggaccaagttggctgaggaaatgcgcaaactcacttccaattttcgcctcggcttcggaagcttcgtagacaaggacattagtccgttctcatataccgcccctaggtatcaaacaaatccgtgtatcggttataaattatttccaaactgtgtcccgtcattcgggtttcgccatctgctgcctttgacagaccgggtggattccttcaacgaagaggttcggaagcagcgtgtgagtagaaatcgcgacgcgcctgagggcggatttgatgctgtgttacaagcagccgtctgcaaagagaagatcggttggaggaaggatgcgctgcacctcttggtgttcacaaccgatgatgtgcctcacattgccctcgacgggaagctaggaggcctggttcaaccccacgacggtcaatgccatctgaatgaggcaaacgagtacactgctagtaaccaaatggattatccttctctggctctactcggcgagaaactggctgaaaataatattaacctcatctttgccgtaacgaaaaaccactatatgctgtacaagaacttcacggctttgattccaggcaccacggtggaaatcctcgatggcgattccaagaacattatccagctgataatcaatgcttacaacagcattcgatccaaagtcgaactgagtgtttgggatcaacccgaagacctcaaccttttcttcaccgccacttgtcaagatggagtctcttatccagggcagcgcaagtgtgaaggtctgaagataggggacacggcatcttttgaagtgtccctggaagcccgttcatgcccttcgaggcataccgagcacgtgttcgcgctgaggcccgtcggtttccgtgacagccttgaagttggcgtgacttataactgcacgtgcgggtgtagcgtcggcctggagcccaattccgccaggtgtaatgggtcaggcacatatgtctgtgggctgtgcgagtgcagccccggatacctggggactcggtgtgagtgccaagatggggaaaaccaaagtgtgtatcagaacctttgtcgtgaggcggaaggaaaaccactgtgctccggcaggggggactgtagctgtaaccagtgttcttgcttcgaatccgaattcggaaagatctacgggcctttctgcgagtgtgacaacttttcttgcgcgaggaacaaaggggtcctgtgtagtggacatggcgagtgtcattgcggcgagtgcaagtgccacgccggttacattggcgacaactgcaattgctccactgacattagtacatgtagggggcgagacgggcaaatctgtagtgaacggggtcactgtctctgcggccagtgccagtgcaccgaaccaggagcgttcggtgaaatgtgcgaaaaatgcccaacctgcccagacgcctgtagcaccaagcgtgattgtgtagagtgcctcctgcttcattctggcaagcccgataaccagacctgtcatagcctgtgccgcgacgaggtgatcacatgggtggacacaattgttaaggacgatcaggaagccgttctgtgcttttacaagacagcaaaagactgtgtcatgatgtttacctatgttgagctcccatccggaaagagtaatctgaccgtactgagggagcctgagtgtgggaatacccctaatgcaatgacgattctattagctgttgtgggctcaattctgctggtaggacttgccttacttgcaatctggaaactgctggtcactatccatgaccgacgggagtttgccaaattccagagtgaacgttcccgggcacgttatgaaatggccagcaacccattgtaccgtaagccaatatccacccacaccgtggactttacgtttaacaaattcaacaagtcctataatggcacagtggattag

SEQ ID NO: 126593 - protein, 769 aa, Artificial Sequence
  derived and/or modified sequence
MCGSALAFFTAAFVCLQNDRRGPASFLWAAWVFSLVLGLGQGEDNRCASSNAASCARCLALGPECGWCVQEDFISGGSRSERCDIVSNLISKGCSVDSIEYPSVHVIIPTENEINTQVTPGEVSIQLRPGAEANFMLKVHPLKKYPVDLYYLVDVSASMHNNIEKLNSVGNDLSRKMAFFSRDFRLGFGSYVDKTVSPYISIHPERIHNQCSDYNLDCMPPHGYIHVLSLTENITEFEKAVHRQKISGNIDTPEGGFDAMLQAAVCESHIGWRKEAKRLLLVMTDQTSHLALDSKLAGIVVPNDGNCHLKNNVYVKSTTMEHPSLGQLSEKLIDNNINVIFAVQGKQFHWYKDLLPLLPGTIAGEIESKAANLNNLVVEAYQKLISEVKVQVENQVQGIYFNITAICPDGSRKPGMEGCRNVTSNDEVLFNVTVTMKKCDVTGGKNYAIIKPIGFNETAKIHIHRNCSCQCEDNRGPKGKCVDETFLDSKCFQCDENKCHFDEDQFSSESCKSHKDQPVCSGRGVCVCGKCSCHKIKLGKVYGKYCEKDDFSCPYHHGNLCAGHGECEAGRCQCFSGWEGDRCQCPSAAAQHCVNSKGQVCSGRGTCVCGRCECTDPRSIGRFCEHCPTCYTACKENWNCMQCLHPHNLSQAILDQCKTSCALMEQQHYVDQTSECFSSPSYLRIFFIIFIVTFLIGLLKVLIIRQVILQWNSNKIKSSSDYRVSASKKDKLILQSVCTRAVTYRREKPEEIKMDISKLNAHETFRCNF

SEQ ID NO: 126594 - DNA, 1905 bp, Artificial Sequence
  derived and/or modified sequence
atgctgaaggtgcaccccctgaagaagtaccccgtggacctgtactacctggtggacgtgagcgccagcatgcacaacaacatcgagaagctgaacagcgtgggcaacgacctgagcagaaagatggccttcttcagcagagacttcagactgggcttcggcagctacgtggacaagaccgtgagcccctacatcagcatccaccccgagagaatccacaaccagtgcagcgactacaacctggactgcatgcccccccacggctacatccacgtgctgagcctgaccgagaacatcaccgagttcgagaaggccgtgcacagacagaagatcagcggcaacatcgacacccccgagggcggcttcgacgccatgctgcaggccgccgtgtgcgagagccacatcggctggagaaaggaggccaagagactgctgctggtgatgaccgaccagaccagccacctggccctggacagcaagctggccggcatcgtggtgcccaacgacggcaactgccacctgaagaacaacgtgtacgtgaagagcaccaccatggagcaccccagcctgggccagctgagcgagaagctgatcgacaacaacatcaacgtgatcttcgccgtgcagggcaagcagttccactggtacaaggacctgctgcccctgctgcccggcaccatcgccggcgagatcgagagcaaggccgccaacctgaacaacctggtggtggaggcctaccagaagctgatcagcgaggtgaaggtgcaggtggagaaccaggtgcagggcatctacttcaacatcaccgccatctgccccgacggcagcagaaagcccggcatggagggctgcagaaacgtgaccagcaacgacgaggtgctgttcaacgtgaccgtgaccatgaagaagtgcgacgtgaccggcggcaagaactacgccatcatcaagcccatcggcttcaacgagaccgccaagatccacatccacagaaactgcagctgccagtgcgaggacaacagaggccccaagggcaagtgcgtggacgagaccttcctggacagcaagtgcttccagtgcgacgagaacaagtgccacttcgacgaggaccagttcagcagcgagagctgcaagagccacaaggaccagcccgtgtgcagcggcagaggcgtgtgcgtgtgcggcaagtgcagctgccacaagatcaagctgggcaaggtgtacggcaagtactgcgagaaggacgacttcagctgcccctaccaccacggcaacctgtgcgccggccacggcgagtgcgaggccggcagatgccagtgcttcagcggctgggagggcgacagatgccagtgccccagcgccgccgcccagcactgcgtgaacagcaagggccaggtgtgcagcggcagaggcacctgcgtgtgcggcagatgcgagtgcaccgaccccagaagcatcggcagattctgcgagcactgccccacctgctacaccgcctgcaaggagaactggaactgcatgcagtgcctgcacccccacaacctgagccaggccatcctggaccagtgcaagaccagctgcgccctgatggagcagcagcactacgtggaccagaccagcgagtgcttcagcagccccagctacctgagaatcttcttcatcatcttcatcgtgaccttcctgatcggcctgctgaaggtgctgatcatcagacaggtgatcctgcagtggaacagcaacaagatcaagagcagcagcgactacagagtgagcgccagcaagaaggacaagctgatcctgcagagcgtgtgcaccagagccgtgacctacagaagagagaagcccgaggagatcaagatggacatcagcaagctgaacgcccacgagaccttcagatgcaacttctag

SEQ ID NO: 126595 - DNA, 1905 bp, Artificial Sequence
  derived and/or modified sequence
atgcttaaggtgcacccgctcaaaaagtaccccgtcgatctgtattatttggtggatgtaagcgcctccatgcacaacaatatcgagaaactgaactccgtaggcaatgatcttagccgaaaaatggcctttttttctcgtgattttagactgggattcggcagctacgtcgacaagaccgtgagcccctacatctccatccatcctgaacgcattcacaatcagtgtagcgattacaatctggactgcatgcccccccacggttacatccatgtcctatcactgacggaaaatataaccgagttcgagaaagctgttcacaggcagaagatctccgggaacatcgacaccccagaagggggctttgacgctatgttacaagctgcagtctgcgagagccatattggctggcgcaaagaggcaaaaagacttcttctggttatgacggaccagacttcccatctggccctcgacagtaagcttgctggtattgtggtgcccaacgatggcaattgtcaccttaaaaataacgtgtatgtcaaatccacgaccatggagcatcccagcttgggtcagttatctgaaaagttaatagataacaatatcaatgtgatcttcgccgtacaaggcaagcaattccattggtacaaggacctcctgccactgcttcccgggactatcgcaggagaaattgagtcaaaggcggctaacctgaataatctagtcgttgaggcataccagaaactcattagtgaggtgaaggtgcaagtggaaaatcaggtgcagggaatttactttaatattactgccatttgtccagacggatcccgtaaacctggcatggaaggatgcagaaatgtcacgtctaacgacgaggttctgtttaacgtgaccgtgactatgaagaagtgtgatgtgaccggagggaaaaattatgcgataattaagccaatcggcttcaacgagacagcaaaaatccatatccaccggaattgtagttgccagtgtgaagataaccgcggaccaaagggcaaatgtgtggacgagacttttcttgattctaagtgtttccagtgcgatgagaataaatgccattttgacgaagatcagtttagcagcgagagctgtaagtcacacaaggatcagccagtgtgtagtggccgaggcgtatgtgtctgcggtaagtgctcttgccacaagattaaacttggtaaggtgtatggaaaatattgcgagaaggacgactttagctgcccctatcatcatgggaacttgtgtgcaggccatggggagtgtgaagcaggacgatgccagtgcttctccgggtgggagggagatcggtgccaatgcccttcggcagccgcccagcactgtgtgaacagcaaaggccaagtctgtagcggccgggggacttgcgtgtgtggcagatgtgaatgtaccgaccccaggtccatcggacgattttgtgagcattgcccaacctgctataccgcctgcaaggagaattggaattgcatgcagtgccttcacccccataatctgagccaggccatcctggaccaatgcaagacctcttgtgccttgatggaacagcaacattacgtggatcaaacatccgagtgctttagcagccccagttatctgcgtatttttttcatcatttttatcgtaacattcttgatcggcttgctcaaggttctaatcatcagacaggtcattcttcagtggaactccaacaaaataaagagctcaagtgactatagagtttccgcgtccaagaaggataagttaattctgcaatcggtatgtactagggcggtgacctacagaagagaaaagcccgaggagatcaagatggatatcagcaagctgaacgctcacgagactttccgctgtaacttctag

SEQ ID NO: 126596 - DNA, 3793 bp, Artificial Sequence
  derived and/or modified sequence
cccagagccgcctccccctgttgctggcatcccgagcttcctcccttgccagccaggacgctgccgacttgtctttgcccgctgctccgcagacggggctgcaaagctgcaactaatggtgttggcctccctgcccacctgtggaagcaactgcgctgattgatgcgccacagacttttttcccctcgacctcgccggcgtcccctcccacagatccagcatcacccagtgaatgtacattagggtggtttcccccccagcttcgggctttgtttgggtttgattgtgtttggctcttcgctaagctgatttatgcagcagaagccccaccggctggagagaaacaaaagctcttttctttgtcccggagcaggctgcggagcccttgcagagccctctctccagtcgccgccggggcccttggccgtcgaaggaggtgcttctcgcggagaccgcgggacccgccgtgccgagccgggagggccgcaggggccctgagatgccgagcggtgcccgggcccgcttacctgcaccgcttgctccgagccgcggggtccgcctgctaggcctgcggaaaacgtcctagcgacactcggcccgcgggccccgaggtgcgcccgggaggcgcgagcccgcgtccggaaggcagtcaggcggcgggcgcggggcgggctgttttgcattatgtgcggctcggccctggctttttttaccgctgcatttgtctgcctgcaaaacgaccggcgaggtcccgcctcgttcctctgggcagcctgggtgttttcacttgttcttggactgggccaaggtgaagacaatagatgtgcatcttcaaatgcagcatcctgtgccaggtgccttgcgctgggtccagaatgtggatggtgtgttcaagaggatttcatttcaggtggatcaagaagtgaacgttgtgatattgtttccaatttaataagcaaaggctgctcagttgattcaatagaatacccatctgtgcatgttataatacccactgaaaatgaaattaatacccaggtgacaccaggagaagtgtctatccagctgcgtccaggagccgaagctaattttatgctgaaagttcatcctctgaagaaatatcctgtggatctttattatcttgttgatgtctcagcatcaatgcacaataatatagaaaaattaaattccgttggaaacgatttatctagaaaaatggcatttttctcccgtgactttcgtcttggatttggctcatacgttgataaaacagtttcaccatacattagcatccaccccgaaaggattcataatcaatgcagtgactacaatttagactgcatgcctccccatggatacatccatgtgctgtctttgacagagaacatcactgagtttgagaaagcagttcatagacagaagatctctggaaacatagatacaccagaaggaggttttgacgccatgcttcaggcagctgtctgtgaaagtcatatcggatggcgaaaagaggctaaaagattgctgctggtgatgacagatcagacgtctcatctcgctcttgatagcaaattggcaggcatagtggtgcccaatgacggaaactgtcatctgaaaaacaacgtctatgtcaaatcgacaaccatggaacacccctcactaggccaactttcagagaaattaatagacaacaacattaatgtcatctttgcagttcaaggaaaacaatttcattggtataaggatcttctacccctcttgccaggcaccattgctggtgaaatagaatcaaaggctgcaaacctcaataatttggtagtggaagcctatcagaagctcatttcagaagtgaaagttcaggtggaaaaccaggtacaaggcatctattttaacattaccgccatctgtccagatgggtccagaaagccaggcatggaaggatgcagaaacgtgacgagcaatgatgaagttcttttcaatgtaacagttacaatgaaaaaatgtgatgtcacaggaggaaaaaactatgcaataatcaaacctattggttttaatgaaaccgctaaaattcatatacacagaaactgcagctgtcagtgtgaggacaacagaggacctaaaggaaagtgtgtagatgaaacttttctagattccaagtgtttccagtgtgatgagaataaatgtcattttgatgaagatcagttttcttctgagagttgcaagtcacacaaggatcagcctgtttgcagtggtcgaggagtttgtgtttgtgggaaatgttcatgtcacaaaattaagcttggaaaagtgtatggaaaatactgtgaaaaggatgacttttcttgtccatatcaccatggaaatctgtgtgctgggcatggagagtgtgaagcaggcagatgccaatgcttcagtggctgggaaggtgatcgatgccagtgcccttcagcagcagcccagcactgtgtcaattcaaagggccaagtgtgcagtggaagaggcacgtgtgtgtgtggaaggtgtgagtgcaccgatcccaggagcatcggccgcttctgtgaacactgccccacctgttatacagcctgcaaggaaaactggaattgtatgcaatgccttcaccctcacaatttgtctcaggctatacttgatcagtgcaaaacctcatgtgctctcatggaacaacagcattatgtcgaccaaacttcagaatgtttctccagcccaagctacttgagaatatttttcatcattttcatagttacattcttgattgggttgcttaaagtcctgatcattagacaggtgatactacaatggaatagtaataaaattaagtcctcatcagattacagagtgtcagcctcaaaaaaggataagttgattctgcaaagtgtttgcacaagagcagtcacctaccgacgtgagaagcctgaagaaataaaaatggatatcagcaaattaaatgctcatgaaactttcaggtgcaacttctaaaaaaagatttttaaacacttaatgggaaactggaattgttaataattgctcctaaagattataattttaaaagtcacaggaggagacaaattgctcacggtcatgccagttgctggttgtacactcgaacgaagactgacaagtatcctcatcatgatgtgactcacatagctgctgactttttcagagaaaaatgtgtcttactactgtttgagactagtgtcgttgtagcactttactgtaatatataacttatttagatcagcatagaatgtagatcctctgaagagcactgattacactttacaggtacctgttatccctacgcttcccagagagaacaatgctgtgagagagtttagcattgtgtcactacaagggtacagtaatccctgcactggacatgtgaggaaaaaaataatctggcaagtatattctaaggttgccaaacacttcaacagttggtggttgaatagacaagaacagctagatgaataaatgattcgtgtttcactctttcaagaggtgaacagatacaaccttaatcttaaaagattattgctttttaaagtgtgtagttttatgcatgtgtgtttatggtttgcttatttttgcaagatggatactaattccagcattctctcctctttgcctttatgttttgttttcttttttacaggataagtttatgtatgtcacagatgactggattaattaagtgctaagttactactgccataaaaaactaataatacaatgtcactttatcagaatactagttttaaaagctgaatgttaa

SEQ ID NO: 126597 - DNA, 1905 bp, Artificial Sequence
  derived and/or modified sequence
atgctgaaggtgcaccccctgaagaagtaccctgtggacctgtactacctggtggatgtgtctgcctccatgcacaacaacatcgagaagctgaacagcgtgggcaatgacctgagcaggaagatggccttcttcagccgggacttccggctgggcttcggcagctatgtggacaagacagtgagcccctacatcagcatccaccctgagcgcatccacaaccagtgcagcgactacaacctggactgcatgcctcctcatggctacatccacgtgctgagcctgacagagaacatcacagaatttgagaaggctgtgcaccggcagaagatcagcggcaacatcgacaccccagagggcggctttgatgccatgctgcaggccgctgtgtgtgagagccacatcggctggaggaaggaggccaagaggctgctgctggtgatgacagaccagaccagccacctggccctggacagcaagctggccggcatcgtggtgcccaatgatggcaactgccacctgaagaacaacgtgtatgtgaagagcaccaccatggagcaccccagcctgggccagctgtctgagaagctgattgacaacaacatcaacgtcatctttgctgtgcagggcaagcagttccactggtacaaggacctgctgcccctgctgcccggcaccatcgccggggagattgagagcaaggccgccaacctgaacaacctggtggtggaggcctaccagaagctgatcagcgaggtgaaggtgcaggtggagaaccaggtgcagggcatctacttcaacatcacagccatctgcccagatggcagcaggaagccaggcatggagggctgcagaaatgtgaccagcaatgatgaggtgctcttcaacgtgacagtgaccatgaagaagtgtgatgtgactggaggcaagaactatgccatcatcaagcccatcggcttcaatgaaacagccaagatccacatccacaggaactgcagctgccagtgtgaggacaacagaggccccaagggcaaatgtgtggatgagaccttcctggacagcaagtgcttccagtgtgatgagaacaagtgccactttgatgaggaccagttcagcagcgagagctgcaagagccacaaggaccagcctgtgtgcagcggccggggcgtgtgtgtgtgtgggaagtgcagctgccacaagatcaagctgggcaaggtgtatggcaagtactgtgagaaggatgacttcagctgcccctaccaccacggcaacctgtgtgccggccatggagaatgtgaggccggccgctgccagtgcttcagcggctgggagggggaccgctgccagtgccccagcgctgctgcccagcactgtgtgaacagcaagggccaggtgtgcagcggccggggcacctgtgtgtgtggccgctgtgagtgcacagaccccaggagcatcggccgcttctgtgagcactgccccacctgctacacagcctgcaaggagaactggaactgcatgcagtgcctgcacccccacaacctgagccaggccatcctggaccagtgcaagaccagctgtgccctgatggagcagcagcactacgtggaccagaccagcgagtgcttcagcagccccagctacctgcgcatcttcttcatcatcttcatcgtgaccttcctgattggcctgctgaaggtgctgatcatccggcaggtgatcctgcagtggaacagcaacaagatcaagagcagcagtgactacagagtgtctgccagcaagaaggacaagctgatcctgcagagcgtgtgcaccagggctgtgacctaccgccgggagaagccagaggagatcaagatggacatcagcaagctgaatgcccacgagaccttccgctgcaacttctag

SEQ ID NO: 126598 - DNA, 1905 bp, Artificial Sequence
  derived and/or modified sequence
atgctgaaggtgcaccccctgaagaagtaccccgtggacctgtactacctggtcgatgtctccgcgtcaatgcacaataacatcgaaaaactgaactctgtgggaaacgacctgtccagaaaaatggcattcttctctagggacttcaggctgggtttcggaagttatgtggacaagacagtgagcccctatatcagcatacacccagagcggattcacaaccaatgttccgattataacttggattgtatgcctccccacggctacatccacgtcttgtcattaactgagaacatcacggagttcgagaaggctgtacataggcagaagatctccggcaatatagacacacctgaaggcgggtttgacgcaatgctccaggccgcagtgtgcgagagccatatcggctggaggaaagaggccaagcgcctcctgttggttatgaccgatcagacttcccacctagcattggatagcaagcttgctgggatcgtcgtgcccaatgatggtaactgccatctaaaaaataacgtgtacgtgaagtccacaactatggagcatcctagcctgggtcaactgtcggaaaaacttatcgacaacaatatcaatgttatcttcgctgttcaggggaagcagtttcattggtataaggacctcctgcccctgctccctgggactatcgctggagaaattgaatctaaagctgctaacttgaataatttagttgtggaggcttaccagaagcttatctccgaagtgaaggttcaggtcgaaaaccaggtgcaaggaatttattttaatatcaccgcaatctgccctgacggatctcgtaagccagggatggagggatgtcgaaatgtgacatcaaacgacgaggtactgttcaatgtcactgtcacgatgaagaagtgcgatgttacaggcgggaaaaactatgctattatcaaacctattggattcaacgagacagcgaagatccacatccacagaaattgttcctgccagtgcgaagataatagggggcctaagggaaagtgcgtagacgagactttccttgacagcaagtgcttccaatgcgatgaaaataagtgtcattttgacgaggatcagtttagctccgagtcttgcaagtcgcataaagaccagccagtctgctcaggacggggcgtatgcgtctgcgggaagtgctcatgccataaaataaagcttgggaaggtgtacggaaaatattgcgaaaaggatgatttttcttgcccctaccaccatggcaatctttgcgcgggtcatggcgaatgcgaggcaggacgatgccaatgctttagcgggtgggaaggggatcgctgccagtgtccaagtgcagcggctcagcactgcgtcaatagcaagggccaagtgtgctccggccgcggaacctgtgtgtgcggtaggtgcgaatgtaccgatccccggtcaatcggtagattttgtgaacattgccctacgtgctacaccgcatgcaaggagaactggaactgcatgcaatgtctgcacccgcacaacctgtctcaggcaattttggatcagtgcaagacatcctgtgctctcatggaacagcaacactacgtggaccagacatctgagtgtttttccagtccttcttacctccgaatcttctttatcatctttattgtaaccttcctgatcggtctgctaaaagtactcattatacggcaggtcattttacagtggaattcgaataaaatcaaaagctcctctgactatcgcgtgagcgcgagcaagaaagacaaacttattctgcaatccgtgtgtacccgtgccgtgacctacaggagagagaagccagaagagattaaaatggatatttccaagctaaatgcacacgagactttccgctgtaacttctag

SEQ ID NO: 126599 - DNA, 1905 bp, Artificial Sequence
  derived and/or modified sequence
atgcttaaagtccatcccctaaaaaaataccccgtggacctgtattacctggtagatgtctccgcctcaatgcataataacatcgagaaactgaactccgtggggaacgatttgtctagaaaaatggctttcttcagcagggatttccgcctgggattcggatcctatgtggataagacagtgagcccctacatatccatacaccctgaacgtattcacaatcagtgcagcgattataatctggactgcatgcctccacacgggtacatccacgttctgagcctcacagaaaacataactgagttcgaaaaggctgtccatcggcagaagatctccgggaatatcgacacacccgaaggtgggttcgacgccatgcttcaagctgcagtgtgcgaaagtcacattgggtggcgaaaggaagcgaagaggctcctgttggtaatgaccgatcagacatctcacctcgctctggattctaaacttgccggaatagtggtgccaaacgatggaaattgccacctcaaaaataacgtttacgtgaagtccaccacaatggaacacccctcgctggggcagctgtccgagaagctgatcgataacaacatcaacgtaatatttgctgtccagggcaaacagtttcactggtataaggatttactgccacttttgcctgggactatcgctggggaaattgagtctaaagcagcaaatttgaataatttggtcgtagaagcctaccaaaaactgatctctgaagtgaaggtgcaggtcgagaaccaggtgcagggaatttatttcaacattaccgcaatttgcccggatggctccagaaagcccggtatggaaggctgccggaatgttaccagcaacgacgaggtgttgttcaatgtgacagtcaccatgaaaaaatgtgacgtaaccggtgggaaaaactatgcgatcatcaagccaatcggtttcaatgaaactgccaaaattcatatccaccgaaattgttcgtgtcaatgtgaagacaatcgtggacccaagggcaaatgcgtggacgaaacgttcctcgatagcaaatgtttccagtgcgacgagaacaagtgccatttcgatgaggaccagttctcatccgagagttgtaagagtcacaaagatcagccggtctgctccggcagaggcgtgtgcgtgtgcggaaaatgctcatgccataaaatcaaactggggaaggtctacggaaagtattgtgaaaaggacgacttctcctgtccataccaccatggtaatttatgtgcagggcatggggagtgcgaggccggtaggtgtcaatgcttcagcgggtgggagggagaccgctgtcagtgtcctagcgctgcggctcagcattgcgtcaactcaaagggacaagtctgtagcggtcggggaacctgtgtgtgcggaaggtgtgagtgtactgatcctcgtagcatcggacgtttctgcgaacattgtccaacctgctataccgcctgtaaggagaactggaactgtatgcagtgtttacaccctcataatctttcacaggctattctggaccaatgtaagacctcatgtgccctcatggaacagcagcattatgttgatcagactagcgagtgtttctctagtcctagctacttgaggatattcttcataatctttatagtgacatttctgataggtttactcaaagtgctcattattcgtcaggtaattctacaatggaactcaaataaaatcaagtcatcctcagactatagagttagcgcctctaaaaaagataaactaattcttcaaagcgtttgcacgcgagcagtcacatacaggagagaaaaaccggaagagattaaaatggatatcagcaagctcaatgcacatgaaactttcaggtgcaacttttag

SEQ ID NO: 126600 - DNA, 2310 bp, Artificial Sequence
  derived and/or modified sequence
atgtgtggcagcgccctggcattcttcaccgcagcatttgtgtgcctgcagaatgaccgcaggggccccgctagctttttgtgggccgcttgggtcttttccttagtgctagggctggggcagggtgaagataatagatgtgcctccagcaatgctgcatcctgtgcacgatgtctggcattgggacccgagtgtggctggtgcgtgcaagaggatttcatctctgggggctctagaagtgagcgttgtgacatcgtgtccaacctgatctctaaagggtgcagcgtggatagtatcgaatacccatccgtccatgtgatcatccctaccgagaacgagattaacacgcaggttaccccaggggaagtcagcatacagctacgacccggggctgaggctaacttcatgcttaaagtgcatccattgaagaagtacccagtggacttgtattacctcgttgatgtcagcgctagcatgcacaataacatcgagaaactaaactccgtgggtaacgacctgtccagaaagatggccttcttttctagagatttccgtctagggtttggctcctatgtcgacaagaccgtgtcaccttatatctccatccacccagagcgcatccataatcagtgctcagattacaatctcgactgtatgccccctcacggttatatccatgtgctgtctttgaccgagaacataactgaatttgaaaaggcagttcatagacagaaaattagtggaaatatagacactccggagggtggatttgacgccatgttacaagctgccgtttgcgaaagtcacattggatggcgtaaagaggccaagcgcctgctcctggtcatgaccgatcaaaccagccatctggcattggactctaaattggcaggcatagtcgttccgaacgacggaaattgtcatctgaaaaacaatgtatacgtcaagtccactacgatggaacatccgtcactcggccaattgtctgaaaagctgattgacaacaatatcaatgtcattttcgctgttcaggggaagcaattccattggtacaaagacctgctgccccttctgccagggacaatagctggggaaatcgaatccaaggccgctaatctaaataatttagtagtggaggcataccagaagttgatcagtgaggtgaaggttcaggtggagaaccaggtccagggtatatactttaatattacggctatttgtcctgacggtagccgcaagcctggcatggaaggttgtcggaacgtcacctccaatgacgaggtcctctttaacgtgaccgtgacgatgaagaagtgtgacgtcacaggaggaaagaattacgccatcatcaaacctatcggattcaatgagaccgctaagatacatatccacaggaattgctcttgccagtgcgaagacaatcgcggacccaaggggaagtgcgttgatgagaccttcctcgactccaagtgcttccaatgcgatgagaataaatgtcactttgatgaagatcagttttcctctgaaagctgcaaaagtcataaagatcagccagtgtgctctggccgcggtgtctgtgtgtgcggcaagtgttcctgtcacaaaatcaaactgggcaaggtgtacggcaagtactgcgaaaaggatgatttcagctgcccatatcatcatggaaacctgtgtgcgggtcacggcgaatgcgaggccggcaggtgccagtgcttctccggatgggagggtgatcggtgccagtgtcctagcgccgcagcccagcactgcgttaattcaaaagggcaggtgtgtagcggccgcgggacttgtgtctgcggcagatgcgaatgtactgacccaaggtctattggccgcttttgcgagcactgtcccacttgttacaccgcctgtaaggaaaattggaattgcatgcaatgtctccatccccacaatctctcgcaggccattttggatcagtgtaagacttcgtgtgctcttatggaacagcaacattatgtggatcagacttcagagtgtttctcctctccctcctatcttaggatcttttttatcattttcatagtcacattcctaatcgggttgcttaaggtgctgataatccgacaggttatcctccaatggaattccaataaaatcaagtccagctctgactacagagtgtctgcttccaagaaagataaactgatcttacaaagcgtttgtacgcgggccgtcacctataggcgcgagaagcctgaagagatcaaaatggacatctcaaagctgaacgcacacgagacctttaggtgtaacttctag

SEQ ID NO: 126601 - DNA, 2310 bp, Artificial Sequence
  derived and/or modified sequence
atgtgtggcagcgccctggccttcttcaccgctgcctttgtgtgcctgcagaatgaccggcggggccctgccagcttcctgtgggccgcctgggtgttcagcctggtgctgggcctgggccagggcgaggacaacagatgtgccagcagcaatgctgccagctgtgcccgctgcctggccctgggcccagaatgtggctggtgtgtgcaggaggacttcatcagcggcggcagccgctctgagcgctgtgacatcgtgagcaacctgatcagcaagggctgcagcgtggacagcattgagtaccccagcgtgcacgtgatcatccccacagaaaatgagatcaacacccaggtgaccccaggagaggtgtccatccagctgcggcctggagctgaggccaacttcatgctgaaggtgcaccccctgaagaagtaccctgtggacctgtactacctggtggatgtgtctgcctccatgcacaacaacatcgagaagctgaacagcgtgggcaatgacctgagcaggaagatggccttcttcagccgggacttccggctgggcttcggcagctatgtggacaagacagtgagcccctacatcagcatccaccctgagcgcatccacaaccagtgcagcgactacaacctggactgcatgccaccccacggctacatccacgtgctgagcctgacagagaacatcacagaatttgagaaggctgtgcaccggcagaagatcagcggcaacatcgacaccccagagggcggctttgatgccatgctgcaggccgctgtgtgtgagagccacatcggctggaggaaggaggccaagaggctgctgctggtgatgacagaccagaccagccacctggccctggacagcaagctggccggcatcgtggtgcccaatgatggcaactgccacctgaagaacaacgtgtatgtgaagagcaccaccatggagcaccccagcctgggccagctgtctgagaagctgattgacaacaacatcaacgtcatctttgctgtgcagggcaagcagttccactggtacaaggacctgctgcccctgctgcccggcaccatcgccggggagattgagagcaaggccgccaacctgaacaacctggtggtggaggcctaccagaagctgatcagcgaggtgaaggtgcaggtggagaaccaggtgcagggcatctacttcaacatcacagccatctgcccagatggcagcaggaagccaggcatggagggctgcagaaatgtgaccagcaatgatgaggtgctcttcaacgtgacagtgaccatgaagaagtgtgatgtgactggaggcaagaactatgccatcatcaagcccatcggcttcaatgaaacagccaagatccacatccacaggaactgcagctgccagtgtgaggacaacagaggccccaagggcaaatgtgtggatgagaccttcctggacagcaagtgcttccagtgtgatgagaacaagtgccactttgatgaggaccagttcagcagcgagagctgcaagagccacaaggaccagcctgtgtgcagcggccggggcgtgtgtgtgtgtgggaagtgcagctgccacaagatcaagctgggcaaggtgtatggcaagtactgtgagaaggatgacttcagctgcccctaccaccacggcaacctgtgtgccggccacggggagtgtgaggccggccgctgccagtgcttcagcggctgggagggggaccgctgccagtgccccagcgctgctgcccagcactgtgtgaacagcaagggccaggtgtgcagcggccggggcacctgtgtgtgtggccgctgtgaatgtacagaccccaggagcatcggccgcttctgtgagcactgccccacctgctacacagcctgcaaggagaactggaactgcatgcagtgcctgcacccccacaacctgagccaggccatcctggaccagtgcaagaccagctgtgccctgatggagcagcagcactacgtggaccagaccagcgagtgcttcagcagccccagctacctgcgcatcttcttcatcatcttcatcgtgaccttcctgattggcctgctgaaggtgctgatcatccggcaggtgatcctgcagtggaacagcaacaagatcaagagcagcagtgactacagagtgtctgccagcaagaaggacaagctgatcctgcagagcgtgtgcaccagggctgtgacctacagaagagagaagccagaggagatcaagatggacatcagcaagctgaatgcccacgagaccttccgctgcaacttctag

SEQ ID NO: 126602 - DNA, 2310 bp, Artificial Sequence
  derived and/or modified sequence
atgtgcggcagcgccctggccttcttcaccgccgccttcgtgtgccttcagaatgatcgaaggggtcctgcttctttcctgtgggcggcctgggtgttttctctggtcttgggactgggtcagggcgaggacaatcgctgcgccagcagtaatgccgcgagctgcgcaaggtgtcttgctctcgggccggaatgtggttggtgtgtacaggaagatttcataagcggcgggagcagatctgagcgatgcgacatcgtctctaacctgatatctaaggggtgctccgtggatagcatcgaatacccatccgtgcacgtaattattcccacagaaaacgagataaatacccaggtaactccaggtgaggtctctattcagttacgccccggcgccgaagctaatttcatgctgaaagtgcatccattaaagaagtacccagtggacttgtactatttggtcgacgtcagcgcaagtatgcataacaatattgagaagctaaattccgtggggaacgacctgagccgaaagatggcctttttctctcgggactttcggctaggctttggatcttatgttgacaaaaccgtgtccccttacatcagcatccatccggagaggatccacaatcagtgcagtgactacaacctcgactgcatgcctccccacggttacatccatgtcctttccctgacagaaaacatcacagagttcgagaaagccgtccaccggcagaaaatttctggcaatattgacaccccagagggagggttcgatgccatgctgcaagctgcagtttgtgagagccatattggctggcgaaaagaggcaaaaagattgctgcttgtcatgacagaccagacgagccaccttgcgttggactcaaaacttgcaggtatagtcgtgccaaatgacggaaactgccacctgaagaacaatgtatacgtgaaatcaacaaccatggagcatccatccctggggcagttatcagaaaagctgatcgacaataacattaacgttatttttgcagtacaggggaaacagttccactggtacaaggatctcctgcccctcttacccgggacgattgcgggtgaaatcgagtccaaggctgcaaacctcaacaaccttgtagtcgaggcctatcagaaactcatttccgaggtgaaagttcaagtcgaaaatcaggtccaggggatttattttaatattacggccatttgtcctgatggatcacggaaaccaggtatggagggctgccggaacgtgacctccaatgacgaagttctttttaatgtcacggtcacaatgaaaaagtgtgacgttaccgggggaaaaaattacgctatcattaaaccaattggctttaatgagaccgctaagatccacattcacagaaactgctcttgtcagtgcgaagacaaccggggcccaaaagggaagtgtgtcgatgaaacatttctcgatagcaagtgcttccagtgtgatgagaacaaatgccactttgatgaagaccagttttcttcagagtcttgcaaatctcacaaggaccagcctgtttgcagcgggcgtggggtttgtgtgtgcggaaaatgtagctgccacaaaatcaagttagggaaggtgtacggcaaatactgtgaaaaagatgatttctcttgtccataccatcacgggaatttatgtgcagggcacggagagtgtgaggctggtcggtgccagtgtttcagcggctgggaaggcgaccggtgtcaatgtccaagcgctgctgcccaacactgtgtcaatagcaaaggccaggtatgttccgggagggggacttgtgtttgcggacgttgcgagtgcacagatccacgtagcattgggaggttttgcgaacattgcccgacctgttacactgcatgtaaagaaaactggaattgcatgcagtgtctccatccgcacaacctcagccaggccattctagaccagtgcaagaccagttgcgccctcatggagcaacagcactatgtggatcagacgtccgagtgtttctctagtcctagttacctcaggatcttttttattatctttattgtaactttcctgattggcctgcttaaagtgctgataatcagacaggtgatcctgcaatggaacagtaacaaaattaagtcttcctccgactaccgggttagcgcctccaagaaggacaaactgatcctccaaagcgtgtgcaccagggccgtgacgtatcggagggaaaaacccgaagagattaagatggacatcagtaagctgaatgcgcacgaaacatttagatgtaatttctag

SEQ ID NO: 126603 - DNA, 2310 bp, Artificial Sequence
  derived and/or modified sequence
atgtgtggttctgccctggctttttttacagcagccttcgtctgtttacagaacgacaggaggggtccagcaagctttctctgggccgcatgggttttctctttggttctcggcttgggtcagggcgaagataatcgatgcgccagttcaaacgccgctagttgtgccagatgcctggccctgggaccagagtgtggatggtgtgtgcaagaagacttcataagtgggggttccagaagtgagcgctgtgacattgtaagcaatctgatcagcaaggggtgctctgtggactctatcgagtatcctagtgtgcacgttatcataccaacagaaaatgagattaatactcaagtcacgccaggggaggtatctattcagctgcgacctggagcggaggctaattttatgttgaaggtgcatcccctgaagaagtatccggtcgatctgtattacttggtggatgtatcagcatccatgcataacaatatcgaaaagctgaattctgtcggaaacgatctatcccggaagatggccttctttagcagggactttagacttggctttggcagctacgttgataagaccgtttccccctacattagcatccacccagagaggattcacaatcagtgtagtgattacaatctggattgtatgccaccccatggctacatacacgtcctttccctgaccgagaatatcacagagttcgaaaaagcagtgcaccggcagaagatctcaggaaacatcgatactcccgagggaggattcgacgcaatgctgcaggcagccgtctgtgagtctcatatcggttggcgaaaggaagcaaagcgtctgctgttggtgatgactgaccagactagtcacttggccctcgactcgaagctcgccggaatcgttgtcccaaatgatggaaattgccaccttaagaacaatgtgtacgtcaagagcacaaccatggaacacccgtcactcgggcaactgtctgagaagctgatcgacaacaacatcaatgtaattttcgcagtacagggtaagcaattccactggtataaggatctactgcctttattacctggtacaatcgctggcgaaattgagtcaaaggccgcaaacctgaacaatctggtcgtggaagcttatcagaaactaatcagcgaagtcaaagttcaagtcgaaaatcaggttcaaggaatctattttaatattactgcgatctgtccagatggttccaggaaacccggaatggagggttgccgaaatgtgacatctaatgacgaagtgcttttcaatgttaccgttaccatgaagaagtgcgatgttacagggggaaaaaactatgcaatcatcaagccgattggctttaacgagaccgcaaaaatccatattcacagaaattgctcatgccagtgtgaggataatagggggccaaaggggaagtgcgtcgatgagacctttttagattctaaatgttttcagtgcgacgaaaacaaatgtcattttgacgaggaccagttttccagtgagagctgcaaatctcataaagatcaacccgtgtgtagtggcaggggggtgtgcgtctgcgggaagtgcagctgccacaaaatcaagcttggcaaggtttacggaaagtactgtgaaaaagatgatttcagctgtccatatcatcatggcaacctctgcgccggtcacggggagtgcgaggccggacggtgtcagtgtttcagtgggtgggagggagataggtgccaatgccctagcgccgctgcgcagcactgcgtcaactccaaagggcaggtttgctcaggccgaggcacctgtgtgtgcggcaggtgtgagtgcaccgatcctcggtctattgggagattctgtgaacattgccccacctgctacaccgcttgcaaggaaaattggaactgcatgcagtgcctgcacccccacaacctctcccaggcaattctggaccagtgtaaaacatcctgtgccctgatggagcagcagcactatgtcgatcaaacttcagaatgcttctccagcccgagttatctgcgtattttctttatcatttttatcgtcactttcctgatcgggcttcttaaagttctcataatccggcaggtgatcttacagtggaatagcaataaaatcaagtcctcaagcgactatagggtgtcagccagtaagaaagataaattaattctgcaatcagtttgtacgagggccgtgacatatcgcagagaaaagcccgaggagatcaagatggacatctccaagcttaatgctcacgaaacttttcggtgcaacttttag

SEQ ID NO: 126604 - DNA, 2310 bp, Artificial Sequence
  derived and/or modified sequence
atgtgcggcagcgccctggccttcttcaccgccgccttcgtgtgcctgcagaacgacagaagaggccccgccagcttcctgtgggccgcctgggtgttcagcctggtgctgggcctgggccagggcgaggacaacagatgcgccagcagcaacgccgccagctgcgccagatgcctggccctgggccccgagtgcggctggtgcgtgcaggaggacttcatcagcggcggcagcagaagcgagagatgcgacatcgtgagcaacctgatcagcaagggctgcagcgtggacagcatcgagtaccccagcgtgcacgtgatcatccccaccgagaacgagatcaacacccaggtgacccccggcgaggtgagcatccagctgagacccggcgccgaggccaacttcatgctgaaggtgcaccccctgaagaagtaccccgtggacctgtactacctggtggacgtgagcgccagcatgcacaacaacatcgagaagctgaacagcgtgggcaacgacctgagcagaaagatggccttcttcagcagagacttcagactgggcttcggcagctacgtggacaagaccgtgagcccctacatcagcatccaccccgagagaatccacaaccagtgcagcgactacaacctggactgcatgcccccccacggctacatccacgtgctgagcctgaccgagaacatcaccgagttcgagaaggccgtgcacagacagaagatcagcggcaacatcgacacccccgagggcggcttcgacgccatgctgcaggccgccgtgtgcgagagccacatcggctggagaaaggaggccaagagactgctgctggtgatgaccgaccagaccagccacctggccctggacagcaagctggccggcatcgtggtgcccaacgacggcaactgccacctgaagaacaacgtgtacgtgaagagcaccaccatggagcaccccagcctgggccagctgagcgagaagctgatcgacaacaacatcaacgtgatcttcgccgtgcagggcaagcagttccactggtacaaggacctgctgcccctgctgcccggcaccatcgccggcgagatcgagagcaaggccgccaacctgaacaacctggtggtggaggcctaccagaagctgatcagcgaggtgaaggtgcaggtggagaaccaggtgcagggcatctacttcaacatcaccgccatctgccccgacggcagcagaaagcccggcatggagggctgcagaaacgtgaccagcaacgacgaggtgctgttcaacgtgaccgtgaccatgaagaagtgcgacgtgaccggcggcaagaactacgccatcatcaagcccatcggcttcaacgagaccgccaagatccacatccacagaaactgcagctgccagtgcgaggacaacagaggccccaagggcaagtgcgtggacgagaccttcctggacagcaagtgcttccagtgcgacgagaacaagtgccacttcgacgaggaccagttcagcagcgagagctgcaagagccacaaggaccagcccgtgtgcagcggcagaggcgtgtgcgtgtgcggcaagtgcagctgccacaagatcaagctgggcaaggtgtacggcaagtactgcgagaaggacgacttcagctgcccctaccaccacggcaacctgtgcgccggccacggcgagtgcgaggccggcagatgccagtgcttcagcggctgggagggcgacagatgccagtgccccagcgccgccgcccagcactgcgtgaacagcaagggccaggtgtgcagcggcagaggcacctgcgtgtgcggcagatgcgagtgcaccgaccccagaagcatcggcagattctgcgagcactgccccacctgctacaccgcctgcaaggagaactggaactgcatgcagtgcctgcacccccacaacctgagccaggccatcctggaccagtgcaagaccagctgcgccctgatggagcagcagcactacgtggaccagaccagcgagtgcttcagcagccccagctacctgagaatcttcttcatcatcttcatcgtgaccttcctgatcggcctgctgaaggtgctgatcatcagacaggtgatcctgcagtggaacagcaacaagatcaagagcagcagcgactacagagtgagcgccagcaagaaggacaagctgatcctgcagagcgtgtgcaccagagccgtgacctacagaagagagaagcccgaggagatcaagatggacatcagcaagctgaacgcccacgagaccttcagatgcaacttctag

SEQ ID NO: 126605 - protein, 911 aa, Artificial Sequence
  derived and/or modified sequence
MDGAMGPRGLLLCMYLVSLLILQAMPALGSATGRSKSSEKRQAVDTAVDGVFIRSLKVNCKVTSRFAHYVVTSQVVNTANEAREVAFDLEIPKTAFISDFAVTADGNAFIGDIKDKVTAWKQYRKAAISGENAGLVRASGRTMEQFTIHLTVNPQSKVTFQLTYEEVLKRNHMQYEIVIKVKPKQLVHHFEIDVDIFEPQGISKLDAQASFLPKELAAQTIKKSFSGKKGHVLFRPTVSQQQSCPTCSTSLLNGHFKVTYDVSRDKICDLLVANNHFAHFFAPQNLTNMNKNVVFVIDISGSMRGQKVKQTKEALLKILGDMQPGDYFDLVLFGTRVQSWKGSLVQASEANLQAAQDFVRGFSLDEATNLNGGLLRGIEILNQVQESLPELSNHASILIMLTDGDPTEGVTDRSQILKNVRNAIRGRFPLYNLGFGHNVDFNFLEVMSMENNGRAQRIYEDHDATQQLQGFYSQVAKPLLVDVDLQYPQDAVLALTQNHHKQYYEGSEIVVAGRIADNKQSSFKADVQAHGEGQEFSITCLVDEEEMKKLLRERGHMLENHVERLWAYLTIQELLAKRMKVDREERANLSSQALQMSLDYGFVTPLTSMSIRGMADQDGLKPTIDKPSEDSPPLEMLGPRRTFVLSALQPSPTHSSSNTQRLPDRVTGVDTDPHFIIHVPQKEDTLCFNINEEPGVILSLVQDPNTGFSVNGQLIGNKARSPGQHDGTYFGRLGIANPATDFQLEVTPQNITLNPGFGGPVFSWRDQAVLRQDGVVVTINKKRNLVVSVDDGGTFEVVLHRVWKGSSVHQDFLGFYVLDSHRMSARTHGLLGQFFHPIGFEVSDIHPGSDPTKPDATMVVRNRRLTVTRGLQKDYSKDPWHGAEVSCWFIHNNGAGLIDGAYTDYIVPDIF

SEQ ID NO: 126606 - protein, 623 aa, Artificial Sequence
  derived and/or modified sequence
MNKNVVFVIDISGSMRGQKVKQTKEALLKILGDMQPGDYFDLVLFGTRVQSWKGSLVQASEANLQAAQDFVRGFSLDEATNLNGGLLRGIEILNQVQESLPELSNHASILIMLTDGDPTEGVTDRSQILKNVRNAIRGRFPLYNLGFGHNVDFNFLEVMSMENNGRAQRIYEDHDATQQLQGFYSQVAKPLLVDVDLQYPQDAVLALTQNHHKQYYEGSEIVVAGRIADNKQSSFKADVQAHGEGQEFSITCLVDEEEMKKLLRERGHMLENHVERLWAYLTIQELLAKRMKVDREERANLSSQALQMSLDYGFVTPLTSMSIRGMADQDGLKPTIDKPSEDSPPLEMLGPRRTFVLSALQPSPTHSSSNTQRLPDRVTGVDTDPHFIIHVPQKEDTLCFNINEEPGVILSLVQDPNTGFSVNGQLIGNKARSPGQHDGTYFGRLGIANPATDFQLEVTPQNITLNPGFGGPVFSWRDQAVLRQDGVVVTINKKRNLVVSVDDGGTFEVVLHRVWKGSSVHQDFLGFYVLDSHRMSARTHGLLGQFFHPIGFEVSDIHPGSDPTKPDATMVVRNRRLTVTRGLQKDYSKDPWHGAEVSCWFIHNNGAGLIDGAYTDYIVPDIF

SEQ ID NO: 126607 - protein, 769 aa, Artificial Sequence
  derived and/or modified sequence
MEQFTIHLTVNPQSKVTFQLTYEEVLKRNHMQYEIVIKVKPKQLVHHFEIDVDIFEPQGISKLDAQASFLPKELAAQTIKKSFSGKKGHVLFRPTVSQQQSCPTCSTSLLNGHFKVTYDVSRDKICDLLVANNHFAHFFAPQNLTNMNKNVVFVIDISGSMRGQKVKQTKEALLKILGDMQPGDYFDLVLFGTRVQSWKGSLVQASEANLQAAQDFVRGFSLDEATNLNGGLLRGIEILNQVQESLPELSNHASILIMLTDGDPTEGVTDRSQILKNVRNAIRGRFPLYNLGFGHNVDFNFLEVMSMENNGRAQRIYEDHDATQQLQGFYSQVAKPLLVDVDLQYPQDAVLALTQNHHKQYYEGSEIVVAGRIADNKQSSFKADVQAHGEGQEFSITCLVDEEEMKKLLRERGHMLENHVERLWAYLTIQELLAKRMKVDREERANLSSQALQMSLDYGFVTPLTSMSIRGMADQDGLKPTIDKPSEDSPPLEMLGPRRTFVLSALQPSPTHSSSNTQRLPDRVTGVDTDPHFIIHVPQKEDTLCFNINEEPGVILSLVQDPNTGFSVNGQLIGNKARSPGQHDGTYFGRLGIANPATDFQLEVTPQNITLNPGFGGPVFSWRDQAVLRQDGVVVTINKKRNLVVSVDDGGTFEVVLHRVWKGSSVHQDFLGFYVLDSHRMSARTHGLLGQFFHPIGFEVSDIHPGSDPTKPDATMVVRNRRLTVTRGLQKDYSKDPWHGAEVSCWFIHNNGAGLIDGAYTDYIVPDIF

SEQ ID NO: 126608 - protein, 645 aa, Artificial Sequence
  derived and/or modified sequence
MDGAMGPRGLLLCMYLVSLLILQAMPALGSATGRSKSSEKRQAVDTAVDGVFIRSLKVNCKVTSRFAHYVVTSQVVNTANEAREVAFDLEIPKTAFISDFAVTADGNAFIGDIKDKVTAWKQYRKAAISGENAGLVRASGRTMEQFTIHLTVNPQSKVTFQLTYEEVLKRNHMQYEIVIKVKPKQLVHHFEIDVDIFEPQGISKLDAQASFLPKELAAQTIKKSFSGKKGHVLFRPTVSQQQSCPTCSTSLLNGHFKVTYDVSRDKICDLLVANNHFAHFFAPQNLTNMNKNVVFVIDISGSMRGQKVKQTKEALLKILGDMQPGDYFDLVLFGTRVQSWKGSLVQASEANLQAAQDFVRGFSLDEATNLNGGLLRGIEILNQVQESLPELSNHASILIMLTDGDPTEGVTDRSQILKNVRNAIRGRFPLYNLGFGHNVDFNFLEVMSMENNGRAQRIYEDHDATQQLQGFYSQVAKPLLVDVDLQYPQDAVLALTQNHHKQYYEGSEIVVAGRIADNKQSSFKADVQAHGEGQEFSITCLVDEEEMKKLLRERGHMLENHVERLWAYLTIQELLAKRMKVDREERANLSSQALQMSLDYGFVTPLTSMSIRGMADQDGLKPTIDKPSLHHPRAPERGHPVLQHQ

SEQ ID NO: 126609 - DNA, 2736 bp, Artificial Sequence
  derived and/or modified sequence
atggatggggcaatgggccctaggggactcctgctctgcatgtacctggtgtctctgttaatccttcaagcaatgccagcactgggtagcgcgaccggccgctcaaagtcttctgagaagcgtcaggccgtggacactgctgtggatggcgtgttcattcgaagcctcaaggtgaattgtaaggtaacatctaggttcgcccattacgtggtgacatcgcaggtcgtgaatactgccaatgaggctcgcgaggttgcgttcgatctggagatcccgaaaactgcttttatttccgattttgctgtaaccgccgatggaaacgcctttatcggtgatatcaaggacaaggttacagcctggaagcagtacaggaaagccgcaatctccggagaaaatgctggactggttcgagcgagcgggcgcaccatggagcagtttaccatccatctcacagtgaatcctcaatccaaagtgacctttcaactcacttacgaagaggtcttaaagcggaaccacatgcaatacgagattgtgataaaagttaaaccaaagcaactggtacaccacttcgagattgatgtggatatattcgagccgcagggtatttcaaagctggatgctcaggccagtttcttacctaaagagctagcagcccagacaatcaaaaagagcttctccgggaagaaaggccatgttctgttcaggcccaccgtgtcacagcaacaatcttgtcccacatgctccacttctctgctaaatggacattttaaggttacatacgacgtaagtagggataagatctgcgacctccttgtggccaacaaccattttgcgcatttctttgccccgcagaacttaactaatatgaacaagaatgtagtcttcgtgattgatatctctgggagcatgcgaggccagaaggtcaagcagacgaaagaagcacttcttaaaatactgggagatatgcagcctggggactactttgaccttgtgctctttggaactagggtgcaaagctggaaagggtcgctggtgcaggcctctgaagcgaatctgcaagccgcgcaggatttcgtccggggattctccttagacgaggcaaccaatctaaatgggggtctactgagggggatagagatcctgaaccaggtgcaggagagtctgcccgagctcagcaaccatgcttcgatcctcattatgctgacagacggcgaccccaccgagggcgtgacagacagaagccagatactcaagaacgtcaggaacgccattaggggccgcttcccattatacaatttaggatttggacataacgtcgatttcaatttcctcgaagtgatgtcgatggagaataatggtcgggctcaacgaatctacgaagaccacgacgcaacacagcagttacaaggtttttattcgcaggttgccaagccactgttagtggacgtggacttacagtacccgcaagacgccgttctggcacttacccagaatcatcacaagcagtactatgagggctctgagatagtcgttgccggccgaatcgccgacaataagcagtcctcattcaaagccgatgtgcaggcccacggagagggtcaggaattcagcatcacgtgcctcgtggacgaggaagaaatgaaaaagctcttacgggagcgcggccacatgttggaaaaccacgtggaaagattgtgggcttacttaaccatccaggaactgctggcaaagcgcatgaaagtagaccgggaggagcgcgccaatttgagctcccaagccctgcagatgtccctcgactatggcttcgtgactccattaaccagcatgtcaataaggggtatggcagatcaggatggcctcaaacctacgattgataagccgtctgaagactcaccaccgctcgagatgctgggtccccgccgcacctttgtgttgagcgcgttgcaaccttcccccactcactcttcatctaatacccagaggctgcctgaccgggtcaccggcgtcgacactgaccctcatttcattattcatgtgcctcagaaggaggacaccctgtgctttaatattaacgaggagcctggcgttatcttaagcctcgtccaggacccaaatacgggctttagcgttaatggccagttgattggcaacaaagcaagaagccctggtcagcatgatggcacttattttggccgactggggatcgccaaccctgccacagactttcagctggaggtgacccctcagaacatcacgctcaacccgggattcggaggccctgtgtttagttggcgggatcaggcagtactgcggcaggacggggtagttgtgactataaataaaaaaagaaacttggtagtgtcagtggacgacggaggcacttttgaggtggtgctgcatcgcgtttggaaggggtcatccgtccaccaggacttcctgggattctatgttttggattctcatcggatgagtgcccgcacccatggcttgctgggtcagttttttcatccaatagggtttgaggtgagtgacatacacccagggtcggatcccaccaagccagatgccacaatggttgttcgcaatcgtagactcaccgtaaccaggggtctccagaaggattactccaaggacccatggcatggcgcggaggttagctgctggttcatccacaacaacggtgccggattaattgacggagcctatactgactacattgtgcccgatatcttctag

SEQ ID NO: 126610 - DNA, 1872 bp, Artificial Sequence
  derived and/or modified sequence
atgaacaaaaacgtggtctttgttatagacatcagtggctccatgcggggccagaaggtgaagcagacaaaagaggcactgttgaagattttgggcgatatgcagccaggcgactatttcgatcttgtcctgttcggtactagagtccagagctggaagggctctctggttcaggcaagcgaagcgaatttgcaggcagcccaggattttgtgcgggggttttctctggacgaagcaacgaatctgaatggcgggctgctcagaggaatagaaattcttaatcaagtgcaggaatcactgccggaattgtccaatcacgcaagtatcctgatcatgttaacagacggtgaccccacagagggagtaacggatagaagccagatcctcaagaatgtcaggaatgcaataagaggacggttcccactctataacctgggatttggacataatgtggactttaactttctggaggtcatgtcaatggagaataatgggcgggctcagagaatatatgaggaccacgatgctactcagcaactgcagggcttctatagtcaggtggctaagccgctgctggtcgatgttgacttacagtatccgcaggacgcagtgttggccctcactcaaaatcaccacaaacagtactatgaggggtctgaaattgtagtcgccggcaggatcgctgacaataagcaatcttctttcaaggccgacgttcaggcccatggcgagggccaggagttcagtatcacatgcctggtggacgaagaggagatgaaaaaactgttgagagagaggggacacatgctagagaaccacgtggaaaggctttgggcttacttaacaatccaggaattactcgcgaaacgtatgaaggttgacagagaggagagggccaatctgagcagtcaagccctgcagatgagcttggattatgggtttgttaccccattaacctctatgtccatccgcgggatggccgaccaggatggtctgaaaccaacaattgataagccgtccgaggatagcccaccattggagatgctgggcccgcggcgtacatttgtcctgagtgcactgcaaccctctccgacgcactcatcaagcaatacacaacgcctccctgatcgcgttacaggcgtcgatactgacccccactttattatccacgtgccacagaaagaggatacgctgtgctttaacatcaacgaggaacctggggttatcttgagcctcgtgcaggatcccaatacagggtttagtgtcaatgggcagctcatagggaacaaggcgcgctcccctggccaacacgatgggacttattttgggaggttagggattgccaacccggccacagactttcagctagaggtaacaccccaaaatatcactctgaaccctggcttcggagggccagttttttcctggagggatcaggccgtgctacgacaagacggtgtcgtggttacaatcaacaagaaaagaaatctagttgtgtccgtcgatgatggtgggacgttcgaagttgtgctgcacagagtgtggaaaggatcctcggtgcaccaggacttcctgggattttatgtgctggacagccatcgtatgtccgccagaactcatggcttattgggtcagtttttccatcctataggtttcgaagtatctgacatccatccaggatccgacccaactaagccagatgctacaatggtggtgaggaatcgccgtttaacagttacccgcggactccagaaagattatagtaaggatccttggcacggggccgaggtctcctgttggttcattcacaataacggggcaggacttatcgacggggcatatacagattacatcgtcccggatatcttctag

SEQ ID NO: 126611 - DNA, 2310 bp, Artificial Sequence
  derived and/or modified sequence
atggaacagttcaccattcacctaacagtcaatcctcagagcaaggtcacctttcagttgacgtacgaagaagtgctcaaaagaaaccatatgcagtacgagattgtcatcaaagtaaagccgaagcagctggtgcaccatttcgagattgacgttgatatttttgagcctcaagggatatctaagctggacgcacaggcctcattcttacccaaagagttggcagcgcaaaccatcaaaaagtctttttcaggtaaaaaggggcacgtcctattccgccctaccgtgtcacagcagcaatcatgtcctacatgctccaccagccttctgaacggccattttaaagtcacctatgacgtgtccagggacaagatttgtgacctgctagtcgccaacaatcactttgcacacttcttcgcccctcagaatctgacgaatatgaacaagaatgtggtattcgtgattgacatttctggatccatgcggggacaaaaggttaagcagacaaaagaggcactcctgaagatcctcggggacatgcagcctggagactacttcgacctcgttctctttggtactagagtgcagtcatggaagggctcattagtgcaggcctctgaggcaaatttgcaggcagctcaggactttgtccgtggattctccttggacgaggccaccaacttaaatggaggactgctcagggggattgagatcctgaaccaagtgcaggagtccctgcccgagctcagcaaccatgcctcaattctcatcatgctaacggacggcgaccctaccgagggggtcacagaccgctcccagattctgaagaacgtcaggaatgcaattcgagggcggttccccttgtacaatctggggttcggccacaacgtggatttcaactttctcgaagttatgagcatggaaaacaacgggagagctcagcgcatttacgaagaccatgacgctactcaacagctccaggggttctattcgcaagtggccaagcctttgctagtggatgttgaccttcagtatccgcaggacgctgttttagcactgacacagaaccaccataaacagtattatgaaggaagcgaaattgtggtggctggccggatcgccgacaacaagcagagctcgtttaaggccgatgttcaggcccatggtgagggccaagagtttagcataacttgtctagtagacgaggaagagatgaaaaaactgctgcgggagaggggtcatatgctagaaaatcacgtcgagaggctctgggcttacctgacgatccaggagctcctggccaaaaggatgaaggtcgacagagaagagcgagccaacctgtcctcccaggcgttgcagatgtctctggactacgggtttgtgacaccgctcaccagcatgtctattagaggaatggcagaccaggacggactcaagccgactatagataagccatctgaggacagtcctcctcttgaaatgctcgggcctcggaggacatttgtgctatctgcgctgcagccctccccaacacatagctccagtaacactcagagactgcctgatcgcgtgaccggagtggacacagatccccatttcataattcacgtgccccagaaagaagacactctgtgcttcaatatcaatgaggagccaggcgttatcctctccctcgtacaagatcccaacaccggattttccgtaaacggccagttgattgggaacaaagctcgatctcctggtcagcatgacggcacatactttggtcgcttggggatagccaatcccgccacagattttcagctcgaggttacacctcagaacatcaccctcaatcccggatttggcgggcctgtgttctcctggagggatcaggccgtgctgcggcaggacggtgtggtggtaacaattaacaagaaaaggaaccttgtggtcagtgtggatgatggagggactttcgaagttgtcctccacagagtgtggaaggggtcctcagtgcatcaagactttctgggcttttatgttctcgacagtcacaggatgtccgcaagaacgcatggcctcctcggtcagtttttccaccctatcggatttgaagtaagcgatatacaccctggctcagatcccaccaagcccgacgcaaccatggtggtccgcaatagacggctaactgtcacacggggcctccagaaggattattccaaagacccttggcacggagccgaggtgtcctgctggtttattcacaacaatggggcagggctgatcgacggagcctacaccgactacattgttccagacatcttctag

SEQ ID NO: 126612 - DNA, 1938 bp, Artificial Sequence
  derived and/or modified sequence
atggacggcgccatgggccccaggggcctgctcctgtgcatgtaccttgtcagtctcctgatcctccaagctatgcctgccctgggaagtgcaaccggccggtcaaagagctctgagaagaggcaagccgtggacaccgcggtagacggggttttcataaggagtttgaaagtaaattgcaaggttacgtctcgttttgcccactacgtggtcaccagtcaggtggtcaatactgccaacgaggccagggaggttgccttcgacctggagattcctaagactgcttttattagtgatttcgctgtgacggcagacggcaatgccttcatcggcgatatcaaagataaggtcactgcatggaaacagtaccgaaaagctgctatcagcggcgagaatgcaggcctagtgagggccagtgggcgcacgatggaacagtttaccatccatctaactgtgaacccacaatctaaggtaacttttcagctaacgtacgaggaagtactgaagcgtaatcatatgcagtacgagatcgtgatcaaggtcaaacccaagcagctggtgcaccatttcgaaattgatgtcgacatctttgagccacagggcatctccaagctggatgctcaagcttctttcctgcccaaggaactggcagctcagactattaagaagagcttcagtggaaaaaaggggcacgttctgttccggccgacggtatcacaacaacagagctgtcctacctgctccaccagcttgttgaatggacattttaaggtaacttatgacgtatctcgggataagatctgcgatctgcttgtggcgaacaaccactttgctcacttttttgctccacagaacctcactaacatgaataagaatgtggtcttcgtgattgacatctcaggtagcatgagaggacaaaaggtcaaacaaacaaaagaggccctgctgaaaatacttggcgacatgcaaccaggagactatttcgacttggtcctgttcgggacaagagttcagtcctggaaaggtagcctggtgcaagcgagtgaggccaacctccaggccgcccaggatttcgtgcgcggcttctcccttgatgaagccacaaaccttaatggcggcctgctacggggtattgagatactgaaccaggtgcaggagtctctccccgagctgagcaaccacgcctccatactgatcatgctgacagatggagaccctaccgagggtgtcacagacagatcacagatactgaagaacgtcagaaatgcaatccgtggaaggtttccactctacaacctagggttcggacataacgtcgattttaacttcctcgaggtgatgagcatggaaaacaatgggagggcacagaggatttatgaagaccatgacgcaactcagcagctacagggattttactcccaggtagccaagccactgctggtggacgtggatctgcagtacccccaggacgcagtgctagcgctgacacaaaaccatcataagcagtactatgaggggagcgagattgtggtagctggaagaattgctgataacaaacagtcgtccttcaaggcagatgttcaggcccatggggaaggacaagagttctcaattacttgccttgtggacgaagaggaaatgaaaaaactgctccgcgagcggggacatatgctggaaaatcacgttgaacgactctgggcctacttaacaatccaggagctcctagccaagcggatgaaggtagaccgcgaggagcgcgcaaacctgtctagccaggccctgcaaatgtccctagattatgggtttgtgacaccactcacaagcatgagcatccgggggatggcagatcaagacgggctaaagcccactatagataagccatcactccaccacccacgcgcacccgagcggggtcatccagtgctgcaacaccaatag

SEQ ID NO: 126613 - DNA, 2911 bp, Artificial Sequence
  derived and/or modified sequence
acagggcagcaggagccttagagcatggacggtgccatggggcctcgggggctgctgttgtgcatgtacctggtatctctcctcatcctgcaggccatgcctgccctgggctcggctacaggcaggtccaagagcagcgagaagcgacaggctgtggacaccgctgtcgatggcgtgttcatccggagtttgaaagtcaactgcaaagtcacctctcgcttcgcccactatgttgtcaccagccaagtggtcaacactgccaatgaagccagggaagtggccttcgacctggaaatccccaagacagcattcatcagtgactttgccgttacagcagatggaaacgcatttatcggagacataaaggacaaggtgactgcatggaagcagtaccggaaagcagctatctcaggagagaatgccggccttgtcagggcctcggggagaactatggagcaattcaccatccacctcaccgtcaatccccagagcaaggtcacgtttcagctgacttatgaggaagtgctgaagagaaaccatatgcagtatgaaattgtcatcaaagtcaagcccaagcagctggtgcatcattttgagattgatgtggacatcttcgagccccaggggatcagcaagctggatgcccaggcctctttcctgccgaaggaactggcagcccaaactatcaagaagtccttctcaggaaaaaagggtcatgtgctgttccgtcccaccgtgagccagcagcagtcctgccccacatgctctacatccttactgaacgggcacttcaaggtgacctacgatgtcagtcgagacaagatctgcgacctcctggtggccaataaccactttgcccacttctttgccccccaaaacctgacaaacatgaacaagaacgtggtttttgtgattgacatcagtggctccatgagaggccagaaagtgaagcagaccaaggaggcactccttaaaattctgggggacatgcagccaggggactactttgacctggttctttttgggactcgagtacaatcgtggaagggctcgctggtgcaagcatctgaggccaacctacaagcagctcaagactttgtgcggggcttttccctggatgaggccacaaacctgaatggaggtttgctccggggaattgagatcttgaaccaagttcaggaaagcctcccagaactcagcaaccatgcctcaatactcatcatgttgacagatggcgatcccacagagggggtgacggaccgttcccaaatcctcaagaacgtccgcaacgccatccggggcaggttcccgctctacaacctgggtttcggccacaatgtggactttaactttctggaggtcatgtccatggagaacaacggacgggcccagagaatctacgaggaccatgatgccacccagcagctgcagggtttctacagccaggtagccaaacccctgctggtggatgtggatttgcagtacccccaggatgctgtcttggccctgacccagaaccaccataaacagtactacgaaggctcagagattgtggtggccgggcgcattgctgacaacaaacagagcagcttcaaggctgatgtgcaggcccatggggagggacaagaattcagtataacctgcctagtggatgaggaggagatgaagaaactgctccgagagcgtggccacatgctggagaaccacgtcgagcgcctctgggcctacctcaccatccaggagctgctggccaagcggatgaaggtggacagggaggagagggccaacctgtcatcccaggccctgcagatgtcgctggactatgggtttgtgaccccactgacctccatgagcatcaggggcatggcggaccaggacggcctgaagcccaccatcgacaagccctcagaggattctccgcctttggagatgctgggacccagaaggacgttcgtgctgtcagccttgcagccttctcctactcattccagctccaatacccagcggctgccagaccgagtgaccggcgtggacacagaccctcacttcatcatccacgtgccccagaaagaggacaccctgtgcttcaacatcaatgaggagcctggtgttatcctgagcctggtacaggaccccaacacaggcttctcagtgaatggacagctcattggcaacaaggccaggagccctgggcagcatgacggcacgtacttcgggcggctgggaatcgcaaaccctgccacggactttcagttggaagtgactcctcagaacattacgctgaaccccggctttggtgggcctgtgttttcctggagggaccaagctgtgctgcggcaggacggggtggtggtgaccatcaacaagaagaggaacctggtggtgtctgtggacgacggtggcacctttgaggttgttttgcaccgagtgtggaaggggagctcggtccaccaggacttcctgggcttctatgtgctggacagtcatcggatgtcagcccggacgcacgggctgctggggcaatttttccaccccatcggttttgaagtgtctgacatccacccaggctctgaccccacaaagccagatgccacgatggtggtgaggaaccgccggctcacggtcaccaggggtttgcaaaaagactacagcaaggacccgtggcatggggccgaggtgtcctgctggttcattcacaacaatggggctggactcatcgatggtgcctacactgattatatcgtccccgacatcttctgagccctctggccagcacgcctgtcctcccccggggccaaggcagaggaggaggacgacatcctgacctgctgctgaggctgtacctccttgactaagctggttccttgtgtcaaagcacctcatgccttccattaaagagaggccgtgtcca

SEQ ID NO: 126614 - DNA, 2486 bp, Artificial Sequence
  derived and/or modified sequence
gaattattgctggcacctaagtggtggctgagttgagggatgcaggcatgtacaccttcatttggtcagtatttttggagtgcctactgagtaccaggccctgtgatcagggctgggtgggtgctgcacacagtaggtggccaggacacatgctggctcttggctgagacttgattgatgtggacatcttcgagccccaggggatcagcaagctggatgcccaggcctctttcctgccgaaggaactggcagcccaaactatcaagaagtccttctcaggaaaaaagggtcatgtgctgttccgtcccaccgtgagccagcagcagtcctgccccacatgctctacatccttactgaacgggcacttcaaggtgacctacgatgtcagtcgagacaagatctgcgacctcctggtggccaataaccactttgcccacttctttgccccccaaaacctgacaaacatgaacaagaacgtggtttttgtgattgacatcagtggctccatgagaggccagaaagtgaagcagaccaaggaggcactccttaaaattctgggggacatgcagccaggggactactttgacctggttctttttgggactcgagtacaatcgtggaagggctcgctggtgcaagcatctgaggccaacctacaagcagctcaagactttgtgcggggcttttccctggatgaggccacaaacctgaatggaggtttgctccggggaattgagatcttgaaccaagttcaggaaagcctcccagaactcagcaaccatgcctcaatactcatcatgttgacagatggcgatcccacagagggggtgacggaccgttcccaaatcctcaagaacgtccgcaacgccatccggggcaggttcccgctctacaacctgggtttcggccacaatgtggactttaactttctggaggtcatgtccatggagaacaacggacgggcccagagaatctacgaggaccatgatgccacccagcagctgcagggtttctacagccaggtagccaaacccctgctggtggatgtggatttgcagtacccccaggatgctgtcttggccctgacccagaaccaccataaacagtactacgaaggctcagagattgtggtggccgggcgcattgctgacaacaaacagagcagcttcaaggctgatgtgcaggcccatggggagggacaagaattcagtataacctgcctagtggatgaggaggagatgaagaaactgctccgagagcgtggccacatgctggagaaccacgtcgagcgcctctgggcctacctcaccatccaggagctgctggccaagcggatgaaggtggacagggaggagagggccaacctgtcatcccaggccctgcagatgtcgctggactatgggtttgtgaccccactgacctccatgagcatcaggggcatggcggaccaggacggcctgaagcccaccatcgacaagccctcagaggattctccgcctttggagatgctgggacccagaaggacgttcgtgctgtcagccttgcagccttctcctactcattccagctccaatacccagcggctgccagaccgagtgaccggcgtggacacagaccctcacttcatcatccacgtgccccagaaagaggacaccctgtgcttcaacatcaatgaggagcctggtgttatcctgagcctggtacaggaccccaacacaggcttctcagtgaatggacagctcattggcaacaaggccaggagccctgggcagcatgacggcacgtacttcgggcggctgggaatcgcaaaccctgccacggactttcagttggaagtgactcctcagaacattacgctgaaccccggctttggtgggcctgtgttttcctggagggaccaagctgtgctgcggcaggacggggtggtggtgaccatcaacaagaagaggaacctggtggtgtctgtggacgacggtggcacctttgaggttgttttgcaccgagtgtggaaggggagctcggtccaccaggacttcctgggcttctatgtgctggacagtcatcggatgtcagcccggacgcacgggctgctggggcaatttttccaccccatcggttttgaagtgtctgacatccacccaggctctgaccccacaaagccagatgccacgatggtggtgaggaaccgccggctcacggtcaccaggggtttgcaaaaagactacagcaaggacccgtggcatggggccgaggtgtcctgctggttcattcacaacaatggggctggactcatcgatggtgcctacactgattatatcgtccccgacatcttctgagccctctggccagcacgcctgtcctcccccggggccaaggcagaggaggaggacgacatcctgacctgctgctgaggctgtacctccttgactaagctggttccttgtgtcaaagcacctcatgccttccattaaagagaggccgtgtcc

SEQ ID NO: 126615 - DNA, 2741 bp, Artificial Sequence
  derived and/or modified sequence
gtgcgtgcctgcccaactcccatgccttctcccaggggtgccgcttactagtcccagcttaagaacaaggatcggagtggccagataacgcagagcatctcctcattctagaagggccacagaccagccctggctttgaggggaggaagaagccctttagtacagcagatggaaacgcatttatcggagacataaaggacaaggtgactgcatggaagcagtaccggaaagcagctatctcaggagagaatgccggccttgtcagggcctcggggagaactatggagcaattcaccatccacctcaccgtcaatccccagagcaaggtcacgtttcagctgacttatgaggaagtgctgaagagaaaccatatgcagtatgaaattgtcatcaaagtcaagcccaagcagctggtgcatcattttgagattgatgtggacatcttcgagccccaggggatcagcaagctggatgcccaggcctctttcctgccgaaggaactggcagcccaaactatcaagaagtccttctcaggaaaaaagggtcatgtgctgttccgtcccaccgtgagccagcagcagtcctgccccacatgctctacatccttactgaacgggcacttcaaggtgacctacgatgtcagtcgagacaagatctgcgacctcctggtggccaataaccactttgcccacttctttgccccccaaaacctgacaaacatgaacaagaacgtggtttttgtgattgacatcagtggctccatgagaggccagaaagtgaagcagaccaaggaggcactccttaaaattctgggggacatgcagccaggggactactttgacctggttctttttgggactcgagtacaatcgtggaagggctcgctggtgcaagcatctgaggccaacctacaagcagctcaagactttgtgcggggcttttccctggatgaggccacaaacctgaatggaggtttgctccggggaattgagatcttgaaccaagttcaggaaagcctcccagaactcagcaaccatgcctcaatactcatcatgttgacagatggcgatcccacagagggggtgacggaccgttcccaaatcctcaagaacgtccgcaacgccatccggggcaggttcccgctctacaacctgggtttcggccacaatgtggactttaactttctggaggtcatgtccatggagaacaacggacgggcccagagaatctacgaggaccatgatgccacccagcagctgcagggtttctacagccaggtagccaaacccctgctggtggatgtggatttgcagtacccccaggatgctgtcttggccctgacccagaaccaccataaacagtactacgaaggctcagagattgtggtggccgggcgcattgctgacaacaaacagagcagcttcaaggctgatgtgcaggcccatggggagggacaagaattcagtataacctgcctagtggatgaggaggagatgaagaaactgctccgagagcgtggccacatgctggagaaccacgtcgagcgcctctgggcctacctcaccatccaggagctgctggccaagcggatgaaggtggacagggaggagagggccaacctgtcatcccaggccctgcagatgtcgctggactatgggtttgtgaccccactgacctccatgagcatcaggggcatggcggaccaggacggcctgaagcccaccatcgacaagccctcagaggattctccgcctttggagatgctgggacccagaaggacgttcgtgctgtcagccttgcagccttctcctactcattccagctccaatacccagcggctgccagaccgagtgaccggcgtggacacagaccctcacttcatcatccacgtgccccagaaagaggacaccctgtgcttcaacatcaatgaggagcctggtgttatcctgagcctggtacaggaccccaacacaggcttctcagtgaatggacagctcattggcaacaaggccaggagccctgggcagcatgacggcacgtacttcgggcggctgggaatcgcaaaccctgccacggactttcagttggaagtgactcctcagaacattacgctgaaccccggctttggtgggcctgtgttttcctggagggaccaagctgtgctgcggcaggacggggtggtggtgaccatcaacaagaagaggaacctggtggtgtctgtggacgacggtggcacctttgaggttgttttgcaccgagtgtggaaggggagctcggtccaccaggacttcctgggcttctatgtgctggacagtcatcggatgtcagcccggacgcacgggctgctggggcaatttttccaccccatcggttttgaagtgtctgacatccacccaggctctgaccccacaaagccagatgccacgatggtggtgaggaaccgccggctcacggtcaccaggggtttgcaaaaagactacagcaaggacccgtggcatggggccgaggtgtcctgctggttcattcacaacaatggggctggactcatcgatggtgcctacactgattatatcgtccccgacatcttctgagccctctggccagcacgcctgtcctcccccggggccaaggcagaggaggaggacgacatcctgacctgctgctgaggctgtacctccttgactaagctggttccttgtgtcaaagcacctcatgccttccattaaagagaggccgtgtcc

SEQ ID NO: 126616 - DNA, 2778 bp, Artificial Sequence
  derived and/or modified sequence
aggtgacagggcagcaggagccttagagcatggacggtgccatggggcctcgggggctgctgttgtgcatgtacctggtatctctcctcatcctgcaggccatgcctgccctgggctcggctacaggcaggtccaagagcagcgagaagcgacaggctgtggacaccgctgtcgatggcgtgttcatccggagtttgaaagtcaactgcaaagtcacctctcgcttcgcccactatgttgtcaccagccaagtggtcaacactgccaatgaagccagggaagtggccttcgacctggaaatccccaagacagcattcatcagtgactttgccgttacagcagatggaaacgcatttatcggagacataaaggacaaggtgactgcatggaagcagtaccggaaagcagctatctcaggagagaatgccggccttgtcagggcctcggggagaactatggagcaattcaccatccacctcaccgtcaatccccagagcaaggtcacgtttcagctgacttatgaggaagtgctgaagagaaaccatatgcagtatgaaattgtcatcaaagtcaagcccaagcagctggtgcatcattttgagattgatgtggacatcttcgagccccaggggatcagcaagctggatgcccaggcctctttcctgccgaaggaactggcagcccaaactatcaagaagtccttctcaggaaaaaagggtcatgtgctgttccgtcccaccgtgagccagcagcagtcctgccccacatgctctacatccttactgaacgggcacttcaaggtgacctacgatgtcagtcgagacaagatctgcgacctcctggtggccaataaccactttgcccacttctttgccccccaaaacctgacaaacatgaacaagaacgtggtttttgtgattgacatcagtggctccatgagaggccagaaagtgaagcagaccaaggaggcactccttaaaattctgggggacatgcagccaggggactactttgacctggttctttttgggactcgagtacaatcgtggaagggctcgctggtgcaagcatctgaggccaacctacaagcagctcaagactttgtgcggggcttttccctggatgaggccacaaacctgaatggaggtttgctccggggaattgagatcttgaaccaagttcaggaaagcctcccagaactcagcaaccatgcctcaatactcatcatgttgacagatggcgatcccacagagggggtgacggaccgttcccaaatcctcaagaacgtccgcaacgccatccggggcaggttcccgctctacaacctgggtttcggccacaatgtggactttaactttctggaggtcatgtccatggagaacaacggacgggcccagagaatctacgaggaccatgatgccacccagcagctgcagggtttctacagccaggtagccaaacccctgctggtggatgtggatttgcagtacccccaggatgctgtcttggccctgacccagaaccaccataaacagtactacgaaggctcagagattgtggtggccgggcgcattgctgacaacaaacagagcagcttcaaggctgatgtgcaggcccatggggagggacaagaattcagtataacctgcctagtggatgaggaggagatgaagaaactgctccgagagcgtggccacatgctggagaaccacgtcgagcgcctctgggcctacctcaccatccaggagctgctggccaagcggatgaaggtggacagggaggagagggccaacctgtcatcccaggccctgcagatgtcgctggactatgggtttgtgaccccactgacctccatgagcatcaggggcatggcggaccaggacggcctgaagcccaccatcgacaaaccctcacttcatcatccacgtgccccagaaagaggacaccctgtgcttcaacatcaatgaggagcctggtgttatcctgagcctggtacaggaccccaacacaggcttctcagtgaatggacagctcattggcaacaaggccaggagccctgggcagcatgacggcacgtacttcgggcggctgggaatcgcaaaccctgccacggactttcagttggaagtgactcctcagaacattacgctgaaccccggctttggtgggcctgtgttttcctggagggaccaagctgtgctgcggcaggacggggtggtggtgaccatcaacaagaagaggaacctggtggtgtctgtggacgacggtggcacctttgaggttgttttgcaccgagtgtggaaggggagctcggtccaccaggacttcctgggcttctatgtgctggacagtcatcggatgtcagcccggacgcacgggctgctggggcaatttttccaccccatcggttttgaagtgtctgacatccacccaggctctgaccccacaaagccagatgccacgatggtggtgaggaaccgccggctcacggtcaccaggggtttgcaaaaagactacagcaaggacccgtggcatggggccgaggtgtcctgctggttcattcacaacaatggggctggactcatcgatggtgcctacactgattatatcgtccccgacatcttctgagccctctggccagcacgcctgtcctcccccggggccaaggcagaggaggaggacgacatcctgacctgctgctgaggctgtacctccttgactaagctggttccttgtgtcaaagcacctcatgccttccattaaagagaggccgtgtcc

SEQ ID NO: 126617 - DNA, 2736 bp, Artificial Sequence
  derived and/or modified sequence
atggatggagccatgggcccccggggcctgctgctgtgcatgtacctggtgtccctgctgatcctgcaggccatgcctgccctgggcagcgccaccggccgcagcaagagcagcgagaagaggcaggccgtggacacagctgtggatggagtcttcatccgcagcctgaaggtgaactgcaaggtgaccagcagatttgcccactacgtggtgaccagccaggtggtgaacacagccaatgaggcccgggaggtggcctttgacctggagatccccaagacagccttcatcagtgactttgctgtgacagcagatggaaatgccttcatcggggacatcaaggacaaggtgacagcctggaagcagtacaggaaggccgccatctctggagaaaatgccggcctggtgcgggccagcggccgcaccatggagcagttcaccatccacctgactgtgaacccccagagcaaggtgaccttccagctgacctatgaggaggtgctgaagaggaaccacatgcagtatgaaattgtcatcaaggtgaagcccaagcagctggtgcaccactttgaaattgatgtggacatctttgagccccagggcatcagcaagctggatgcccaggccagcttcctgcccaaggagctggccgcccagaccatcaagaagagcttcagcggcaagaagggccacgtgctcttccggcccaccgtgtcccagcagcagagctgccccacctgcagcaccagcctgctgaatggccacttcaaggtgacctatgatgtgtcccgggacaagatctgtgacctgctggtggccaacaaccactttgcccacttctttgccccccagaacctgaccaacatgaacaagaatgtggtgtttgtgattgacatcagcggctccatgaggggccagaaggtgaagcagaccaaggaggccctgctgaagatcctgggggacatgcagcccggggactactttgacctggtgctgtttggcaccagggtgcagagctggaagggcagcctggtgcaggccagcgaggccaacctgcaggccgcccaggactttgtgcggggcttcagcctggatgaggccaccaacctgaatggaggcctgctgcggggcatcgagatcctgaaccaggtgcaggagagcctgcctgagctgagcaaccacgccagcatcctgatcatgctgacagatggagaccccacagaaggagtgacagacaggagccagatcctgaagaatgtgagaaatgccatccggggccgcttccccctgtacaacctgggcttcggccacaacgtggacttcaacttcctggaggtgatgtccatggagaacaacggccgggcccagaggatctatgaggaccatgatgccacccagcagctgcagggcttctacagccaggtggccaagcccctgctggtggatgtggacctgcagtacccccaggatgctgtgctggccctgacccagaaccaccacaagcagtactatgagggcagcgagatcgtggtggccggcagaattgctgacaacaagcagagcagcttcaaggcagatgtgcaggcccacggggagggccaggagttcagcatcacctgcctggtggatgaggaggagatgaagaagctgctgcgggagcggggccacatgctggagaaccacgtggagcggctgtgggcctacctgaccatccaggagctgctggccaagaggatgaaggtggaccgggaggagcgggccaacctgagcagccaggccctgcagatgagcctggactatggctttgtgacccccctgacctccatgagcatccggggcatggctgaccaggacggcctgaagcccaccatcgacaagcccagcgaggacagcccccccctggagatgctgggccccaggaggacctttgtgctgagcgccctgcagcccagccccacccacagcagcagcaacacccagaggctgcctgacagagtgactggagtggacacagacccccacttcatcatccacgtgccccagaaggaggacaccctgtgcttcaacatcaatgaggagcccggggtcatcctgagcctggtgcaggaccccaacacaggcttctctgtgaatggccagctgattggcaacaaggcccggagccctggccagcatgatggcacctacttcggccgcctgggcatcgccaacccagccacagacttccagctggaggtgaccccccagaacatcaccctgaaccctggctttggaggccctgtgttctcctggagggaccaggccgtgctgcggcaggatggagtggtggtgaccatcaacaagaagaggaacctggtggtgtctgtggatgatggcggcacctttgaggtggtgctgcaccgggtgtggaagggcagctctgtgcaccaggacttcctgggcttctacgtgctggacagccacaggatgtctgcccggacccacggcctgctgggccagttcttccaccccatcggctttgaggtgtctgacatccaccctggcagtgaccccaccaagccagatgccaccatggtggtgaggaacagaaggctgactgtgacccggggcctgcagaaggactacagcaaggacccctggcatggagctgaggtgtcctgctggttcatccacaacaatggagctggcctgattgatggagcctacacagactacatcgtgcctgacatcttctag

SEQ ID NO: 126618 - DNA, 1872 bp, Artificial Sequence
  derived and/or modified sequence
atgaacaagaatgtggtgtttgtgattgacatcagcggctccatgaggggccagaaggtgaagcagaccaaggaggccctgctgaagatcctgggggacatgcagcccggggactactttgacctggtgctgtttggcaccagggtgcagagctggaagggcagcctggtgcaggccagcgaggccaacctgcaggccgcccaggactttgtgcggggcttcagcctggatgaggccaccaacctgaatggaggcctgctgcggggcatcgagatcctgaaccaggtgcaggagagcctgcctgagctgagcaaccacgccagcatcctgatcatgctgacagatggagaccccacagaaggagtgacagacaggagccagatcctgaagaatgtgagaaatgccatccggggccgcttccccctgtacaacctgggcttcggccacaacgtggacttcaacttcctggaggtgatgtccatggagaacaacggccgggcccagaggatctatgaggaccatgatgccacccagcagctgcagggcttctacagccaggtggccaagcccctgctggtggatgtggacctgcagtacccccaggatgctgtgctggccctgacccagaaccaccacaagcagtactatgagggcagcgagatcgtggtggccggcagaattgctgacaacaagcagagcagcttcaaggcagatgtgcaggcccacggggagggccaggagttcagcatcacctgcctggtggatgaggaggagatgaagaagctgctgcgggagcggggccacatgctggagaaccacgtggagcggctgtgggcctacctgaccatccaggagctgctggccaagaggatgaaggtggaccgggaggagcgggccaacctgagcagccaggccctgcagatgagcctggactatggctttgtgacccccctgacctccatgagcatccggggcatggctgaccaggacggcctgaagcccaccatcgacaagcccagcgaggacagcccccccctggagatgctgggccccaggaggacctttgtgctgagcgccctgcagcccagccccacccacagcagcagcaacacccagaggctgcctgacagagtgactggagtggacacagacccccacttcatcatccacgtgccccagaaggaggacaccctgtgcttcaacatcaatgaggagcccggggtcatcctgagcctggtgcaggaccccaacacaggcttctctgtgaatggccagctgattggcaacaaggcccggagccctggccagcatgatggcacctacttcggccgcctgggcatcgccaacccagccacagacttccagctggaggtgaccccccagaacatcaccctgaaccctggctttggaggccctgtgttctcctggagggaccaggccgtgctgcggcaggatggagtggtggtgaccatcaacaagaagaggaacctggtggtgtctgtggatgatggcggcacctttgaggtggtgctgcaccgggtgtggaagggcagctctgtgcaccaggacttcctgggcttctacgtgctggacagccacaggatgtctgcccggacccacggcctgctgggccagttcttccaccccatcggctttgaggtgtctgacatccaccctggcagtgaccccaccaagccagatgccaccatggtggtgaggaacagaaggctgactgtgacccggggcctgcagaaggactacagcaaggacccctggcatggagctgaggtgtcctgctggttcatccacaacaatggagctggcctgattgatggagcctacacagactacatcgtgcctgacatcttctag

SEQ ID NO: 126619 - DNA, 2310 bp, Artificial Sequence
  derived and/or modified sequence
atggagcagttcaccatccacctgactgtgaacccccagagcaaggtgaccttccagctgacctatgaggaggtgctgaagaggaaccacatgcagtatgaaattgtcatcaaggtgaagcccaagcagctggtgcaccactttgaaattgatgtggacatctttgagccccagggcatcagcaagctggatgcccaggccagcttcctgcccaaggagctggccgcccagaccatcaagaagagcttcagcggcaagaagggccacgtgctcttccggcccaccgtgtcccagcagcagagctgccccacctgcagcaccagcctgctgaatggccacttcaaggtgacctatgatgtgtcccgggacaagatctgtgacctgctggtggccaacaaccactttgcccacttctttgccccccagaacctgaccaacatgaacaagaatgtggtgtttgtgattgacatcagcggctccatgaggggccagaaggtgaagcagaccaaggaggccctgctgaagatcctgggggacatgcagcccggggactactttgacctggtgctgtttggcaccagggtgcagagctggaagggcagcctggtgcaggccagcgaggccaacctgcaggccgcccaggactttgtgcggggcttcagcctggatgaggccaccaacctgaatggaggcctgctgcggggcatcgagatcctgaaccaggtgcaggagagcctgcctgagctgagcaaccacgccagcatcctgatcatgctgacagatggagaccccacagaaggagtgacagacaggagccagatcctgaagaatgtgagaaatgccatccggggccgcttccccctgtacaacctgggcttcggccacaacgtggacttcaacttcctggaggtgatgtccatggagaacaacggccgggcccagaggatctatgaggaccatgatgccacccagcagctgcagggcttctacagccaggtggccaagcccctgctggtggatgtggacctgcagtacccccaggatgctgtgctggccctgacccagaaccaccacaagcagtactatgagggcagcgagatcgtggtggccggcagaattgctgacaacaagcagagcagcttcaaggcagatgtgcaggcccacggggagggccaggagttcagcatcacctgcctggtggatgaggaggagatgaagaagctgctgcgggagcggggccacatgctggagaaccacgtggagcggctgtgggcctacctgaccatccaggagctgctggccaagaggatgaaggtggaccgggaggagcgggccaacctgagcagccaggccctgcagatgagcctggactatggctttgtgacccccctgacctccatgagcatccggggcatggctgaccaggacggcctgaagcccaccatcgacaagcccagcgaggacagcccccccctggagatgctgggccccaggaggacctttgtgctgagcgccctgcagcccagccccacccacagcagcagcaacacccagaggctgcctgacagagtgactggagtggacacagacccccacttcatcatccacgtgccccagaaggaggacaccctgtgcttcaacatcaatgaggagcccggggtcatcctgagcctggtgcaggaccccaacacaggcttctctgtgaatggccagctgattggcaacaaggcccggagccctggccagcatgatggcacctacttcggccgcctgggcatcgccaacccagccacagacttccagctggaggtgaccccccagaacatcaccctgaaccctggctttggaggccctgtgttctcctggagggaccaggccgtgctgcggcaggatggagtggtggtgaccatcaacaagaagaggaacctggtggtgtctgtggatgatggcggcacctttgaggtggtgctgcaccgggtgtggaagggcagctctgtgcaccaggacttcctgggcttctacgtgctggacagccacaggatgtctgcccggacccacggcctgctgggccagttcttccaccccatcggctttgaggtgtctgacatccaccctggcagtgaccccaccaagccagatgccaccatggtggtgaggaacagaaggctgactgtgacccggggcctgcagaaggactacagcaaggacccctggcatggagctgaggtgtcctgctggttcatccacaacaatggagctggcctgattgatggagcctacacagactacatcgtgcctgacatcttctag

SEQ ID NO: 126620 - DNA, 1938 bp, Artificial Sequence
  derived and/or modified sequence
atggatggagccatgggcccccggggcctgctgctgtgcatgtacctggtgtccctgctgatcctgcaggccatgcctgccctgggcagcgccaccggccgcagcaagagcagcgagaagaggcaggccgtggacacagctgtggatggagtcttcatccgcagcctgaaggtgaactgcaaggtgaccagcagatttgcccactacgtggtgaccagccaggtggtgaacacagccaatgaggcccgggaggtggcctttgacctggagatccccaagacagccttcatcagtgactttgctgtgacagcagatggaaatgccttcatcggggacatcaaggacaaggtgacagcctggaagcagtacaggaaggccgccatctctggagaaaatgccggcctggtgcgggccagcggccgcaccatggagcagttcaccatccacctgactgtgaacccccagagcaaggtgaccttccagctgacctatgaggaggtgctgaagaggaaccacatgcagtatgaaattgtcatcaaggtgaagcccaagcagctggtgcaccactttgaaattgatgtggacatctttgagccccagggcatcagcaagctggatgcccaggccagcttcctgcccaaggagctggccgcccagaccatcaagaagagcttcagcggcaagaagggccacgtgctcttccggcccaccgtgtcccagcagcagagctgccccacctgcagcaccagcctgctgaatggccacttcaaggtgacctatgatgtgtcccgggacaagatctgtgacctgctggtggccaacaaccactttgcccacttctttgccccccagaacctgaccaacatgaacaagaatgtggtgtttgtgattgacatcagcggctccatgaggggccagaaggtgaagcagaccaaggaggccctgctgaagatcctgggggacatgcagcccggggactactttgacctggtgctgtttggcaccagggtgcagagctggaagggcagcctggtgcaggccagcgaggccaacctgcaggccgcccaggactttgtgcggggcttcagcctggatgaggccaccaacctgaatggaggcctgctgcggggcatcgagatcctgaaccaggtgcaggagagcctgcctgagctgagcaaccacgccagcatcctgatcatgctgacagatggagaccccacagaaggagtgacagacaggagccagatcctgaagaatgtgagaaatgccatccggggccgcttccccctgtacaacctgggcttcggccacaacgtggacttcaacttcctggaggtgatgtccatggagaacaacggccgggcccagaggatctatgaggaccatgatgccacccagcagctgcagggcttctacagccaggtggccaagcccctgctggtggatgtggacctgcagtacccccaggatgctgtgctggccctgacccagaaccaccacaagcagtactatgagggcagcgagatcgtggtggccggcagaattgctgacaacaagcagagcagcttcaaggcagatgtgcaggcccacggggagggccaggagttcagcatcacctgcctggtggatgaggaggagatgaagaagctgctgcgggagcggggccacatgctggagaaccacgtggagcggctgtgggcctacctgaccatccaggagctgctggccaagaggatgaaggtggaccgggaggagcgggccaacctgagcagccaggccctgcagatgagcctggactatggctttgtgacccccctgacctccatgagcatccggggcatggctgaccaggacggcctgaagcccaccatcgacaagcccagcctgcaccacccccgggcccctgagcggggccaccctgtgctgcagcaccagtag

SEQ ID NO: 126621 - DNA, 2736 bp, Artificial Sequence
  derived and/or modified sequence
atggacggcgccatgggcccccggggcctgctgctgtgcatgtacttggtcagcctgctgatattgcaggccatgccagccctgggaagcgctacaggcaggtcgaagagcagtgaaaagcgacaggccgtcgacaccgccgtagatggagtgtttattagatccttgaaggtcaattgtaaagtgacaagcagattcgcccactacgtggtcacttcacaagtggtgaatacagcgaacgaagccagggaggtggcatttgacctggaaatacctaaaactgcattcataagcgattttgctgtgactgcggacgggaatgctttcatcggcgacataaaagacaaagtgaccgcctggaagcagtatcggaaggccgccatcagcggtgagaatgcaggcctcgtaagggccagtggtaggactatggagcagttcaccatccaccttactgtcaaccctcaatccaaggtgacatttcagctaacttacgaagaagtcctgaaaagaaaccacatgcagtatgaaatagtgattaaagttaagcctaaacagttggtccaccacttcgagatcgacgtcgatatattcgaaccccagggaatttcgaaactagacgcacaggcctcctttctaccaaaggagctcgctgcgcaaactattaagaagtccttttccggtaaaaaaggtcatgtgctgtttaggcctacagtttctcagcagcagtcgtgcccaacatgctccaccagcctgcttaatgggcattttaaggttacgtatgatgtgagtcgcgataagatctgcgatcttttggtcgcaaacaaccacttcgctcatttttttgctcctcagaatctgacaaatatgaataagaacgtcgtattcgtcatagatatctctggatcaatgcgcggccagaaagtcaaacaaaccaaagaagcactgctgaaaatcctgggcgacatgcagccaggcgactacttcgatctggtacttttcggaacccgggttcaatcttggaagggatccctggtgcaggctagcgaagcgaacctgcaggcagcacaggattttgtgcggggattttccctggacgaggctactaacctcaacggaggtctgttgcgcggaatcgagatactcaatcaggtgcaagaatcacttccagagctgagcaaccacgccagcatcctgattatgttgaccgacggcgaccctaccgagggcgtgaccgaccggagccaaatactgaagaacgtacgcaatgctatccgcgggcgatttcccctttataaccttggttttggacacaacgtcgacttcaacttcttggaagtcatgagcatggagaataatgggcgggcgcaacgaatctatgaggatcatgacgccacacagcagctgcagggattctattctcaggtcgccaaacccctcctggtcgatgtcgacctgcaatatccccaagacgctgtgctggcactgactcaaaaccaccataaacagtactatgagggatcggaaattgtagtggccggtagaatcgcggacaataagcagtcatctttcaaggctgacgtgcaggcacacggtgaagggcaggagttttcgattacatgccttgtggatgaggaagagatgaaaaagctgctgcgcgaaagaggccacatgctggagaaccatgtcgagagactgtgggcttacctcaccatccaggagctgctagccaaacggatgaaagtggacagggaggaacgggcgaatctcagtagtcaggccctgcaaatgtccctggactacggattcgtgactcctctgacttcaatgtccataaggggaatggctgatcaggacggactgaaacctacaattgacaagccatccgaggatagccccccactcgaaatgttgggacccagacgcaccttcgtcctgtcagcgctgcagccttcgcccacacactcatccagtaacacccagaggcttcctgaccgtgtgaccggcgtggacacagaccctcacttcattatccatgtaccccagaaggaagacacactgtgcttcaatataaatgaagaaccaggggttatactgagtctggtgcaggatcctaataccggattctccgtaaacggacagttgataggaaacaaagcccgctcacccggccagcacgacggcacgtattttggccgtctcggaattgccaatccagccaccgatttccagctcgaagtgacaccccagaatataacattaaatccaggattcggcggaccagtcttctcctggagggatcaagcagttcttcgacaggatggagtggtcgttacaattaataagaaacgtaacctggtggtgtcagtggatgatggtggtacattcgaagtcgtcctccaccgtgtctggaaagggtccagcgtccatcaggatttcctgggcttctacgtacttgacagccatcgaatgagtgcccggacccacggactgttgggtcaattctttcaccccatcgggtttgaggtgtccgacatacatcccggttccgacccaaccaagccagacgccaccatggtggtcaggaacaggcgcctaacagtgactcgcgggcttcagaaagattactccaaggatccttggcatggagccgaggtcagctgttggtttatccataacaacggagcgggactcatcgacggtgcatataccgactacatcgttccagatatattctag

SEQ ID NO: 126622 - DNA, 1872 bp, Artificial Sequence
  derived and/or modified sequence
atgaacaagaacgtggtgttcgtgatcgacatcagcggcagcatgagaggtcagaaggtcaaacagacaaaggaagctctgctgaagatcttgggcgatatgcagcctggagactacttcgacctggtcttattcgggaccagggtgcagagctggaagggatccctcgtgcaagccagcgaggcaaacctgcaggccgcacaagactttgtacgcgggttctccctggacgaggccaccaatcttaatggggggctgctccgcggaattgagatcctgaatcaggtgcaggaatcactcccggagctgtctaatcacgcttcaatcctgataatgctgactgatggcgatccgacagaaggcgtcaccgatagatcccaaatactgaaaaacgtgaggaacgctatccggggtaggttccccctgtacaatttaggattcggacataacgtggacttcaactttcttgaggtgatgtccatggagaacaacggacgggctcaaagaatttatgaagatcatgatgcaacccaacaattgcaaggtttttatagccaggtggccaagcctctgctcgtggacgtcgatctccagtatcctcaggacgcggtcctggcactcacgcaaaaccatcacaagcaatactatgaggggtccgaaattgtggtggctggccggatagctgacaacaaacagtcctcatttaaagctgacgttcaggctcatggggagggacaagaattttccattacctgcctcgtcgatgaggaggaaatgaagaaattgcttagggaacggggacacatgctggagaatcatgtagagaggctgtgggcttacctaactattcaggagctgctggccaaaaggatgaaggttgaccgcgaggagagggcgaatcttagtagccaggccttacaaatgtcactggattatgggtttgtcactcctctcacctcgatgagtattcgagggatggcagatcaggatgggcttaaacccactattgataagcccagcgaagactccccacccctcgagatgttgggcccccgcaggacttttgtactttccgctctgcaaccgtcaccaacacattcttccagcaatacccagaggttgcccgaccgtgtgacgggtgttgacacagacccccacttcattattcatgtgccccagaaggaagacactctgtgtttcaacatcaacgaagagccaggggtcatcctttctttggtccaagatcccaatactggcttttcagtgaatggccagcttattgggaataaagcaagatcacctggacagcacgatgggacttacttcggacgcctcggaatcgctaatcccgccactgacttccaacttgaagtcaccccccagaatattactcttaatcctggttttgggggcccagtgttctcctggagggatcaggctgtgctgagacaggacggagttgtggttaccatcaacaaaaaacggaacctggtagtctctgtagatgatggaggaacatttgaagttgtgctccaccgcgtttggaaagggtcctctgtgcaccaagactttctcggattctatgttctggactcgcatagaatgtcagcccggacacacggcttgctggggcaattctttcaccctattggcttcgaagtgagcgacatccaccccggtagcgaccctacaaagcccgatgccaccatggtggttagaaaccgaagacttacagttactagaggcttacagaaagattactccaaggacccctggcacggtgccgaggtgagctgttggttcatccataacaatggggccgggttaatagacggcgcctacactgattatatagtgcccgatattttttag

SEQ ID NO: 126623 - DNA, 2310 bp, Artificial Sequence
  derived and/or modified sequence
atggagcagttcaccatccacctgaccgtgaacccccagagcaaggtcacgtttcagttgacctacgaagaggtgctcaaaaggaatcacatgcagtacgaaattgtgatcaaggttaaacctaaacagctagtgcaccacttcgagattgacgtggacatctttgagccccaggggatttccaagttggacgcgcaagcctcattcctcccaaaggagctagctgcccagacaataaagaaaagtttttccgggaagaaaggccacgtgctgtttcggcccaccgtatctcagcagcagtcatgccccacatgctcaaccagcttgctgaatggacacttcaaggttacctatgatgtcagtcgagataagatttgtgatctgctggttgccaataatcacttcgcccactttttcgcccctcagaatctgacaaatatgaataagaacgtggtgttcgtcatagacatttccgggagcatgaggggccagaaagtgaaacaaaccaaagaggcgttgctgaaaattctgggggacatgcaacccggcgactatttcgacctggtgctcttcggaacaagggttcagtcctggaaaggttctcttgtccaggcaagcgaggctaacctgcaagcagcgcaagacttcgtgcggggttttagtctagacgaggccacaaatttaaacggaggcctgctgaggggaatcgagattttgaaccaggtccaggaatcactccctgaactgtctaaccatgcctcgatacttataatgctaactgatggggaccccactgaaggagtaacagatagaagtcagatcctaaagaacgttcgtaatgctattcgcggaaggtttccactttataacttggggttcgggcacaatgtcgacttcaatttcctggaggttatgtcaatggaaaataacggaagggcccaaagaatttacgaagatcacgatgctacccagcagctgcaaggattttactcccaggttgcaaaacccctcttggtggatgttgatctgcagtatcctcaggatgcagtattggccttaacccagaatcaccataagcagtattacgagggatcggagatcgtagtggccggccgcatcgcagataacaaacaatccagttttaaggcggacgtccaggcacacggagagggtcaggaattcagcataacgtgtctcgtggacgaagaggagatgaagaagttgctgcgggaaagaggtcatatgctggagaaccacgtagaacgactttgggcttacctgacaatccaggaactgctggccaaacgaatgaaggtcgaccgcgaggagcgtgcaaacttgagcagccaagccctgcaaatgtccctcgactacggattcgtgacccctttaacgtcaatgtctatcagaggcatggctgatcaggatgggctcaagcccactatcgataaaccctccgaggattctcctcccttggagatgctcggccctcgccgcaccttcgtgctttcagctctgcagccaagtccaacccactcttctagcaacacccagaggctgcccgatcgtgtgacaggagtggacacggatcctcattttatcattcacgtaccacagaaggaggacaccttgtgtttcaatattaatgaagaacctggggtgatactgagcttggtgcaagatccaaatactggattttctgtgaatggacaattgatcgggaataaggctagatcccctggacaacacgatggaacctacttcggccggctgggcattgctaatccggccacagattttcaacttgaggtcaccccacagaacattaccctgaatcctggctttggcgggccagtgttcagctggcgcgaccaggccgtcctgcgacaggatggagtagtcgtcacaattaataaaaagagaaatctggtcgtctcggtggacgatgggggcacctttgaggtcgtgctgcaccgcgtgtggaaaggctcttcagtgcatcaagatttcttgggtttttacgttctggacagccatcgcatgagcgctagaacgcacggactgttggggcagttttttcaccccattggcttcgaagtttcagatatccacccgggtagcgaccccaccaaaccagatgccaccatggttgtgaggaatcgaagacttacagttaccaggggcctgcagaaggactactcaaaagatccgtggcatggtgcagaggtctcttgctggttcatccataataatggtgccggccttatagacggtgcctatacggactatattgtgcccgacatcttctag

SEQ ID NO: 126624 - DNA, 1938 bp, Artificial Sequence
  derived and/or modified sequence
atggacggcgccatgggcccccggggcctgctgctgtgcatgtacctggttagtctgctgatcttgcaagcaatgcccgccctagggtccgccacaggccggagcaaatcgtcggagaagcggcaggcagtggacacggcggtggatggggtatttatacgcagcctgaaggtcaactgtaaagtgacgtccaggttcgctcattatgtggtaacgtctcaggtcgttaacacagctaacgaggcccgcgaggtcgctttcgacctggagattcctaagactgcctttatctctgacttcgccgtgacagctgatggaaacgcttttatcggggatatcaaagacaaagtcacagcctggaaacagtataggaaggccgccatatctggagagaacgctggactagtgagggcatctggtcgtacaatggagcagttcactattcacctgacggtgaatcctcagtcgaaggtcacctttcagttgacatacgaggaggttttgaagcgcaaccatatgcagtatgagatcgttataaaagtgaagcccaagcagctggtgcaccatttcgaaatagacgtagatatctttgaaccccaaggaatctctaaactggacgctcaagcatcgttcctgcccaaggaactggccgctcagaccatcaagaaatcctttagtggtaagaagggccatgtgctttttcggcctacagtgtctcagcagcagagctgtccaacttgttccaccagcctgctcaacggccacttcaaggttacttacgatgtctctagagataaaatatgtgaccttctggttgctaacaaccactttgcccatttcttcgcacctcagaacctcaccaatatgaacaaaaatgtggtgttcgtgatcgacataagtggttctatgagaggccagaaggtcaaacagacgaaggaagctctccttaagatactgggggatatgcagcccggggactactttgatctcgtactgtttggtacgcgcgtgcagtcatggaaggggtcattggtgcaggctagcgaggctaacctgcaggccgctcaagactttgttcgcggattctctctggacgaggccacaaacctcaacggcgggcttctaaggggcatcgaaatcttgaatcaggttcaggaatcacttcccgagttgtcaaaccatgccagcatactgatcatgctcacagatggagatcccacggagggagttacggataggtcccagattcttaagaacgtacggaacgccatccgtggaaggttcccactgtacaatctaggatttggccacaatgtcgatttcaatttcctggaggtcatgtccatggaaaataatggccgggcacagaggatctacgaggatcacgatgctactcaacagttgcagggattctactcccaggtggctaagcctctgttggtggacgtggacctacagtatcctcaggatgcggtgctcgcactgactcagaatcaccacaaacagtactatgaggggagcgagatcgttgttgccggcagaatcgccgataataagcagagctcgtttaaagctgacgttcaggcgcatggcgagggtcaagaattttctataacctgcttggtcgacgaggaggagatgaaaaaattgcttcgagaaagggggcacatgttggagaaccacgtcgagcggctttgggcttacctcactatacaggagctacttgcaaaacggatgaaagtggacagggaggaacgtgctaatctttccagccaggcactgcagatgagcctggactatggctttgttacaccattaacctccatgagcattcgagggatggccgatcaggatggcctcaagccaaccattgacaagccaagtctgcatcacccacgagcccccgagcggggccacccagtcctacaacaccagtag

SEQ ID NO: 126625 - DNA, 2736 bp, Artificial Sequence
  derived and/or modified sequence
atggatggagccatgggaccacggggtctgcttctatgcatgtacctggtgtcactcctgattctacaggctatgccagctctggggtctgccacaggaagatcaaaatcatccgagaaacgccaggccgtggacactgccgtggatggagtgttcattaggtcgctgaaggttaattgtaaagtcacttctagatttgcccactacgtggtaaccagtcaggtggtgaacactgccaacgaggcgagagaggtggcattcgacctggagatcccaaagactgcttttatatccgatttcgcagttaccgccgatggcaacgcctttattggcgacataaaagacaaggttaccgcgtggaagcagtatagaaaagccgctatcagcggagagaacgccggactcgtgagagcttctggcagaacgatggaacagttcactattcatctgaccgttaacccccagtcgaaagtgactttccagttgacatacgaagaggtactgaagagaaaccatatgcaatacgagatcgttataaaggtcaagcctaagcagctagtgcaccatttcgagatagatgtggacattttcgaaccccagggcatctctaagctcgacgcacaggcctctttcctgcccaaggaactcgcagcacagactattaagaagtctttctctggaaagaaggggcatgttttgtttagaccaaccgttagccagcaacagagctgtcccacatgtagtacctcactgctgaatgggcactttaaagttacatatgatgtatctcgagacaagatttgtgatttacttgtggccaataatcattttgcgcatttcttcgccccacagaacctgaccaacatgaataaaaacgtggtcttcgtaattgatatctcggggtctatgaggggccaaaaagtgaaacagactaaagaagctctgctgaaaatcctgggtgatatgcagcctggcgattattttgacctggtcctgttcggaactagagtccagagctggaagggttccttagtgcaggccagcgaggctaacttacaggccgctcaggacttcgtccgcggtttcagtctggacgaggcaacgaacctgaatggcggtttactccgagggatcgagattctgaatcaggtacaggagtctttgcccgagctcagcaaccatgcatcaattctgatcatgcttacggatggcgatcccactgagggagtgaccgatcggagccaaattctcaagaatgttcggaatgcgatacggggaaggtttcccctctataatctcggcttcggccacaacgtggatttcaacttcctcgaagttatgtccatggaaaacaatggcagagcgcaacgaatttatgaggatcatgacgccacccagcaactgcagggtttttatagccaggtggccaagcccttacttgttgacgtggaccttcagtatcctcaggatgccgttctggctttaactcagaaccaccacaagcaatattacgaggggtccgagatcgtcgtagccggtcgcattgctgacaacaagcaatcatcctttaaagctgatgtgcaggcgcacggggagggccaggaattctccataacctgcttggtcgacgaagaagaaatgaagaagctcctgagagaaagggggcacatgcttgaaaatcacgttgagaggctatgggcctacctaaccatccaggaactcctggcaaagaggatgaaggtggacagggaggaacgcgcaaacctgagttcacaggctctgcagatgtctctggactatggctttgtgacgcccctgacaagcatgtctattagaggtatggctgaccaggacggacttaaaccaaccatcgataagcctagcgaggatagccctcctcttgaaatgctgggccctcgcaggacattcgtactaagcgcactgcagccctcacctacacactccagttccaatacgcaaagactgcccgacagagtcacaggagttgatacagatcctcactttatcatccacgttccacagaaagaggacaccctctgtttcaacatcaatgaagagcctggagtgattctgtccctcgtgcaagatcccaacaccggttttagtgtaaatgggcaactgataggcaataaggcacgtagcccgggacagcatgacgggacctattttggcaggctcggcattgctaacccagcaaccgattttcagctggaagtcacaccacagaacatcactttgaatcctggatttggaggtccagtgttctcttggcgtgaccaggctgtcctgaggcaggacggagtcgtagtgactatcaacaaaaaaagaaatctggtagtgtcggtggatgatggcggtacttttgaagtggtccttcaccgagtttggaagggttccagcgtgcatcaggattttctgggcttctacgtgctggacagtcacagaatgtctgccaggacccacggactgttagggcagttttttcatcccatcggctttgaagtctccgacatacacccagggtcggatccaaccaagccagacgccaccatggttgtgaggaatcgaaggcttactgtaacaagggggctgcagaaagactacagcaaggatccctggcatggcgctgaagtttcatgttggttcattcacaataatggggctggactgatcgatggggcttacaccgactacatcgttcccgacattttctag

SEQ ID NO: 126626 - DNA, 1872 bp, Artificial Sequence
  derived and/or modified sequence
atgaacaagaatgtcgtcttcgttatcgatatttcaggctccatgagaggccaaaaagtaaaacagacaaaggaagcccttctgaaaatcctcggagacatgcagccaggagattattttgatctggtgctcttcggaacaagggtgcaaagctggaagggttctttggtccaggcttcggaagcaaacctgcaggccgcacaggactttgtgcggggtttcagccttgatgaagcaaccaacctgaatgggggattattacggggaatcgagattttgaaccaagtgcaggagtcgctcccagaattgagcaatcacgctagcatcctcattatgctgacagacggcgatcctaccgagggggtaaccgataggagtcagattctcaagaatgtacgaaacgccatcagaggtcgcttcccgctgtataatctgggctttggacacaacgtagattttaattttttagaggtgatgagcatggaaaataatggacgcgcacagagaatatatgaagatcatgatgcaacccaacagcttcaaggcttttactcgcaagtagccaagccactgctggttgatgtggaccttcagtaccctcaagacgctgtgctggctctcacacagaatcatcataagcaatactacgaaggtagcgagatcgtggttgcaggccgaatcgctgacaataagcagagttcattcaaggcagacgtccaggcccacggtgaaggccaagagtttagcatcacctgcttagtcgatgaggaagaaatgaagaagttattaagagagcggggtcatatgctcgaaaatcatgtggagaggctgtgggcatacttaactatccaagagctgctcgctaagaggatgaaagtggatagggaagaaagggccaacctgtcatctcaggccctacagatgtctctggattacggctttgtcacgccactgacgtccatgagcattagaggaatggccgatcaggatgggctgaagcccactattgacaaaccttctgaggacagtcctcctcttgagatgttggggccaaggcggactttcgtcctgagcgccctgcagccctcccctactcacagttcctcaaatacacagcgtctgcccgaccgcgtaactggggtggataccgatccacattttatcattcatgtgcctcagaaagaggataccctgtgctttaatattaatgaggagcctggtgtgattctctcattagtgcaggatcctaatacgggcttcagtgtgaatggccaactcatagggaataaggcgcgtagcccaggccagcacgacggtacctacttcggaaggctgggaatcgccaacccagcaaccgatttccagcttgaagtcactcctcagaacattactcttaatccaggctttggcggtccagtcttttcctggcgtgaccaggccgtgctgaggcaagacggagtggtggtgactatcaacaaaaaacgtaatctcgttgtttcggtggatgatggcggtacttttgaggtggttctgcaccgggtctggaaggggagcagcgtacatcaggacttcctgggcttctatgtgctggatagccatagaatgtccgcacgaacgcatgggctgttaggccagttctttcaccctattgggtttgaggtgagcgacatccatccgggatccgaccctaccaagccagacgcaaccatggttgtcagaaatcgccgattgaccgtaacccgtggcctgcagaaagattattctaaggatccttggcacggcgctgaggtatcttgttggttcatccacaacaatggcgcaggtttgattgacggtgcgtatacagattacatcgtacctgatatcttttag

SEQ ID NO: 126627 - DNA, 2310 bp, Artificial Sequence
  derived and/or modified sequence
atggaacaattcactatccatcttactgttaaccctcaatccaaagttacttttcagctgacttacgaggaggttctgaagaggaatcacatgcagtatgaaattgtgatcaaggttaaacccaaacagttagtgcaccactttgagatagacgttgacatcttcgaaccgcagggaatatccaaactcgatgcccaagcgagctttctgcctaaagagctggctgcccagaccatcaaaaagtctttttctggcaaaaagggccatgtgctttttcggccaactgtctcacagcaacagtcatgccctacatgcagcacttctcttttaaacggtcactttaaagtcacctacgatgtgagccgggataagatttgcgatctgctggtggccaacaaccacttcgcgcatttcttcgcaccgcagaaccttactaacatgaacaaaaatgtagtctttgttatcgatatctccggtagtatgcgaggccagaaggtgaagcagaccaaggaggctctgttaaagatcctcggtgacatgcaaccaggcgactatttcgaccttgtcctgttcgggacccgcgtacagtcttggaaggggtcccttgtccaggcatcagaggccaatttgcaggctgcgcaggacttcgttcggggatttagcctcgacgaagccacaaacttaaacggaggcctgttgaggggaatagagattctcaaccaggtgcaggagagtctgccagagctgtcgaatcacgcaagcatcctcatcatgttaacggatggcgatccaaccgagggagtgacagacagatcccaaatcctaaagaacgttcggaacgctataaggggaagattccctttgtacaacctagggtttgggcataacgtggacttcaactttctggaggtcatgtcaatggagaataatggacgtgctcagcgcatatatgaggatcatgatgcaactcagcagctgcaggggttttattctcaggtggccaagcccctgttggtggacgtggaccttcagtaccctcaggacgccgtgctagcactcactcagaaccatcacaagcaatattacgagggaagtgaaatagtggtcgccggtcgcattgcagataataaacagtcgtcattcaaagcggacgtgcaggcccacggcgaagggcaggagttctccatcacttgcctagtcgacgaagaggaaatgaaaaagcttttgcgggaacgaggccacatgctcgagaatcatgttgagagactgtgggcctacctgaccatccaggagctcctggctaagcgcatgaaagtagatcgggaggagagggccaatctgtcaagccaagcattacagatgtccttggactacggatttgttacccccctcacaagcatgagtattcgaggcatggcggaccaggacggtctgaagccaacaattgataaacccagcgaagactcccctccccttgagatgctcggccctaggcggacctttgtgttgtctgcattgcaaccttctccaacacactcttcttcaaatacacagcgactccccgatcgagttaccggggtggataccgatccccatttcattatacacgttccacaaaaagaggatacattatgtttcaacatcaatgaagagccaggcgtgatcctgtccctcgtccaggaccccaacactggtttttcggtgaatggccagctgattggaaacaaagccagaagcccgggtcaacacgacggaacctacttcgggcgactcggaatcgccaaccccgctactgatttccaattagaagtgactcctcagaatataacactgaatcctgggttcggcggtcctgtgttctcttggagggaccaggcagtattgagacaggatggcgtggtggtgacaatcaacaagaaacgtaatctcgtcgtgtctgtggacgatggcggaacatttgaggtggttctgcacagagtgtggaagggatcaagcgtgcatcaggattttctggggttttacgtccttgactcccaccgcatgtctgccaggactcacgggctgctgggccagtttttccacccaatcggcttcgaagtgtcagatattcatcctggctctgatcctactaaacctgatgcaactatggtagtaagaaatcggaggctgaccgttactcggggactgcagaaagactactctaaggacccatggcacggagccgaggtgtcctgctggtttattcataataatggagcaggtctcatagacggggcttatactgattatatagtgcctgacattttttag

SEQ ID NO: 126628 - DNA, 1938 bp, Artificial Sequence
  derived and/or modified sequence
atggatggcgcaatgggccctagggggctgctactgtgtatgtacttagtctcactgctgatccttcaggccatgcccgctctaggcagtgcgacaggtaggagcaaatcgtcggagaagaggcaggctgtggataccgccgtggacggtgtcttcatcagaagtcttaaggttaactgtaaagtaacatccagattcgcacactacgtggttacgagtcaagtcgtgaacactgcaaacgaagccagagaggtggcctttgatttagaaatcccgaaaactgcctttatttctgacttcgctgtgaccgcagacggcaatgccttcattggcgatattaaggataaggtgactgcctggaagcaatatcggaaagccgctatttccggtgagaacgcaggactggtacgggcatcaggtagaacaatggagcaatttactattcacttgaccgtcaacccccagtctaaagtgacattccaactgacatacgaggaagtgcttaaacggaaccacatgcagtatgagatcgtgatcaaagtcaagcccaaacaactggtccatcatttcgagatcgacgtcgacatttttgaaccacagggaatctccaagttggacgcccaggcgtcttttctgcctaaggagctcgccgcacagacaattaagaagtcgttcagcggcaagaaaggacacgtattgttcagaccgacggtctcccagcagcagtcgtgcccgacttgtagtacgtctcttcttaatgggcacttcaaggtgacatacgatgtgagtagagacaaaatctgtgatctgctcgttgcgaacaaccactttgctcacttcttcgcgcctcagaatttgacaaacatgaataaaaatgttgtcttcgtaattgacatttccggcagcatgcgtgggcagaaggtcaagcagaccaaagaggccctcttgaagatcctcggcgatatgcaacccggagattattttgacctggtgctatttggcacccgggtgcagtcttggaaaggatctctggtgcaggcctctgaagctaacttgcaggcagcacaggactttgtgaggggcttttccctggacgaagctactaacttaaacggcggactgctgcggggtatcgagatcctaaaccaggtgcaagagtcactcccggaactctcgaaccatgcgagtatcctgataatgttgacagatggagaccctacagagggcgtcaccgacagatctcagatcttaaaaaatgttaggaacgccatccgcggtcgattccctttgtataaccttgggttcgggcacaacgtagattttaattttctagaagtcatgagtatggagaataacggtagagctcagcgaatttacgaggatcacgacgctacccaacaattacagggtttctactcgcaagtggcaaagcccttgctcgtggacgtggacctccagtatccgcaggatgctgtgttagctttgacccaaaaccaccacaaacagtattatgaaggctccgagatagtggtggctgggcgtattgccgataacaaacaatcctcttttaaggcggacgtccaggcacatggagagggtcaggagttctctatcacatgcttggttgatgaggaagagatgaaaaaacttcttcgcgaaagaggccatatgctcgaaaaccacgtggagaggttgtgggcttatctgacaattcaggaattgctggctaagcggatgaaggtggaccgggaggagcgcgctaatttgtcgagccaggcactgcagatgagtctcgactacggctttgtcacccctctgacatccatgtcaatccgtggaatggctgaccaagacgggctcaaaccaaccattgacaaacccagcttgcatcacccaagggcacctgaacgtggtcatccagtccttcagcaccaatag

SEQ ID NO: 126629 - DNA, 2736 bp, Artificial Sequence
  derived and/or modified sequence
atggacggcgccatgggccccagaggcctgctgctgtgcatgtacctggtgagcctgctgatcctgcaggccatgcccgccctgggcagcgccaccggcagaagcaagagcagcgagaagagacaggccgtggacaccgccgtggacggcgtgttcatcagaagcctgaaggtgaactgcaaggtgaccagcagattcgcccactacgtggtgaccagccaggtggtgaacaccgccaacgaggccagagaggtggccttcgacctggagatccccaagaccgccttcatcagcgacttcgccgtgaccgccgacggcaacgccttcatcggcgacatcaaggacaaggtgaccgcctggaagcagtacagaaaggccgccatcagcggcgagaacgccggcctggtgagagccagcggcagaaccatggagcagttcaccatccacctgaccgtgaacccccagagcaaggtgaccttccagctgacctacgaggaggtgctgaagagaaaccacatgcagtacgagatcgtgatcaaggtgaagcccaagcagctggtgcaccacttcgagatcgacgtggacatcttcgagccccagggcatcagcaagctggacgcccaggccagcttcctgcccaaggagctggccgcccagaccatcaagaagagcttcagcggcaagaagggccacgtgctgttcagacccaccgtgagccagcagcagagctgccccacctgcagcaccagcctgctgaacggccacttcaaggtgacctacgacgtgagcagagacaagatctgcgacctgctggtggccaacaaccacttcgcccacttcttcgccccccagaacctgaccaacatgaacaagaacgtggtgttcgtgatcgacatcagcggcagcatgagaggccagaaggtgaagcagaccaaggaggccctgctgaagatcctgggcgacatgcagcccggcgactacttcgacctggtgctgttcggcaccagagtgcagagctggaagggcagcctggtgcaggccagcgaggccaacctgcaggccgcccaggacttcgtgagaggcttcagcctggacgaggccaccaacctgaacggcggcctgctgagaggcatcgagatcctgaaccaggtgcaggagagcctgcccgagctgagcaaccacgccagcatcctgatcatgctgaccgacggcgaccccaccgagggcgtgaccgacagaagccagatcctgaagaacgtgagaaacgccatcagaggcagattccccctgtacaacctgggcttcggccacaacgtggacttcaacttcctggaggtgatgagcatggagaacaacggcagagcccagagaatctacgaggaccacgacgccacccagcagctgcagggcttctacagccaggtggccaagcccctgctggtggacgtggacctgcagtacccccaggacgccgtgctggccctgacccagaaccaccacaagcagtactacgagggcagcgagatcgtggtggccggcagaatcgccgacaacaagcagagcagcttcaaggccgacgtgcaggcccacggcgagggccaggagttcagcatcacctgcctggtggacgaggaggagatgaagaagctgctgagagagagaggccacatgctggagaaccacgtggagagactgtgggcctacctgaccatccaggagctgctggccaagagaatgaaggtggacagagaggagagagccaacctgagcagccaggccctgcagatgagcctggactacggcttcgtgacccccctgaccagcatgagcatcagaggcatggccgaccaggacggcctgaagcccaccatcgacaagcccagcgaggacagcccccccctggagatgctgggccccagaagaaccttcgtgctgagcgccctgcagcccagccccacccacagcagcagcaacacccagagactgcccgacagagtgaccggcgtggacaccgacccccacttcatcatccacgtgccccagaaggaggacaccctgtgcttcaacatcaacgaggagcccggcgtgatcctgagcctggtgcaggaccccaacaccggcttcagcgtgaacggccagctgatcggcaacaaggccagaagccccggccagcacgacggcacctacttcggcagactgggcatcgccaaccccgccaccgacttccagctggaggtgaccccccagaacatcaccctgaaccccggcttcggcggccccgtgttcagctggagagaccaggccgtgctgagacaggacggcgtggtggtgaccatcaacaagaagagaaacctggtggtgagcgtggacgacggcggcaccttcgaggtggtgctgcacagagtgtggaagggcagcagcgtgcaccaggacttcctgggcttctacgtgctggacagccacagaatgagcgccagaacccacggcctgctgggccagttcttccaccccatcggcttcgaggtgagcgacatccaccccggcagcgaccccaccaagcccgacgccaccatggtggtgagaaacagaagactgaccgtgaccagaggcctgcagaaggactacagcaaggacccctggcacggcgccgaggtgagctgctggttcatccacaacaacggcgccggcctgatcgacggcgcctacaccgactacatcgtgcccgacatcttctag

SEQ ID NO: 126630 - DNA, 1872 bp, Artificial Sequence
  derived and/or modified sequence
atgaacaagaacgtggtgttcgtgatcgacatcagcggcagcatgagaggccagaaggtgaagcagaccaaggaggccctgctgaagatcctgggcgacatgcagcccggcgactacttcgacctggtgctgttcggcaccagagtgcagagctggaagggcagcctggtgcaggccagcgaggccaacctgcaggccgcccaggacttcgtgagaggcttcagcctggacgaggccaccaacctgaacggcggcctgctgagaggcatcgagatcctgaaccaggtgcaggagagcctgcccgagctgagcaaccacgccagcatcctgatcatgctgaccgacggcgaccccaccgagggcgtgaccgacagaagccagatcctgaagaacgtgagaaacgccatcagaggcagattccccctgtacaacctgggcttcggccacaacgtggacttcaacttcctggaggtgatgagcatggagaacaacggcagagcccagagaatctacgaggaccacgacgccacccagcagctgcagggcttctacagccaggtggccaagcccctgctggtggacgtggacctgcagtacccccaggacgccgtgctggccctgacccagaaccaccacaagcagtactacgagggcagcgagatcgtggtggccggcagaatcgccgacaacaagcagagcagcttcaaggccgacgtgcaggcccacggcgagggccaggagttcagcatcacctgcctggtggacgaggaggagatgaagaagctgctgagagagagaggccacatgctggagaaccacgtggagagactgtgggcctacctgaccatccaggagctgctggccaagagaatgaaggtggacagagaggagagagccaacctgagcagccaggccctgcagatgagcctggactacggcttcgtgacccccctgaccagcatgagcatcagaggcatggccgaccaggacggcctgaagcccaccatcgacaagcccagcgaggacagcccccccctggagatgctgggccccagaagaaccttcgtgctgagcgccctgcagcccagccccacccacagcagcagcaacacccagagactgcccgacagagtgaccggcgtggacaccgacccccacttcatcatccacgtgccccagaaggaggacaccctgtgcttcaacatcaacgaggagcccggcgtgatcctgagcctggtgcaggaccccaacaccggcttcagcgtgaacggccagctgatcggcaacaaggccagaagccccggccagcacgacggcacctacttcggcagactgggcatcgccaaccccgccaccgacttccagctggaggtgaccccccagaacatcaccctgaaccccggcttcggcggccccgtgttcagctggagagaccaggccgtgctgagacaggacggcgtggtggtgaccatcaacaagaagagaaacctggtggtgagcgtggacgacggcggcaccttcgaggtggtgctgcacagagtgtggaagggcagcagcgtgcaccaggacttcctgggcttctacgtgctggacagccacagaatgagcgccagaacccacggcctgctgggccagttcttccaccccatcggcttcgaggtgagcgacatccaccccggcagcgaccccaccaagcccgacgccaccatggtggtgagaaacagaagactgaccgtgaccagaggcctgcagaaggactacagcaaggacccctggcacggcgccgaggtgagctgctggttcatccacaacaacggcgccggcctgatcgacggcgcctacaccgactacatcgtgcccgacatcttctag

SEQ ID NO: 126631 - DNA, 2310 bp, Artificial Sequence
  derived and/or modified sequence
atggagcagttcaccatccacctgaccgtgaacccccagagcaaggtgaccttccagctgacctacgaggaggtgctgaagagaaaccacatgcagtacgagatcgtgatcaaggtgaagcccaagcagctggtgcaccacttcgagatcgacgtggacatcttcgagccccagggcatcagcaagctggacgcccaggccagcttcctgcccaaggagctggccgcccagaccatcaagaagagcttcagcggcaagaagggccacgtgctgttcagacccaccgtgagccagcagcagagctgccccacctgcagcaccagcctgctgaacggccacttcaaggtgacctacgacgtgagcagagacaagatctgcgacctgctggtggccaacaaccacttcgcccacttcttcgccccccagaacctgaccaacatgaacaagaacgtggtgttcgtgatcgacatcagcggcagcatgagaggccagaaggtgaagcagaccaaggaggccctgctgaagatcctgggcgacatgcagcccggcgactacttcgacctggtgctgttcggcaccagagtgcagagctggaagggcagcctggtgcaggccagcgaggccaacctgcaggccgcccaggacttcgtgagaggcttcagcctggacgaggccaccaacctgaacggcggcctgctgagaggcatcgagatcctgaaccaggtgcaggagagcctgcccgagctgagcaaccacgccagcatcctgatcatgctgaccgacggcgaccccaccgagggcgtgaccgacagaagccagatcctgaagaacgtgagaaacgccatcagaggcagattccccctgtacaacctgggcttcggccacaacgtggacttcaacttcctggaggtgatgagcatggagaacaacggcagagcccagagaatctacgaggaccacgacgccacccagcagctgcagggcttctacagccaggtggccaagcccctgctggtggacgtggacctgcagtacccccaggacgccgtgctggccctgacccagaaccaccacaagcagtactacgagggcagcgagatcgtggtggccggcagaatcgccgacaacaagcagagcagcttcaaggccgacgtgcaggcccacggcgagggccaggagttcagcatcacctgcctggtggacgaggaggagatgaagaagctgctgagagagagaggccacatgctggagaaccacgtggagagactgtgggcctacctgaccatccaggagctgctggccaagagaatgaaggtggacagagaggagagagccaacctgagcagccaggccctgcagatgagcctggactacggcttcgtgacccccctgaccagcatgagcatcagaggcatggccgaccaggacggcctgaagcccaccatcgacaagcccagcgaggacagcccccccctggagatgctgggccccagaagaaccttcgtgctgagcgccctgcagcccagccccacccacagcagcagcaacacccagagactgcccgacagagtgaccggcgtggacaccgacccccacttcatcatccacgtgccccagaaggaggacaccctgtgcttcaacatcaacgaggagcccggcgtgatcctgagcctggtgcaggaccccaacaccggcttcagcgtgaacggccagctgatcggcaacaaggccagaagccccggccagcacgacggcacctacttcggcagactgggcatcgccaaccccgccaccgacttccagctggaggtgaccccccagaacatcaccctgaaccccggcttcggcggccccgtgttcagctggagagaccaggccgtgctgagacaggacggcgtggtggtgaccatcaacaagaagagaaacctggtggtgagcgtggacgacggcggcaccttcgaggtggtgctgcacagagtgtggaagggcagcagcgtgcaccaggacttcctgggcttctacgtgctggacagccacagaatgagcgccagaacccacggcctgctgggccagttcttccaccccatcggcttcgaggtgagcgacatccaccccggcagcgaccccaccaagcccgacgccaccatggtggtgagaaacagaagactgaccgtgaccagaggcctgcagaaggactacagcaaggacccctggcacggcgccgaggtgagctgctggttcatccacaacaacggcgccggcctgatcgacggcgcctacaccgactacatcgtgcccgacatcttctag

SEQ ID NO: 126632 - DNA, 1938 bp, Artificial Sequence
  derived and/or modified sequence
atggacggcgccatgggccccagaggcctgctgctgtgcatgtacctggtgagcctgctgatcctgcaggccatgcccgccctgggcagcgccaccggcagaagcaagagcagcgagaagagacaggccgtggacaccgccgtggacggcgtgttcatcagaagcctgaaggtgaactgcaaggtgaccagcagattcgcccactacgtggtgaccagccaggtggtgaacaccgccaacgaggccagagaggtggccttcgacctggagatccccaagaccgccttcatcagcgacttcgccgtgaccgccgacggcaacgccttcatcggcgacatcaaggacaaggtgaccgcctggaagcagtacagaaaggccgccatcagcggcgagaacgccggcctggtgagagccagcggcagaaccatggagcagttcaccatccacctgaccgtgaacccccagagcaaggtgaccttccagctgacctacgaggaggtgctgaagagaaaccacatgcagtacgagatcgtgatcaaggtgaagcccaagcagctggtgcaccacttcgagatcgacgtggacatcttcgagccccagggcatcagcaagctggacgcccaggccagcttcctgcccaaggagctggccgcccagaccatcaagaagagcttcagcggcaagaagggccacgtgctgttcagacccaccgtgagccagcagcagagctgccccacctgcagcaccagcctgctgaacggccacttcaaggtgacctacgacgtgagcagagacaagatctgcgacctgctggtggccaacaaccacttcgcccacttcttcgccccccagaacctgaccaacatgaacaagaacgtggtgttcgtgatcgacatcagcggcagcatgagaggccagaaggtgaagcagaccaaggaggccctgctgaagatcctgggcgacatgcagcccggcgactacttcgacctggtgctgttcggcaccagagtgcagagctggaagggcagcctggtgcaggccagcgaggccaacctgcaggccgcccaggacttcgtgagaggcttcagcctggacgaggccaccaacctgaacggcggcctgctgagaggcatcgagatcctgaaccaggtgcaggagagcctgcccgagctgagcaaccacgccagcatcctgatcatgctgaccgacggcgaccccaccgagggcgtgaccgacagaagccagatcctgaagaacgtgagaaacgccatcagaggcagattccccctgtacaacctgggcttcggccacaacgtggacttcaacttcctggaggtgatgagcatggagaacaacggcagagcccagagaatctacgaggaccacgacgccacccagcagctgcagggcttctacagccaggtggccaagcccctgctggtggacgtggacctgcagtacccccaggacgccgtgctggccctgacccagaaccaccacaagcagtactacgagggcagcgagatcgtggtggccggcagaatcgccgacaacaagcagagcagcttcaaggccgacgtgcaggcccacggcgagggccaggagttcagcatcacctgcctggtggacgaggaggagatgaagaagctgctgagagagagaggccacatgctggagaaccacgtggagagactgtgggcctacctgaccatccaggagctgctggccaagagaatgaaggtggacagagaggagagagccaacctgagcagccaggccctgcagatgagcctggactacggcttcgtgacccccctgaccagcatgagcatcagaggcatggccgaccaggacggcctgaagcccaccatcgacaagcccagcctgcaccaccccagagcccccgagagaggccaccccgtgctgcagcaccagtag

SEQ ID NO: 126633 - protein, 946 aa, Artificial Sequence
  derived and/or modified sequence
MKRLTCFFICFFLSEVSGFEIPINGLSEFVDYEDLVELAPGKFQLVAENRRYQRSLPGESEEMMEEVDQVTLYSYKVQSTITSRMATTMIQSKVVNNSPQPQNVVFDVQIPKGAFISNFSMTVDGKTFRSSIKEKTVGRALYAQARAKGKTAGLVRSSALDMENFRTEVNVLPGAKVQFELHYQEVKWRKLGSYEHRIYLQPGRLAKHLEVDVWVIEPQGLRFLHVPDTFEGHFDGVPVISKGQQKAHVSFKPTVAQQRICPNCRETAVDGELVVLYDVKREEKAGELEVFNGYFVHFFAPDNLDPIPKNILFVIDVSGSMWGVKMKQTVEAMKTILDDLRAEDHFSVIDFNQNIRTWRNDLISATKTQVADAKRYIEKIQPSGGTNINEALLRAIFILNEANNLGLLDPNSVSLIILVSDGDPTVGELKLSKIQKNVKENIQDNISLFSLGMGFDVDYDFLKRLSNENHGIAQRIYGNQDTSSQLKKFYNQVSTPLLRNVQFNYPHTSVTDVTQNNFHNYFGGSEIVVAGKFDPAKLDQIESVITATSANTQLVLETLAQMDDLQDFLSKDKHADPDFTRKLWAYLTINQLLAERSLAPTAAAKRRITRSILQMSLDHHIVTPLTSLVIENEAGDERMLADAPPQDPSCCSGALYYGSKVVPDSTPSWANPSPTPVISMLAQGSQVLESTPPPHVMRVENDPHFIIYLPKSQKNICFNIDSEPGKILNLVSDPESGIVVNGQLVGAKKPNNGKLSTYFGKLGFYFQSEDIKIEISTETITLSHGSSTFSLSWSDTAQVTNQRVQISVKKEKVVTITLDKEMSFSVLLHRVWKKHPVNVDFLGIYIPPTNKFSPKAHGLIGQFMQEPKIHIFNERPGKDPEKPEASMEVKGQKLIITRGLQKDYRTDLVFGTDVTCWFVHNSGKGFIDGHYKDYFVPQLYSFLKRP

SEQ ID NO: 126634 - DNA, 2841 bp, Artificial Sequence
  derived and/or modified sequence
atgaagcgcctgacctgttttttcatttgttttttcctgagcgaagtcagcggctttgagatccccataaatggtctatctgagttcgttgactacgaagacctggtcgaattggcgccagggaagtttcaactagttgctgagaaccggcgctaccagagatccttgcctggggagtccgaggaaatgatggaagaggtggaccaggttacattgtatagctacaaagtacaaagtactatcacaagtagaatggccactaccatgatacagtcaaaagtggtgaataactccccccagccacagaatgtggtgtttgatgtgcagataccgaaaggggctttcatatccaacttctcaatgaccgtggatggtaaaaccttccgatcgagcatcaaggagaaaacagtcgggcgtgcactctatgcgcaggcccgcgctaaggggaaaacagctggcctggttcgatccagcgcactggacatggaaaatttccgcaccgaggtgaacgttctgccgggcgccaaggtccaatttgaattgcactatcaggaggtgaagtggcgcaagctgggttcttacgagcaccgtatctacctccagcccgggcggctcgcaaaacatcttgaggtggatgtgtgggtaatagaaccccagggattgaggttccttcatgttccggatactttcgagggccacttcgatggggtgcccgtcatctctaaggggcaacagaaagctcacgtgtcgtttaagcccaccgtcgcccaacagcggatctgccctaattgtagggaaaccgcagtggacggcgagctcgtcgtactttacgacgtgaagcgagaagagaaagcaggcgaactcgaagtctttaacggttatttcgtgcatttttttgccccggataatctcgaccccatcccaaagaatatcttgttcgtgatcgatgtatcaggatccatgtggggcgtgaaaatgaaacagactgtcgaagcaatgaagactattttggacgatctgagggccgaagaccattttagtgtgattgatttcaaccaaaacatccgaacatggcggaacgaccttatttctgcaaccaagacacaagtggctgatgcaaagcggtacattgagaaaatacaaccatccggtggcaccaatattaatgaggccctcctgcgggccatatttatcttaaacgaggcaaataatttgggcctattagacccaaacagcgtgtccttaatcattctcgtaagcgacggcgatccaactgtcggggagttgaagctgtctaaaattcagaagaatgtaaaagagaatattcaggataatatctcgttgtttagccttggaatggggtttgatgtagactacgacttcttaaaacggctaagtaatgaaaaccatggtattgctcagcgtatatatggtaatcaggacacttcaagccagctcaagaaattctataaccaggtgtctacaccgctcctgaggaacgtgcagttcaactatccgcacactagcgtgactgatgtgacccaaaataatttccataactattttggaggctccgaaattgttgtggccggaaaatttgatcccgccaagctcgatcagatagagtccgtcatcactgcaacaagcgctaacacgcaacttgtcctggaaaccttggcacagatggacgatttgcaggacttcctctctaaagataagcatgctgacccagatttcacccgcaaactgtgggcgtatcttacaatcaaccagctgctcgcggaaagatccctagctcctacagccgctgccaaacggcggatcacccgatcaatccttcagatgtcccttgatcaccacatcgtaacgcccctgacaagcctagtcatcgagaatgaggcaggggacgagaggatgctggcagatgcccctccgcaagatccttcatgctgtagcggagctctttattatggtagtaaggttgtgcctgatagcacacccagctgggccaacccaagcccaactcctgtgatttcaatgctcgcccagggtagccaggttcttgagtccacccctcctccgcacgtgatgcgagttgaaaacgatccccatttcatcatttatcttcccaagtcccagaaaaatatttgctttaatatcgacagcgaaccaggaaaaattctgaatctggtgtccgacccagagtcaggaatcgtagtgaacggacagttggtaggggcaaagaagccaaacaacggcaagctgtcaacatactttggaaagcttgggttttacttccaaagcgaagatattaaaatcgagatctccacagaaacgatcaccttaagtcatggctccagcactttttcactctcctggtccgacacagcccaggttactaatcagcgagtgcaaatttcggtcaaaaaagagaaggtcgtgacgatcaccctggataaagaaatgtccttctccgtgctgctgcacagagtgtggaaaaagcacccggtgaatgtcgactttctgggaatctatattccacctaccaataagttctctcccaaggcacacggtttgattggacagtttatgcaggagcccaaaattcacatctttaacgagcgtccgggtaaggaccccgaaaaacctgaagccagcatggaagttaagggtcagaaactgatcatcactcgaggcctgcagaaggattacagaactgacctggtgtttggaactgatgtgacttgttggtttgtccataactctgggaaggggtttatcgacggccactataaggattatttcgttccacagctctactctttcttaaagagaccctag

SEQ ID NO: 126635 - DNA, 3193 bp, Artificial Sequence
  derived and/or modified sequence
atttgtcccaattttgaacaaagttagagagttttttcttcttttttcttctttcttaaagcgaactgtactcctctgctgttcctttgaacttggttcagtaggaagaagtgatatcctccccagaccatctgctttggggagcttggcaaaactgtccagcaaaatgaaaagactcacgtgctttttcatctgcttctttctttctgaagtatcaggcttcgaaatccccataaatggactttctgaatttgtagactatgaagatcttgtggaactggccccaggcaaatttcaattggtggcagagaaccggagatatcagagaagccttccaggagaatcggaagaaatgatggaagaggttgatcaagtaactctttatagctataaagtccagtctactattacttctcggatggccaccaccatgatccagagcaaagtggtgaacaattccccgcagcctcagaatgtcgtgtttgatgttcagatccccaaaggagcattcatttccaacttctccatgactgtggacggcaagacatttaggagctctattaaggagaaaactgtgggccgagctctttatgcacaggccagagcaaaaggcaagacggctggcttggtgaggagcagcgctcttgatatggaaaacttcagaacggaagtaaatgtcctcccaggagcaaaggtgcagttcgaacttcactaccaggaggtgaagtggaggaagctgggctcctatgagcacaggatctatctgcaacctggacggctggccaaacacttagaggtagatgtgtgggttatcgaaccacagggactgagatttcttcatgttcccgacacatttgaaggccatttcgatggtgttccggtcatttctaaaggacaacagaaggcgcacgtctccttcaagcccacggtagcacagcagagaatatgccctaactgccgggagactgcggtagatggggaactggtggtgctgtatgacgtgaaaagagaagagaaggctggtgaactggaggtgtttaatggatattttgtccacttctttgctcctgacaacctggacccaattcccaaaaacatcctctttgtcatcgatgtgagtggctccatgtggggagttaaaatgaaacaaactgtggaagcaatgaagaccatattggatgacctcagagcagaagaccatttctctgtgattgatttcaaccagaacattcgaacttggagaaatgatttaatttcagctacaaaaacacaggttgcagatgccaagaggtatattgagaaaatccagcccagtggaggcacaaacatcaacgaagcactcctacgggcaatcttcattttgaatgaagccaataacttgggactgttagaccccaactccgtctcgctgatcattttggtttctgatggagatccaacagtgggcgaactaaaactgtcaaaaattcagaaaaacgttaaggagaacatccaagacaatatctccttgttcagtttgggcatgggatttgatgtggactatgattttttgaagagactgtccaatgaaaaccatggaattgcacaaaggatttatggaaaccaggacacgtcttcccagcttaagaaattctacaaccaggtctccactccattgctccggaatgttcagttcaactatccccatacatcagtcacggacgtcactcaaaacaatttccataactactttggaggctcagagattgtggtggcaggaaaatttgaccctgctaaattggatcaaatagagagcgttatcacggcgacttcggctaacacgcagttagtcttggagaccctggcccagatggacgacttgcaggattttctatcgaaagacaagcatgcagatcccgatttcaccaggaaactgtgggcctatctaaccatcaaccaactgctagctgaacgaagcctggctcctacagctgccgccaagagaagaattacaagatcgatcctgcagatgtctctagaccaccacattgtgactccgctgacctcgctggtgatcgagaacgaggctggggatgagcgcatgctggcggatgccccaccgcaggatccctcctgctgctcaggggccctgtattacggcagcaaagtggttccagattccaccccgtcttgggccaatccttcaccaacgcccgtgatctccatgctggcacaaggatctcaggtgctagagtccacgccacccccacatgtgatgagagttgaaaatgacccacatttcatcatttatctaccaaaaagccaaaagaacatttgtttcaatattgactcagaacctggaaaaatcctcaacctggtttctgacccagaatcaggaattgtagtcaacggtcagcttgttggtgccaagaagcccaacaatggaaaactaagcacctattttggaaaactgggattttatttccaaagtgaagacataaaaatagaaatcagcactgagaccatcaccctgagccatggttctagcacattctccttgtcctggtccgacacggctcaagtcacgaatcagagggtgcagatctcagtgaagaaagaaaaagtggtaactatcaccctggataaagagatgtccttttctgttttacttcatcgtgtttggaagaagcatcccgtcaatgttgactttctgggaatctacataccccctacaaacaagttctcacctaaagcccacggactaataggccagttcatgcaggaaccaaagatacacatcttcaatgagagaccaggaaaggaccctgagaagccagaggccagcatggaagtgaaggggcagaagctgatcatcaccaggggcttacagaaagactacagaacggatctagtgtttggaacggacgttacctgctggtttgtgcacaacagtggaaaaggattcattgacgggcattacaaggattacttcgtgcctcagctctacagctttctcaaacggccttaaaggtttatagtttgggaaattatatatattaatatacatctttcccctgtcacttttgcagatattcttcggtttgaataattaaaatgaaccagatatcagggtggttaattaaaatgaaccagatatcagggtggtttataaagcctgtaaacacacctaagaaaataaacattttacaaatga

SEQ ID NO: 126636 - DNA, 2841 bp, Artificial Sequence
  derived and/or modified sequence
atgaagaggctgacctgcttcttcatctgcttcttcctgtctgaggtgtctggctttgagatccccatcaatggcctgtctgaatttgtggactatgaggacctggtggagctggcccctgggaagttccagctggtggccgagaacagacgctaccagaggagcctgcctggagagagcgaggagatgatggaggaggtggaccaggtgaccctgtacagctacaaggtgcagagcaccatcaccagcaggatggccaccaccatgatccagagcaaggtggtgaacaacagcccccagccccagaatgtggtgtttgatgtgcagatccccaagggggccttcatcagcaacttctccatgacagtggatggcaagaccttccgcagcagcatcaaggagaagacagtgggccgggccctgtatgcccaggcccgggccaagggcaagacagctggcctggtgcgcagcagcgccctggacatggagaacttcagaacagaggtgaatgtgctgcccggggccaaggtgcagtttgagctgcactaccaggaggtgaagtggaggaagctgggcagctatgagcaccgcatctacctgcagcccggccgcctggccaagcacctggaggtggatgtgtgggtgattgagccccagggcctgcgcttcctgcacgtgcctgacacctttgagggccactttgatggagtgcctgtgatcagcaagggccagcagaaggcccacgtgtccttcaagcccaccgtggcccagcagaggatctgccccaactgccgggagacagctgtggatggagagctggtggtgctgtatgatgtgaagcgggaggagaaggccggggagctggaggtgttcaacggctactttgtgcacttctttgccccagacaacctggaccccatccccaagaacatcctgtttgtgattgatgtgtctggctccatgtggggcgtgaagatgaagcagacagtggaggccatgaagaccatcctggatgacctgcgggcagaggaccacttctctgtgattgacttcaaccagaacatccgcacctggagaaatgacctgatcagcgccaccaagacccaggtggctgatgccaagcgctacatcgagaagatccagcccagcggcggcaccaacatcaatgaggccctgctgcgggccatcttcatcctgaatgaggccaacaacctgggcctgctggaccccaacagcgtgtccctcatcatcctggtgtctgatggagaccccaccgtgggggagctgaagctgagcaagatccagaagaatgtgaaggagaacatccaggacaacatcagcctcttcagcctgggcatgggctttgatgtggactatgacttcctgaagaggctgagcaatgaaaaccacggcatcgcccagaggatctacggcaaccaggacaccagcagccagctgaagaagttctacaaccaggtgtccacccccctgctgagaaatgtgcagttcaactacccccacacctctgtgacagatgtgacccagaacaacttccacaactactttggaggcagcgagatcgtggtggccggcaagtttgatcctgccaagctggaccagattgaatctgtcatcacagccaccagcgccaacacccagctggtgctggagaccctggcccagatggatgacctgcaggacttcctgagcaaggacaagcatgctgaccctgacttcaccaggaagctgtgggcctacctgaccatcaaccagctgctggccgagaggagcctggcccccacagctgctgccaagaggcgcatcaccaggagcatcctgcagatgagcctggaccaccacatcgtgacccccctgaccagcctggtgattgaaaatgaggccggagatgagaggatgctggctgatgccccaccccaggaccccagctgctgcagcggggccctgtactacggcagcaaggtggtgcctgacagcacccccagctgggccaaccccagccccacccctgtgatctccatgctggcccagggcagccaggtgctggagagcaccccacctcctcatgtgatgagggtggagaatgacccccacttcatcatctacctgcccaagagccagaagaacatctgcttcaacatcgacagcgagcccgggaagatcctgaacctggtgtctgaccctgagagcggcatcgtggtgaatggccagctggtgggcgccaagaagcccaacaacgggaagctgagcacctactttgggaagctgggcttctacttccagagcgaggacatcaagattgagatcagcacagagaccatcaccctgagccacggcagcagcaccttcagcctgtcctggagcgacacagcccaggtgaccaaccagagggtgcagatctctgtgaagaaggagaaggtggtgaccatcaccctggacaaggagatgtccttctctgtgctgctgcaccgggtgtggaagaagcaccctgtgaatgtggacttcctgggcatctacatcccccccaccaacaagttcagccccaaggcccacggcctcatcggccagttcatgcaggagcccaagatccacatcttcaatgaaagacctgggaaggaccctgagaagccagaggcctccatggaggtgaagggccagaagctgatcatcacccggggcctgcagaaggactacagaacagacctggtgtttggaacagatgtgacctgctggtttgtgcacaacagcggcaagggcttcattgatggccactacaaggactactttgtgccccagctgtacagcttcctgaagaggccctag

SEQ ID NO: 126637 - DNA, 2841 bp, Artificial Sequence
  derived and/or modified sequence
atgaagcggctgacctgcttcttcatctgcttcttcctgagcgaggtgagtgggtttgagatccccattaatgggctttcagaatttgtggattacgaggatttagtagagctcgccccaggcaagttccaactggtcgccgagaaccgcaggtaccaacgctctctaccaggggagtccgaggaaatgatggaggaggtggatcaggttactctttattcctataaagttcaaagcacaattaccagccgcatggccaccacaatgatccagagcaaggtggtcaacaactctcctcagcctcagaatgtggtattcgacgtgcaaatacccaagggcgctttcattagcaatttcagcatgactgtcgacggaaagacattcaggagtagcattaaagaaaaaactgtaggccgagccctttatgctcaggctcgcgccaagggaaaaaccgccggactggtgcgatcatcagctctagatatggaaaatttccgcactgaggtcaacgtacttccaggcgccaaagtgcagtttgagctgcattatcaggaagttaaatggcgcaaacttgggagctacgaacaccgtatctatctgcagcctggcagattagcaaagcacttggaagtggacgtgtgggtgatagagccccaaggtctgcgattcttacacgtgccagacacgttcgaaggacacttcgacggagtgccggttataagcaaagggcagcagaaagcacatgtaagtttcaagccaactgtcgcccaacagaggatctgcccgaattgcagggagaccgcagtcgacggagagctagtagtcctctatgacgtgaaacgagaagaaaaggccggtgagttagaggtgtttaatgggtacttcgtgcactttttcgcccccgataacttagaccccatccctaaaaacatcctgttcgtcattgatgtctccgggtctatgtggggtgtgaaaatgaagcagacagtagaagctatgaagaccatccttgacgatttaagagctgaagaccacttcagcgtaatcgattttaaccagaatatccggacgtggagaaacgacctcatctcagccacaaaaacccaagtcgctgacgctaagaggtatatcgaaaagatacaaccttccggcggtaccaacatcaacgaggcactcctgcgtgctatctttatcctcaacgaggctaataacctgggccttttagatccaaacagtgtgagtctgataatccttgttagtgatggcgaccctaccgtcggagaacttaaactgtcaaagattcagaagaatgtgaaagaaaacattcaggacaacatctctctgttttctttgggtatggggtttgatgtggactacgacttcctcaaacgcctttccaatgagaaccatggcatcgcccagcgaatctacgggaatcaagacacctcttcccaactgaaaaaattctataaccaagtaagcaccccactgctgaggaatgtgcaatttaattacccacatacaagcgtcacagatgtgacccagaataactttcacaattactttggcggttctgaaatcgtggtggctggaaaattcgatcctgccaagctggaccaaattgaatccgttatcacagctactagcgcaaacactcaacttgttctggagaccctggctcaaatggacgacctgcaggattttctctccaaggacaagcatgctgatcccgacttcactcggaagctgtgggcatatctcactatcaatcagctgcttgcagagcgaagcctcgccccaacggccgcggcaaagcggcggataaccagatctatccttcagatgagcttggaccaccatatcgtaaccccacttacgtctcttgttattgagaatgaggcgggagacgagagaatgttagccgacgcaccccctcaggacccatcttgctgcagtggggccctatattatggttcaaaggtggtgccagactcaacaccttcctgggccaatccatcccccacgccagtaataagcatgctagcacagggatcccaggtgcttgagagcacccccccaccacacgttatgcgagtggagaacgatccacattttatcatttatcttcccaagtcccagaagaacatatgttttaacatcgactctgaacccggtaagatactcaaccttgtcagcgatcccgagtccggcatcgtcgtgaacggccagctggtgggcgccaagaaaccaaacaacgggaaactttcgacctacttcggcaagctgggcttttacttccagagcgaggatattaaaattgagatttccaccgagacaattactctgagtcacgggagttcaacattcagcctcagctggagcgatacagctcaagtaactaaccagcgcgtccagatttccgtgaagaaggaaaaggttgtcactataaccctggacaaagagatgtcattttctgttctcctgcatagagtatggaagaaacaccctgtgaatgtagacttcctgggcatctacatcccaccaactaataaattctctcccaaagcacatgggctgattggccagtttatgcaggagcccaaaatccatatctttaacgagcggccagggaaagaccctgagaaacctgaggctagcatggaagtgaagggacaaaagctcatcataacccgcggactgcagaaagactatcggacagacctggtctttggcacggacgtgacttgttggtttgttcacaactcgggcaagggcttcatagatggacactataaagactactttgtccctcagctttactccttcttgaaaaggccctag

SEQ ID NO: 126638 - DNA, 2841 bp, Artificial Sequence
  derived and/or modified sequence
atgaaacggttgacctgtttcttcatttgcttttttctgtccgaagtctcaggttttgaaatccctatcaacggactgagtgaatttgtggactacgaggatcttgtggaactggcgcctggaaaattccagctggtggccgaaaacaggcggtatcagagaagtctgcccggagaatcagaggagatgatggaagaggtggaccaggtgacgctgtactcatacaaggttcagtccaccattacctcccggatggccacaacaatgatccaatccaaggtcgttaacaacagtccacagccccagaatgtggtctttgatgtgcagattccgaagggagcttttatctcaaacttttctatgactgtggatgggaagaccttccgtagctctattaaagaaaaaacagttgggcgagccctctacgcgcaagcacgcgcaaagggaaaaactgcaggactggtgcgcagctctgcgctagatatggaaaatttccgcaccgaggtaaatgtcttacccggtgctaaagtccagtttgaactacattatcaggaggtgaagtggcgaaagctaggcagttacgagcataggatttatctgcaacccggaagactggccaaacatctggaagtcgacgtatgggtgattgaaccccaggggctccgattcttacacgttccggacacatttgagggacatttcgacggagtaccagtaatttctaagggccagcagaaagctcacgtatcatttaagccgacagtcgcacagcagcgaatttgtcctaattgccgtgagaccgcagtcgacggggaattggtcgtgttatacgatgttaagcgcgaagaaaaagctggggagttagaggtttttaatggatatttcgttcatttcttcgcgccagacaatctggatccaatccccaaaaacattttgtttgtgatagatgtcagcggttcgatgtggggggtcaaaatgaaacagactgtggaagctatgaagactatcttggacgaccttcgggcagaggatcatttcagtgttatcgactttaaccaaaacatcagaacatggcgcaatgatctaatcagtgctactaagacacaggtggcagatgccaagagatatatagaaaagatccagccatctgggggtacgaacatcaacgaggcattgctgagggccatctttattctcaatgaagccaacaacctagggcttttagatcctaacagcgtgtcactcatcattttggtgagtgatggcgatcctacagtcggagaactaaagctgtcaaagattcagaagaatgtgaaagagaacatacaagacaatatcagcttattcagcctcggcatggggtttgacgtggactatgactttttgaagaggttatccaatgagaaccatggaattgctcagcgcatttatggaaatcaggatacttcctcacagctgaagaaattctataaccaagtcagtacacctttactgcgcaatgtgcagttcaattatccccatacgtctgtgaccgacgtgacacagaacaattttcataactattttggtgggagcgagattgtcgttgcgggtaagtttgacccggcaaaactcgatcagattgagagtgtcataaccgctactagtgccaacacacaattagttttagagacactggctcagatggacgatctgcaggattttctgtccaaggacaaacacgctgatccggatttcactcgcaagctttgggcttacctcactattaaccagctccttgcagaacgatcactcgctcccaccgctgcagctaagaggagaattacaaggagtatactccagatgagtcttgatcatcatatcgtcacaccactcactagtcttgtgattgaaaatgaggctggcgacgagcgaatgctggccgatgcccctccacaggatccttcctgttgctcaggagcattatattatgggtctaaagtggtccccgatagcacacctagttgggccaaccctagcccaacaccggtgatcagcatgttggcccagggatctcaggtactggagtctacacctccccctcacgtgatgagagtggagaacgatccacacttcatcatatacctcccaaagtctcagaagaatatctgcttcaacatcgatagtgagccagggaagattctcaatttggtgtccgatccggaaagtgggatagtggttaacggccagctggtcggagcaaagaagcctaataatggaaaactcagtacctattttgggaagctcggattttatttccagtccgaagatattaaaattgagatatcaactgagaccatcactctgtctcatgggtcctcgacttttagtctgagctggtctgacactgctcaagttaccaaccagcgcgtgcagatctctgtgaaaaaggagaaagtagtaaccatcaccctggacaaagaaatgtccttcagtgtgctcctgcatcgggtgtggaagaagcacccagtaaatgtggattttctggggatatacattccccctacgaacaagttcagcccgaaagcgcatggactgattggccagttcatgcaggagccaaagatccatatcttcaacgaaagacctgggaaggatcccgagaagcccgaggcttctatggaagttaagggccaaaagctgatcatcaccagaggcttacagaaagactatcgaactgacctggtctttgggactgatgtgacctgttggtttgtccacaacagcggaaagggcttcatagatggtcattataaagactacttcgtcccccaattatacagttttctcaagagaccatag

SEQ ID NO: 126639 - DNA, 2841 bp, Artificial Sequence
  derived and/or modified sequence
atgaagagactgacctgcttcttcatctgcttcttcctgagcgaggtgagcggcttcgagatccccatcaacggcctgagcgagttcgtggactacgaggacctggtggagctggcccccggcaagttccagctggtggccgagaacagaagataccagagaagcctgcccggcgagagcgaggagatgatggaggaggtggaccaggtgaccctgtacagctacaaggtgcagagcaccatcaccagcagaatggccaccaccatgatccagagcaaggtggtgaacaacagcccccagccccagaacgtggtgttcgacgtgcagatccccaagggcgccttcatcagcaacttcagcatgaccgtggacggcaagaccttcagaagcagcatcaaggagaagaccgtgggcagagccctgtacgcccaggccagagccaagggcaagaccgccggcctggtgagaagcagcgccctggacatggagaacttcagaaccgaggtgaacgtgctgcccggcgccaaggtgcagttcgagctgcactaccaggaggtgaagtggagaaagctgggcagctacgagcacagaatctacctgcagcccggcagactggccaagcacctggaggtggacgtgtgggtgatcgagccccagggcctgagattcctgcacgtgcccgacaccttcgagggccacttcgacggcgtgcccgtgatcagcaagggccagcagaaggcccacgtgagcttcaagcccaccgtggcccagcagagaatctgccccaactgcagagagaccgccgtggacggcgagctggtggtgctgtacgacgtgaagagagaggagaaggccggcgagctggaggtgttcaacggctacttcgtgcacttcttcgcccccgacaacctggaccccatccccaagaacatcctgttcgtgatcgacgtgagcggcagcatgtggggcgtgaagatgaagcagaccgtggaggccatgaagaccatcctggacgacctgagagccgaggaccacttcagcgtgatcgacttcaaccagaacatcagaacctggagaaacgacctgatcagcgccaccaagacccaggtggccgacgccaagagatacatcgagaagatccagcccagcggcggcaccaacatcaacgaggccctgctgagagccatcttcatcctgaacgaggccaacaacctgggcctgctggaccccaacagcgtgagcctgatcatcctggtgagcgacggcgaccccaccgtgggcgagctgaagctgagcaagatccagaagaacgtgaaggagaacatccaggacaacatcagcctgttcagcctgggcatgggcttcgacgtggactacgacttcctgaagagactgagcaacgagaaccacggcatcgcccagagaatctacggcaaccaggacaccagcagccagctgaagaagttctacaaccaggtgagcacccccctgctgagaaacgtgcagttcaactacccccacaccagcgtgaccgacgtgacccagaacaacttccacaactacttcggcggcagcgagatcgtggtggccggcaagttcgaccccgccaagctggaccagatcgagagcgtgatcaccgccaccagcgccaacacccagctggtgctggagaccctggcccagatggacgacctgcaggacttcctgagcaaggacaagcacgccgaccccgacttcaccagaaagctgtgggcctacctgaccatcaaccagctgctggccgagagaagcctggcccccaccgccgccgccaagagaagaatcaccagaagcatcctgcagatgagcctggaccaccacatcgtgacccccctgaccagcctggtgatcgagaacgaggccggcgacgagagaatgctggccgacgcccccccccaggaccccagctgctgcagcggcgccctgtactacggcagcaaggtggtgcccgacagcacccccagctgggccaaccccagccccacccccgtgatcagcatgctggcccagggcagccaggtgctggagagcaccccccccccccacgtgatgagagtggagaacgacccccacttcatcatctacctgcccaagagccagaagaacatctgcttcaacatcgacagcgagcccggcaagatcctgaacctggtgagcgaccccgagagcggcatcgtggtgaacggccagctggtgggcgccaagaagcccaacaacggcaagctgagcacctacttcggcaagctgggcttctacttccagagcgaggacatcaagatcgagatcagcaccgagaccatcaccctgagccacggcagcagcaccttcagcctgagctggagcgacaccgcccaggtgaccaaccagagagtgcagatcagcgtgaagaaggagaaggtggtgaccatcaccctggacaaggagatgagcttcagcgtgctgctgcacagagtgtggaagaagcaccccgtgaacgtggacttcctgggcatctacatcccccccaccaacaagttcagccccaaggcccacggcctgatcggccagttcatgcaggagcccaagatccacatcttcaacgagagacccggcaaggaccccgagaagcccgaggccagcatggaggtgaagggccagaagctgatcatcaccagaggcctgcagaaggactacagaaccgacctggtgttcggcaccgacgtgacctgctggttcgtgcacaacagcggcaagggcttcatcgacggccactacaaggactacttcgtgccccagctgtacagcttcctgaagagaccctag

SEQ ID NO: 126640 - protein, 885 aa, Artificial Sequence
  derived and/or modified sequence
MVALSHLGSALQLGSLFPRSPFRLLGKRSLPEGVANGIEVYSTKINSKVTSRFAHNVVTMRAVNRADTAKEVSFDVELPKTAFITNFTLTIDGVTYPGNVKEKEVAKKQYEKAVSQGKTAGLVKASGRKLEKFTVSVNVAAGSKVTFELTYEELLKRHKGKYEMYLKVQPKQLVKHFEIEVDIFEPQGISMLDAEASFITNDLLGSALTKSFSGKKGHVSFKPSLDQQRSCPTCTDSLLNGDFTITYDVNRESPGNVQIVNGYFVHFFAPQGLPVVPKNVAFVIDISGSMAGRKLEQTKEALLRILEDMQEEDYLNFILFSGDVSTWKEHLVQATPENLQEARTFVKSMEDKGMTNINDGLLRGISMLNKAREEHRIPERSTSIVIMLTDGDANVGESRPEKIQENVRNAIGGKFPLYNLGFGNNLNYNFLENMALENHGFARRIYEDSDADLQLQGFYEEVANPLLTGVEMEYPENAILDLTQNTYQHFYDGSEIVVAGRLVDEDMNSFKADVKGHGATNDLTFTEEVDMKEMEKALQERDYIFGNYIERLWAYLTIEQLLEKRKNAHGEEKENLTARALDLSLKYHFVTPLTSMVVTKPEDNEDERAIADKPGEGFSATPVSPAMSYLTSYQPPQNPYYYVDGDPHFIIQIPEKDDALCFNIDEAPGTVLRLIQDAVTGLTVNGQITGDKRGSPDSKTRKTYFGKLGIANAQMDFQVEVTTEKITLWNRAVPSTFSWLDTVTVTQDGLSMMINRKNMVVSFGDGVTFVVVLHQVWKKHPVHRDFLGFYVVDSHRMSAQTHGLLGQFFQPFDFKVSDIRPGSDPTKPDATLVVKNHQLIVTRGSQKDYRKDASIGTKVVCWFVHNNGEGLIDGVHTDYIVPNLF

SEQ ID NO: 126641 - protein, 890 aa, Artificial Sequence
  derived and/or modified sequence
MAFAWWPCLILALLSSLAASGFPRSPFRLLGKRSLPEGVANGIEVYSTKINSKVTSRFAHNVVTMRAVNRADTAKEVSFDVELPKTAFITNFTLTIDGVTYPGNVKEKEVAKKQYEKAVSQGKTAGLVKASGRKLEKFTVSVNVAAGSKVTFELTYEELLKRHKGKYEMYLKVQPKQLVKHFEIEVDIFEPQGISMLDAEASFITNDLLGSALTKSFSGKKGHVSFKPSLDQQRSCPTCTDSLLNGDFTITYDVNRESPGNVQIVNGYFVHFFAPQGLPVVPKNVAFVIDISGSMAGRKLEQTKEALLRILEDMQEEDYLNFILFSGDVSTWKEHLVQATPENLQEARTFVKSMEDKGMTNINDGLLRGISMLNKAREEHRIPERSTSIVIMLTDGDANVGESRPEKIQENVRNAIGGKFPLYNLGFGNNLNYNFLENMALENHGFARRIYEDSDADLQLQGFYEEVANPLLTGVEMEYPENAILDLTQNTYQHFYDGSEIVVAGRLVDEDMNSFKADVKGHGATNDLTFTEEVDMKEMEKALQERDYIFGNYIERLWAYLTIEQLLEKRKNAHGEEKENLTARALDLSLKYHFVTPLTSMVVTKPEDNEDERAIADKPGEDAEATPVSPAMSYLTSYQPPQNPYYYVDGDPHFIIQIPEKDDALCFNIDEAPGTVLRLIQDAVTGLTVNGQITGDKRGSPDSKTRKTYFGKLGIANAQMDFQVEVTTEKITLWNRAVPSTFSWLDTVTVTQDGLSMMINRKNMVVSFGDGVTFVVVLHQVWKKHPVHRDFLGFYVVDSHRMSAQTHGLLGQFFQPFDFKVSDIRPGSDPTKPDATLVVKNHQLIVTRGSQKDYRKDASIGTKVVCWFVHNNGEGLIDGVHTDYIVPNLF

SEQ ID NO: 126642 - protein, 658 aa, Artificial Sequence
  derived and/or modified sequence
MAFAWWPCLILALLSSLAASGFPRSPFRLLGKRSLPEGVANGIEVYSTKINSKVTSRFAHNVVTMRAVNRADTAKEVSFDVELPKTAFITNFTLTIDGVTYPGNVKEKEVAKKQYEKAVSQGKTAGLVKASGRKLEKFTVSVNVAAGSKRHKGKYEMYLKVQPKQLVKHFEIEVDIFEPQGISMLDAEASFITNDLLGSALTKSFSGKKGHVSFKPSLDQQRSCPTCTDSLLNGDFTITYDVNRESPGNVQIVNGYFVHFFAPQGLPVVPKNVAFVIDISGSMAGRKLEQTKEALLRILEDMQEEDYLNFILFSGDVSTWKEHLVQATPENLQEARTFVKSMEDKGMTNINDGLLRGISMLNKAREEHRIPERSTSIVIMLTDGDANVGESRPEKIQENVRNAIGGKFPLYNLGFGNNLNYNFLENMALENHGFARRIYEDSDADLQLQGFYEEVANPLLTGVEMEYPENAILDLTQNTYQHFYDGSEIVVAGRLVDEDMNSFKADVKGHGATNDLTFTEEVDMKEMEKALQERDYIFGNYIERLWAYLTIEQLLEKRKNAHGEEKENLTARALDLSLKYHFVTPLTSMVVTKPEDNEDERAIADKPGEGGDSHTGEPRHVLPDQLPASSKPLLLCGRGSPLHHPNSGERRCPLLQHR

SEQ ID NO: 126643 - DNA, 2658 bp, Artificial Sequence
  derived and/or modified sequence
atggtcgcactgtctcatctgggatcagccttgcagttgggcagcttatttccacggtccccctttcgattgctcggtaaaagatctctgcccgagggcgtggccaatgggatcgaagtatactccaccaagattaactctaaggtgacttccaggttcgctcacaacgtggtgacaatgcgcgcagttaatcgggccgacactgctaaggaagtgtcttttgacgtggagcttccaaagaccgcatttatcacgaattttacattgaccatcgatggcgtgacgtacccggggaatgtgaaagagaaagaagtggccaagaagcagtatgagaaggctgtttcccaggggaagactgctggcctcgtgaaggcctctgggcgcaagttagagaagttcacggtcagcgttaacgtggctgccgggagcaaggtgactttcgagctcacctatgaagagctgctgaaacgacataaaggcaagtacgagatgtatcttaaggttcaacctaaacaactggttaagcacttcgaaatcgaggtggacattttcgagccacaaggcatttccatgttagacgcggaggcatcatttatcacaaacgacctgctgggaagtgcgctaaccaaatctttctcaggcaaaaaaggccacgtgtcattcaaaccctctctggatcagcagcgctcctgccccacttgtactgattcattacttaatggcgactttacaatcacctatgatgtcaacagggagagtccaggaaatgtccagatcgtgaacgggtactttgtgcacttcttcgccccgcagggactccccgttgtgccaaaaaacgtcgcattcgtcatcgatattagtggatctatggccgggcgcaagctcgagcagactaaagaggcactcctgcggatcctcgaagatatgcaggaggaggactatctgaattttattctgttttcaggggacgtttctacatggaaggagcacttagtgcaggcaacaccagaaaatcttcaggaagcccgcacatttgtgaagagcatggaagacaagggcatgactaacatcaatgatggactgttgaggggtatttccatgttgaacaaggcgcgcgaggagcaccgaattccagaaagaagtacatctatcgtcatcatgctgaccgatggagacgcgaatgtaggagaatcccgtcctgaaaagattcaggagaatgtgaggaatgcgattggagggaaattccccctttataacctcggttttggaaataacctgaattacaactttctggaaaatatggccctggaaaaccatgggtttgccaggaggatttacgaggatagcgatgcagatttgcagcttcagggcttttacgaagaggtggccaatcctctccttacaggtgtcgagatggaatatccagagaacgccattttagatctgacccagaatacctaccagcacttttatgacggctcagagattgtcgtcgcaggcagactggtggacgaggatatgaacagctttaaggccgacgttaagggccatggggcaactaacgacctaacatttaccgaggaggtggatatgaaggaaatggaaaaagccctgcaggagcgcgattacatctttggaaactacatcgaacgtctctgggcatatctaactatagagcagctgcttgaaaagcgcaagaatgcacatggagaggagaaagagaacctaacggcacgtgccttggacctttctctgaagtatcactttgtgactcctctgacatccatggtcgtcacaaagccggaagacaacgaggacgagcgagctattgcggataagcctggcgaaggattcagcgctacacccgttagccctgcaatgagctaccttacttcctatcagcccccacaaaatccatattactacgtggatggcgacccacacttcatcatacagatcccggagaaggacgatgccttgtgcttcaacattgatgaggcccctggtactgtcctgagactgatccaggacgccgtcaccggactgaccgttaatggtcagattaccggggacaagaggggatcccctgattcaaaaaccagaaagacctatttcggaaaactgggcattgcgaatgcacagatggacttccaggtggaggttacgaccgagaaaattaccttgtggaatagggctgtgccatccaccttctcttggctcgacactgtcacggtcactcaggacgggctttccatgatgatcaaccggaaaaacatggtagtgtccttcggcgacggcgttactttcgtcgtcgtgctgcatcaggtatggaagaagcatcctgtgcacagggactttcttggcttctatgttgtggatagccatcgtatgtccgctcagacccatggtctgctgggccaattttttcagccattcgacttcaaagtttcagacattagaccgggtagcgacccaaccaagccagatgctactttggtcgttaagaatcaccagttaatcgtaactagagggagtcagaaggattatagaaaagacgcttctatcggcacaaaagtcgtgtgttggtttgtccacaataacggagaagggctgatagacggcgtacacacagattatattgtccctaatctgttctag

SEQ ID NO: 126644 - DNA, 2013 bp, Artificial Sequence
  derived and/or modified sequence
atggccttcgcatggtggccctgcctcatccttgcactgttatcctctctcgcagcctctgggtttcccaggagcccatttaggctgctcggaaaacggtcccttcctgaaggcgtggccaacggcattgaggtctactctactaaaatcaattccaaggtgaccagcagattcgcccataacgttgtcactatgcgggcagtaaatcgcgccgatacagccaaggaagtatcttttgacgtggaacttccaaaaactgcgttcattactaatttcacactgacaattgacggggttacctatccaggcaatgtgaaggagaaagaagtggcaaagaagcagtatgagaaggctgtttctcagggcaagacagcaggactagtgaaagcttcaggtcgtaaactggagaagttcacagtgtctgttaatgttgccgccggaagtaaggtcaccttcgagttgacttatgaggaactgctgaagagacacaaaggcaagtacgagatgtaccttaaagtgcaaccgaaacagctcgtgaaacatttcgaaatcgaggtggatatcttcgaaccacagggaatatccatgctggacgctgaagcctcgtttatcacaaatgacctcctgggatccgctctgaccaaatctttttccggaaagaagggccatgtgtcctttaaaccatccctcgaccagcagagatcctgcccaacttgtactgacagcttgcttaatggggactttaccatcacatatgacgtcaatagggagagtccagggaacgtccagattgtcaatggctatttcgtccatttctttgctcctcagggacttccagtggtgcccaagaacgtagcatttgtaatcgacatctctgggtccatggccggccgcaagctggaacaaaccaaggaggccctcctaaggattctggaggacatgcaagaggaggattacttgaactttatactgtttagcggagacgtgagcacatggaaggaacacctggtgcaggccactcctgaaaatctccaggaggctcggacttttgtgaaatcgatggaggacaagggcatgactaatattaacgacggactgctgcggggcataagcatgttgaacaaagccagggaagaacatcggatcccagaaaggtctacctccatagtcatcatgctgacagatggagacgcaaacgtgggagagtcaagaccggagaagattcaggaaaatgtgaggaacgcgatcggtggcaaatttcccttatataacctcgggtttggcaacaacttgaattacaacttcctggaaaatatggccctcgagaaccatgggttcgcgaggcgcatctacgaagactcagatgctgacctgcagctgcagggattttacgaggaagtcgcaaacccacttttgactggagttgagatggaatatcccgagaacgcaatccttgatcttacccagaatacatatcaacacttctacgacggtagcgagatcgtggttgccggccggctcgtggacgaagatatgaactcctttaaagccgatgtgaaggggcacggagctaccaatgatcttaccttcaccgaagaagtggacatgaaggaaatggagaaggcactgcaggaacgggactacatttttggaaactacatcgaacgactgtgggcctacctcacaatagagcaactactggaaaaacgcaaaaatgcacacggggaagagaaagagaacctgactgctcgggcgctggacttaagcctcaagtaccatttcgtgacccctttgacatccatggtggtcacaaaaccggaggacaatgaggatgagagggcaatcgccgacaagccaggggaaggcggagactcccacacaggcgagccacgtcatgttctgcctgatcaactccctgcctctagtaagccccttttactgtgcggcaggggatcacctttgcaccatcccaacagtggagaaaggaggtgtcctctactacagcacaggtag

SEQ ID NO: 126645 - DNA, 2673 bp, Artificial Sequence
  derived and/or modified sequence
atggcatttgcgtggtggccgtgccttattctggccctcttgtcatcgctggccgccagcgggttccctcgcagcccgtttcgcctgcttggcaagcgcagtttgcctgaaggcgtagcgaacgggatcgaagtttacagtaccaaaatcaatagtaaggtcacctccaggtttgcgcacaatgtggtcaccatgcgtgcggtcaaccgtgccgatacggccaaggaggtgagtttcgacgttgagcttcccaagaccgcattcatcaccaattttacactcaccattgacggcgtgacatatccaggcaatgtgaaagaaaaggaggtcgccaaaaaacagtacgagaaagccgtgtcccaagggaagactgccgggctcgtgaaagcgtctggaagaaaactcgaaaaattcacggtcagcgttaacgtggcggctgggtccaaagtgaccttcgaactgacttatgaggagctcttgaaacgccataagggaaaatacgaaatgtatctgaaggttcaaccaaaacagctggttaagcacttcgaaatcgaggtagacatatttgaacctcagggcatctcaatgctggacgccgaggcgagctttataaccaatgatctgctgggatccgcccttaccaaaagcttttccgggaagaaagggcacgtgagctttaaaccctcgctggaccagcagagatcatgccctacatgtaccgactcactcttgaacggcgattttacgatcacctacgacgtgaatcgtgagagccctggcaacgtccagattgtaaacggttattttgtgcatttctttgctcctcagggcctgcccgtggtaccaaagaatgtggcattcgtcattgacattagcgggagtatggctggcagaaagctcgagcaaacgaaagaggccctgctacgaattcttgaagacatgcaggaggaagactatcttaattttatccttttctccggagacgtgagcacctggaaggaacacctggttcaagctacaccagagaacctacaggaggcgcggacgttcgtgaaatccatggaggataaggggatgactaacatcaatgacgggctgctgcgaggcatttccatgcttaacaaggccagagaagagcatcgtatcccagagagatcaacctctatcgtgattatgctaacagacggggatgccaacgtgggcgagagccgcccggagaagatacaagagaacgtgcgtaatgctattggcggaaagttccccttatataacttaggctttggtaataacctgaattacaacttcctcgagaatatggcactagaaaatcacggattcgcccggcgcatctacgaagactccgatgccgacctgcaattacagggcttttatgaagaagtggcgaatccgctgcttacaggcgtggaaatggagtaccctgagaacgctatcctcgacctgactcagaatacatatcagcatttctatgacggaagtgaaattgtggtggccggtcgactcgtggacgaggatatgaattcattcaaggctgatgtaaagggacatggggctacaaacgacctaaccttcacggaggaagttgacatgaaggagatggaaaaagcccttcaggagagggattacatcttcgggaattacattgaacgattgtgggcgtatctgaccattgaacaactcctggagaagaggaaaaatgcccatggagaggaaaaggagaacctgactgctagagcccttgacctgagtctgaaataccattttgtcacccccctgacttctatggtggtgactaaacccgaggataacgaggatgagcgggctatagcagacaagcctggggaagacgccgaagcaacaccagtttcaccagctatgtcatacctcacctcttaccagcccccacagaatccttactactatgtggacggcgaccctcactttatcatacaaatacctgagaaggacgatgctctctgtttcaacatcgacgaagccccaggaaccgtgttgagactgatacaggacgccgtaaccggcctgacagtaaatggacaaataacaggggacaagcgtgggtcaccggactcaaaaacccggaaaacctatttcggaaaactaggtattgctaatgcacagatggatttccaggtagaggtgactaccgaaaaaattactctgtggaacagagctgtacccagcacgttcagttggctagatacagttacagtgacacaggatggactatccatgatgattaatcgaaaaaacatggtggtatcattcggggatggcgtaaccttcgtggtggtgctgcaccaggtgtggaaaaaacatccagtccatcgggattttctgggtttttatgtcgtcgactctcacaggatgagcgctcaaacccacggactactgggccaattcttccagccttttgatttcaaggtttccgatatcaggcccggatcggatcccaccaagccagatgcgacacttgtcgtcaaaaatcatcaattaatcgtgacccggggaagccaaaaagactacaggaaggatgcaagtatcggcacaaaagtggtttgttggtttgtccataataacggggagggcctgattgatggcgtccataccgactatatcgtgcctaaccttttctag

SEQ ID NO: 126646 - DNA, 1977 bp, Artificial Sequence
  derived and/or modified sequence
atggcctttgcatggtggccctgtctgattctggccttactgagctctttggctgctagcggtttcccccggagccctttccgattgctgggcaaaagatccctgccagaaggtgtagcgaacggcattgaggtttactccactaaaattaatagcaaagtcacctctcgatttgcccataatgtggtgacaatgagagccgtaaatcgcgcagataccgccaaagaggtgagctttgacgtcgaactgcccaagactgcgttcattactaacttcacattgaccattgacggtgtgacctacccaggaaatgtgaaggagaaggaggtagccaaaaaacagtatgaaaaggcagttagtcagggtaagaccgcaggcctggttaaagcctccggtcggaagttggaaaagtttactgtttctgtcaatgtggcggctggcagcaaaagacataaagggaaatacgaaatgtacttaaaggtacagcctaaacagctggtgaagcactttgaaatcgaggtcgacatctttgagccacagggaatcagtatgttagacgccgaggccagcttcatcacaaatgatcttctgggatccgcattgaccaaatcgttcagcggcaaaaaggggcatgtgtcctttaaaccatcgctggaccagcagcgcagttgtccgacgtgcactgatagtctcctcaatggcgatttcacgattacatacgacgtcaaccgggaaagcccagggaatgtccagattgtcaacggatactttgttcatttctttgcgcctcagggtctgcccgtcgtgcccaagaacgtggcatttgtgattgatatcagtggcagcatggctgggcgtaaactggaacaaacaaaagaggcgttgcttcgcatcctggaagacatgcaggaagaagactatctgaactttatcctgttttctggagacgtgtccacttggaaagaacacctcgtacaagccactcccgaaaacttgcaggaagctcgtacctttgtaaagagtatggaagataagggaatgacaaatattaatgacggccttcttagaggcattagtatgttaaacaaggctcgcgaagagcatcgcatccccgaaagatcaacctccattgtgattatgctcacagacggtgatgccaacgtgggggagtctcggccagaaaaaattcaggagaacgtgcgtaacgctatcggcggtaaattcccactttataatctgggctttggaaacaatctgaactacaatttcttagagaacatggctctggagaaccatggtttcgcccgccgtatttacgaggatagtgacgcggaccttcagcttcaaggcttctacgaagaggtggctaaccccctcttaacgggcgtagaaatggaatatcctgagaacgccatcttggatctgacccagaacacataccagcacttttacgacggcagcgaaattgtagtggcaggcaggctggtcgatgaggacatgaattcgttcaaagcagatgtaaaaggccatggagcgacgaatgatctcactttcactgaggaggtagatatgaaggagatggaaaaagccctccaagaacgggactatatattcggcaactacattgagcggttgtgggcctacttaactattgaacagctgctggagaagcggaagaatgctcatggagaggagaaggagaatctgaccgcacgggctctagacctgtcattgaaataccacttcgtcacaccacttaccagtatggtggtgacaaaacccgaggacaatgaggatgagcgggctatcgctgacaagcctggagaaggcggggattcccataccggagagccccgccatgttctgcctgaccagcttcccgcctcaagcaagcccctgctgctctgcgggagaggcagtccgttgcatcatcccaactcgggggaacgccgatgtccactgctccagcatcgctag

SEQ ID NO: 126647 - DNA, 3033 bp, Artificial Sequence
  derived and/or modified sequence
atataaggagcgtgggccaggcctgagtattcagcgatggcatttgcatggtggccctgtctcatcttggctctgctctccagcttggcagcctcttcccgagaagcccctttcggctgcttgggaaacggagcctcccggaaggggtggccaatggcatcgaggtctacagtaccaaaatcaactccaaggtgacctcccgttttgctcacaatgttgtcaccatgagagccgtcaaccgtgcagacacggccaaggaggtttcctttgatgtggagctgcccaagacggccttcatcaccaacttcaccttgaccatcgacggtgttacctaccctgggaatgtcaaggagaaggaagttgccaagaagcagtatgaaaaggctgtgtcccagggcaagacggccggcttggtcaaggcctctgggaggaagttggagaagttcacagtctcggtcaacgtggctgcaggcagcaaagtcaccttcgagctaacctacgaggagctgctgaagaggcacaagggcaagtacgagatgtacctcaaggtccagcctaagcaactggtcaaacactttgagatcgaggtagacatcttcgagcctcagggaatcagcatgctggatgctgaggcctctttcatcaccaacgacctcctgggaagcgccctcaccaagtccttctcagggaaaaagggccatgtgtccttcaagcccagcttagaccaacagcgttcatgcccaacctgtacagactccctcctcaatggagatttcactatcacctatgacgtgaacagagaatctcctggcaacgtgcagatagtcaatggctacttcgtgcacttctttgcacctcaaggccttccagtggtgcctaagaacgtggcctttgtgattgacatcagcggctccatggctggtcggaaattagagcagacaaaggaggcccttctcagaatcctggaagatatgcaagaggaagactatctgaatttcatcctgttcagtggagatgtgtccacatggaaagagcacttagtccaggccacgcccgagaacctccaggaggccaggacgtttgtgaagagcatggaggataaaggaatgaccaacatcaatgacgggctgctgaggggcatcagtatgctgaacaaggcccgagaggagcacagaatcccagagaggagcacctccattgtcatcatgctgactgatggggatgccaatgttggtgagagcagacccgaaaaaatccaagagaatgtgcggaatgccatcgggggcaagttccccttgtataacctgggctttggcaacaatctgaattataacttcctggagaacatggccctggagaaccatgggtttgcccggcgcatttatgaggactctgatgccgatttgcagttgcagggcttctatgaggaggtggccaacccactgctgacgggtgtggagatggagtaccccgagaacgctatcctggacctcacccagaacacttaccagcacttctacgatggctctgagatcgtggtggccgggcgcctggtggacgaggacatgaacagctttaaggcagatgtgaagggccatggggccaccaacgacctgaccttcacagaggaggtggacatgaaggagatggagaaggccctgcaggagcgggactacatcttcgggaattacattgagcggctctgggcctacctcaccattgagcagctgctggagaagcgcaagaacgcccatggcgaggagaaggagaacctcacggcccgggccctggacctgtccctcaagtatcactttgtgactccactgacctcaatggtggtgaccaagcctgaggacaacgaggatgagagggccattgccgacaagcctggggaaggcttttcagccacaccggtgagccccgccatgtcctacctgaccagctaccagcctcctcaaaacccctactactatgtggacggggatccccacttcatcatccaaattccggagaaagacgatgccctctgcttcaacatcgatgaagccccaggcacagtgctgcgccttattcaggatgcagtcacaggcctcacagttaatgggcagatcactggcgacaagagaggcagccctgactccaagaccagaaagacttactttggaaaactgggcatcgccaatgctcagatggacttccaggtggaggtgacaacggagaagatcaccctgtggaacagggccgtgccgagcactttcagctggctggacacagtcacagtcacgcaggatgggctgtccatgatgatcaacaggaagaacatggtggtctcctttggagatggggttaccttcgtggtcgtcctacaccaggtgtggaagaaacatcctgtccaccgtgactttctaggcttctacgtggtggacagtcaccggatgtcagcacagacgcatgggctgctggggcaattcttccaaccctttgactttaaagtgtctgacatccggccaggctctgaccccacaaagccagatgccacattggtggtgaagaaccatcagctgattgtcaccaggggctcccagaaagactacagaaaggatgccagcatcggcacgaaggttgtctgctggttcgtccacaacaacggagaagggctgattgatggtgtccacactgactacattgtccccaacctgttttgagtagacacaccagctcctgttgggatggatggcccggattttatggcatctggaacatgggcacagagaggggcctgtgggaggggctgggaaaataaagtccaaggtcgagaccagacagctgccagcctctacatgccttcatgagcctctgctccagggaacaggcaactgggacccacagcagctcaaaagaggggatggctagcaggaaggcaacttcttgggcctctccactgacacagctgagagacagagttggttggactagaactttagggattcaaatgtatgacagcttgggggaaaaaataaagaactgactctg

SEQ ID NO: 126648 - DNA, 3038 bp, Artificial Sequence
  derived and/or modified sequence
atataaggagcgtgggccaggcctgagtattcagcgatggcatttgcatggtggccctgtctcatcttggctctgctctccagcttggcagcctctggcttcccgagaagcccctttcggctgcttgggaaacggagcctcccggaaggggtggccaatggcatcgaggtctacagtaccaaaatcaactccaaggtgacctcccgttttgctcacaatgttgtcaccatgagagccgtcaaccgtgcagacacggccaaggaggtttcctttgatgtggagctgcccaagacggccttcatcaccaacttcaccttgaccatcgacggtgttacctaccctgggaatgtcaaggagaaggaagttgccaagaagcagtatgaaaaggctgtgtcccagggcaagacggccggcttggtcaaggcctctgggaggaagttggagaagttcacagtctcggtcaacgtggctgcaggcagcaaagtcaccttcgagctaacctacgaggagctgctgaagaggcacaagggcaagtacgagatgtacctcaaggtccagcctaagcaactggtcaaacactttgagatcgaggtagacatcttcgagcctcagggaatcagcatgctggatgctgaggcctctttcatcaccaacgacctcctgggaagcgccctcaccaagtccttctcagggaaaaagggccatgtgtccttcaagcccagcttagaccaacagcgttcatgcccaacctgtacagactccctcctcaatggagatttcactatcacctatgacgtgaacagagaatctcctggcaacgtgcagatagtcaatggctacttcgtgcacttctttgcacctcaaggccttccagtggtgcctaagaacgtggcctttgtgattgacatcagcggctccatggctggtcggaaattagagcagacaaaggaggcccttctcagaatcctggaagatatgcaagaggaagactatctgaatttcatcctgttcagtggagatgtgtccacatggaaagagcacttagtccaggccacgcccgagaacctccaggaggccaggacgtttgtgaagagcatggaggataaaggaatgaccaacatcaatgacgggctgctgaggggcatcagtatgctgaacaaggcccgagaggagcacagaatcccagagaggagcacctccattgtcatcatgctgactgatggggatgccaatgttggtgagagcagacccgaaaaaatccaagagaatgtgcggaatgccatcgggggcaagttccccttgtataacctgggctttggcaacaatctgaattataacttcctggagaacatggccctggagaaccatgggtttgcccggcgcatttatgaggactctgatgccgatttgcagttgcagggcttctatgaggaggtggccaacccactgctgacgggtgtggagatggagtaccccgagaacgctatcctggacctcacccagaacacttaccagcacttctacgatggctctgagatcgtggtggccgggcgcctggtggacgaggacatgaacagctttaaggcagatgtgaagggccatggggccaccaacgacctgaccttcacagaggaggtggacatgaaggagatggagaaggccctgcaggagcgggactacatcttcgggaattacattgagcggctctgggcctacctcaccattgagcagctgctggagaagcgcaagaacgcccatggcgaggagaaggagaacctcacggcccgggccctggacctgtccctcaagtatcactttgtgactccactgacctcaatggtggtgaccaagcctgaggacaacgaggatgagagggccattgccgacaagcctggggaaggtggggatagccacaccggtgagccccgccatgtcctacctgaccagctaccagcctcctcaaaacccctactactatgtggacggggatccccacttcatcatccaaattccggagaaagacgatgccctctgcttcaacatcgatgaagccccaggcacagtgctgcgccttattcaggatgcagtcacaggcctcacagttaatgggcagatcactggcgacaagagaggcagccctgactccaagaccagaaagacttactttggaaaactgggcatcgccaatgctcagatggacttccaggtggaggtgacaacggagaagatcaccctgtggaacagggccgtgccgagcactttcagctggctggacacagtcacagtcacgcaggatgggctgtccatgatgatcaacaggaagaacatggtggtctcctttggagatggggttaccttcgtggtcgtcctacaccaggtgtggaagaaacatcctgtccaccgtgactttctaggcttctacgtggtggacagtcaccggatgtcagcacagacgcatgggctgctggggcaattcttccaaccctttgactttaaagtgtctgacatccggccaggctctgaccccacaaagccagatgccacattggtggtgaagaaccatcagctgattgtcaccaggggctcccagaaagactacagaaaggatgccagcatcggcacgaaggttgtctgctggttcgtccacaacaacggagaagggctgattgatggtgtccacactgactacattgtccccaacctgttttgagtagacacaccagctcctgttgggatggatggcccggattttatggcatctggaacatgggcacagagaggggcctgtgggaggggctgggaaaataaagtccaaggtcgagaccagacagctgccagcctctacatgccttcatgagcctctgctccagggaacaggcaactgggacccacagcagctcaaaagaggggatggctagcaggaaggcaacttcttgggcctctccactgacacagctgagagacagagttggttggactagaactttagggattcaaatgtatgacagcttgggggaaaaaataaagaactgactctg

SEQ ID NO: 126649 - DNA, 3007 bp, Artificial Sequence
  derived and/or modified sequence
tcagcgatggcatttgcatggtggccctgtctcatcttggctctgctctccagcttggcagcctctggcttcccgagaagcccctttcggctgcttgggaaacggagcctcccggaaggggtggccaatggcatcgaggtctacagtaccaaaatcaactccaaggtgacctcccgttttgctcacaatgttgtcaccatgagagccgtcaaccgtgcagacacggccaaggaggtttcctttgatgtggagctgcccaagacggccttcatcaccaacttcaccttgaccatcgacggtgttacctaccctgggaatgtcaaggagaaggaagttgccaagaagcagtatgaaaaggctgtgtcccagggcaagacggccggcttggtcaaggcctctgggaggaagttggagaagttcacagtctcggtcaacgtggctgcaggcagcaaagtcaccttcgagctaacctacgaggagctgctgaagaggcacaagggcaagtacgagatgtacctcaaggtccagcctaagcaactggtcaaacactttgagatcgaggtagacatcttcgagcctcagggaatcagcatgctggatgctgaggcctctttcatcaccaacgacctcctgggaagcgccctcaccaagtccttctcagggaaaaagggccatgtgtccttcaagcccagcttagaccaacagcgttcatgcccaacctgtacagactccctcctcaatggagatttcactatcacctatgacgtgaacagagaatctcctggcaacgtgcagatagtcaatggctacttcgtgcacttctttgcacctcaaggccttccagtggtgcctaagaacgtggcctttgtgattgacatcagcggctccatggctggtcggaaattagagcagacaaaggaggcccttctcagaatcctggaagatatgcaagaggaagactatctgaatttcatcctgttcagtggagatgtgtccacatggaaagagcacttagtccaggccacgcccgagaacctccaggaggccaggacgtttgtgaagagcatggaggataaaggaatgaccaacatcaatgacgggctgctgaggggcatcagtatgctgaacaaggcccgagaggagcacagaatcccagagaggagcacctccattgtcatcatgctgactgatggggatgccaatgttggtgagagcagacccgaaaaaatccaagagaatgtgcggaatgccatcgggggcaagttccccttgtataacctgggctttggcaacaatctgaattataacttcctggagaacatggccctggagaaccatgggtttgcccggcgcatttatgaggactctgatgccgatttgcagttgcagggcttctatgaggaggtggccaacccactgctgacgggtgtggagatggagtaccccgagaacgctatcctggacctcacccagaacacttaccagcacttctacgatggctctgagatcgtggtggccgggcgcctggtggacgaggacatgaacagctttaaggcagatgtgaagggccatggggccaccaacgacctgaccttcacagaggaggtggacatgaaggagatggagaaggccctgcaggagcgggactacatcttcgggaattacattgagcggctctgggcctacctcaccattgagcagctgctggagaagcgcaagaacgcccatggcgaggagaaggagaacctcacggcccgggccctggacctgtccctcaagtatcactttgtgactccactgacctcaatggtggtgaccaagcctgaggacaacgaggatgagagggccattgccgacaagcctggggaagatgcagaagccacaccggtgagccccgccatgtcctacctgaccagctaccagcctcctcaaaacccctactactatgtggacggggatccccacttcatcatccaaattccggagaaagacgatgccctctgcttcaacatcgatgaagccccaggcacagtgctgcgccttattcaggatgcagtcacaggcctcacagttaatgggcagatcactggcgacaagagaggcagccctgactccaagaccagaaagacttactttggaaaactgggcatcgccaatgctcagatggacttccaggtggaggtgacaacggagaagatcaccctgtggaacagggccgtgccgagcactttcagctggctggacacagtcacagtcacgcaggatgggctgtccatgatgatcaacaggaagaacatggtggtctcctttggagatggggttaccttcgtggtcgtcctacaccaggtgtggaagaaacatcctgtccaccgtgactttctaggcttctacgtggtggacagtcaccggatgtcagcacagacgcatgggctgctggggcaattcttccaaccctttgactttaaagtgtctgacatccggccaggctctgaccccacaaagccagatgccacattggtggtgaagaaccatcagctgattgtcaccaggggctcccagaaagactacagaaaggatgccagcatcggcacgaaggttgtctgctggttcgtccacaacaacggagaagggctgattgatggtgtccacactgactacattgtccccaacctgttttgagtagacacaccagctcctgttgggatggatggcccggattttatggcatctggaacatgggcacagagaggggcctgtgggaggggctgggaaaataaagtccaaggtcgagaccagacagctgccagcctctacatgccttcatgagcctctgctccagggaacaggcaactgggacccacagcagctcaaaagaggggatggctagcaggaaggcaacttcttgggcctctccactgacacagctgagagacagagttggttggactagaactttagggattcaaatgtatgacagcttgggggaaaaaataaagaactgactctg

SEQ ID NO: 126650 - DNA, 3002 bp, Artificial Sequence
  derived and/or modified sequence
atataaggagcgtgggccaggcctgagtattcagcgatggcatttgcatggtggccctgtctcatcttggctctgctctccagcttggcagcctctggcttcccgagaagcccctttcggctgcttgggaaacggagcctcccggaaggggtggccaatggcatcgaggtctacagtaccaaaatcaactccaaggtgacctcccgttttgctcacaatgttgtcaccatgagagccgtcaaccgtgcagacacggccaaggaggtttcctttgatgtggagctgcccaagacggccttcatcaccaacttcaccttgaccatcgacggtgttacctaccctgggaatgtcaaggagaaggaagttgccaagaagcagtatgaaaaggctgtgtcccagggcaagacggccggcttggtcaaggcctctgggaggaagttggagaagttcacagtctcggtcaacgtggctgcaggcagcaaaaggcacaagggcaagtacgagatgtacctcaaggtccagcctaagcaactggtcaaacactttgagatcgaggtagacatcttcgagcctcagggaatcagcatgctggatgctgaggcctctttcatcaccaacgacctcctgggaagcgccctcaccaagtccttctcagggaaaaagggccatgtgtccttcaagcccagcttagaccaacagcgttcatgcccaacctgtacagactccctcctcaatggagatttcactatcacctatgacgtgaacagagaatctcctggcaacgtgcagatagtcaatggctacttcgtgcacttctttgcacctcaaggccttccagtggtgcctaagaacgtggcctttgtgattgacatcagcggctccatggctggtcggaaattagagcagacaaaggaggcccttctcagaatcctggaagatatgcaagaggaagactatctgaatttcatcctgttcagtggagatgtgtccacatggaaagagcacttagtccaggccacgcccgagaacctccaggaggccaggacgtttgtgaagagcatggaggataaaggaatgaccaacatcaatgacgggctgctgaggggcatcagtatgctgaacaaggcccgagaggagcacagaatcccagagaggagcacctccattgtcatcatgctgactgatggggatgccaatgttggtgagagcagacccgaaaaaatccaagagaatgtgcggaatgccatcgggggcaagttccccttgtataacctgggctttggcaacaatctgaattataacttcctggagaacatggccctggagaaccatgggtttgcccggcgcatttatgaggactctgatgccgatttgcagttgcagggcttctatgaggaggtggccaacccactgctgacgggtgtggagatggagtaccccgagaacgctatcctggacctcacccagaacacttaccagcacttctacgatggctctgagatcgtggtggccgggcgcctggtggacgaggacatgaacagctttaaggcagatgtgaagggccatggggccaccaacgacctgaccttcacagaggaggtggacatgaaggagatggagaaggccctgcaggagcgggactacatcttcgggaattacattgagcggctctgggcctacctcaccattgagcagctgctggagaagcgcaagaacgcccatggcgaggagaaggagaacctcacggcccgggccctggacctgtccctcaagtatcactttgtgactccactgacctcaatggtggtgaccaagcctgaggacaacgaggatgagagggccattgccgacaagcctggggaaggtggggatagccacaccggtgagccccgccatgtcctacctgaccagctaccagcctcctcaaaacccctactactatgtggacggggatccccacttcatcatccaaattccggagaaagacgatgccctctgcttcaacatcgatgaagccccaggcacagtgctgcgccttattcaggatgcagtcacaggcctcacagttaatgggcagatcactggcgacaagagaggcagccctgactccaagaccagaaagacttactttggaaaactgggcatcgccaatgctcagatggacttccaggtggaggtgacaacggagaagatcaccctgtggaacagggccgtgccgagcactttcagctggctggacacagtcacagtcacgcaggatgggctgtccatgatgatcaacaggaagaacatggtggtctcctttggagatggggttaccttcgtggtcgtcctacaccaggtgtggaagaaacatcctgtccaccgtgactttctaggcttctacgtggtggacagtcaccggatgtcagcacagacgcatgggctgctggggcaattcttccaaccctttgactttaaagtgtctgacatccggccaggctctgaccccacaaagccagatgccacattggtggtgaagaaccatcagctgattgtcaccaggggctcccagaaagactacagaaaggatgccagcatcggcacgaaggttgtctgctggttcgtccacaacaacggagaagggctgattgatggtgtccacactgactacattgtccccaacctgttttgagtagacacaccagctcctgttgggatggatggcccggattttatggcatctggaacatgggcacagagaggggcctgtgggaggggctgggaaaataaagtccaaggtcgagaccagacagctgccagcctctacatgccttcatgagcctctgctccagggaacaggcaactgggacccacagcagctcaaaagaggggatggctagcaggaaggcaacttcttgggcctctccactgacacagctgagagacagagttggttggactagaactttagggattcaaatgtatgacagcttgggggaaaaaataaagaactgactctg

SEQ ID NO: 126651 - DNA, 2658 bp, Artificial Sequence
  derived and/or modified sequence
atggtggccctgagccacctgggcagcgccctgcagctgggcagcctcttccccaggagccccttccggctgctgggcaagaggagcctgcctgagggcgtggccaacggcatcgaggtgtacagcaccaagatcaacagcaaggtgaccagcagatttgcccacaacgtggtgaccatgagagctgtgaacagagctgacacagccaaggaggtgtcctttgatgtggagctgcccaagacagccttcatcaccaacttcaccctgaccattgatggagtgacctacccaggaaatgtgaaggagaaggaggtggccaagaagcagtatgagaaggctgtgtcccagggcaagacagctggcctggtgaaggccagcggcaggaagctggagaagttcaccgtgtctgtgaatgtggccgccggcagcaaggtgacctttgagctgacctatgaggagctgctgaagaggcacaagggcaagtatgagatgtacctgaaggtgcagcccaagcagctggtgaagcactttgaaattgaggtggacatctttgagccccagggcatctccatgctggatgctgaggccagcttcatcaccaatgacctgctgggcagcgccctgaccaagagcttcagcggcaagaagggccacgtgtccttcaagcccagcctggaccagcagaggagctgccccacctgcacagacagcctgctgaatggagacttcaccatcacctatgatgtgaaccgggagagccctggaaatgtgcagatcgtgaatggctactttgtgcacttctttgccccccagggcctgcctgtggtgcccaagaatgtggccttcgtcatcgacatcagcggctccatggccggcaggaagctggagcagaccaaggaggccctgctgcgcatcctggaggacatgcaggaggaggactacctgaacttcatcctcttctctggagatgtgtccacctggaaggagcacctggtgcaggccaccccagagaacctgcaggaggcccggacctttgtgaagtccatggaggacaagggcatgaccaacatcaatgatggcctgctgcggggcatctccatgctgaacaaggcccgggaggagcaccgcatccctgagaggagcaccagcatcgtcatcatgctgacagatggagatgccaacgtgggggagagcaggcctgagaagatccaggagaatgtgagaaatgccatcggcggcaagttccccctgtacaacctgggcttcggcaacaacctgaactacaacttcctggagaacatggccctggagaaccacggctttgcccggcgcatctatgaagattctgatgctgacctgcagctgcagggcttctatgaggaggtggccaaccccctgctgactggagtggagatggagtacccagaaaatgccatcctggacctgacccagaacacctaccagcacttctatgatggcagcgagatcgtggtggccggccgcctggtggatgaggacatgaacagcttcaaggcagatgtgaagggccatggagccaccaatgacctgaccttcacagaggaggtggacatgaaggagatggagaaggccctgcaggagcgggactacatctttggaaactacatcgagcggctgtgggcctacctgaccatcgagcagctgctggagaagaggaagaatgcccatggagaggagaaggagaacctgacagcccgggccctggacctgagcctgaagtaccactttgtgacccccctgacctccatggtggtgaccaagccagaggacaatgaagatgagcgggccatcgctgacaagccaggagagggcttcagcgccacccctgtgtccccagccatgagctacctgaccagctaccagcccccccagaacccctactactacgtggatggagacccccacttcatcatccagatccctgagaaggatgatgccctgtgcttcaacattgatgaggcccctggcaccgtgctgcggctcatccaggatgctgtgacaggcctgactgtgaatggccagatcactggagacaagaggggcagcccagacagcaagaccaggaagacctactttgggaagctgggcatcgccaatgcccagatggacttccaggtggaggtgaccacagagaagatcaccctgtggaacagagctgtgcccagcaccttctcctggctggacacagtgacagtgacccaggacggcctgtccatgatgatcaacaggaagaacatggtggtgtcctttggagatggagtgacctttgtggtggtgctgcaccaggtgtggaagaagcaccctgtgcaccgggacttcctgggcttctacgtggtggacagccacaggatgtctgcccagacccacggcctgctgggccagttcttccagccctttgacttcaaggtgtctgacatccggcccggcagtgaccccaccaagccagatgccaccctggtggtgaagaaccaccagctgattgtgacccggggcagccagaaggactacaggaaggatgccagcatcggcaccaaggtggtgtgctggtttgtgcacaacaatggagagggcctgattgatggagtgcacacagactacatcgtgcccaacctcttctag

SEQ ID NO: 126652 - DNA, 2013 bp, Artificial Sequence
  derived and/or modified sequence
atggcctttgcctggtggccctgcctgatcctggccctgctgagcagcctggccgccagcggcttccccaggagccccttccggctgctgggcaagaggagcctgcctgagggcgtggccaatggaattgaggtgtacagcaccaagatcaacagcaaggtgaccagcagatttgcccacaacgtggtgaccatgagagctgtgaacagagctgacacagccaaggaggtgtcctttgatgtggagctgcccaagacagccttcatcaccaacttcaccctgaccattgatggagtgacctacccaggaaatgtgaaggagaaggaggtggccaagaagcagtatgagaaggctgtgtcccagggcaagacagctggcctggtgaaggccagcggcaggaagctggagaagttcaccgtgtctgtgaatgtggccgccggcagcaaggtgacctttgagctgacctatgaggagctgctgaagaggcacaagggcaagtatgagatgtacctgaaggtgcagcccaagcagctggtgaagcactttgaaattgaggtggacatctttgagccccagggcatctccatgctggatgctgaggccagcttcatcaccaatgacctgctgggcagcgccctgaccaagagcttcagcggcaagaagggccacgtgtccttcaagcccagcctggaccagcagaggagctgccccacctgcacagacagcctgctgaatggagacttcaccatcacctatgatgtgaaccgggagagccctggaaatgtgcagatcgtgaatggctactttgtgcacttctttgccccccagggcctgcctgtggtgcccaagaatgtggcctttgtgattgacatcagcggctccatggccggcaggaagctggagcagaccaaggaggccctgctgcgcatcctggaggacatgcaggaggaggactacctgaacttcatcctcttctctggagatgtgtccacctggaaggagcacctggtgcaggccaccccagagaacctgcaggaggcccggacctttgtgaagtccatggaggacaagggcatgaccaacatcaatgatggcctgctgcggggcatctccatgctgaacaaggcccgggaggagcaccgcatccctgagaggagcaccagcatcgtcatcatgctgacagatggagatgccaacgtgggggagagcaggcctgagaagatccaggagaatgtgagaaatgccatcggcggcaagttccccctgtacaacctgggctttggaaacaacctgaactacaacttcctggagaacatggccctggagaaccacggctttgcccggcgcatctatgaggacagtgatgctgacctgcagctgcagggcttctatgaggaggtggccaaccccctgctgactggagtggagatggagtacccagaaaatgccatcctggacctgacccagaacacctaccagcacttctatgatggcagcgagatcgtggtggccggccgcctggtggatgaggacatgaacagcttcaaggcagatgtgaagggccacggggccaccaatgacctgaccttcacagaggaggtggacatgaaggagatggagaaggccctgcaggagcgggactacatcttcggcaactacatcgagcggctgtgggcctacctgaccatcgagcagctgctggagaagaggaagaatgcccacggggaggagaaggagaacctgacagcccgggccctggacctgagcctgaagtaccactttgtgacccccctgacctccatggtggtgaccaagccagaagataatgaagatgagcgggccatcgctgacaagccaggagagggcggggacagccacactggagagcccaggcatgtgctgcctgaccagctgcctgccagcagcaagcccctgctgctgtgtggccggggcagccccctgcaccaccccaacagcggggagcggcgctgccccctgctgcagcacaggtag

SEQ ID NO: 126653 - DNA, 2673 bp, Artificial Sequence
  derived and/or modified sequence
atggcctttgcctggtggccctgcctgatcctggccctgctgagcagcctggccgccagcggcttccccaggagccccttccggctgctgggcaagaggagcctgcctgagggcgtggccaatggaattgaggtgtacagcaccaagatcaacagcaaggtgaccagcagatttgcccacaacgtggtgaccatgagagctgtgaacagagctgacacagccaaggaggtgtcctttgatgtggagctgcccaagacagccttcatcaccaacttcaccctgaccattgatggagtgacctacccaggaaatgtgaaggagaaggaggtggccaagaagcagtatgagaaggctgtgtcccagggcaagacagctggcctggtgaaggccagcggcaggaagctggagaagttcaccgtgtctgtgaatgtggccgccggcagcaaggtgacctttgagctgacctatgaggagctgctgaagaggcacaagggcaagtatgagatgtacctgaaggtgcagcccaagcagctggtgaagcactttgaaattgaggtggacatctttgagccccagggcatctccatgctggatgctgaggccagcttcatcaccaatgacctgctgggcagcgccctgaccaagagcttcagcggcaagaagggccacgtgtccttcaagcccagcctggaccagcagaggagctgccccacctgcacagacagcctgctgaatggagacttcaccatcacctatgatgtgaaccgggagagccctggaaatgtgcagatcgtgaatggctactttgtgcacttctttgccccccagggcctgcctgtggtgcccaagaatgtggcctttgtgattgacatcagcggctccatggccggcaggaagctggagcagaccaaggaggccctgctgcgcatcctggaggacatgcaggaggaggactacctgaacttcatcctcttctctggagatgtgtccacctggaaggagcacctggtgcaggccaccccagagaacctgcaggaggcccggacctttgtgaagtccatggaggacaagggcatgaccaacatcaatgatggcctgctgcggggcatctccatgctgaacaaggcccgggaggagcaccgcatccctgagaggagcaccagcatcgtcatcatgctgacagatggagatgccaacgtgggggagagcaggcctgagaagatccaggagaatgtgagaaatgccatcggcggcaagttccccctgtacaacctgggctttggaaacaacctgaactacaacttcctggagaacatggccctggagaaccacggctttgcccggcgcatctatgaggacagtgatgctgacctgcagctgcagggcttctatgaggaggtggccaaccccctgctgactggagtggagatggagtacccagaaaatgccatcctggacctgacccagaacacctaccagcacttctatgatggcagcgagatcgtggtggccggccgcctggtggatgaggacatgaacagcttcaaggcagatgtgaagggccacggggccaccaatgacctgaccttcacagaggaggtggacatgaaggagatggagaaggccctgcaggagcgggactacatcttcggcaactacatcgagcggctgtgggcctacctgaccatcgagcagctgctggagaagaggaagaatgcccacggggaggagaaggagaacctgacagcccgggccctggacctgagcctgaagtaccactttgtgacccccctgacctccatggtggtgaccaagccagaagataatgaagatgagcgggccatcgctgacaagccaggagaagatgctgaggccacccctgtgtccccagccatgagctacctgaccagctaccagcccccccagaacccctactactacgtggatggagacccccacttcatcatccagatccctgagaaggatgatgccctgtgcttcaacattgatgaggcccctggcaccgtgctgcggctcatccaggatgctgtgacaggcctgactgtgaatggccagatcaccggggacaagaggggcagcccagacagcaagaccaggaagacctactttgggaagctgggcatcgccaatgcccagatggacttccaggtggaggtgaccacagagaagatcaccctgtggaacagagctgtgcccagcaccttctcctggctggacacagtgacagtgacccaggacggcctgtccatgatgatcaacaggaagaacatggtggtgtcctttggagatggagtgacctttgtggtggtgctgcaccaggtgtggaagaagcaccctgtgcaccgggacttcctgggcttctacgtggtggacagccacaggatgtctgcccagacccacggcctgctgggccagttcttccagccctttgacttcaaggtgtctgacatccggcccggcagtgaccccaccaagccagatgccaccctggtggtgaagaaccaccagctgattgtgacccggggcagccagaaggactacaggaaggatgccagcatcggcaccaaggtggtgtgctggtttgtgcacaacaacggggagggcctgattgatggagtgcacacagactacatcgtgcccaacctcttctag

SEQ ID NO: 126654 - DNA, 1977 bp, Artificial Sequence
  derived and/or modified sequence
atggcctttgcctggtggccctgcctgatcctggccctgctgagcagcctggccgccagcggcttccccaggagccccttccggctgctgggcaagaggagcctgcctgagggcgtggccaatggaattgaggtgtacagcaccaagatcaacagcaaggtgaccagcagatttgcccacaacgtggtgaccatgagagctgtgaacagagctgacacagccaaggaggtgtcctttgatgtggagctgcccaagacagccttcatcaccaacttcaccctgaccattgatggagtgacctacccaggaaatgtgaaggagaaggaggtggccaagaagcagtatgagaaggctgtgtcccagggcaagacagctggcctggtgaaggccagcggcaggaagctggagaagttcaccgtgtctgtgaatgtggccgccggcagcaagaggcacaagggcaagtatgagatgtacctgaaggtgcagcccaagcagctggtgaagcactttgaaattgaggtggacatctttgagccccagggcatctccatgctggatgctgaggccagcttcatcaccaatgacctgctgggcagcgccctgaccaagagcttcagcggcaagaagggccacgtgtccttcaagcccagcctggaccagcagaggagctgccccacctgcacagacagcctgctgaatggagacttcaccatcacctatgatgtgaaccgggagagccctggaaatgtgcagatcgtgaatggctactttgtgcacttctttgccccccagggcctgcctgtggtgcccaagaatgtggcctttgtgattgacatcagcggctccatggccggcaggaagctggagcagaccaaggaggccctgctgcgcatcctggaggacatgcaggaggaggactacctgaacttcatcctcttctctggagatgtgtccacctggaaggagcacctggtgcaggccaccccagagaacctgcaggaggcccggacctttgtgaagtccatggaggacaagggcatgaccaacatcaatgatggcctgctgcggggcatctccatgctgaacaaggcccgggaggagcaccgcatccctgagaggagcaccagcatcgtcatcatgctgacagatggagatgccaacgtgggggagagcaggcctgagaagatccaggagaatgtgagaaatgccatcggcggcaagttccccctgtacaacctgggctttggaaacaacctgaactacaacttcctggagaacatggccctggagaaccacggctttgcccggcgcatctatgaggacagtgatgctgacctgcagctgcagggcttctatgaggaggtggccaaccccctgctgactggagtggagatggagtacccagaaaatgccatcctggacctgacccagaacacctaccagcacttctatgatggcagcgagatcgtggtggccggccgcctggtggatgaggacatgaacagcttcaaggcagatgtgaagggccacggggccaccaatgacctgaccttcacagaggaggtggacatgaaggagatggagaaggccctgcaggagcgggactacatcttcggcaactacatcgagcggctgtgggcctacctgaccatcgagcagctgctggagaagaggaagaatgcccacggggaggagaaggagaacctgacagcccgggccctggacctgagcctgaagtaccactttgtgacccccctgacctccatggtggtgaccaagccagaagataatgaagatgagcgggccatcgctgacaagccaggagagggcggggacagccacactggagagcccaggcatgtgctgcctgaccagctgcctgccagcagcaagcccctgctgctgtgtggccggggcagccccctgcaccaccccaacagcggggagcggcgctgccccctgctgcagcacaggtag

SEQ ID NO: 126655 - DNA, 2658 bp, Artificial Sequence
  derived and/or modified sequence
atggtggccctgagccacctgggcagcgccctgcagctgggcagcctgttccccagaagcccctttagactgctgggaaagcggagcctgcccgagggagtggccaacggcatagaagtgtactcaacaaagatcaattcaaaagtgacctctaggttcgcccataatgttgttaccatgagagccgtgaaccgcgctgacaccgccaaggaggtctcgttcgatgtggaactcccgaagaccgccttcataactaactttaccctgaccattgatggcgtgacatatcctggaaatgttaaggagaaggaagttgcaaagaaacagtacgaaaaggcagtgtcccaggggaagaccgcagggcttgtgaaagcgagcggccgcaagttggaaaaattcactgtttccgtgaacgtggctgctggtagcaaagtgaccttcgaactgacatatgaagagcttttgaagcggcacaagggcaaatacgagatgtatctcaaagttcaaccaaagcagctcgtgaaacactttgagatcgaagtagatatatttgaaccacagggtatttctatgctcgatgcagaagcgagctttatcaccaatgacctgctgggttcggcccttacgaaaagtttttcaggtaagaagggtcacgtgtctttcaaaccttccctggatcaacaacggagttgtcctacgtgtaccgactcgctcctgaatggtgactttacaattacatatgacgttaacagggagtccccagggaatgttcagatcgtgaatggctatttcgtgcatttttttgcacctcaggggttacctgtggttcctaaaaacgtggcgttcgttatcgacatatcgggcagcatggcgggcagaaaacttgagcagaccaaggaggccctgttaaggatacttgaagatatgcaggaggaggactacctgaattttatcctattctctggagacgtctctacttggaaagaacatcttgtacaggcaacgcccgagaacctgcaggaagcaaggacattcgtgaagtcgatggaagacaagggcatgacaaatatcaatgacggactcctgcgggggatcagtatgctgaataaagcacgcgaggaacaccgaataccagagcgatccacatcaattgtcattatgctgacagacggagatgccaacgtaggcgaatccagacctgaaaagatacaagagaacgttcgcaatgcaataggtgggaagtttccactgtacaatctggggtttggcaataatctgaattacaacttcctggagaatatggccctggagaaccatggtttcgccaggcgcatctatgaggactccgacgccgatctgcagctgcagggcttttatgaagaagtggccaacccgttactgaccggtgtcgaaatggaataccccgagaatgccattttggacttaacccagaatacctaccagcatttttatgacggtagcgagatcgtagtagctggccgtctagtggatgaggatatgaattcattcaaagcggatgtgaaaggccacggcgccaccaacgacctaactttcactgaggaagttgacatgaaagaaatggagaaagctctccaggagcgcgactacatttttggcaattacatcgaacgtttatgggcttatttaacaattgagcaattgctggagaaacgcaaaaacgcacatggggaggaaaaggagaacctcaccgctagagccttggacctgtcactcaagtaccattttgtaaccccactgactagcatggtcgttaccaagcctgaagacaacgaagatgaacgtgccatagccgacaagccaggcgaggggttttcagccacccccgtttctccggctatgagctacctgacctcctatcagccccctcagaacccgtactactacgtcgacggtgatccacacttcattattcaaatacccgaaaaggacgatgcactgtgtttcaacatcgacgaggcccccggaacagtgctgaggcttatccaggacgcagtcacaggtttgaccgtcaacgggcagatcacgggcgataagcgaggcagccccgatagcaagacccgtaaaacctattttggaaagctcggcattgcgaacgcacagatggattttcaggtggaggtcactacagagaagattaccctgtggaaccgcgccgtgccatccacattctcctggctggataccgtgacagttactcaggatggactgagtatgatgataaataggaaaaatatggttgtctcattcggagacggagtgacatttgttgtagttttgcaccaggtctggaagaaacacccggttcatcgcgactttctaggattttacgtggttgatagccatagaatgtctgcccagacacacggtctgttgggccagtttttccagcctttcgacttcaaggtaagtgacatccgcccgggctcggatccgactaaaccggatgcaaccctggtagtaaagaatcaccagctgatcgtgacccgcgggtcccaaaaagattacagaaaagatgcctcaattggcacgaaagtcgtgtgttggttcgtccataacaacggagaaggactaattgatggggttcatacagattacatagtgcctaaccttttctag

SEQ ID NO: 126656 - DNA, 2013 bp, Artificial Sequence
  derived and/or modified sequence
atggccttcgcctggtggccctgcctgatcctggccctgctgagctctctggccgctagtggtttcccccgctctccttttagactactcgggaaaagaagtctgccggagggcgtggccaatggcattgaggtgtacagtactaagattaattccaaggttacatccagatttgcccacaacgtggtgaccatgcgtgcggtcaaccgtgcagatacggccaaggaagtctctttcgatgtggaactccctaaaacagccttcatcaccaattttacgttaaccattgacggtgttacctaccccggaaacgttaaggagaaagaggtcgcaaagaagcaatatgaaaaggccgtctcccagggtaagaccgccgggctggtgaaggcatcaggaaggaaactcgagaagtttacagtgagtgttaacgtggcagctggcagcaaggtgacatttgaactgacatacgaggagcttctcaaaaggcataagggcaagtacgaaatgtatttgaaagtgcagccaaagcagctcgtgaaacatttcgagattgaagtggatatcttcgaacctcaggggatatcgatgctcgacgctgaggccagttttatcacaaacgatctcttgggctctgcgctaaccaagagcttcagcggcaagaaggggcacgtctccttcaagccaagtctggatcagcaaagatcttgccccacttgcaccgactccctccttaacggcgatttcacgattacctatgacgtaaacagggaatctccaggcaacgttcaaatcgtgaatggatactttgtccacttctttgctccccagggcttgccagtagtgccaaagaacgttgcttttgtcatcgatatcagcggttcgatggccggtcggaagctggagcaaactaaagaggccctgctacgcattctggaagatatgcaggaagaagattacctcaactttatcctattctcgggcgacgtatctacgtggaaggagcacctggtgcaggcgactccagaaaacctgcaggaagcgagaacctttgtgaagtccatggaagacaaagggatgaccaacatcaacgatggactcctccgtggcatcagtatgctcaataaggctagggaggagcaccggattcccgagcgaagcacgtctatagtgatcatgctgaccgacggtgacgcaaacgtgggtgagagccgccctgagaaaattcaagagaacgtccgtaatgccatcggtggcaaattccccctgtacaatctgggatttggcaataacctgaactacaacttcttggagaacatggctctggaaaaccatggttttgcccgcaggatttacgaggacagcgatgcagaccttcaactgcaagggttttacgaggaggtggccaacccactgctgaccggagtcgagatggaataccccgagaacgcaattttggatcttacacaaaatacttatcagcatttttacgacgggtccgagattgtcgtcgcgggcaggctggtcgacgaggatatgaactctttcaaggctgacgtgaagggacatggcgcaactaacgatttgacgttcacggaggaagtggatatgaaggaaatggaaaaagctttgcaggagagagattatatctttggaaactacatcgagagattgtgggcttatctcacaatagaacagttgctggagaagaggaagaatgcacatggggaggagaaagagaacttaactgcccgcgccttggacctcagccttaagtatcattttgtgactccacttactagcatggtggtgaccaagcctgaagataatgaagacgagcgggcaatagctgataagccaggcgaagggggtgacagtcacactggcgaacctagacacgtcctgcccgaccagctccccgcttcctcaaaaccactcttgttgtgcggacgcggctcacccctccatcaccctaacagtggggagaggcggtgtccactccttcagcaccgctag

SEQ ID NO: 126657 - DNA, 2673 bp, Artificial Sequence
  derived and/or modified sequence
atggccttcgcctggtggccctgcctgatcctggccctgctgagctccctggccgcgtcagggttccctcggtctccattccgcctgctggggaagcgctcattaccggagggggtggctaacggaattgaggtttattctacgaagattaacagcaaggtaacgagtcgctttgcacataacgtcgtcacaatgcgcgccgtgaatcgagcggacaccgctaaggaggtgtctttcgacgtggagctgccaaagacagccttcatcaccaattttacactgacaatcgatggagtcacctaccccggcaacgtcaaggaaaaggaggttgcaaaaaagcagtacgaaaaagctgtgtcgcagggaaagaccgccggtctggtgaaggcaagcggtagaaagttggagaaattcacagtctcagtcaacgttgccgctgggagcaaagttacatttgagctgacttatgaagaactgctcaagcggcacaagggaaaatatgagatgtacctaaaggtccagcccaaacagttagtgaagcacttcgaaatcgaagtcgacatcttcgagcctcagggcatctctatgctggatgcggaggcctcatttattacaaacgatcttctgggctcagctcttacaaaaagcttttccggaaagaagggccacgtgagcttcaaaccctcacttgatcagcaaagatcgtgccccacatgtaccgattcacttctgaacggagattttacaatcacctatgacgtcaatcgggagagtccaggtaatgtccagattgtgaatggctactttgtgcatttctttgctccccaaggactccccgtcgtgcctaaaaacgtggcattcgtgattgacattagtggtagcatggcaggccggaaattagaacagaccaaagaggctctcctcagaattctggaggatatgcaggaggaggattatctgaatttcattcttttttccggggatgtctctacctggaaagagcacctcgttcaagccacgcctgagaatctacaagaagctcgaacgtttgtgaagagcatggaggacaaaggaatgacaaatatcaacgacggccttcttcgtggcattagtatgctgaataaagcgcgcgaggagcacaggattcctgagcggtccacttcaattgtgattatgctgacggacggcgacgcgaacgtaggcgaatccagacccgaaaaaatacaagaaaatgtgcgcaacgcgatcggaggcaaatttcccttgtataatctgggctttggcaataacttaaactataatttccttgagaacatggccctggagaatcacggattcgctcggcggatctatgaggacagcgacgctgacctgcagctgcaagggttttatgaagaggtagcaaatcctctcttgaccggtgtcgagatggagtacccagagaacgcgatccttgacctcactcagaatacttaccagcacttctatgacggaagcgagatcgtggtggctggacgtttagttgatgaggatatgaactccttcaaagctgatgtcaaggggcatggtgccacaaacgacctgacctttacggaggaggttgatatgaaagaaatggagaaggctcttcaggaaagggactatatcttcgggaactatatcgagagactgtgggcatatctaaccatagaacaactgctcgaaaagaggaagaatgcacatggcgaagagaaggagaatcttacagctcgcgccctagacctctctttgaaataccactttgtgactccactgactagtatggtggtgaccaaaccagaggataatgaggatgaacgggcaatagctgataagcctggggaggacgcagaagccaccccagtaagccctgcaatgtcctatcttaccagctatcagcccccccaaaatccgtactattacgtggacggcgatccccactttattatacagattccagagaaagacgatgcgctgtgtttcaacatcgacgaggcccccggaaccgtattgcgactcatccaagatgcagtgactggtttgacggtgaatgggcaaattactggtgacaagcgcgggtcacccgactctaaaacgcggaagacttactttggtaagctagggattgccaacgcacagatggatttccaggtggaagtcactaccgagaagatcacattgtggaacagggccgttcctagcacctttagttggctggatactgtcactgtgactcaggacgggctgagtatgatgattaatagaaagaacatggtggtgagtttcggcgatggggtaactttcgtagtggtgctgcaccaagtatggaagaaacatcctgtgcacagagattttctaggcttctacgttgttgacagccacagaatgtccgctcagactcacgggcttctcgggcagttcttccagcctttcgacttcaaggtgagcgacatccgccccggctcagaccccaccaaaccagacgctacgctcgtcgtcaaaaatcaccagttaattgtaacgaggggatcacagaaggattaccggaaggacgcctcaatcggcaccaaagtagtgtgctggttcgtgcacaacaacggagaggggttgatagacggggtccatactgattacatagttcctaacctgttttag

SEQ ID NO: 126658 - DNA, 1977 bp, Artificial Sequence
  derived and/or modified sequence
atggccttcgcctggtggccctgcctgatcctggccctgctgagctcgttggcagcatcgggcttccctcgctcaccgtttcgacttttaggtaagcgttccttaccagagggcgtagcgaacgggattgaggtgtactctacaaagatcaactcaaaagtaacaagtaggttcgcccataatgttgttaccatgagagcagtgaaccgggctgatacagctaaggaggtatcattcgatgtggaactcccaaagaccgcctttattacaaattttactctcactatcgacggagttacataccccgggaatgtaaaagagaaggaagtggctaaaaaacagtatgagaaggctgtgagccaaggtaagacggcaggcctggtcaaggccagcggccggaaactggagaagttcactgtttccgtcaacgtggcagccggatccaagcgccacaaagggaaatacgagatgtacctgaaagtccagccaaagcagctggtgaagcactttgagattgaggtcgacatctttgagccccagggcatctctatgttagatgcagaggcctccttcatcaccaatgaccttctgggaagcgccctgacgaaaagtttctccgggaaaaaaggacacgtctcctttaagcccagcctcgaccagcagcgttcatgcccgacatgtacagactccctccttaatggtgatttcacgatcacttacgacgtgaacagagagagtcccggaaatgtgcagatcgttaacggctactttgtgcacttcttcgcccctcaaggcctgccagtggtccctaaaaatgtcgcttttgttatcgatatcagcggtagtatggcggggcggaaactcgagcagaccaaggaagccttgctgcgaatcctggaagatatgcaggaggaagattatctgaactttattctgttttccggcgacgtgtcaacctggaaggagcatcttgtacaggctacaccagagaacttacaggaggccagaacctttgtgaagtcgatggaggataagggcatgaccaatattaacgacggtctgctccgaggaatctccatgctgaacaaggcaagggaggagcataggattcccgaacggtccacctctatcgtcatcatgttgactgatggagacgcgaacgttggcgagtcacgtcctgagaaaatccaggagaacgtgcgcaatgcaatcggcggcaagttccccttgtacaatctggggtttggcaacaacctgaattacaatttcctcgagaacatggcactggaaaaccacggcttcgcgcggcgtatctatgaagactccgatgccgacctgcagctgcaggggttctacgaagaggtggcaaatccattgttgactggcgtggagatggagtatcccgaaaatgccatcctggacctgacgcagaacacctaccaacacttctatgatggttccgaaatagtggtggctgggcgccttgtagatgaggatatgaatagctttaaagcagacgttaaaggtcatggcgccacaaatgacctgacctttaccgaagaggtagatatgaaggagatggagaaagcactgcaggaacgcgattatattttcggcaattacattgagcgcctgtgggcttacctgactattgagcagctcttggaaaaacgcaagaacgctcacggggaggagaaggagaaccttactgctagagcacttgatttaagtttaaagtaccacttcgttacacccttgaccagcatggttgtgaccaagcccgaggacaacgaggacgagcgggccatcgcagacaagcccggagaggggggagatagccatactggcgagccacgccatgtcctgcccgaccagttaccagcctcctccaagccacttcttctttgtggcagaggttccccactccatcaccccaattccggcgagcgcagatgccctctgcttcaacaccggtag

SEQ ID NO: 126659 - DNA, 2658 bp, Artificial Sequence
  derived and/or modified sequence
atggttgcactgtctcatctggggtctgctctgcaactgggcagcttgttcccccgaagccccttcagactgctgggcaaacggtccctccccgagggcgtcgccaatggaattgaggtgtattcaactaaaattaactcaaaggttaccagtcgctttgcacacaatgtggtgacaatgcgggctgttaacagagcagacaccgctaaggaagtatcttttgacgtcgaattgcccaagacagccttcatcaccaatttcaccctgacaatcgacggtgtaacttaccctggcaacgtaaaagagaaagaagtagccaaaaagcagtatgagaaggcggtcagtcaaggtaaaacagcgggactcgttaaggcttctggcagaaagctcgagaagttcactgtcagcgtaaacgtagcagcaggatcaaaagtgaccttcgaacttacatacgaagaactcttgaaacgacacaaagggaaatatgagatgtatctgaaagtacaacctaagcagcttgttaagcattttgaaatcgaggtcgacatctttgagccccaggggatctccatgttagacgccgaggcttccttcattactaatgacttgctggggtctgccttgaccaaaagtttttctgggaaaaaaggacatgtgtcttttaaaccttcattggaccagcagaggagctgcccaacttgtactgactcacttctcaacggcgactttacaataacttacgacgtgaatagggaaagtccaggaaacgtgcagattgtaaacggatacttcgtacattttttcgcaccacaggggctgcccgtggtccccaagaacgtggccttcgtgatcgatataagcggcagtatggctggacgcaagctcgagcagaccaaggaagcattgctccggatcctcgaggacatgcaagaggaggattatctaaatttcatattgttcagtggtgatgtgagcacttggaaggagcatcttgtgcaagccactcccgaaaacttacaagaagctagaactttcgtgaaatctatggaggataaaggcatgactaacataaatgatggactcctgcgcggtatttctatgctgaacaaagcaagagaagagcaccgaatccctgagcgatccaccagcattgtgataatgttgaccgacggtgacgcaaacgtaggagaatcgcggcctgaaaagatccaggagaatgtgagaaacgctatcggtggcaaattcccactgtataacctgggctttggtaacaatctcaattataactttctcgagaacatggcactggagaatcacggatttgcccgaagaatctatgaggactctgacgccgacctccagctgcaggggttctacgaggaggtggctaaccccctcctgaccggtgttgaaatggaatacccagaaaacgctatcctggacctgacacagaatacctaccagcatttttacgacggcagcgagatagtcgtggcgggtcgactggttgacgaagacatgaatagctttaaggcagacgtgaagggtcacggggctaccaatgatctgacctttaccgaggaggtggacatgaaagagatggagaaggcgctgcaggagcgcgattacattttcggaaattatatcgagcgactatgggcctacttgaccattgaacaattgcttgagaagagaaagaacgcacacggcgaggaaaaagaaaaccttacggcaagagctcttgacctaagtctcaagtaccactttgttacccctttaacttctatggtggttacgaagcccgaggataacgaagatgaaagagccatcgccgataaacccggagagggattcagtgctacacccgtctcaccagcgatgagctacctgacctcttaccagcctcctcagaatccgtattactacgtggacggtgatccccactttattatacagattccagagaaagatgatgcactttgttttaacattgacgaagcccctggcacagttttacgcctgattcaagatgccgtgaccggcctgactgtgaatgggcaaatcaccggtgataagcgagggagcccggactcaaaaaccaggaagacatactttggtaaacttggaatcgccaacgcgcagatggactttcaggtggaagtcaccacagaaaaaatcaccctctggaacagggctgtaccaagcacctttagttggctggacactgtcactgttacccaggatgggctgtccatgatgatcaaccgaaagaatatggtggtctcatttggtgacggtgtgacgttcgtggtagttttgcaccaggtgtggaaaaaacaccccgtgcatcgtgatttcctgggattctatgtggttgattcacacagaatgtccgcacagacacacggacttttaggccagttctttcagcccttcgactttaaggtgtctgacatccgacccggttcagacccgaccaaaccagatgccacattggtagtgaagaatcaccagttgatagtgacaagggggtcgcaaaaggattatagaaaggacgccagtataggaaccaaggtggtctgctggttcgtacataataacggggaaggattgattgacggagtgcacacggattatatcgtgccaaatctattctag

SEQ ID NO: 126660 - DNA, 2013 bp, Artificial Sequence
  derived and/or modified sequence
atggcgttcgcctggtggccatgcttgatcctggccttactgtcctcgctagccgcaagcgggtttccaagatctcccttccgccttttgggaaagcgctctctgcctgagggcgtcgcaaacggtatcgaggtgtactccaccaagattaatagcaaggttacctctagatttgcccacaacgtcgtgaccatgagggccgtgaatcgcgcagatactgccaaggaagtgagcttcgacgttgagcttcctaagacggcttttatcaccaacttcacactcaccattgacggtgtcacctacccaggcaatgttaaagaaaaggaagtagccaagaagcagtatgagaaggcggtgtctcagggaaagactgcaggactagttaaggcgagcgggagaaagcttgaaaaatttactgtttccgttaatgttgcggcaggcagcaaagtcacattcgagctcacctacgaagaattactgaagcgccataaagggaagtatgaaatgtacctgaaggtgcagcccaaacagctcgtcaagcattttgagatcgaggtggatatcttcgagcctcagggcataagtatgcttgacgccgaggcatcattcattacaaatgacctcctgggctccgcactaacaaaaagcttctccggcaagaaaggccatgtcagcttcaagccgtccctggaccagcagcgcagctgtccaacgtgcactgactccctacttaatggcgatttcacaatcacatacgacgttaatcgggagagccctggcaatgtgcaaatcgttaatggttatttcgtacacttttttgcgccacagggactgcccgtggtgcccaaaaatgtcgccttcgttatcgatattagcggttcaatggcaggtcgaaaattagagcaaactaaggaggctcttttacgcatacttgaagacatgcaagaagaagactaccttaattttatattatttagcggcgacgtctcaacatggaaagaacatttagtgcaggccactccggagaacctccaggaagcgagaacttttgtgaaatcaatggaagataagggaatgacgaatattaatgacggcttactgcgtggcatatcgatgctgaataaagccagggaagaacacagaattccagagcgctctacttcaattgtcattatgctgaccgacggggacgcgaacgtgggcgagtcacgccctgaaaaaattcaggagaacgttcggaatgccattgggggaaagttcccactgtataatctggggttcggcaataatcttaattacaacttccttgagaacatggctctggaaaatcatggctttgctcggagaatttacgaagattcggacgcggatctccaactgcaagggttctacgaggaagtggccaaccctctgttgacgggagtggaaatggagtaccctgagaatgccattttggacttaacacaaaacacatatcagcacttctacgacggcagtgaaatcgtggttgcaggtcgcctggtggacgaagatatgaacagctttaaagccgatgtgaagggccacggagctactaacgacttaactttcacagaagaagtggatatgaaagaaatggagaaggctctccaggagagggattacatctttggcaactacatcgagagactgtgggcgtacttgaccatcgagcaattgttggaaaagaggaagaatgcacatggcgaagagaaagagaatttgactgcacgcgcattggacctcagcttgaaataccactttgtcacccccctgacgtctatggtggtgaccaaaccagaggacaacgaggacgagagagccatcgccgacaaaccaggtgaagggggagactcacatacaggcgagcctaggcatgtgttaccagaccaactgcccgcatcttcaaaaccactgcttctatgtggtcggggaagtccactgcatcaccccaatagcggtgagcgccgttgtcctctgctccaacacagatag

SEQ ID NO: 126661 - DNA, 2673 bp, Artificial Sequence
  derived and/or modified sequence
atggctttcgcctggtggccttgcctcatccttgcattgttgtcaagccttgcagcttccggtttccccagatccccattcaggcttcttggaaagcgctctcttccggaaggggtcgccaatggtatcgaggtttactctaccaaaatcaactcaaaagtaaccagtagatttgctcataacgtggttaccatgcgcgctgtcaacagagccgacacagcaaaggaggtgagctttgacgtggagctgccaaaaaccgccttcatcacgaatttcaccctgacaatcgatggcgtgacataccccggaaatgtcaaggaaaaggaagtggctaagaagcagtacgagaaggccgtgtcgcaaggcaaaacggctggcttggtcaaggcgtccggtcgcaaactggaaaagtttacagtttccgttaatgtggcagccggaagtaaggttacctttgagctcacatatgaggaactgttgaaacgccataaaggtaagtacgagatgtatttaaaggtgcagccaaagcaactcgtgaaacattttgaaatcgaagttgacattttcgagccgcagggcatttctatgttagacgctgaggcttccttcattactaacgatttgttaggcagcgctctaacaaagagcttttccggcaagaagggccacgtgtcctttaaaccttcactcgaccaacaaaggtcttgccctacctgcacagactccctgctgaacggagatttcacaataacttatgatgttaatagggagtctcctggaaatgtgcagattgtgaatggctattttgttcatttttttgcgcctcagggactgcccgtcgtacctaaaaacgtggccttcgttatcgatatctccggcagcatggcgggaaggaagttggagcaaactaaagaggcgctacttcgcatcttggaagatatgcaggaggaggactacctcaatttcattttattttcaggcgacgtgagtacgtggaaggaacacttagttcaggcaacccccgagaacctccaggaggcacgaacctttgtgaagtctatggaagataaagggatgaccaacataaacgatggtctcctgagaggtataagcatgctcaacaaggctagggaagagcataggatcccggaacggagtacctccatcgtgataatgctgaccgatggggatgctaacgttggagagagtcggcctgaaaaaattcaggaaaacgtccgaaatgctattggtggaaagttccctctgtacaacctcggctttggaaacaacctaaattacaattttttagagaatatggccctggaaaaccatggttttgcaaggaggatttatgaggactccgatgcagaccttcagttgcaggggttctacgaggaggtggcgaacccgctgctcacaggggtcgaaatggaatatccagagaatgccatccttgaccttactcaaaacacatatcaacacttttatgacggatcggagattgtggtcgctgggcgactggtagacgaggacatgaacagtttcaaagccgatgtgaaaggccacggggctacaaacgacctaacttttacagaagaagtagacatgaaagaaatggagaaggccctgcaagaacgggactacatttttggcaattatatcgagaggttgtgggcctacttgaccatcgagcagcttctggaaaaaaggaagaatgctcacggggaagagaaggaaaatcttacggcccgagccctggatctgtcattaaagtatcacttcgtgactccattaacgagcatggtggtgactaaacctgaggataacgaagacgaaagagccatcgcggacaagccgggagaggatgccgaagccactcctgtgtcccctgcaatgtcatacctgacatcttaccagccacctcagaacccttactactatgttgacggcgatccacacttcatcatccaaattccagagaaggatgacgccctatgcttcaatatagatgaagccccaggcacagttctaaggctgatccaggacgccgtgacgggtctcaccgtgaacggacagattactggcgataaacggggttctcctgactccaaaacaaggaagacttacttcgggaaactcggaatcgctaacgctcagatggattttcaggttgaagtcactactgaaaaaatcaccctttggaacagggcggtgccttcaaccttcagctggttggatacagtaactgtgacccaggacggcttaagcatgatgatcaatcgtaagaatatggttgtatcattcggtgacggagtcactttcgtggtcgtcctgcaccaggtttggaaaaaacacccagttcacagggattttctggggttctatgtagtggattcccatcgcatgtccgcccagacccacgggctcctaggacaatttttccagccgtttgacttcaaggttagcgatatacggccaggatccgaccctactaagcctgatgccacgctcgtggttaaaaatcaccagctgatagtcacaaggggcagccaaaaggattatcgtaaagatgcctctattgggaccaaagtggtgtgttggttcgttcataataacggtgaaggcctgatcgacggcgtccatactgattatatcgtcccgaacctgttttag

SEQ ID NO: 126662 - DNA, 1977 bp, Artificial Sequence
  derived and/or modified sequence
atggcctttgcctggtggccctgcctgatcttggcccttctgagcagcctggctgcctcaggctttcctcgctcccccttccgtttacttggaaagcggagtctccccgaaggggtcgccaacggaatcgaggtgtactcaaccaaaataaattctaaagttacaagcagattcgcccataacgtggttaccatgcgcgctgtcaacagagcagatacggcgaaggaggtcagcttcgatgtggaactgccaaagacagcctttatcaccaactttactcttacaatagatggcgtgacttatcctggtaacgttaaggaaaaggaggtggctaaaaaacagtacgagaaagcagtgagtcagggcaaaacagccggtctcgtgaaggcaagcgggaggaagctagaaaaattcacagtcagcgtgaacgtggcagctggctccaaaaggcacaaagggaagtacgaaatgtacttgaaggtgcagcctaagcaactggtgaaacactttgagatagaggttgacattttcgagccccagggcatctccatgctggacgcagaagcaagcttcatcacgaacgacctgctggggagcgctcttactaagtcttttagtggtaagaagggccacgttagctttaagcctagcctggatcagcagcgctcatgccctacctgcacagatagtctactgaacggcgactttacaatcacgtacgatgtgaatagagaaagtcctgggaatgttcaaattgttaacggatacttcgtgcatttcttcgctccccagggccttcctgtggtgcctaaaaatgtcgccttcgtaatcgacatttcaggcagcatggccggacggaaactggaacagactaaggaggctctactgcgtattctggaggacatgcaggaagaggattatctcaattttatcctgtttagcggcgatgtgtccacttggaaggagcacctggtccaggctaccccggagaatctccaggaagcgaggacatttgtgaaatcaatggaagacaaaggaatgaccaatatcaacgatggactgttaaggggcataagcatgttaaataaggccagggaggagcaccgcatccccgaaagatctacctctatcgtaatcatgctgaccgacggcgatgccaacgtcggtgaatccaggcccgagaaaatacaggaaaacgtaaggaacgctatcgggggaaagttccctctttacaatctgggatttggaaacaatctgaattataacttcctcgagaatatggccttagaaaaccatggttttgcacgacggatttacgaagacagcgacgccgaccttcagttacaggggttctacgaggaagtggctaaccccctcctgacaggggtggaaatggaatatcctgagaatgccattctggacctgacacagaatacataccaacatttttacgacggatctgagattgttgtggccggaagactggtagacgaggatatgaattcttttaaggcggacgtgaagggccacggtgcaaccaatgacttgacttttactgaggaagttgacatgaaggagatggaaaaggcacttcaggagcgtgactacatatttggaaactacatcgaacggctctgggcctacctgacaatcgagcagctgctcgagaaaaggaaaaacgcccacggggaggagaaagaaaacctgaccgcgagagcgctggacctgagcttgaaatatcacttcgtgacccctctgacatccatggtggtgacgaagccagaggataatgaggacgaacgcgcaatcgcagacaagcctggcgagggcggtgattcacacactggtgagcccaggcacgtattaccggaccagttgcctgccagcagtaagccgctcctgttgtgcggcagaggttctccactccaccatccaaacagcggggaaagaaggtgccctctgctgcaacaccgctag

SEQ ID NO: 126663 - DNA, 2658 bp, Artificial Sequence
  derived and/or modified sequence
atggtggccctgagccacctgggcagcgccctgcagctgggcagcctgttccccagaagccccttcagactgctgggcaagagaagcctgcccgagggcgtggccaacggcatcgaggtgtacagcaccaagatcaacagcaaggtgaccagcagattcgcccacaacgtggtgaccatgagagccgtgaacagagccgacaccgccaaggaggtgagcttcgacgtggagctgcccaagaccgccttcatcaccaacttcaccctgaccatcgacggcgtgacctaccccggcaacgtgaaggagaaggaggtggccaagaagcagtacgagaaggccgtgagccagggcaagaccgccggcctggtgaaggccagcggcagaaagctggagaagttcaccgtgagcgtgaacgtggccgccggcagcaaggtgaccttcgagctgacctacgaggagctgctgaagagacacaagggcaagtacgagatgtacctgaaggtgcagcccaagcagctggtgaagcacttcgagatcgaggtggacatcttcgagccccagggcatcagcatgctggacgccgaggccagcttcatcaccaacgacctgctgggcagcgccctgaccaagagcttcagcggcaagaagggccacgtgagcttcaagcccagcctggaccagcagagaagctgccccacctgcaccgacagcctgctgaacggcgacttcaccatcacctacgacgtgaacagagagagccccggcaacgtgcagatcgtgaacggctacttcgtgcacttcttcgccccccagggcctgcccgtggtgcccaagaacgtggccttcgtgatcgacatcagcggcagcatggccggcagaaagctggagcagaccaaggaggccctgctgagaatcctggaggacatgcaggaggaggactacctgaacttcatcctgttcagcggcgacgtgagcacctggaaggagcacctggtgcaggccacccccgagaacctgcaggaggccagaaccttcgtgaagagcatggaggacaagggcatgaccaacatcaacgacggcctgctgagaggcatcagcatgctgaacaaggccagagaggagcacagaatccccgagagaagcaccagcatcgtgatcatgctgaccgacggcgacgccaacgtgggcgagagcagacccgagaagatccaggagaacgtgagaaacgccatcggcggcaagttccccctgtacaacctgggcttcggcaacaacctgaactacaacttcctggagaacatggccctggagaaccacggcttcgccagaagaatctacgaggacagcgacgccgacctgcagctgcagggcttctacgaggaggtggccaaccccctgctgaccggcgtggagatggagtaccccgagaacgccatcctggacctgacccagaacacctaccagcacttctacgacggcagcgagatcgtggtggccggcagactggtggacgaggacatgaacagcttcaaggccgacgtgaagggccacggcgccaccaacgacctgaccttcaccgaggaggtggacatgaaggagatggagaaggccctgcaggagagagactacatcttcggcaactacatcgagagactgtgggcctacctgaccatcgagcagctgctggagaagagaaagaacgcccacggcgaggagaaggagaacctgaccgccagagccctggacctgagcctgaagtaccacttcgtgacccccctgaccagcatggtggtgaccaagcccgaggacaacgaggacgagagagccatcgccgacaagcccggcgagggcttcagcgccacccccgtgagccccgccatgagctacctgaccagctaccagcccccccagaacccctactactacgtggacggcgacccccacttcatcatccagatccccgagaaggacgacgccctgtgcttcaacatcgacgaggcccccggcaccgtgctgagactgatccaggacgccgtgaccggcctgaccgtgaacggccagatcaccggcgacaagagaggcagccccgacagcaagaccagaaagacctacttcggcaagctgggcatcgccaacgcccagatggacttccaggtggaggtgaccaccgagaagatcaccctgtggaacagagccgtgcccagcaccttcagctggctggacaccgtgaccgtgacccaggacggcctgagcatgatgatcaacagaaagaacatggtggtgagcttcggcgacggcgtgaccttcgtggtggtgctgcaccaggtgtggaagaagcaccccgtgcacagagacttcctgggcttctacgtggtggacagccacagaatgagcgcccagacccacggcctgctgggccagttcttccagcccttcgacttcaaggtgagcgacatcagacccggcagcgaccccaccaagcccgacgccaccctggtggtgaagaaccaccagctgatcgtgaccagaggcagccagaaggactacagaaaggacgccagcatcggcaccaaggtggtgtgctggttcgtgcacaacaacggcgagggcctgatcgacggcgtgcacaccgactacatcgtgcccaacctgttctag

SEQ ID NO: 126664 - DNA, 2013 bp, Artificial Sequence
  derived and/or modified sequence
atggccttcgcctggtggccctgcctgatcctggccctgctgagcagcctggccgccagcggcttccccagaagccccttcagactgctgggcaagagaagcctgcccgagggcgtggccaacggcatcgaggtgtacagcaccaagatcaacagcaaggtgaccagcagattcgcccacaacgtggtgaccatgagagccgtgaacagagccgacaccgccaaggaggtgagcttcgacgtggagctgcccaagaccgccttcatcaccaacttcaccctgaccatcgacggcgtgacctaccccggcaacgtgaaggagaaggaggtggccaagaagcagtacgagaaggccgtgagccagggcaagaccgccggcctggtgaaggccagcggcagaaagctggagaagttcaccgtgagcgtgaacgtggccgccggcagcaaggtgaccttcgagctgacctacgaggagctgctgaagagacacaagggcaagtacgagatgtacctgaaggtgcagcccaagcagctggtgaagcacttcgagatcgaggtggacatcttcgagccccagggcatcagcatgctggacgccgaggccagcttcatcaccaacgacctgctgggcagcgccctgaccaagagcttcagcggcaagaagggccacgtgagcttcaagcccagcctggaccagcagagaagctgccccacctgcaccgacagcctgctgaacggcgacttcaccatcacctacgacgtgaacagagagagccccggcaacgtgcagatcgtgaacggctacttcgtgcacttcttcgccccccagggcctgcccgtggtgcccaagaacgtggccttcgtgatcgacatcagcggcagcatggccggcagaaagctggagcagaccaaggaggccctgctgagaatcctggaggacatgcaggaggaggactacctgaacttcatcctgttcagcggcgacgtgagcacctggaaggagcacctggtgcaggccacccccgagaacctgcaggaggccagaaccttcgtgaagagcatggaggacaagggcatgaccaacatcaacgacggcctgctgagaggcatcagcatgctgaacaaggccagagaggagcacagaatccccgagagaagcaccagcatcgtgatcatgctgaccgacggcgacgccaacgtgggcgagagcagacccgagaagatccaggagaacgtgagaaacgccatcggcggcaagttccccctgtacaacctgggcttcggcaacaacctgaactacaacttcctggagaacatggccctggagaaccacggcttcgccagaagaatctacgaggacagcgacgccgacctgcagctgcagggcttctacgaggaggtggccaaccccctgctgaccggcgtggagatggagtaccccgagaacgccatcctggacctgacccagaacacctaccagcacttctacgacggcagcgagatcgtggtggccggcagactggtggacgaggacatgaacagcttcaaggccgacgtgaagggccacggcgccaccaacgacctgaccttcaccgaggaggtggacatgaaggagatggagaaggccctgcaggagagagactacatcttcggcaactacatcgagagactgtgggcctacctgaccatcgagcagctgctggagaagagaaagaacgcccacggcgaggagaaggagaacctgaccgccagagccctggacctgagcctgaagtaccacttcgtgacccccctgaccagcatggtggtgaccaagcccgaggacaacgaggacgagagagccatcgccgacaagcccggcgagggcggcgacagccacaccggcgagcccagacacgtgctgcccgaccagctgcccgccagcagcaagcccctgctgctgtgcggcagaggcagccccctgcaccaccccaacagcggcgagagaagatgccccctgctgcagcacagatag

SEQ ID NO: 126665 - DNA, 2673 bp, Artificial Sequence
  derived and/or modified sequence
atggccttcgcctggtggccctgcctgatcctggccctgctgagcagcctggccgccagcggcttccccagaagccccttcagactgctgggcaagagaagcctgcccgagggcgtggccaacggcatcgaggtgtacagcaccaagatcaacagcaaggtgaccagcagattcgcccacaacgtggtgaccatgagagccgtgaacagagccgacaccgccaaggaggtgagcttcgacgtggagctgcccaagaccgccttcatcaccaacttcaccctgaccatcgacggcgtgacctaccccggcaacgtgaaggagaaggaggtggccaagaagcagtacgagaaggccgtgagccagggcaagaccgccggcctggtgaaggccagcggcagaaagctggagaagttcaccgtgagcgtgaacgtggccgccggcagcaaggtgaccttcgagctgacctacgaggagctgctgaagagacacaagggcaagtacgagatgtacctgaaggtgcagcccaagcagctggtgaagcacttcgagatcgaggtggacatcttcgagccccagggcatcagcatgctggacgccgaggccagcttcatcaccaacgacctgctgggcagcgccctgaccaagagcttcagcggcaagaagggccacgtgagcttcaagcccagcctggaccagcagagaagctgccccacctgcaccgacagcctgctgaacggcgacttcaccatcacctacgacgtgaacagagagagccccggcaacgtgcagatcgtgaacggctacttcgtgcacttcttcgccccccagggcctgcccgtggtgcccaagaacgtggccttcgtgatcgacatcagcggcagcatggccggcagaaagctggagcagaccaaggaggccctgctgagaatcctggaggacatgcaggaggaggactacctgaacttcatcctgttcagcggcgacgtgagcacctggaaggagcacctggtgcaggccacccccgagaacctgcaggaggccagaaccttcgtgaagagcatggaggacaagggcatgaccaacatcaacgacggcctgctgagaggcatcagcatgctgaacaaggccagagaggagcacagaatccccgagagaagcaccagcatcgtgatcatgctgaccgacggcgacgccaacgtgggcgagagcagacccgagaagatccaggagaacgtgagaaacgccatcggcggcaagttccccctgtacaacctgggcttcggcaacaacctgaactacaacttcctggagaacatggccctggagaaccacggcttcgccagaagaatctacgaggacagcgacgccgacctgcagctgcagggcttctacgaggaggtggccaaccccctgctgaccggcgtggagatggagtaccccgagaacgccatcctggacctgacccagaacacctaccagcacttctacgacggcagcgagatcgtggtggccggcagactggtggacgaggacatgaacagcttcaaggccgacgtgaagggccacggcgccaccaacgacctgaccttcaccgaggaggtggacatgaaggagatggagaaggccctgcaggagagagactacatcttcggcaactacatcgagagactgtgggcctacctgaccatcgagcagctgctggagaagagaaagaacgcccacggcgaggagaaggagaacctgaccgccagagccctggacctgagcctgaagtaccacttcgtgacccccctgaccagcatggtggtgaccaagcccgaggacaacgaggacgagagagccatcgccgacaagcccggcgaggacgccgaggccacccccgtgagccccgccatgagctacctgaccagctaccagcccccccagaacccctactactacgtggacggcgacccccacttcatcatccagatccccgagaaggacgacgccctgtgcttcaacatcgacgaggcccccggcaccgtgctgagactgatccaggacgccgtgaccggcctgaccgtgaacggccagatcaccggcgacaagagaggcagccccgacagcaagaccagaaagacctacttcggcaagctgggcatcgccaacgcccagatggacttccaggtggaggtgaccaccgagaagatcaccctgtggaacagagccgtgcccagcaccttcagctggctggacaccgtgaccgtgacccaggacggcctgagcatgatgatcaacagaaagaacatggtggtgagcttcggcgacggcgtgaccttcgtggtggtgctgcaccaggtgtggaagaagcaccccgtgcacagagacttcctgggcttctacgtggtggacagccacagaatgagcgcccagacccacggcctgctgggccagttcttccagcccttcgacttcaaggtgagcgacatcagacccggcagcgaccccaccaagcccgacgccaccctggtggtgaagaaccaccagctgatcgtgaccagaggcagccagaaggactacagaaaggacgccagcatcggcaccaaggtggtgtgctggttcgtgcacaacaacggcgagggcctgatcgacggcgtgcacaccgactacatcgtgcccaacctgttctag

SEQ ID NO: 126666 - DNA, 1977 bp, Artificial Sequence
  derived and/or modified sequence
atggccttcgcctggtggccctgcctgatcctggccctgctgagcagcctggccgccagcggcttccccagaagccccttcagactgctgggcaagagaagcctgcccgagggcgtggccaacggcatcgaggtgtacagcaccaagatcaacagcaaggtgaccagcagattcgcccacaacgtggtgaccatgagagccgtgaacagagccgacaccgccaaggaggtgagcttcgacgtggagctgcccaagaccgccttcatcaccaacttcaccctgaccatcgacggcgtgacctaccccggcaacgtgaaggagaaggaggtggccaagaagcagtacgagaaggccgtgagccagggcaagaccgccggcctggtgaaggccagcggcagaaagctggagaagttcaccgtgagcgtgaacgtggccgccggcagcaagagacacaagggcaagtacgagatgtacctgaaggtgcagcccaagcagctggtgaagcacttcgagatcgaggtggacatcttcgagccccagggcatcagcatgctggacgccgaggccagcttcatcaccaacgacctgctgggcagcgccctgaccaagagcttcagcggcaagaagggccacgtgagcttcaagcccagcctggaccagcagagaagctgccccacctgcaccgacagcctgctgaacggcgacttcaccatcacctacgacgtgaacagagagagccccggcaacgtgcagatcgtgaacggctacttcgtgcacttcttcgccccccagggcctgcccgtggtgcccaagaacgtggccttcgtgatcgacatcagcggcagcatggccggcagaaagctggagcagaccaaggaggccctgctgagaatcctggaggacatgcaggaggaggactacctgaacttcatcctgttcagcggcgacgtgagcacctggaaggagcacctggtgcaggccacccccgagaacctgcaggaggccagaaccttcgtgaagagcatggaggacaagggcatgaccaacatcaacgacggcctgctgagaggcatcagcatgctgaacaaggccagagaggagcacagaatccccgagagaagcaccagcatcgtgatcatgctgaccgacggcgacgccaacgtgggcgagagcagacccgagaagatccaggagaacgtgagaaacgccatcggcggcaagttccccctgtacaacctgggcttcggcaacaacctgaactacaacttcctggagaacatggccctggagaaccacggcttcgccagaagaatctacgaggacagcgacgccgacctgcagctgcagggcttctacgaggaggtggccaaccccctgctgaccggcgtggagatggagtaccccgagaacgccatcctggacctgacccagaacacctaccagcacttctacgacggcagcgagatcgtggtggccggcagactggtggacgaggacatgaacagcttcaaggccgacgtgaagggccacggcgccaccaacgacctgaccttcaccgaggaggtggacatgaaggagatggagaaggccctgcaggagagagactacatcttcggcaactacatcgagagactgtgggcctacctgaccatcgagcagctgctggagaagagaaagaacgcccacggcgaggagaaggagaacctgaccgccagagccctggacctgagcctgaagtaccacttcgtgacccccctgaccagcatggtggtgaccaagcccgaggacaacgaggacgagagagccatcgccgacaagcccggcgagggcggcgacagccacaccggcgagcccagacacgtgctgcccgaccagctgcccgccagcagcaagcccctgctgctgtgcggcagaggcagccccctgcaccaccccaacagcggcgagagaagatgccccctgctgcagcacagatag

SEQ ID NO: 126667 - protein, 930 aa, Artificial Sequence
  derived and/or modified sequence
MKPPRPVRTCSKVLVLLSLLAIHQTTTAEKNGIDIYSLTVDSRVSSRFAHTVVTSRVVNRANTVQEATFQMELPKKAFITNFSMIIDGMTYPGIIKEKAEAQAQYSAAVAKGKSAGLVKATGRNMEQFQVSVSVAPNAKITFELVYEELLKRRLGVYELLLKVRPQQLVKHLQMDIHIFEPQGISFLETESTFMTNQLVDALTTWQNKTKAHIRFKPTLSQQQKSPEQQETVLDGNLIIRYDVDRAISGGSIQIENGYFVHYFAPEGLTTMPKNVVFVIDKSGSMSGRKIQQTREALIKILDDLSPRDQFNLIVFSTEATQWRPSLVPASAENVNKARSFAAGIQALGGTNINDAMLMAVQLLDSSNQEERLPEGSVSLIILLTDGDPTVGETNPRSIQNNVREAVSGRYSLFCLGFGFDVSYAFLEKLALDNGGLARRIHEDSDSALQLQDFYQEVANPLLTAVTFEYPSNAVEEVTQNNFRLLFKGSEMVVAGKLQDRGPDVLTATVSGKLPTQNITFQTESSVAEQEAEFQSPKYIFHNFMERLWAYLTIQQLLEQTVSASDADQQALRNQALNLSLAYSFVTPLTSMVVTKPDDQEQSQVAEKPMEGESRNRNVHSGSTFFKYYLQGAKIPKPEASFSPRRGWNRQAGAAGSRMNFRPGVLSSRQLGLPGPPDVPDHAAYHPFRRLAILPASAPPATSNPDPAVSRVMNMKIEETTMTTQTPAPIQAPSAILPLPGQSVERLCVDPRHRQGPVNLLSDPEQGVEVTGQYEREKAGFSWIEVTFKNPLVWVHASPEHVVVTRNRRSSAYKWKETLFSVMPGLKMTMDKTGLLLLSDPDKVTIGLLFWDGRGEGLRLLLRDTDRFSSHVGGTLGQFYQEVLWGSPAASDDGRRTLRVQGNDHSATRERRLDYQEGPPGVEISCWSVEL

SEQ ID NO: 126668 - protein, 560 aa, Artificial Sequence
  derived and/or modified sequence
MTYPGIIKEKAEAQAQYSAAVAKGKSAGLVKATGRNMEQFQVSVSVAPNAKITFELVYEELLKRRLGVYELLLKVRPQQLVKHLQMDIHIFEPQGISFLETESTFMTNQLVDALTTWQNKTKAHIRFKPTLSQQQKSPEQQETVLDGNLIIRYDVDRAISGGSIQIENGYFVHYFAPEGLTTMPKNVVFVIDKSGSMSGRKIQQTREALIKILDDLSPRDQFNLIVFSTEATQWRPSLVPASAENVNKARSFAAGIQALGGTNINDAMLMAVQLLDSSNQEERLPEGSVSLIILLTDGDPTVGETNPRSIQNNVREAVSGRYSLFCLGFGFDVSYAFLEKLALDNGGLARRIHEDSDSALQLQDFYQEVANPLLTAVTFEYPSNAVEEVTQNNFRLLFKGSEMVVAGKLQDRGPDVLTATVSGKLPTQNITFQTESSVAEQEAEFQSPKYIFHNFMERLWAYLTIQQLLEQTVSASDADQQALRNQALNLSLAYSFVTPLTSMVVTKPDDQEQSQVAEKPMEGESRNRNVHSGSTFFKYYLQGAKIPKPGDKVGGGGRGD

SEQ ID NO: 126669 - DNA, 2793 bp, Artificial Sequence
  derived and/or modified sequence
atgaaaccaccacggcctgttcgcacgtgtagtaaagtactggtgctgttgagcctgctcgcgattcatcagaccacaactgccgaaaagaacggcattgacatttatagcttgaccgttgatagtcgcgtttcttcccgtttcgcccacaccgtggttacatcaagagtagtgaatcgcgctaacaccgtgcaggaagcgacatttcagatggagctgccaaaaaaggccttcatcaccaatttcagtatgattatagatggtatgacctaccctggtattataaaggagaaagcggaagctcaggcacaatatagtgctgcagtggccaaggggaagagcgcagggcttgtgaaagctacaggtagaaatatggagcagtttcaggtcagcgtgtcagtggcccccaacgccaaaatcactttcgaattggtgtacgaagagctgctgaaacggaggttgggtgtttacgagctgttactcaaagtgcggccacagcaacttgtgaaacatctccagatggacatccatatcttcgagcctcaggggataagttttctcgagaccgaaagcacattcatgactaaccaactggtggacgcgctcacaacctggcagaataagaccaaggctcatattaggtttaagcccactctgagccagcagcagaaaagtccagagcagcaggaaacagtgctggacgggaacctgatcattagatacgatgtggatcgtgcaatttcaggaggatcaatccagattgagaatggttactttgttcattatttcgcacctgagggtctgactaccatgcctaagaacgtggtctttgtcatcgataagtctggtagtatgtccggccgcaaaatccagcagacccgcgaagccctaatcaagatccttgatgacttatcgccccgtgatcagtttaatttgattgtcttctctactgaagcaacccagtggcggccctccctcgtgcctgccagtgctgaaaatgtcaacaaggcccggtcctttgctgcagggattcaggctcttgggggtaccaacattaacgatgccatgctgatggccgtgcagttactcgatagctctaatcaggaggaaagacttccagaaggttctgtgtctctcatcatactgctcaccgatggggatccaacggtgggagagaccaatcccaggtctatacaaaataatgtgcgcgaagctgtaagcggtcgctatagcctgttttgcttaggatttggcttcgacgtcagctatgcctttttagagaagcttgcgctcgacaacgggggacttgcaagacgtattcacgaggattctgactccgctctgcagcttcaggatttttaccaggaggtggcaaatccgctgctgaccgccgtgacttttgagtacccatcaaacgcagtggaggaggtgacccagaacaacttccgtctactgtttaaggggtcagaaatggttgtggccgggaagctgcaggaccggggcccagatgtgttaacggcgactgtgtcgggcaaattacccacgcagaacataacattccaaacagaatcgagcgtggcggagcaagaagccgaatttcagagcccaaagtatatcttccacaatttcatggagcgcttgtgggcgtaccttacaatccagcagcttctggaacagactgtcagtgccagcgacgctgatcaacaagcgctgagaaaccaagctctgaatcttagcctagcatacagcttcgtcacacctcttacaagcatggtagtgaccaagcccgacgaccaagaacaaagccaggtggccgaaaaacccatggagggcgagagtcgaaacaggaacgttcactcgggatctaccttttttaagtattatctacagggggccaagattccaaaaccggaggcatctttttcgccgaggcgaggctggaacagacaagcaggtgctgccggttctaggatgaactttagacctggggtgctgtccagtagacagcttggcctcccaggaccaccagacgtgcccgatcacgctgcgtaccaccctttccggagactcgccatactgcccgcaagtgctccacccgcaacatctaacccggatcctgccgtatcacgggtgatgaacatgaagatcgaagagactactatgaccacacagaccccagcccccatccaggcgcctagtgcaattctgccattgcccggccagtctgtcgagcgcctctgcgtggacccccgccataggcaggggccggttaatctgctttctgaccctgagcaaggggttgaagtcactgggcaatacgagagggagaaagctgggttcagctggatcgaggtcactttcaagaacccccttgtttgggtccatgcaagtcctgagcacgtggtcgtgacaagaaatcgccggtcttccgcttataagtggaaggaaacactgttctctgtcatgcctgggcttaaaatgacaatggacaagactggcctcctactcctgtcagatcccgataaagtgaccattggcctcctgttctgggatggccggggagagggattacgccttctgcttagagacacggatcgattttcctctcatgttggcggcactctcgggcagttctaccaagaagttctgtggggatcaccagccgccagtgacgacggacgccgaactctgcgagtccagggaaacgaccactcagctacccgcgagcggagactggattatcaggagggtcctcctggcgtagagatcagctgttggagcgtggaactgtag

SEQ ID NO: 126670 - DNA, 1683 bp, Artificial Sequence
  derived and/or modified sequence
atgacgtatccaggtatcattaaggagaaggccgaggcccaagctcagtattcagcagccgtagccaagggaaagagcgccggcttagtgaaggcgaccggccggaacatggaacagtttcaggtgtcagtgtctgtagcccctaacgccaagattaccttcgagttagtttacgaggagttgctgaaacgcaggctgggcgtctatgagttgctcttaaaggtgaggccccaacaactagtgaagcacctccagatggatattcatattttcgaaccccaggggattagcttccttgagaccgagtcaacatttatgacaaatcagttagtagacgccttgactacctggcaaaacaagactaaagcccacatccggtttaagcctacactctcacaacaacagaaatcccccgaacagcaagagacggtccttgatggcaacctgataattaggtacgacgtggatagggccattagcggaggaagtatccagatcgagaatggttatttcgtgcattatttcgctcccgagggattaacaacgatgccaaaaaacgttgtctttgtcattgacaaaagcgggagcatgagcggacggaaaatccagcagacgcgggaagcattaatcaaaatcctggatgacttatccccccgggaccagtttaaccttattgttttttccactgaggccacgcagtggcgccccagcctcgtgccagccagcgccgagaacgttaacaaggcacgttcctttgccgcgggcatccaggccctggggggtaccaacatcaatgatgctatgctcatggctgtgcagcttttagacagctccaatcaggaagaacggctgcctgaaggctctgtttccctgatcattctgctcacagacggggaccccacagtaggtgaaacaaacccacgctccattcaaaacaacgtgagagaggcggtttctgggcgttacagcttattttgtctcggtttcggctttgacgtttcatacgcctttctagaaaagctggcgctcgacaacggagggctcgccagacgaattcatgaggactccgactctgctctgcaactccaagacttctatcaggaagtagccaatccactgctgaccgccgtgaccttcgagtaccccagcaatgcggtggaggaggtcacccagaataactttcggctgctgttcaaaggaagcgagatggtcgtcgccgggaagctgcaggaccgggggccagacgtactaacagctactgtgtcaggaaagctgcctacacaaaacatcaccttccagactgagtccagcgtggctgagcaggaagctgagttccagtcaccaaagtatatctttcataatttcatggagaggctgtgggcctatttgaccattcagcagctgcttgagcaaacggtgtcagccagtgatgcagatcagcaagcacttagaaaccaggccctgaacctcagtctcgcttacagctttgtgacaccattgacaagcatggtcgtaacaaagccagatgaccaggaacaatctcaggtggcagagaagcccatggagggggagagcaggaaccgtaacgtacactctggatcaactttcttcaaatattacctccagggggccaagatccccaagccaggggataaagtcggcggtggcggacgcggtgattag

SEQ ID NO: 126671 - DNA, 3336 bp, Artificial Sequence
  derived and/or modified sequence
aacctgcccccatgtgggtggggcagcaaacaagttactaatccattccccacttgctgtcgagttcagaagcctcctggcagacactggagccacgatgaagcccccaaggcctgtccgtacctgcagcaaagttctcgtcctgctttcactgctggccatccaccagactactactgccgaaaagaatggcatcgacatctacagcctcaccgtggactccagggtctcatcccgatttgcccacacggtcgtcaccagccgagtggtcaatagggccaatactgtgcaggaggccaccttccagatggagctgcccaagaaagccttcatcaccaacttctccatgatcatcgatggcatgacctacccagggatcatcaaggagaaggctgaagcccaggcacagtacagcgcagcagtggccaagggaaagagcgctggcctcgtcaaggccaccgggagaaacatggagcagttccaggtgtcggtcagtgtggctcccaatgccaagatcacctttgagctggtctatgaggagctgctcaagcggcgtttgggggtgtacgagctgctgctgaaagtgcggccccagcagctggtcaagcacctgcagatggacattcacatcttcgagccccagggcatcagctttctggagacagagagcaccttcatgaccaaccagctggtagacgccctcaccacctggcagaataagaccaaggctcacatccggttcaagccaacactttcccagcagcaaaagtccccagagcagcaagaaacagtcctggacggcaacctcattatccgctatgatgtggaccgggccatctccgggggctccattcagatcgagaacggctactttgtacactactttgcccccgagggcctaaccacaatgcccaagaatgtggtctttgtcattgacaagagcggctccatgagtggcaggaaaatccagcagacccgggaagccctaatcaagatcctggatgacctcagccccagagaccagttcaacctcatcgtcttcagtacagaagcaactcagtggaggccatcactggtgccagcctcagccgagaacgtgaacaaggccaggagctttgctgcgggcatccaggccctgggagggaccaacatcaatgatgcaatgctgatggctgtgcagttgctggacagcagcaaccaggaggagcggctgcccgaagggagtgtctcactcatcatcctgctcaccgatggcgaccccactgtgggggagactaaccccaggagcatccagaataacgtgcgggaagctgtaagtggccggtacagcctcttctgcctgggcttcggtttcgacgtcagctatgccttcctggagaagctggcactggacaatggcggcctggcccggcgcatccatgaggactcagactctgccctgcagctccaggacttctaccaggaagtggccaacccactgctgacagcagtgaccttcgagtacccaagcaatgccgtggaggaggtcactcagaacaacttccggctcctcttcaagggctcagagatggtggtggctgggaagctccaggaccgggggcctgatgtgctcacagccacagtcagtgggaagctgcctacacagaacatcactttccaaacggagtccagtgtggcagagcaggaggcggagttccagagccccaagtatatcttccacaacttcatggagaggctctgggcatacctgactatccagcagctgctggagcaaactgtctccgcatccgatgctgatcagcaggccctccggaaccaagcgctgaatttatcacttgcctacagctttgtcacgcctctcacatctatggtagtcaccaaacccgatgaccaagagcagtctcaagttgctgagaagcccatggaaggcgaaagtagaaacaggaatgtccactcaggttccactttcttcaaatattatctccagggagcaaaaataccaaaaccagaggcttccttttctccaagaagaggatggaatagacaagctggagctgctggctcccggatgaatttcagacctggggttctcagctccaggcaacttggactcccaggacctcctgatgttcctgaccatgctgcttaccaccccttccgccgtctggccatcttgcctgcttcagcaccaccagccacctcaaatcctgatccagctgtgtctcgtgtcatgaatatgaaaatcgaagaaacaaccatgacaacccaaaccccagcccccatacaggctccctctgccatcctgccactgcctgggcagagtgtggagcggctctgtgtggaccccagacaccgccaggggccagtgaacctgctctcagaccctgagcaaggggttgaggtgactggccagtatgagagggagaaggctgggttctcatggatcgaagtgaccttcaagaaccccctggtatgggttcacgcatcccctgaacacgtggtggtgactcggaaccgaagaagctctgcgtacaagtggaaggagacgctattctcagtgatgcccggcctgaagatgaccatggacaagacgggtctcctgctgctcagtgacccagacaaagtgaccatcggcctgttgttctgggatggccgtggggaggggctccggctccttctgcgtgacactgaccgcttctccagccacgttggagggacccttggccagttttaccaggaggtgctctggggatctccagcagcatcagatgacggcagacgcacgctgagggttcagggcaatgaccactctgccaccagagagcgcaggctggattaccaggaggggcccccgggagtggagatttcctgctggtctgtggagctgtagttctgatggaaggagctgtgcccaccctgtacacttggcttccccctgcaactgcagggccgcttctggggcctggaccaccatggggaggaagagtcccactcattacaaataaagaaaggtggtgtgagcctgggaagtgggtgtctccagttccatgtggccaaatcctagggcctcaacctcgcatcctgaaccttagcatcgtggaacacagaagcttccactgtcagctctcaagagcccatggccaggaaggcccatgctgagctttcagtccagccccttcattttacaaacaaggaaactgagctcgaaccacccatttgagatgtcactgtggcccccagctagaggcccagggctgggagcattctccaggagcagaggttcagtctgcttcatggtctcttggaccagttttgactacaaaaaaaaaaaaaaaa

SEQ ID NO: 126672 - DNA, 2109 bp, Artificial Sequence
  derived and/or modified sequence
acttgctgtcgagttcagaagcctcctggcagacactggagccacgatgaagcccccaaggcctgtccgtacctgcagcaaagttctcgtcctgctttcactgctggccatccaccagactactactgccgaaaaggatcatcgatggcatgacctacccagggatcatcaaggagaaggctgaagcccaggcacagtacagcgcagcagtggccaagggaaagagcgctggcctcgtcaaggccaccgggagaaacatggagcagttccaggtgtcggtcagtgtggctcccaatgccaagatcacctttgagctggtctatgaggagctgctcaagcggcgtttgggggtgtacgagctgctgctgaaagtgcggccccagcagctggtcaagcacctgcagatggacattcacatcttcgagccccagggcatcagctttctggagacagagagcaccttcatgaccaaccagctggtagacgccctcaccacctggcagaataagaccaaggctcacatccggttcaagccaacactttcccagcagcaaaagtccccagagcagcaagaaacagtcctggacggcaacctcattatccgctatgatgtggaccgggccatctccgggggctccattcagatcgagaacggctactttgtacactactttgcccccgagggcctaaccacaatgcccaagaatgtggtctttgtcattgacaagagcggctccatgagtggcaggaaaatccagcagacccgggaagccctaatcaagatcctggatgacctcagccccagagaccagttcaacctcatcgtcttcagtacagaagcaactcagtggaggccatcactggtgccagcctcagccgagaacgtgaacaaggccaggagctttgctgcgggcatccaggccctgggagggaccaacatcaatgatgcaatgctgatggctgtgcagttgctggacagcagcaaccaggaggagcggctgcccgaagggagtgtctcactcatcatcctgctcaccgatggcgaccccactgtgggggagactaaccccaggagcatccagaataacgtgcgggaagctgtaagtggccggtacagcctcttctgcctgggcttcggtttcgacgtcagctatgccttcctggagaagctggcactggacaatggcggcctggcccggcgcatccatgaggactcagactctgccctgcagctccaggacttctaccaggaagtggccaacccactgctgacagcagtgaccttcgagtacccaagcaatgccgtggaggaggtcactcagaacaacttccggctcctcttcaagggctcagagatggtggtggctgggaagctccaggaccgggggcctgatgtgctcacagccacagtcagtgggaagctgcctacacagaacatcactttccaaacggagtccagtgtggcagagcaggaggcggagttccagagccccaagtatatcttccacaacttcatggagaggctctgggcatacctgactatccagcagctgctggagcaaactgtctccgcatccgatgctgatcagcaggccctccggaaccaagcgctgaatttatcacttgcctacagctttgtcacgcctctcacatctatggtagtcaccaaacccgatgaccaagagcagtctcaagttgctgagaagcccatggaaggcgaaagtagaaacaggaatgtccactcaggttccactttcttcaaatattatctccagggagcaaaaataccaaaaccaggtgacaaagtaggaggtggggggaggggagattgacagattgggctcagtcctggctgtggagggtagtgccttgcccagctcctctggctggtgacagccctcgggcctcagttcagttgtatctgatcaggacttgaccacacagaggcttccttttctccaagaagaggatggaatagacaagctggagctgctggctcccggatgaatttcagacctggggttctcagctccaggcaacttggactcccaggacctcctgatgttcctgaccatgctgcttaccaccccttccgccgtctggccatct

SEQ ID NO: 126673 - DNA, 2793 bp, Artificial Sequence
  derived and/or modified sequence
atgaagccacccaggcctgtgaggacctgcagcaaggtgctggtgctgctgagcctgctggccatccaccagaccaccacagctgagaagaatggaattgacatctacagcctgactgtggacagccgggtgagcagcagatttgcccacacagtggtgaccagccgggtggtgaacagagccaacacagtgcaggaggccaccttccagatggagctgcccaagaaggccttcatcaccaacttctccatgatcattgatggcatgacctacccaggcatcatcaaggagaaggccgaggcccaggcccagtacagcgctgctgtggccaagggcaagtctgctggcctggtgaaggccactggaagaaacatggagcagttccaggtgtctgtgtctgtggccccaaatgccaagatcacctttgagctggtgtatgaggagctgctgaagaggcggctgggcgtgtatgagctgctgctgaaggtgcggccccagcagctggtgaagcacctgcagatggacatccacatctttgagccccagggcatctccttcctggagacagagagcaccttcatgaccaaccagctggtggatgccctgaccacctggcagaacaagaccaaggcccacatccgcttcaagcccaccctgagccagcagcagaagagccctgagcagcaggagaccgtgctggatggcaacctgatcatccgctatgatgtggaccgggccatcagcggcggcagcatccagattgaaaatggctactttgtgcactactttgcccctgagggcctgaccaccatgcccaagaatgtggtgtttgtgattgacaagagcggctccatgagcggcaggaagatccagcagacccgggaggccctgatcaagatcctggatgacctgagcccccgggaccagttcaacctgattgtgttcagcacagaggccacccagtggaggcccagcctggtgcctgccagcgcagaaaatgtgaacaaggcccggagctttgctgctggcatccaggccctgggcggcaccaacatcaatgatgccatgctgatggctgtgcagctgctggacagcagcaaccaggaggagcggctgcctgagggctctgtgtccctcatcatcctgctgacagatggagaccccaccgtgggggagaccaaccccaggagcatccagaacaacgtgcgggaggccgtgtctggccgctacagcctcttctgcctgggctttggatttgatgtgtcctatgccttcctggagaagctggccctggacaatggaggcctggcccggcgcatccacgaggacagcgacagcgccctgcagctgcaggacttctaccaggaggtggccaaccccctgctgacagctgtgacctttgagtaccccagcaatgctgtggaggaggtgacccagaacaacttccggctgctcttcaagggcagcgagatggtggtggccggcaagctgcaggaccggggcccagatgtgctgacagccaccgtgtctgggaagctgcccacccagaacatcaccttccagacagagagctctgtggccgagcaggaggccgagttccagagccccaagtacatcttccacaacttcatggagcggctgtgggcctacctgaccatccagcagctgctggagcagacagtgtctgccagtgatgctgaccagcaggccctgaggaaccaggccctgaacctgagcctggcctacagctttgtgacccccctgacctccatggtggtgaccaagccagatgaccaggagcagagccaggtggccgagaagcccatggagggggagagcaggaacagaaatgtgcacagcggcagcaccttcttcaagtactacctgcagggcgccaagatccccaagccagaggccagcttcagcccccggcggggctggaaccggcaggccggggccgccggcagcaggatgaacttccggcctggggtgctgagcagccggcagctgggcctgcccggccccccagatgtgcctgaccacgccgcctaccaccccttccggcggctggccatcctgcctgccagcgcccccccagccaccagcaacccagaccctgctgtgtcccgggtgatgaacatgaagattgaggagaccaccatgaccacccagaccccagcccccatccaggcccccagcgccatcctgcccctgcccggccagagcgtggagcggctgtgtgtggaccccaggcaccggcagggccctgtgaacctgctgagtgaccctgagcagggcgtggaggtgacaggccagtatgagcgggagaaggccggcttctcctggattgaggtgaccttcaagaaccccctggtgtgggtgcacgccagccctgagcacgtggtggtgaccaggaacagaagaagcagcgcctacaagtggaaggagaccctcttctctgtgatgcctggcctgaagatgaccatggacaagacaggcctgctgctgctgagtgaccctgacaaggtgaccatcggcctgctcttctgggatggccgcggggagggcctgcggctgctgctgcgggacacagaccgcttcagcagccacgtgggcggcaccctgggccagttctaccaggaggtgctgtggggcagccctgctgccagtgatgatggccgccgcaccctgcgggtgcagggcaatgaccacagcgccacccgggagcggcggctggactaccaggagggccccccaggagtggagatcagctgctggagcgtggagctgtag

SEQ ID NO: 126674 - DNA, 1683 bp, Artificial Sequence
  derived and/or modified sequence
atgacctacccaggcatcatcaaggagaaggccgaggcccaggcccagtacagcgctgctgtggccaagggcaagtctgctggcctggtgaaggccactggaagaaacatggagcagttccaggtgtctgtgtctgtggccccaaatgccaagatcacctttgagctggtgtatgaggagctgctgaagaggcggctgggcgtgtatgagctgctgctgaaggtgcggccccagcagctggtgaagcacctgcagatggacatccacatctttgagccccagggcatctccttcctggagacagagagcaccttcatgaccaaccagctggtggatgccctgaccacctggcagaacaagaccaaggcccacatccgcttcaagcccaccctgagccagcagcagaagagccctgagcagcaggagaccgtgctggatggcaacctgatcatccgctatgatgtggaccgggccatcagcggcggcagcatccagattgaaaatggctactttgtgcactactttgcccctgagggcctgaccaccatgcccaagaatgtggtgtttgtgattgacaagagcggctccatgagcggcaggaagatccagcagacccgggaggccctgatcaagatcctggatgacctgagcccccgggaccagttcaacctgattgtgttcagcacagaggccacccagtggaggcccagcctggtgcctgccagcgcagaaaatgtgaacaaggcccggagctttgctgctggcatccaggccctgggcggcaccaacatcaatgatgccatgctgatggctgtgcagctgctggacagcagcaaccaggaggagcggctgcctgagggctctgtgtccctcatcatcctgctgacagatggagaccccaccgtgggggagaccaaccccaggagcatccagaacaacgtgcgggaggccgtgtctggccgctacagcctcttctgcctgggctttggatttgatgtgtcctatgccttcctggagaagctggccctggacaatggaggcctggcccggcgcatccacgaggacagcgacagcgccctgcagctgcaggacttctaccaggaggtggccaaccccctgctgacagctgtgacctttgagtaccccagcaatgctgtggaggaggtgacccagaacaacttccggctgctcttcaagggcagcgagatggtggtggccggcaagctgcaggaccggggcccagatgtgctgacagccaccgtgtctgggaagctgcccacccagaacatcaccttccagacagagagctctgtggccgagcaggaggccgagttccagagccccaagtacatcttccacaacttcatggagcggctgtgggcctacctgaccatccagcagctgctggagcagacagtgtctgccagtgatgctgaccagcaggccctgaggaaccaggccctgaacctgagcctggcctacagctttgtgacccccctgacctccatggtggtgaccaagccagatgaccaggagcagagccaggtggccgagaagcccatggagggggagagcaggaacagaaatgtgcacagcggcagcaccttcttcaagtactacctgcagggcgccaagatccccaagccaggggacaaggtgggcggcggcggccgcggggactag

SEQ ID NO: 126675 - DNA, 2793 bp, Artificial Sequence
  derived and/or modified sequence
atgaagcccccccggcccgtgcggacctgcagcaaggtgctggtgctgctgagccttctggcaatacatcagaccacaactgccgagaagaatgggatagatatttacagccttacagtggactcacgtgtgagctcccgcttcgctcacaccgtggtcacctcacgggtggtgaaccgggctaatacagtacaggaggccaccttccaaatggaacttcctaaaaaggcatttattacgaacttctcgatgattattgacggcatgacttatcccggaattattaaggaaaaggctgaagcccaggcgcagtattccgctgcggtggccaagggaaaaagcgcggggctggttaaagcaactgggaggaacatggagcagttccaggttagcgtctccgtcgcgccgaacgctaagataacctttgagttggtatacgaagaactgctgaaacgccgcctcggggtctacgaattgctgttgaaggttcggccacagcagctggttaagcacctgcaaatggatatccacatttttgagccgcagggtatcagttttctggagaccgagtctacatttatgaccaaccaacttgttgatgctttaacaacttggcaaaataaaaccaaggcccatatccggtttaagccgaccctctcacagcagcagaagagtccagaacagcaggaaacagttctcgacggcaacttgatcatcaggtacgatgttgatcgtgcgatttcgggtgggtctattcaaatagaaaacggatatttcgtgcactatttcgcacctgagggccttactaccatgcccaagaacgtggtgttcgtcatagataagtctggctcaatgagtggccgcaagatccagcagaccagggaagcattaatcaaaattctggatgatctttctccgcgagatcagttcaatcttatcgttttttctacggaagcgacccagtggagaccaagtctagtcccagcaagcgcagagaatgtaaataaagccagatcttttgcggctggtattcaagctttaggggggactaatattaacgatgcgatgctgatggccgtacagctcttagatagttcgaaccaggaagaaagactgccagagggctctgtttccctcatcattctgttaaccgacggcgaccccaccgtgggcgaaacaaaccctcgttccatccaaaataacgtgcgtgaagctgtgagcggtcgatacagccttttttgtctcgggtttggtttcgatgtgtcttacgcctttctggaaaaactagcactcgataacggcggcttggcccgaaggatacacgaagatagtgactctgctttacagctccaagacttctaccaagaggtggccaatccattactgactgctgtgaccttcgagtaccctagcaacgctgttgaggaggtgactcagaataatttcagattacttttcaaaggatctgaaatggtggtcgctggaaaactgcaggacagaggtcctgacgtcctcaccgctacggtttcaggcaaactgcccacccaaaacattacattccagactgaaagcagcgtcgccgaacaagaggctgagttccagtcacccaagtacatattccacaatttcatggaaaggctgtgggcctatttgacgattcagcaactcctcgaacaaacggtaagcgctagcgatgctgaccagcaggccctgcgaaatcaggctttaaatttgagcttggcgtactcattcgtcactcccttgaccagcatggtcgttaccaaacctgacgatcaagaacagtctcaagtggcagagaaacctatggagggcgagagcagaaatcgaaatgtgcattccggtagtacttttttcaagtactaccttcagggggctaagatcccaaagccggaagcctccttttcacctaggagggggtggaatagacaggctggcgcagctggatcacgaatgaattttaggccgggcgttctaagcagccggcagctaggacttcccggcccacccgacgtaccagaccacgcagcataccacccctttcgacgcctggcaattctaccagccagcgctcctcccgccacttccaatccagacccggcagtatctcgagttatgaatatgaaaatagaggaaaccaccatgaccacccaaacgccggctccaatacaggcgccaagtgctattctgcctctacctggccaatctgtggagcgtctttgcgttgaccccaggcacagacaaggaccggtgaatttgcttagtgatccagagcagggtgttgaagtcacaggccagtacgagcgagaaaaggccggattctcgtggatagaagtcacattcaagaaccctctagtgtgggttcatgcgagtccggaacatgtcgtggtaaccaggaacaggaggagctccgcatacaaatggaaagaaaccctgttctctgtcatgccaggcctaaagatgacaatggacaagactggattactattgttgagcgaccctgataaagtgaccattggcttactattctgggacggaaggggcgagggattacggctactgcttagggacaccgaccgttttagcagtcacgtgggcggcacacttggccaattttaccaggaagtactgtggggatctccagctgcgagcgacgacggccgacgaactctccgtgtgcagggtaacgatcactccgctacgagggagagacgtctggattaccaggagggccccccaggggtggagatctcttgttggagcgttgaactatag

SEQ ID NO: 126676 - DNA, 1683 bp, Artificial Sequence
  derived and/or modified sequence
atgacctaccccggcatcatcaaggagaaggccgaggcccaggcccagtattcagccgctgtggctaagggcaaatctgccggcctggttaaagccaccggccgaaatatggagcagtttcaggtctccgtgtctgtggctcccaatgctaagattacattcgagctggtttacgaagagctcctgaagaggcgcttgggggtgtacgagctactgttaaaggtccgcccgcagcagttagtcaagcatttgcagatggacatccacatttttgagccacagggcatatcattcctggaaaccgagtcaaccttcatgacaaaccagctggtggatgcccttaccacctggcagaacaaaaccaaggctcacattcgcttcaaaccgaccttgtctcaacagcagaagtctcctgagcagcaggagaccgtactggatggaaatctaattattagatatgatgttgacagggccatctccggcggctcaattcaaattgaaaacgggtatttcgtgcattacttcgctccagagggactgaccacaatgccaaagaatgtcgtttttgtgatcgataaaagtggtagtatgtcgggaaggaagattcagcagacgagagaggcattaatcaagatcctggacgacctgagtcctagagatcaatttaatcttattgtgttttcaacggaggccacccagtggcggccttctcttgtgccagcttctgctgagaatgtcaataaagccagatcgttcgccgctggaattcaggctctcggtggcaccaacattaatgacgctatgctgatggctgttcagctgctcgactcatccaaccaagaggagagactaccagaaggttccgtttcactgatcatcttgctcacagacggcgacccgactgttggcgaaactaacccccgatcaattcagaataacgtcagagaggccgttagcggacggtacagcctcttttgcctcggatttgggttcgacgtgagctatgccttcctggagaaactggcattggacaatggcggcttagcgaggcggatccacgaggatagcgattctgccctccaactgcaagatttctaccaggaggtcgccaatcctctgttgacggcggtgacattcgaatatccctcaaacgccgtcgaggaagtcacccaaaataactttagacttctgttcaaagggagtgagatggtcgtggcaggcaagttacaggacagaggcccagatgtgctgactgccaccgtcagtgggaagctgcctacccagaacattacttttcagactgagagttctgtcgccgagcaagaggccgagtttcagagccccaaatacatctttcacaatttcatggaaaggttatgggcttatctgactatacagcaactcctcgaacagactgtctcggcaagcgatgcagaccagcaggcactccgcaatcaggctctgaatctctctctggcttactccttcgtcacacccttgacatccatggtagttacaaagcccgacgatcaggagcaatcccaagtggcagaaaagcctatggagggagaatcccgtaatagaaacgtccatagtggctctacctttttcaagtactacctgcagggagcgaaaatccctaaaccgggggataaggtgggcgggggagggcgtggggattag

SEQ ID NO: 126677 - DNA, 2793 bp, Artificial Sequence
  derived and/or modified sequence
atgaaaccccctcggccagtgaggacttgcagcaaagtcttggtactgttgtcgttgctcgccatccatcaaacaacgaccgcggagaagaatggcatagatatctattccctgacagtcgattcgcgagtgagcagtcgcttcgcacacactgtggttacctcaagagtggtcaaccgggctaacacagtgcaggaggctactttccagatggagttgccgaagaaagcatttataacgaacttcagcatgatcatagacggcatgacgtacccaggtatcatcaaggaaaaggctgaggcccaggcacagtactcagccgctgtcgccaaggggaagagtgccggtctcgtaaaggctactggcagaaacatggagcagttccaggtgagcgtgtcagtagcccctaacgcaaagatcaccttcgagctagtgtatgaggaactgctcaagcgccgactcggggtatatgagctgctgttgaaggtgcggccacagcagctagtgaaacatctgcagatggatatacatatctttgagcctcagggaatcagttttctggagactgaaagcaccttcatgacgaatcagcttgtcgacgccctgaccacctggcagaacaaaacgaaagcacacatacggttcaaacctacattatcacagcagcagaaatcccccgaacagcaagaaacagttctggacggcaacctgattatcagatacgacgtggatcgagccatttccggaggttcaatccagatagagaatggctacttcgtgcactactttgcaccagaaggactcaccactatgcccaaaaatgtcgtgtttgtcatcgataaatccgggtcaatgtctggacggaaaatccagcaaacccgggaggcactgatcaagatcctggatgacctgagccccagagatcagttcaacttgatagtgttcagcacagaagcaacacagtggagaccttcacttgtccccgctagcgccgagaatgtgaataaagcgcgtagcttcgcagccggtatacaggctctcggcggtacaaatatcaacgacgctatgttaatggcagttcagcttctggactcgagcaaccaggaagaaaggcttccagaaggcagtgtgagtcttataatcctgcttaccgatggagatcctaccgttggagaaactaacccgagaagcatccagaataacgtgcgcgaggcagtgagtggtcggtacagcttattctgcttgggatttggtttcgacgtgtcatatgcatttctcgagaaactggccctggacaacgggggacttgcccgaagaatccacgaggattccgactcagctcttcagctccaggatttctaccaggaggtggcgaatcctctcctgacggccgtaaccttcgaatacccgagtaacgcagttgaggaagtgacccagaacaatttcaggctgctgtttaaaggctccgagatggtggttgccggtaaactgcaggaccgtggtcctgacgtgctgactgcaaccgttagcggaaaactccccacccaaaacatcacttttcagactgaatcttctgtggccgaacaggaagcagagtttcagtcccccaagtacatcttccacaatttcatggagcggctgtgggcatatttgacaattcagcaactgttagagcaaaccgtcagcgcgagtgacgcagaccaacaagctctccggaaccaggcgttgaacctgagcttagcttacagcttcgtaacgcccctgacatccatggtggtgaccaagcctgacgaccaggaacaatcacaggtggcagagaagcctatggagggtgagtccaggaataggaatgtccattccggttcgacattttttaagtactatttacagggtgcaaaaatcccaaaaccagaggctagtttcagcccgaggcgcggttggaaccgccaggctggagcagccggatccaggatgaatttcagacctggcgtgctctcgagccgtcagcttggactgcccggacctccggacgtgcccgatcacgccgcttaccatccattccgacggctcgccatcctgccagcatcggccccacccgcaacatccaaccccgacccagccgtgtctcgagtcatgaacatgaagatcgaagaaaccaccatgactacacagaccccagcccctattcaagcaccgtctgccatcctgcccctgcccggtcagtctgtggaacggctatgtgtggaccctagacatcggcagggacctgtgaacctgctgtcagacccagaacagggagtcgaagtgaccggacagtatgagagagagaaagccggtttttcttggatcgaagtgaccttcaaaaaccccctcgtctgggtgcacgcatctccagaacacgtcgtggtgaccaggaaccgccgaagctcagcttacaagtggaaggagacgctctttagtgtcatgccaggacttaagatgacaatggacaaaacagggctgcttctgctctccgatcccgacaaagtcacgatcggacttctgttctgggacggacggggtgaagggctgcgattgctcctgcgggacaccgatagattttcttcccatgttggagggacgttaggccagttttatcaagaggtgttgtgggggtcacctgccgcaagcgacgatggcagacgtacactaagggtacagggcaacgatcactcggcaactcgagaacggaggctggactaccaggaagggcctcccggtgtcgaaatctcatgttggagtgtcgagctgtag

SEQ ID NO: 126678 - DNA, 1683 bp, Artificial Sequence
  derived and/or modified sequence
atgacataccctggtatcatcaaggagaaagcagaggcccaggctcaatacagcgctgccgtggccaagggaaagtccgctgggctggtgaaagcaaccggaagaaatatggagcagttccaggtctccgtttccgtggccccaaatgcaaagattacttttgagttagtctacgaggagttgctgaagcgacggctcggagtatacgaactgcttttaaaggttaggccgcagcagctcgtgaaacacctgcagatggatatacatatcttcgaaccccagggtatatcatttctggaaactgagagtacgtttatgaccaatcagttggtagatgctctgacaacctggcaaaataaaaccaaagcccatattagattcaaacctacactgtctcagcagcaaaaatcccctgagcaacaagaaacagtgctcgatgggaatcttattataagatacgatgtggaccgagctatctcgggcggatcaatccaaatagagaatggctacttcgttcattacttcgcaccagaggggttaactacaatgccaaagaacgtggtatttgtgatcgacaagtcgggatcaatgagcggcagaaaaatccagcaaactagggaggctctgataaagattctcgatgacctgtctcctcgtgatcagttcaatctgatagtatttagcactgaggcaacccagtggaggccatcccttgtgccggcttccgccgagaatgtgaacaaagcccgtagcttcgccgctggcattcaggcactgggtgggactaacatcaacgatgcgatgctaatggcagtgcaattactcgattcctcaaatcaggaggaaaggctccccgagggtagcgtcagtctgatcattctgctaacagacggagaccctaccgtgggagagacaaaccctcggtctatccagaataatgttagggaagccgtttccggaagatattcgctcttttgtctaggttttggatttgacgtttcctatgccttcctagaaaaactcgctttggataatgggggtctggctcggaggatacacgaggactcagatagtgctttgcagttgcaggatttttatcaggaggttgccaaccccctgcttactgcggttacatttgaatatccaagcaacgcagttgaggaagttacccaaaacaattttaggctcctatttaaaggttcggaaatggtcgtcgccggtaaactgcaggaccgcggacctgatgtcctcacagccacagtatcaggaaagttgccaacacaaaatattacttttcagactgaatcttccgtagctgagcaagaggctgagttccaatctcctaagtatatatttcataacttcatggaaaggctctgggcctacctaacgattcaacagctgctggagcagactgtgagcgcttcagacgctgatcagcaggccctgagaaaccaggccctaaacctcagtcttgcttattctttcgtgacgcccctaacttccatggtcgtgaccaagcccgacgaccaggaacaaagccaagtggccgaaaagcctatggaaggagaatctcgtaacaggaatgtgcatagcggcagtacttttttcaaatactacctgcaaggcgcaaagatccccaagcctggagacaaggtcgggggtggcggaagaggagactag

SEQ ID NO: 126679 - DNA, 2793 bp, Artificial Sequence
  derived and/or modified sequence
atgaagccccccagacccgtgagaacctgcagcaaggtgctggtgctgctgagcctgctggccatccaccagaccaccaccgccgagaagaacggcatcgacatctacagcctgaccgtggacagcagagtgagcagcagattcgcccacaccgtggtgaccagcagagtggtgaacagagccaacaccgtgcaggaggccaccttccagatggagctgcccaagaaggccttcatcaccaacttcagcatgatcatcgacggcatgacctaccccggcatcatcaaggagaaggccgaggcccaggcccagtacagcgccgccgtggccaagggcaagagcgccggcctggtgaaggccaccggcagaaacatggagcagttccaggtgagcgtgagcgtggcccccaacgccaagatcaccttcgagctggtgtacgaggagctgctgaagagaagactgggcgtgtacgagctgctgctgaaggtgagaccccagcagctggtgaagcacctgcagatggacatccacatcttcgagccccagggcatcagcttcctggagaccgagagcaccttcatgaccaaccagctggtggacgccctgaccacctggcagaacaagaccaaggcccacatcagattcaagcccaccctgagccagcagcagaagagccccgagcagcaggagaccgtgctggacggcaacctgatcatcagatacgacgtggacagagccatcagcggcggcagcatccagatcgagaacggctacttcgtgcactacttcgcccccgagggcctgaccaccatgcccaagaacgtggtgttcgtgatcgacaagagcggcagcatgagcggcagaaagatccagcagaccagagaggccctgatcaagatcctggacgacctgagccccagagaccagttcaacctgatcgtgttcagcaccgaggccacccagtggagacccagcctggtgcccgccagcgccgagaacgtgaacaaggccagaagcttcgccgccggcatccaggccctgggcggcaccaacatcaacgacgccatgctgatggccgtgcagctgctggacagcagcaaccaggaggagagactgcccgagggcagcgtgagcctgatcatcctgctgaccgacggcgaccccaccgtgggcgagaccaaccccagaagcatccagaacaacgtgagagaggccgtgagcggcagatacagcctgttctgcctgggcttcggcttcgacgtgagctacgccttcctggagaagctggccctggacaacggcggcctggccagaagaatccacgaggacagcgacagcgccctgcagctgcaggacttctaccaggaggtggccaaccccctgctgaccgccgtgaccttcgagtaccccagcaacgccgtggaggaggtgacccagaacaacttcagactgctgttcaagggcagcgagatggtggtggccggcaagctgcaggacagaggccccgacgtgctgaccgccaccgtgagcggcaagctgcccacccagaacatcaccttccagaccgagagcagcgtggccgagcaggaggccgagttccagagccccaagtacatcttccacaacttcatggagagactgtgggcctacctgaccatccagcagctgctggagcagaccgtgagcgccagcgacgccgaccagcaggccctgagaaaccaggccctgaacctgagcctggcctacagcttcgtgacccccctgaccagcatggtggtgaccaagcccgacgaccaggagcagagccaggtggccgagaagcccatggagggcgagagcagaaacagaaacgtgcacagcggcagcaccttcttcaagtactacctgcagggcgccaagatccccaagcccgaggccagcttcagccccagaagaggctggaacagacaggccggcgccgccggcagcagaatgaacttcagacccggcgtgctgagcagcagacagctgggcctgcccggcccccccgacgtgcccgaccacgccgcctaccaccccttcagaagactggccatcctgcccgccagcgccccccccgccaccagcaaccccgaccccgccgtgagcagagtgatgaacatgaagatcgaggagaccaccatgaccacccagacccccgcccccatccaggcccccagcgccatcctgcccctgcccggccagagcgtggagagactgtgcgtggaccccagacacagacagggccccgtgaacctgctgagcgaccccgagcagggcgtggaggtgaccggccagtacgagagagagaaggccggcttcagctggatcgaggtgaccttcaagaaccccctggtgtgggtgcacgccagccccgagcacgtggtggtgaccagaaacagaagaagcagcgcctacaagtggaaggagaccctgttcagcgtgatgcccggcctgaagatgaccatggacaagaccggcctgctgctgctgagcgaccccgacaaggtgaccatcggcctgctgttctgggacggcagaggcgagggcctgagactgctgctgagagacaccgacagattcagcagccacgtgggcggcaccctgggccagttctaccaggaggtgctgtggggcagccccgccgccagcgacgacggcagaagaaccctgagagtgcagggcaacgaccacagcgccaccagagagagaagactggactaccaggagggcccccccggcgtggagatcagctgctggagcgtggagctgtag

SEQ ID NO: 126680 - DNA, 1683 bp, Artificial Sequence
  derived and/or modified sequence
atgacctaccccggcatcatcaaggagaaggccgaggcccaggcccagtacagcgccgccgtggccaagggcaagagcgccggcctggtgaaggccaccggcagaaacatggagcagttccaggtgagcgtgagcgtggcccccaacgccaagatcaccttcgagctggtgtacgaggagctgctgaagagaagactgggcgtgtacgagctgctgctgaaggtgagaccccagcagctggtgaagcacctgcagatggacatccacatcttcgagccccagggcatcagcttcctggagaccgagagcaccttcatgaccaaccagctggtggacgccctgaccacctggcagaacaagaccaaggcccacatcagattcaagcccaccctgagccagcagcagaagagccccgagcagcaggagaccgtgctggacggcaacctgatcatcagatacgacgtggacagagccatcagcggcggcagcatccagatcgagaacggctacttcgtgcactacttcgcccccgagggcctgaccaccatgcccaagaacgtggtgttcgtgatcgacaagagcggcagcatgagcggcagaaagatccagcagaccagagaggccctgatcaagatcctggacgacctgagccccagagaccagttcaacctgatcgtgttcagcaccgaggccacccagtggagacccagcctggtgcccgccagcgccgagaacgtgaacaaggccagaagcttcgccgccggcatccaggccctgggcggcaccaacatcaacgacgccatgctgatggccgtgcagctgctggacagcagcaaccaggaggagagactgcccgagggcagcgtgagcctgatcatcctgctgaccgacggcgaccccaccgtgggcgagaccaaccccagaagcatccagaacaacgtgagagaggccgtgagcggcagatacagcctgttctgcctgggcttcggcttcgacgtgagctacgccttcctggagaagctggccctggacaacggcggcctggccagaagaatccacgaggacagcgacagcgccctgcagctgcaggacttctaccaggaggtggccaaccccctgctgaccgccgtgaccttcgagtaccccagcaacgccgtggaggaggtgacccagaacaacttcagactgctgttcaagggcagcgagatggtggtggccggcaagctgcaggacagaggccccgacgtgctgaccgccaccgtgagcggcaagctgcccacccagaacatcaccttccagaccgagagcagcgtggccgagcaggaggccgagttccagagccccaagtacatcttccacaacttcatggagagactgtgggcctacctgaccatccagcagctgctggagcagaccgtgagcgccagcgacgccgaccagcaggccctgagaaaccaggccctgaacctgagcctggcctacagcttcgtgacccccctgaccagcatggtggtgaccaagcccgacgaccaggagcagagccaggtggccgagaagcccatggagggcgagagcagaaacagaaacgtgcacagcggcagcaccttcttcaagtactacctgcagggcgccaagatccccaagcccggcgacaaggtgggcggcggcggcagaggcgactag

SEQ ID NO: 126681 - protein, 461 aa, Artificial Sequence
  derived and/or modified sequence
MTLPGGPTGMARPGGARPCSPGLERAPRRSVGELRLLFEARCAAVAAAAAAGEPRARGAKRRGGQVPNGLPRAPPAPVIPQLTVTAEEPDVPPTSPGPPERERDCLPAAGSSHLQQPRRLSTSSVSSTGSSSLLEDSEDDLLSDSESRSRGNVQLEAGEDVGQKNHWQKIRTMVNLPVISPFKKRYAWVQLAGHTGSFKAAGTSGLILKRCSEPERYCLARLMADALRGCVPAFHGVVERDGESYLQLQDLLDGFDGPCVLDCKMGVRTYLEEELTKARERPKLRKDMYKKMLAVDPEAPTEEEHAQRAVTKPRYMQWREGISSSTTLGFRIEGIKKADGSCSTDFKTTRSREQVLRVFEEFVQGDEEVLRRYLNRLQQIRDTLEVSEFFRRHEVIGSSLLFVHDHCHRAGVWLIDFGKTTPLPDGQILDHRRPWEEGNREDGYLLGLDNLIGILASLAER

SEQ ID NO: 126682 - DNA, 1386 bp, Artificial Sequence
  derived and/or modified sequence
atgacattacccggaggccccacaggaatggctcgtcccgggggagctaggccttgttcacccggcctggagagggccccccggcgctcagtcggcgagctacgtctgctgttcgaagctagatgtgcagctgtggctgccgctgcggcagccggggaaccccgggccagaggcgccaaaagaaggggaggacaggttcctaatggcctgcctcgggcccctcctgccccagtaatcccacaactcacagttaccgcagaggagcccgatgtgccccctacaagcccaggcccacctgaacgagaaagagactgcttaccagccgcgggttcctcacacctgcagcagcctcggaggttgagcacctcctctgtgtcaagcacaggttcgtcctccttattggaggattcagaggacgacctgctgagcgactctgaatcccgctctcggggcaacgtccaattggaggcgggcgaagatgtcggccaaaagaatcattggcaaaagatcaggaccatggtgaacctgccggtcatttcaccttttaagaagagatacgcttgggtccaactggccggtcatacagggagctttaaagctgctggaacttcaggactgatcctaaagagatgttcagagcccgagcgatactgtctcgcaaggctgatggccgatgccctgagggggtgcgtgcctgcttttcatggggtcgtggaaagggatggcgagtcctacctccaacttcaggacctgcttgatgggtttgatgggccttgcgtcctggattgtaagatgggggttcggacgtaccttgaagaggaacttaccaaagctcgcgaaagacctaagttgaggaaggatatgtacaagaaaatgctggccgtggatccagaagccccaacagaagaggaacatgctcagagagccgtgacaaaaccacggtacatgcaatggagagagggaatctcctcttcaaccacactggggttcagaatcgaaggaattaagaaggctgatggatcatgcagcactgacttcaaaacaacaagaagcagggagcaagtactgagggtctttgaggagttcgtccagggagatgaagaagtacttcggcgttatttgaaccgcctgcaacagattcgcgataccttggaagtttctgagttctttcgaaggcacgaggtgatcggaagttctttactgtttgtgcacgaccattgccatagagcgggagtctggctgatcgatttcggaaagacgacacctctgcccgatggccagattctcgaccatcggagaccctgggaggagggcaatagggaagatggatatctgctgggcctggacaacctgatcggcattctggcgagcctcgcggagcggtag

SEQ ID NO: 126683 - DNA, 1838 bp, Artificial Sequence
  derived and/or modified sequence
gccgagccgctccagtccccggcgcgccgcgggctggtgggctcagcggcggcgccggcactgggaaatgaccctgcccgggggcccaacgggcatggcgcggccggggggcgcgaggccctgcagcccggggctggagcgggccccgcgccggagtgtcggggagctgcgcctgctcttcgaggcgcgctgtgcggcggtcgctgcggccgccgccgcgggggagccccgggcccgcggggccaagcggcgtgggggacaggtccccaacgggcttccgcgggctcccccggccccggtgatccctcagctgaccgtgacagccgaggagcccgacgtgcccccgaccagccctgggccgccggagcgggagagggactgcctcccggcagcgggctcttcgcacctgcagcagccgcgccgcctttccacctcgtcggtctcctccactggctcctcgtcgctgctcgaggactcggaggacgacctgctgagcgacagtgagagccggagccgcggcaacgtgcagctggaagcgggcgaggacgtgggtcagaaaaaccactggcagaagatccggaccatggtcaatctgccggtcataagccctttcaagaagcgctacgcctgggtgcagctggcagggcacactgggagttttaaggcggcgggcaccagcgggctgatcctgaagcgctgctcggagccggagcgctactgcctggcgcggctgatggctgacgcgctgcgcggctgcgtgcctgccttccacggcgtggtggagcgcgacggcgaaagctacctgcagctgcaggacctgctcgatggcttcgacggaccttgtgtgctcgactgcaaaatgggcgtcaggacttacctagaggaggagctgaccaaggcccgtgagcggcccaagctgcggaaggacatgtacaagaaaatgctggcggtggatcctgaagctcccacggaggaggagcacgcgcagcgcgccgtcaccaagccgcgctacatgcagtggcgggaaggcatcagctccagcaccaccctcggcttccgcatcgagggcatcaagaaagcggacggctcctgcagcaccgacttcaagactacgcgaagccgagagcaggtgcttcgcgtctttgaagagtttgtgcaaggagatgaggaagtgctgaggcggtatctgaaccgcctgcagcagatccgggacaccctggaggtatccgagttcttcaggaggcacgaggtgatcggcagctcgctcctctttgtgcacgatcactgccatcgcgccggcgtgtggctcatcgacttcggcaagaccacgcccctccccgatggccagatcctggaccaccggcggccctgggaggagggcaaccgcgaggacggctatttgctggggctggacaatctcattggcatcctggccagcctggctgagagatgaggctggactcctgtccccgcgggccgctcacctgacatgtggacctgcagctttgtccccactgtgcatgccggcttgagactggagccccgcggtgcagggcagttcaccgggtcctgcaggaccaggtgccagccactaagggggggcaccgccgatgccaggggttttgcccacccgggccccagcgttcccagagccaaatgacactaacttatagaaggggagggggcaaagggcttcttcctcaggccagctcttctgaggaggctctgccctctccagaggtgccagaccgcggattttatttagcaagcccagaccttccggtctaacgtctcacaccacgacggactccccttcctaataaaactcaaagacaaga

SEQ ID NO: 126684 - DNA, 1386 bp, Artificial Sequence
  derived and/or modified sequence
atgaccctgcccggcggccccaccggcatggcccggcctggaggagcccggccctgcagccctggcctggagcgggccccccggcgctctgtgggggagctgcggctgctgtttgaggcccgctgtgccgctgtggccgctgctgctgctgctggggagccccgggcccggggggccaagagaagaggaggccaggtgcccaacggcctgccccgggcccccccagcccctgtgatcccccagctgactgtgacagctgaggagccagatgtgccccccaccagccctggccccccagagcgggagcgggactgcctgcctgctgctggcagcagccacctgcagcagccccggcggctgagcaccagctctgtgagcagcacaggcagcagcagcctgctggaggacagtgaagatgacctgctgagtgacagcgagagccgcagcagaggaaatgtgcagctggaggccggagaagatgtgggccagaagaaccactggcagaagatccgcaccatggtgaacctgcctgtgatcagccccttcaagaagagatatgcctgggtgcagctggccggccacacaggcagcttcaaggctgctggcaccagcggcctcatcctgaagcgctgcagcgagcctgagcgctactgcctggcccggctgatggctgatgccctgcggggctgtgtgcctgccttccatggagtggtggagagagatggagagagctacctgcagctgcaggacctgctggatggctttgatggcccctgtgtgctggactgcaagatgggcgtgaggacctacctggaggaggagctgaccaaggcccgggagcggcccaagctgaggaaggacatgtacaagaagatgctggccgtggaccctgaggcccccacagaggaggagcacgcccagagagctgtgaccaagccccgctacatgcagtggagggagggcatcagcagcagcaccaccctgggcttccgcatcgagggcatcaagaaggcagatggcagctgcagcacagacttcaagaccaccaggagccgggagcaggtgctgcgggtgtttgaggagtttgtgcagggagatgaggaggtgctgcggcgctacctgaaccggctgcagcagatccgggacaccctggaggtgtctgagttcttcagaagacatgaagtcatcggcagcagcctgctgtttgtgcatgaccactgccaccgggccggcgtgtggctgattgactttgggaagaccacccccctgcctgatggccagatcctggaccaccggcggccctgggaggagggcaacagagaagatggctacctgctgggcctggacaacctgattggcatcctggccagcctggccgagaggtag

SEQ ID NO: 126685 - DNA, 1386 bp, Artificial Sequence
  derived and/or modified sequence
atgaccctgcccggcggccccaccggcatggcccggcccggcggcgcccgaccctgttcccctggtttggagcgcgcgcccagacggtccgtcggggagttgcgactgctgttcgaagctcggtgcgccgctgtggcggccgccgctgcagctggtgaaccacgcgctagaggggcaaagagacgcgggggacaggtcccgaacgggctgcccagggcaccccccgcccctgtcatcccacagcttaccgtgactgctgaggagcctgatgtgccgcctacctcaccagggcctcccgagagggagcgggactgtttgcccgctgctgggtcctcccacttacagcagccccgacgacttagtacctccagcgtctcttcaaccgggtcgtcctcattactggaagactcagaagatgacttactgtctgattcagagagtcgtagtcgaggcaacgtgcagctggaggcaggggaggatgtagggcaaaagaatcactggcaaaaaatccgtaccatggtcaacttgcctgttattagcccatttaagaaacggtacgcttgggtgcagcttgccggccacacaggcagttttaaagcagccggcacgtctggactgattctgaagcgctgctcggagccagaaagatactgcctagctcgccttatggcagacgcactacgaggctgtgtgccggcttttcacggagtggtcgaacgcgacggcgaatcttacctacagctacaagacttgctggacggatttgacggcccttgtgtcctggattgtaagatgggagttaggacgtatcttgaagaggagctaactaaagccagagaaagaccaaagctcaggaaagatatgtataaaaagatgcttgccgtggaccccgaggcacctacagaggaggagcacgcccagagagccgtaacgaagcccagatatatgcagtggagagagggtatctcatcctcaaccaccctgggattcaggattgaggggatcaaaaaggccgacgggagttgtagcaccgattttaagactaccagatctcgcgaacaggtgctaagggtgttcgaggaatttgtacagggagatgaggaggtccttaggagatatctgaatagactgcagcagattagagacacactggaagtgtccgaattctttcggaggcatgaagtaattggctcttctctgctgttcgttcacgatcattgccatcgcgccggcgtgtggctaattgacttcggcaaaaccacccctctgcccgacggccaaatcctagatcaccggagaccttgggaggaaggcaacagagaggatggataccttctgggtttagacaatctgataggcatcctggcctctttagctgagcggtag

SEQ ID NO: 126686 - DNA, 1386 bp, Artificial Sequence
  derived and/or modified sequence
atgactctgccgggtggccctacggggatggcacgacctggcggtgcaagaccctgcagccccggattggaacgggcaccccgaaggtcggtgggggagctacgcctgctgttcgaagctaggtgtgccgcagttgcagcagctgccgcagcaggcgagcctagggctcggggagctaaacggcgaggcggtcaggtacctaatggactgcccagagcacccccagcgccagttatccctcaattaaccgtaacggccgaagagccagacgttccccctacctcccctgggcctcctgagagagagagagattgcctgcctgccgctggaagttcacacctgcagcagccgaggcgccttagcacttcgtccgtctcctcaacaggctcatcttcactgctggaggatagcgaagacgacttgcttagcgattccgagtcccgttcacggggtaacgttcaattggaagccggagaggatgttggccaaaaaaaccactggcagaaaatccggacgatggtgaacctcccggttatctctccttttaaaaaaagatatgcctgggtccaactggcagggcacactgggagctttaaagcagctggaacatctggcttgatcttgaagagatgctccgagccagagcgctactgcctcgcaaggctgatggcagacgctctgcgtggttgcgtcccggcttttcacggggtggttgaaagggacggtgaatcctatctccagctacaagacctgttggatggttttgacgggccttgcgtgctggactgtaagatgggagtcagaacatatctggaggaggagttaaccaaagcacgagagaggccgaaactgcggaaggatatgtacaagaagatgctcgcagtggacccagaggcaccaactgaggaggaacacgcacagcgagccgtgaccaagcctaggtatatgcaatggcgggaggggatctccagctccactaccttgggctttcgaatcgagggtataaaaaaggcagacggcagttgctctactgattttaagactactcgcagcagggagcaagtactgcgcgtgttcgaggagtttgtccaaggcgatgaggaggtgctgcggaggtatctgaacagactccagcagatccgtgacaccttagaagtgagtgagttttttcgtaggcacgaagtgatcggctcctccctcctgttcgttcatgatcactgccaccgcgcaggggtctggttgatcgacttcgggaaaaccacgcctctgccagacggtcaaatcctggaccaccgcagaccatgggaggaggggaaccgagaggacgggtacttgcttggtctcgacaatctcatagggattctagcgagcttggcagagcggtag

SEQ ID NO: 126687 - DNA, 1386 bp, Artificial Sequence
  derived and/or modified sequence
atgaccctgcccggcggccccaccggcatggccagacccggcggcgccagaccctgcagccccggcctggagagagcccccagaagaagcgtgggcgagctgagactgctgttcgaggccagatgcgccgccgtggccgccgccgccgccgccggcgagcccagagccagaggcgccaagagaagaggcggccaggtgcccaacggcctgcccagagccccccccgcccccgtgatcccccagctgaccgtgaccgccgaggagcccgacgtgccccccaccagccccggcccccccgagagagagagagactgcctgcccgccgccggcagcagccacctgcagcagcccagaagactgagcaccagcagcgtgagcagcaccggcagcagcagcctgctggaggacagcgaggacgacctgctgagcgacagcgagagcagaagcagaggcaacgtgcagctggaggccggcgaggacgtgggccagaagaaccactggcagaagatcagaaccatggtgaacctgcccgtgatcagccccttcaagaagagatacgcctgggtgcagctggccggccacaccggcagcttcaaggccgccggcaccagcggcctgatcctgaagagatgcagcgagcccgagagatactgcctggccagactgatggccgacgccctgagaggctgcgtgcccgccttccacggcgtggtggagagagacggcgagagctacctgcagctgcaggacctgctggacggcttcgacggcccctgcgtgctggactgcaagatgggcgtgagaacctacctggaggaggagctgaccaaggccagagagagacccaagctgagaaaggacatgtacaagaagatgctggccgtggaccccgaggcccccaccgaggaggagcacgcccagagagccgtgaccaagcccagatacatgcagtggagagagggcatcagcagcagcaccaccctgggcttcagaatcgagggcatcaagaaggccgacggcagctgcagcaccgacttcaagaccaccagaagcagagagcaggtgctgagagtgttcgaggagttcgtgcagggcgacgaggaggtgctgagaagatacctgaacagactgcagcagatcagagacaccctggaggtgagcgagttcttcagaagacacgaggtgatcggcagcagcctgctgttcgtgcacgaccactgccacagagccggcgtgtggctgatcgacttcggcaagaccacccccctgcccgacggccagatcctggaccacagaagaccctgggaggagggcaacagagaggacggctacctgctgggcctggacaacctgatcggcatcctggccagcctggccgagagatag

SEQ ID NO: 126688 - protein, 2695 aa, Artificial Sequence
  derived and/or modified sequence
MSDKMSSFLHIGDICSLYAEGSTNGFISTLGLVDDRCVVQPETGDLNNPPKKFRDCLFKLCPMNRYSAQKQFWKAAKPGANSTTDAVLLNKLHHAADLEKKQNETENRKLLGTVIQYGNVIQLLHLKSNKYLTVNKRLPALLEKNAMRVTLDEAGNEGSWFYIQPFYKLRSIGDSVVIGDKVVLNPVNAGQPLHASSHQLVDNPGCNEVNSVNCNTSWKIVLFMKWSDNKDDILKGGDVVRLFHAEQEKFLTCDEHRKKQHVFLRTTGRQSATSATSSKALWEVEVVQHDPCRGGAGYWNSLFRFKHLATGHYLAAEVDPDQDASRSRLRNAQEKMVYSLVSVPEGNDISSIFELDPTTLRGGDSLVPRNSYVRLRHLCTNTWVHSTNIPIDKEEEKPVMLKIGTSPVKEDKEAFAIVPVSPAEVRDLDFANDASKVLGSIAGKLEKGTITQNERRSVTKLLEDLVYFVTGGTNSGQDVLEVVFSKPNRERQKLMREQNILKQIFKLLQAPFTDCGDGPMLRLEELGDQRHAPFRHICRLCYRVLRHSQQDYRKNQEYIAKQFGFMQKQIGYDVLAEDTITALLHNNRKLLEKHITAAEIDTFVSLVRKNREPRFLDYLSDLCVSMNKSIPVTQELICKAVLNPTNADILIETKLVLSRFEFEGVSSTGENALEAGEDEEEVWLFWRDSNKEIRSKSVRELAQDAKEGQKEDRDVLSYYRYQLNLFARMCLDRQYLAINEISGQLDVDLILRCMSDENLPYDLRASFCRLMLHMHVDRDPQEQVTPVKYARLWSEIPSEIAIDDYDSSGASKDEIKERFAQTMEFVEEYLRDVVCQRFPFSDKEKNKLTFEVVNLARNLIYFGFYNFSDLLRLTKILLAILDCVHVTTIFPISKMAKGEENKGSNVMRSIHGVGELMTQVVLRGGGFLPMTPMAAAPEGNVKQAEPEKEDIMVMDTKLKIIEILQFILNVRLDYRISCLLCIFKREFDESNSQTSETSSGNSSQEGPSNVPGALDFEHIEEQAEGIFGGSEENTPLDLDDHGGRTFLRVLLHLTMHDYPPLVSGALQLLFRHFSQRQEVLQAFKQVQLLVTSQDVDNYKQIKQDLDQLRSIVEKSELWVYKGQGPDETMDGASGENEHKKTEEGNNKPQKHESTSSYNYRVVKEILIRLSKLCVQESASVRKSRKQQQRLLRNMGAHAVVLELLQIPYEKAEDTKMQEIMRLAHEFLQNFCAGNQQNQALLHKHINLFLNPGILEAVTMQHIFMNNFQLCSEINERVVQHFVHCIETHGRNVQYIKFLQTIVKAEGKFIKKCQDMVMAELVNSGEDVLVFYNDRASFQTLIQMMRSERDRMDENSPLMYHIHLVELLAVCTEGKNVYTEIKCNSLLPLDDIVRVVTHEDCIPEVKIAYINFLNHCYVDTEVEMKEIYTSNHMWKLFENFLVDICRACNNTSDRKHADSILEKYVTEIVMSIVTTFFSSPFSDQSTTLQTRQPVFVQLLQGVFRVYHCNWLMPSQKASVESCIRVLSDVAKSRAIAIPVDLDSQVNNLFLKSHSIVQKTAMNWRLSARNAARRDSVLAASRDYRNIIERLQDIVSALEDRLRPLVQAELSVLVDVLHRPELLFPENTDARRKCESGGFICKLIKHTKQLLEENEEKLCIKVLQTLREMMTKDRGYGEKGEALRQVLVNRYYGNVRPSGRRESLTSFGNGPLSAGGPGKPGGGGGGSGSSSMSRGEMSLAEVQCHLDKEGASNLVIDLIMNASSDRVFHESILLAIALLEGGNTTIQHSFFCRLTEDKKSEKFFKVFYDRMKVAQQEIKATVTVNTSDLGNKKKDDEVDRDAPSRKKAKEPTTQITEEVRDQLLEASAATRKAFTTFRREADPDDHYQPGEGTQATADKAKDDLEMSAVITIMQPILRFLQLLCENHNRDLQNFLRCQNNKTNYNLVCETLQFLDCICGSTTGGLGLLGLYINEKNVALINQTLESLTEYCQGPCHENQNCIATHESNGIDIITALILNDINPLGKKRMDLVLELKNNASKLLLAIMESRHDSENAERILYNMRPKELVEVIKKAYMQGEVEFEDGENGEDGAASPRNVGHNIYILAHQLARHNKELQSMLKPGGQVDGDEALEFYAKHTAQIEIVRLDRTMEQIVFPVPSICEFLTKESKLRIYYTTERDEQGSKINDFFLRSEDLFNEMNWQKKLRAQPVLYWCARNMSFWSSISFNLAVLMNLLVAFFYPFKGVRGGTLEPHWSGLLWTAMLISLAIVIALPKPHGIRALIASTILRLIFSVGLQPTLFLLGAFNVCNKIIFLMSFVGNCGTFTRGYRAMVLDVEFLYHLLYLVICAMGLFVHEFFYSLLLFDLVYREETLLNVIKSVTRNGRSIILTAVLALILVYLFSIVGYLFFKDDFILEVDRLPNETAVPETGESLASEFLFSDVCRVESGENCSSPAPREELVPAEETEQDKEHTCETLLMCIVTVLSHGLRSGGGVGDVLRKPSKEEPLFAARVIYDLLFFFMVIIIVLNLIFGVIIDTFADLRSEKQKKEEILKTTCFICGLERDKFDNKTVTFEEHIKEEHNMWHYLCFIVLVKVKDSTEYTGPESYVAEMIKERNLDWFPRMRAMSLVSSDSEGEQNELRNLQEKLESTMKLVTNLSGQLSELKDQMTEQRKQKQRIGLLGHPPHMNVNPQQPA

SEQ ID NO: 126689 - DNA, 8088 bp, Artificial Sequence
  derived and/or modified sequence
atgagcgataaaatgtcatcttttctacacattggggacatttgctctctctatgcggaaggcagtacaaacgggttcatcagcactttaggacttgtggacgataggtgtgttgtgcagcccgagactggcgatcttaataatccccccaagaagttccgtgattgcctgttcaagctctgtcctatgaataggtactccgcccaaaagcagttttggaaggctgccaaacctggcgccaattctacaactgacgccgtcctgttgaacaagctccaccacgcagctgacctggaaaaaaagcagaatgaaacagaaaaccgaaagctcctgggtactgtgatccagtacgggaatgtgattcagctccttcacctcaagagtaacaaatatctgaccgttaacaaaagattacctgcgctactcgagaaaaatgcgatgagggtgacacttgatgaagcaggtaacgagggctcatggttctatatacaaccattctacaaactcagatcgataggagatagcgttgttatcggagacaaagtggtccttaatcccgtaaatgcaggccagccactgcatgctagctcacaccagctggtcgataatcccgggtgcaacgaagtaaactcagtgaactgtaacacttcctggaagattgtgctttttatgaagtggtctgataacaaagatgacatcttgaagggaggggacgtggtgcgcctgttccacgctgaacaggagaaatttctgacttgtgatgaacacaggaaaaagcagcacgtcttcctgcggacgaccgggcgccaaagcgccacgtccgctacttcaagcaaggctctgtgggaagttgaggtggtgcagcacgacccctgccgaggtggggccggctactggaacagcctttttcgcttcaagcacctggctaccgggcactatctggccgccgaagtcgatccagatcaagacgcctcaaggtctcgtctgcggaacgctcaggagaagatggtttactcactggtgtcagtgccagagggtaatgatatcagttcaatattcgagctcgacccaaccactctgagagggggcgactcactggttcctcgaaacagctacgtgagactgcggcacctatgcaccaacacttgggtgcactcgaccaatataccgatcgataaggaggaggagaaaccagtcatgcttaagatcggcacctcacccgtcaaggaagacaaggaagcattcgcaatagtgcccgtatctcctgctgaagttcgggatcttgatttcgccaatgatgctagcaaggtcctgggctcaatcgctgggaaactggagaaagggactattacacagaacgagcgccggtccgtgactaagctgctcgaagacctggtgtacttcgtgacaggcgggaccaactctggccaggacgtcttagaagtggtgttttcaaagcccaatagagaaagacagaaactgatgagggagcagaatatcctgaagcagatctttaagctcttgcaggcaccctttaccgactgcggcgacggacctatgcttaggttagaggagctcggtgatcagagacacgcgccatttcgccacatatgcaggctctgctatagagtccttcgccatagccagcaggattatcggaaaaaccaggaatatattgccaagcaattcgggttcatgcagaagcagatcgggtacgacgtattggccgaggatacaattacggcactcctgcacaataaccgaaaacttttagaaaagcatatcaccgccgccgagatcgacacatttgtctcattggtgcgtaagaatcgagagcccagattcctggactatctgtctgatctctgcgtctccatgaacaagagtatccccgttacacaggagctgatttgtaaggctgtcctgaacccaacaaacgcagatatccttatcgaaactaaactcgtgctgagtcgcttcgagtttgagggcgtgagcagcacaggcgagaatgctctggaggctggcgaggatgaagaagaggtttggctgttttggagagattccaacaaggagatccgctccaaatccgtgagggagttggcccaggatgcaaaggaaggtcagaaggaggatcgggatgtgttgtcgtattatcgctaccagctgaatctcttcgccagaatgtgtttagatagacagtacttagccatcaacgaaatctcaggccaactggacgtggatctgattctccgatgtatgagcgatgaaaacctaccatatgacctacgtgcgtctttttgtcggcttatgctgcatatgcacgttgacagggatccccaagagcaggtcacaccagtgaagtatgctagactgtggagcgagattccatcagagattgctatcgacgactacgatagctccggcgcttctaaagacgaaatcaaagagcggttcgcccagacaatggagtttgttgaggagtatcttagggatgttgtctgccagcgctttccattttccgataaagaaaaaaataagttgacattcgaggtggttaacttggctcggaacctcatctatttcggtttctacaatttcagtgacctacttaggctgactaagatattattagctatacttgactgcgttcacgtgactactattttccctatcagtaaaatggctaagggggaggagaataaaggatcaaatgttatgaggtctattcacggtgttggagaacttatgacacaagttgtgctgcggggcggagggtttctgccaatgactcccatggctgcagccccagaagggaatgtgaagcaggcggaacccgaaaaagaagatattatggtgatggacacgaaattaaaaataatcgagattttacagtttatcctcaacgtccggctcgactaccgtatctcttgcttgctgtgcatttttaagcgagaatttgacgaaagcaactctcaaacttccgaaaccagctccggtaattccagtcaggagggtccatcaaatgtgcctggcgctctggactttgagcacattgaggagcaggcagagggcatcttcggcgggagtgaggagaacaccccactggatctggatgatcacggtgggcgcacgtttctcagagtcctcctacatctgaccatgcacgattatccaccacttgtttccggtgctttgcaattgctgtttcggcactttagccagagacaggaggtactgcaagcttttaagcaggtacagctcctggtaacctcccaggacgtagataattataagcagataaaacaagatctagatcagcttaggtccatcgtggagaagtccgaactctgggtctacaaaggccagggccctgacgagacaatggatggggcttccggggaaaatgagcataagaaaactgaggaagggaataataaaccgcagaaacatgagtcaacctcaagctacaattaccgagttgtgaaagagatcctgattcggctgtcaaaactctgcgtgcaggagagcgcatctgtccgcaagtcccggaagcaacaacagcgcttgcttcggaatatgggagcccacgccgtggtcctggagttgctgcagattccatatgagaaagccgaagatactaagatgcaggaaatcatgagactcgctcatgaatttcttcagaacttctgcgctgggaaccagcagaaccaggctctcctccacaaacatatcaacctgttcctgaaccctggtattttggaagctgttacgatgcagcacatttttatgaataactttcaactctgcagcgaaattaacgaaagggtggtgcaacatttcgttcactgcattgaaacccacggccgcaacgtgcagtatataaaatttctacagactattgtcaaagccgaaggtaaatttataaagaaatgtcaggacatggttatggctgaactcgtaaattccggtgaggacgttctcgttttctacaatgatagagcaagctttcagacgctgatccagatgatgcgctcagaaagggacagaatggacgaaaactctccattgatgtatcacatccatctggtcgagctccttgcagtgtgtacagagggaaaaaacgtgtataccgaaattaagtgcaattctttgttgccccttgatgacatcgtccgcgtagttactcacgaagactgtatccccgaggtaaagatcgcctatatcaacttcctcaatcactgctatgtcgatacggaagtggagatgaaggagatctacacatccaatcacatgtggaagttgttcgagaatttcctggtggatatatgcagggcttgcaacaacacatctgatcgaaagcacgctgatagtatcctggagaaatatgttacagaaatcgtgatgtcaatagtgacgacttttttcagcagccccttcagtgatcagagcaccaccctgcagactaggcaacctgtgtttgtgcagctgctgcagggcgtctttagagtgtaccattgtaactggctgatgccaagccagaaggcgtcggtcgaaagttgtattcgggtcctctctgacgtggctaagagcagagcaatagcgataccggtggacttggactcccaggttaataatctgtttctaaagagtcacagtatcgtccagaagactgcaatgaactggaggctcagtgcgcggaatgctgcccggcgagattcagtcttggcggcctccagggactatagaaatattatcgagagactccaggatattgtgagtgccttggaggaccgcctccggccactcgtccaggcagaactgtccgtgctggtagatgtgctgcaccgtccggagctcctgttcccagaaaacactgatgccagacgtaaatgcgagtctggtggattcatctgcaagttgattaagcacacaaagcagctcctcgaggaaaatgaagagaagctgtgtatcaaggtcctgcagaccctccgagaaatgatgaccaaagatagaggctatggcgagaaaggtgaagctttgaggcaggtcctggtcaaccgatactacgggaacgttcgcccatccgggcggcgggaaagtctgacttcctttggcaacgggcctctgtccgcaggagggcccggcaagcccgggggcggtgggggaggctcgggatcctcctcaatgagcaggggcgagatgtcactcgctgaggtccagtgccacctcgataaggagggcgccagtaacctagtaattgatctgataatgaacgcctcctccgacagagtcttccacgagtctattctgttggctattgctcttctggaagggggcaatacaacaattcagcattcatttttctgtcgtctcaccgaagacaaaaagtctgaaaaattcttcaaggtcttttatgaccgtatgaaggtagcccagcaggagattaaggccactgtgacagtgaacacttccgacctgggcaacaaaaagaaggatgacgaagtggacagggacgcaccctctcgtaagaaagccaaggaacctactactcagatcacagaggaggttagagatcaactgctagaagcatccgcagcaacccgcaaagcgtttactaccttccgtagagaagccgacccggacgaccactatcagcctggggaaggcacgcaggcaactgccgataaagccaaagatgaccttgaaatgtccgcagtaataacaataatgcagcccatcttgaggtttttacagctgctatgcgagaatcataatagagacctccagaatttcttgaggtgtcagaataataaaacaaactataatttggtgtgcgagacactgcagttcctggattgtatctgtggctccacaacaggtggactaggtctgctcggcctttacataaacgagaaaaacgtagcactcattaatcagactctggagagcctcacagagtactgccagggcccttgccatgaaaaccagaactgtattgctacacacgagtctaacggaatcgatatcatcacggccttgatcttgaatgatattaatcccctgggaaagaagagaatggacttggttctcgaattaaaaaataacgccagtaagctgctgctcgccatcatggaatccaggcacgattccgagaacgcagagagaatcctttataacatgcggcccaaggagctggtggaggtgattaaaaaggcctatatgcagggagaagttgagtttgaggacggtgagaatggagaggatggcgcagcaagtccaaggaacgtggggcataatatctacatcctggcacaccagctggccagacacaacaaagagctgcagagcatgctcaagccaggcggccaggtggatggtgacgaagctctcgaattttacgccaagcataccgcacagattgaaatcgtgagattggaccggacaatggagcagatagtttttcctgtcccttctatctgcgagttcctcactaaggagtcaaagctaagaatttattataccactgaacgggacgagcaaggatctaagattaatgatttcttcctgcgctccgaggacctgttcaacgagatgaactggcagaagaagctccgggcccagcccgtcctgtactggtgcgcaaggaatatgagcttttggagctcaatttcattcaaccttgccgttctgatgaatcttctcgtcgcttttttctatccgttcaaaggggtgcgcggcgggacgctcgagccacattggtccgggctgttgtggacggccatgctgatttctctggccatagtcatcgcgcttcccaaaccccacggaatcagagcactgatcgcttccaccattcttaggttaatcttttctgttggcttacagccgaccttattcctgctgggagcatttaacgtttgtaataaaatcatctttctgatgagctttgtgggtaattgcggcaccttcactcggggctaccgggccatggttctggacgtcgagtttttgtatcacctgctgtaccttgtcatctgtgctatgggcctgtttgtacatgaatttttttattccctgttacttttcgacctggtgtaccgggaagaaacactcctaaacgtcattaagtcagtgaccagaaacggacgttccatcatcttgaccgctgtcctcgctttaatcttggtgtacctcttcagcattgtcggttaccttttcttcaaggatgatttcatcctggaggtggaccgcctgcctaatgaaactgcagtgcctgaaaccggggagtccttggcctccgagtttcttttttccgatgtctgcagggtcgaaagtggcgaaaattgcagctcacccgccccacgcgaagaacttgtgccagccgaggagactgagcaggacaaggaacacacgtgcgagaccctcttgatgtgcatagtgaccgtgctgtctcatgggctacgatctgggggcggcgtcggcgatgtgctgcgaaaacctagcaaagaagaaccgctgttcgcagctagggtgatctacgatttattatttttctttatggtgatcataatcgtgctcaatttgatcttcggggtgatcattgatacgttcgccgacctgaggtccgaaaaacaaaaaaaagaagagatcctgaaaacgacgtgtttcatctgcggcctggaacgggataagttcgataataagaccgttaccttcgaggagcacattaaagaagaacacaatatgtggcactacctgtgtttcatcgtgctggtaaaggttaaagatagcactgaatacacgggcccggagagctatgttgccgaaatgatcaaggagcggaatctggactggtttccccggatgcgggccatgagcctcgtgagcagtgattctgaaggcgagcagaacgagctccgtaatcttcaggaaaaactcgagtctacaatgaaactcgtgaccaacctgtctggtcagcttagtgaattgaaggaccaaatgactgagcagcggaaacaaaaacagcggattggactgctaggacatcctccccacatgaatgtgaatccgcagcagcctgcctag

SEQ ID NO: 126690 - DNA, 2166 bp, Artificial Sequence
  derived and/or modified sequence
atgtctgataaaatgtcatcatttctccacatcggggatatatgctcgttgtacgctgaaggcagcacaaacggctttatttcaactctagggcttgtggacgataggtgtgtggtgcagccagaaactggtgatctgaataatccacctaaaaagtttcgagactgcctttttaagctttgtcccatgaatcgctatagtgcacagaaacagttctggaaagccgctaaacctggcgcgaactctaccaccgacgcagttttacttaataagctgcaccacgccgcagatctggaaaagaaacaaaacgagaccgagaatcggaagctgctcgggaccgtcatccaatacggaaacgtcattcagttgctgcatttgaagtctaacaagtatttgactgtgaataagagactcccagctctgctggagaagaatgccatgagggttactttagacgaagctggcaatgagggctcctggttttatatacagccgttttacaagctgaggtctatcggcgattctgtagtgataggcgacaaagtggtgctgaaccccgtgaacgctggacagccactgcatgcctcttctcaccagcttgtggataacccgggatgtaatgaggtgaattctgtgaactgcaacacctcgtggaaaatagtgctgtttatgaagtggagcgataataaagatgacattcttaagggcggggacgtagtgcggcttttccacgccgagcaagagaaattcctcacatgcgacgaacataggaagaagcagcatgtttttctgagaaccacaggtcgccagagcgccacatcagctaccagctccaaggccctgtgggaggtcgaggtggtccagcacgatccatgtagaggaggtgctggttattggaacagcctgtttcgcttcaaacaccttgcaaccggccattacttggccgctgaggttgaccccgattttgaggaggagtgcctggagtttcagccctctgtatgtaacaagataatctttctcatgagtttcgttggcaactgtggtacatttacccgggggtacagagcaatggtgctcgacgtcgagtttttataccacctgctctaccttgttatctgtgctatgggactgtttgtgcacgaatttttttatagtcttctcttgttcgacctggtatacagggaggaaacgctgctgaacgtgataaagtcagttacccgaaatggccgcagtattattttgacggccgtgctggctctcatattggtgtacctattttcgatcgtgggctatttgttcttcaaggatgatttcatcttagaggtggaccgtcttccaaacgagaccgcagtgcctgagaccggggaaagcctggcatccgagtttctgttttccgacgtctgtcgggtggaaagcggtgagaattgcagttctcccgcgccccgggaagagctggtaccagcagaagagaccgagcaggataaagagcatacctgtgaaacactgctcatgtgtattgtgactgtcctgtcccatgggctgaggagtggcggcggagtaggcgatgtgctacgcaaaccgagcaaagaggagccacttttcgcggctcgagttatttatgatcttctgttttttttcatggtgatcatcatcgtactgaaccttattttcggtgtgatcatcgatacatttgccgatctccgctctgagaaacaaaagaaggaagagattttgaagaccacatgttttatctgcggccttgaaagagataagttcgataataagacagtgacgtttgaagagcacatcaaagaagagcataacatgtggcactacttatgcttcatcgttctagtgaaggtaaaagactctactgagtataccggtccggagagttacgtggcagagatgatcaaggagcggaatctggattggtttccccgaatgagagctatgagtttagtgtcatctgattccgagggtgagcagaacgagctgcgcaatttgcaagagaaattggagagtacaatgaagctagtaaccaatctgagcggacagttgagcgaactgaaagaccagatgactgagcaaaggaagcaaaaacagagaatcggcctgctggggcatccccctcacatgaatgtgaatccacagcaacctgcctag

SEQ ID NO: 126691 - DNA, 9813 bp, Artificial Sequence
  derived and/or modified sequence
agtaaccatgtggatgtgctgctgaagcgtttcctcaagctcgctggggtgggaggagaggaggaggaggaggtggtggtggaggaggaggcagggggtggagagagagaaagcgcacgccgagaggaggtgtgggtgttccgcttccatcctaacggaacgagctccctcttcgcggacatgggattacccagcggctgctaacccctctcctcgccctgctcccccaaaccggcgtggctccccgggcaccaaggagctgactacagaggagcaggatttgcacccctcgctgggcttgctttggcaacagagtgcctgacccaggtcaggattttcaagaaagacatgtctgacaaaatgtctagcttcctacatattggagacatttgttctctgtacgcggagggatcgacaaatggatttattagcaccttgggcctggttgatgatcgttgtgttgtacagccagaaaccggggaccttaacaatccacctaagaaattcagagactgcctctttaagctatgtcccatgaaccgctactctgcccaaaagcagttctggaaagccgctaagcctggggccaacagcaccacagacgcagtgctactcaacaaactgcaccacgctgcagacttggaaaagaagcagaatgagacagaaaacaggaaattgctggggaccgtaatccagtatggcaatgtgatccagctcctgcatttgaaaagtaataaatacctaacagtgaataagaggcttcctgctctgttggagaagaatgccatgagagtcacattggacgaggctggaaatgaagggtcctggttttatattcagccattctacaagctgcgatccattggagacagcgtggtcataggtgacaaggtggttctgaaccccgtcaatgctggtcagcccctacatgctagcagccatcaactggtagataacccaggctgcaatgaggtcaattccgtcaactgcaatacaagctggaaaatagtccttttcatgaaatggagtgataacaaagacgacatattaaaggggggtgacgtggtgaggctgtttcatgctgagcaggagaagtttctcacctgtgacgaacacaggaagaagcagcacgtcttcctgagaaccacgggccggcagtcggccacatctgccaccagttcaaaagccctgtgggaggtggaggtggtccagcatgacccatgtcggggcggagcagggtattggaacagccttttccgtttcaagcatctggccacggggcattacttggcagcagaggtggaccctgatcaggacgcctctcgaagtaggttgcggaatgcccaagaaaagatggtatactccctggtctctgtgcctgaaggcaatgacatctcctccattttcgagctagatcccaccactctgcgtggaggtgacagccttgtcccaaggaactcttatgttcggctcagacacctatgtactaatacctgggttcacagcacaaatattcctattgacaaggaagaagaaaagcccgtgatgctgaaaattggcacctctcctgtgaaggaggataaggaagcatttgccatagttccggtttctcctgctgaagttcgggacctggactttgccaatgatgccagcaaggtgctgggctccattgctgggaagctagagaagggcaccatcacccagaatgaaaggaggtctgtaaccaagctgctagaagatttggtttacttcgtcactggtggaactaattctggtcaagatgttctcgaagttgtcttctccaagcccaacagagaacggcagaaactgatgagagaacagaatattctcaagcagatcttcaagttgttacaagccccattcacagactgcggtgatggcccaatgcttcggctggaagagctcggggaccagcggcacgctcctttcagacacatctgccggctctgctacagggtgctgagacactcgcagcaagactacaggaagaaccaggagtatatagccaagcagtttggcttcatgcagaagcagattggctatgatgtgttggctgaagacactatcactgccctgctccacaataatcggaaactcctggaaaaacacattaccgcggcagagattgacacatttgtcagcctggtgcgaaagaacagggagcccagattcttagattacctctccgacctctgtgtctccatgaacaaatcaattccagtgacccaggaactgatatgtaaagctgtgctgaaccccaccaacgctgacatcctgattgagaccaagttggttctttctcgttttgaatttgaaggtgtctcttccactggagagaatgctctggaggcaggagaagacgaggaagaggtgtggctgttttggagggacagcaacaaagagattcgcagcaagagtgtgagggaattggctcaggatgctaaagaagggcagaaggaggaccgagacgttctcagctactacagatatcagctgaacctctttgcgaggatgtgtctggaccgccaatacctggccatcaacgaaatctcaggccagctggatgtcgatctcattctccgctgcatgtctgacgagaacctgccctatgacctcagggcgtccttctgccgcctcatgcttcacatgcatgtggaccgagatccccaggaacaagtcacccccgtgaaatatgcccgcctctggtcggagattccctcggagatcgccattgacgactatgatagtagtggagcttccaaagatgaaattaaggagagatttgctcagaccatggagtttgtggaggagtatttaagagatgtggtttgtcagaggttccctttctctgataaagagaagaataagcttacgtttgaggttgtaaatttagctaggaatctcatatactttggtttctacaacttctctgaccttctacgattaactaagatccttctggccatattggactgtgtacatgtgacaacaatcttccccattagcaagatggcgaaaggagaagagaataaaggcagtaacgtgatgagatctattcatggcgtgggagagctgatgacccaggtggtgctccggggaggaggctttttgcccatgactcccatggctgctgcccctgaaggcaatgtgaagcaggcagagcctgagaaggaggacatcatggtcatggacaccaagctgaagatcattgagatactccagtttattttgaatgtgaggttggattataggatctcctgcctcctgtgtatatttaagcgagagtttgatgaaagcaattcccagacttcagaaacatcctccggaaacagcagccaagaagggccaagtaatgtaccaggtgctcttgactttgaacacattgaagaacaagcagaaggcatctttggaggaagtgaggagaacaccccactggacttggatgaccacggcggcagaacctttctccgtgtcctgctccacttgacgatgcatgactacccacccctggtgtcaggggccctgcagctcctcttccggcacttcagccagaggcaggaggtgctccaggccttcaaacaggttcaactgctggttaccagccaagatgtggacaactacaaacagatcaaacaagacttggatcaactgaggtccatcgtggaaaagtcagagctttgggtgtacaaagggcagggccccgatgagactatggatggtgcatctggagaaaatgaacataagaaaacggaggagggaaataacaagccacaaaagcatgaaagcaccagcagctacaactacagagtggtcaaagagattttgattcggcttagcaaactctgtgttcaagagagtgcctcagtgagaaagagcaggaagcagcaacagcgtctgctccggaacatgggcgcgcacgccgtggtgctggagctgctgcagattccctatgagaaggccgaagataccaagatgcaagagataatgaggttggctcatgaatttttgcagaatttctgcgcaggcaaccagcagaatcaagctttgctacataaacacataaacctgtttctcaacccagggatcctggaggcagtaaccatgcagcacatcttcatgaacaatttccagctttgcagtgagatcaacgagagagttgttcagcacttcgttcactgcatagagactcacggtcggaatgtccagtatataaagttcttacagacaattgtcaaggcagaagggaaatttattaaaaaatgccaagacatggttatggccgagctggtcaattcgggagaggatgtcctcgtgttctacaacgacagagcctctttccagactctgatccagatgatgcggtcagaacgggatcggatggatgagaacagccctctcatgtaccacatccacttggtcgagctcctggctgtgtgcacggagggtaagaatgtctacacagagatcaagtgcaactccctgctcccgctggatgacatcgttcgcgtggtgacccacgaggactgcatccctgaggttaaaattgcatacattaacttcctgaatcactgctatgtggatacagaggtggaaatgaaggagatttataccagcaatcacatgtggaaattgtttgagaatttccttgtagacatctgcagggcctgtaacaacactagtgacaggaaacatgcagactcgattttggagaagtatgtcaccgaaatcgtcatgagtattgttactactttcttcagctctcccttctcagaccagagtacgactttgcagactcgccagcctgtctttgtgcaactgctgcaaggcgtgttcagggtttaccactgcaactggttaatgccaagccaaaaagcctccgtggagagctgtattcgggtgctgtctgatgtagccaagagccgggccattgccattcccgtggacctggacagccaagtcaacaacctctttctcaagtcccacagcattgtgcagaaaacagccatgaactggcggctctcagcccgcaatgccgcacgcagggactctgttctggcagcttccagagactaccggaatatcattgagagattgcaggacatcgtctccgcgctggaggaccgtctcaggcccctggtgcaggcagagttatctgtgctcgtggatgttctccacagacccgagctgcttttcccagagaacacagacgccagaaggaaatgtgaaagtggcggtttcatttgcaagttaataaagcatacaaaacagctgctagaagaaaatgaagagaagctctgcattaaggtcctacagaccctgagggaaatgatgaccaaagatagaggctatggagaaaagggtgaggcgctcaggcaagttctggtcaaccgttactatggaaacgtcagaccttcgggacgaagagagagccttaccagctttggcaatggcccactgtcagcaggaggacccggcaagcccgggggaggagggggaggttccggatccagctctatgagcaggggtgagatgagtctggccgaggttcagtgtcaccttgacaaggagggggcttccaatctagttatcgacctcatcatgaacgcatccagtgaccgagtgttccatgaaagcattctcctggccattgcccttctggaaggaggcaacaccaccatccagcactcctttttctgtcgcttgacagaagataagaagtcagagaaattctttaaggtgttttatgaccggatgaaggtggcccagcaagaaatcaaagcaacagtgacagtgaacaccagtgacttgggaaataaaaagaaagacgatgaggtagacagggatgccccatcacggaaaaaagctaaagagcccacaacacagataacagaagaggtccgggatcagctcctggaggcctccgctgccaccaggaaagccttcaccactttcaggagggaggctgatcccgacgaccactaccagcctggagagggcacccaggccactgccgacaaggccaaggacgacctggagatgagcgcggtcatcaccatcatgcagcccatcctccgcttccttcagctcctgtgtgaaaaccacaaccgagacctgcagaacttcctccgttgccaaaataacaagaccaactacaatttggtatgtgagaccctgcagtttctggactgtatttgtggaagcacaactggaggccttggtcttctgggcttgtatataaatgaaaagaatgtagcgcttatcaaccaaaccctggaaagtctgaccgaatactgtcaaggaccttgccatgagaaccagaactgcatagccacccatgaatccaatggcattgacatcatcacagccctgatcctcaatgatatcaatcctttgggaaagaagaggatggaccttgtgttagaactgaagaacaatgcctcgaagttgctcctggccatcatggaaagcaggcacgacagtgaaaacgcagagaggatactttataacatgaggcccaaggaactggtggaagtgatcaagaaagcctacatgcaaggtgaagtggaatttgaggatggagaaaacggtgaggatggggcggcgtcccccaggaacgtggggcacaacatctacatattagcccatcagttggctcggcataacaaagaacttcagagcatgctgaaacctggtggccaagtggacggagatgaagccctggagttttatgccaagcacacggcgcagatagagattgtcagattagaccgaacaatggaacagatagtctttcccgtgcccagcatatgtgaattcctaaccaaggagtcaaaactacgaatttactatactacagagagagacgaacaaggcagcaaaatcaatgatttctttctgcggtctgaagacctcttcaatgaaatgaattggcagaagaaactgagagcccagcccgtgttgtactggtgtgcccgcaacatgtctttctggagcagcatttcgtttaacctggccgtcctgatgaacctgctggtggcgtttttctacccgtttaagggagtccgaggaggaaccctggagccccactggtcgggactcctgtggacagccatgctcatctctctggccatcgtcattgccctccccaagccccatggcatccgggccttaattgcctccacaattctacgactgatattttcagtcgggttacaacccacgttgtttcttctgggcgctttcaatgtatgcaataaaatcatctttctaatgagctttgtgggcaactgtgggacattcacaagaggctaccgagccatggttctggatgttgagttcctctatcatttgttgtatctggtgatctgtgccatggggctctttgtccatgaattcttctacagtctgctgctttttgatttagtgtacagagaagagactttgcttaatgtcattaaaagtgtcactcgcaatggacggtccatcatcctgacagcagttctggctctgatcctcgtttacctgttctcaatagtgggctatcttttcttcaaggatgactttatcttggaagtagataggctgcccaatgaaacagctgttccagaaaccggcgagagtttggcaagcgagttcctgttctccgatgtgtgtagggtggagagtggggagaactgctcctctcctgcacccagagaagagctggtccctgcagaagagacggaacaggataaagagcacacatgtgagacgctgctgatgtgcattgtcactgtgctgagtcacgggctgcggagcgggggtggagtaggagatgtactcaggaagccgtccaaagaggaacccctgtttgctgctagagttatttatgacctcttgttcttcttcatggtcatcatcattgttcttaacctgatttttggggttatcattgacacttttgctgacctgaggagtgagaagcagaagaaggaagagatcttgaagaccacgtgctttatctgtggcttggaaagagacaagtttgacaacaagactgtcacctttgaagagcacatcaaggaagaacacaacatgtggcactatctgtgcttcatcgtcctggtgaaagtaaaggactccaccgaatatactgggcctgagagttacgtggcagaaatgatcaaggaaagaaaccttgactggttccccaggatgagagccatgtcattggtcagcagtgattctgaaggagaacagaatgagctgagaaacctgcaggagaagctggagtccaccatgaaacttgtcacgaacctttctggccagctgtcggaattaaaggatcagatgacagaacaaaggaagcagaaacaaagaattggtcttctaggacatcctcctcacatgaatgtcaacccacaacaaccagcataagcaaatgaaagaaaggaattgtatttaccttttataattattattagtgtgggtatggctaatgagttctgattcacccacgaaggttacatttatgctgaatacatttgtaaatactcagttttatactgtatgtatatgattgctactctaaaggtttggatatatgtattgtaattagaattgttggcatgatgacatttcatttgtgccaaaaatattaaaaatgccttttttggaaggactaacagaaagcacctgatttgcacttgaaccagattatagatttaaaagtatatgacatgtattttgtatttaaaactagaatagccagtatttatgttttttataaaactgtgcaatacgaattatgcaatcacaatacatttgtagctcccgagtgtcctaaagggagtgcacttctttgaagctggtgtgttaatactatgtaataaatggttaactttcaaatgatgctgctgccaaaattatattaatagtgagtttcaggcccctgggcattttgtaccatgtaattatcctctggtgatgctgtttctcgttagtggcagtagtgcctccgtctcctagtgataatgctccaagtctatgaactgttaaatcagcattcattttaagaaaagcaactttagtttcaaagatacttttaagcttctaaattgatcatttaaactatttctttaaataagagagccaaattagaggctcatactttagcttgtgaagaagataatgaattttttaaagggaactttctatgcaatgttcaggataaatgcatactgctggccaatcagtgtcatctcctgggtaaattttgatgtcgcattataaagacatgcataattgatggtttctagattatctagtccaaacaatagagtttattttttcttcatctgaaccaacatgctacagtagctaagaagtattaaaactatatacatccatataaagatgaaatatgaactatctcattagaagtcatagttgaccacagacatgttattcttctgaaagagccacattttggttttatttcttgtcacatgatttcttttcttgatggatgaaaaatatgaaaggaaacttttatatctgttgcctagttttgtacatggatctcattttacaagagaatctctctgcaaaaaaaaaaaaaacagtttaaaaatgcattgaaagcagagttctgaaatgagtaaagtttgtaaatgcatatataaaaatatttaataaatgatgcagaatatacagtgactggttggtggctttcatttggcatttgtgacttaactgctattccatttatgtactttctttaggatcagtttgaagtacagtcggtttgattac

SEQ ID NO: 126692 - DNA, 2799 bp, Artificial Sequence
  derived and/or modified sequence
ctaacccctctcctcgccctgctcccccaaaccggcgtggctccccgggcaccaaggagctgactacagaggagcaggatttgcacccctcgctgggcttgctttggcaacagagtgcctgacccaggtcaggattttcaagaaagacatgtctgacaaaatgtctagcttcctacatattggagacatttgttctctgtacgcggagggatcgacaaatggatttattagcaccttgggcctggttgatgatcgttgtgttgtacagccagaaaccggggaccttaacaatccacctaagaaattcagagactgcctctttaagctatgtcccatgaaccgctactctgcccaaaagcagttctggaaagccgctaagcctggggccaacagcaccacagacgcagtgctactcaacaaactgcaccacgctgcagacttggaaaagaagcagaatgagacagaaaacaggaaattgctggggaccgtaatccagtatggcaatgtgatccagctcctgcatttgaaaagtaataaatacctaacagtgaataagaggcttcctgctctgttggagaagaatgccatgagagtcacattggacgaggctggaaatgaagggtcctggttttatattcagccattctacaagctgcgatccattggagacagcgtggtcataggtgacaaggtggttctgaaccccgtcaatgctggtcagcccctacatgctagcagccatcaactggtagataacccaggctgcaatgaggtcaattccgtcaactgcaatacaagctggaaaatagtccttttcatgaaatggagtgataacaaagacgacatattaaaggggggtgacgtggtgaggctgtttcatgctgagcaggagaagtttctcacctgtgacgaacacaggaagaagcagcacgtcttcctgagaaccacgggccggcagtcggccacatctgccaccagttcaaaagccctgtgggaggtggaggtggtccagcatgacccatgtcggggcggagcagggtattggaacagccttttccgtttcaagcatctggccacggggcattacttggcagcagaggtagaccctgactttgaggaagaatgcctggagtttcagccctcagtatgcaataaaatcatctttctaatgagctttgtgggcaactgtgggacattcacaagaggctaccgagccatggttctggatgttgagttcctctatcatttgttgtatctggtgatctgtgccatggggctctttgtccatgaattcttctacagtctgctgctttttgatttagtgtacagagaagagactttgcttaatgtcattaaaagtgtcactcgcaatggacggtccatcatcctgacagcagttctggctctgatcctcgtttacctgttctcaatagtgggctatcttttcttcaaggatgactttatcttggaagtagataggctgcccaatgaaacagctgttccagaaaccggcgagagtttggcaagcgagttcctgttctccgatgtgtgtagggtggagagtggggagaactgctcctctcctgcacccagagaagagctggtccctgcagaagagacggaacaggataaagagcacacatgtgagacgctgctgatgtgcattgtcactgtgctgagtcacgggctgcggagcgggggtggagtaggagatgtactcaggaagccgtccaaagaggaacccctgtttgctgctagagttatttatgacctcttgttcttcttcatggtcatcatcattgttcttaacctgatttttggggttatcattgacacttttgctgacctgaggagtgagaagcagaagaaggaagagatcttgaagaccacgtgctttatctgtggcttggaaagagacaagtttgacaacaagactgtcacctttgaagagcacatcaaggaagaacacaacatgtggcactatctgtgcttcatcgtcctggtgaaagtaaaggactccaccgaatatactgggcctgagagttacgtggcagaaatgatcaaggaaagaaaccttgactggttccccaggatgagagccatgtcattggtcagcagtgattctgaaggagaacagaatgagctgagaaacctgcaggagaagctggagtccaccatgaaacttgtcacgaacctttctggccagctgtcggaattaaaggatcagatgacagaacaaaggaagcagaaacaaagaattggtcttctaggacatcctcctcacatgaatgtcaacccacaacaaccagcataagcaaatgaaagaaaggaattgtatttaccttttataattattattagtgtgggtatggctaatgagttctgattcacccacgaaggttacatttatgctgaatacatttgtaaatactcagttttatactgtatgtatatgattgctactctaaaggtttggatatatgtattgtaattagaattgttggcatgatgacatttcatttgtgccaaaaatattaaaaatgccttttttggaaggactaacagaaagcacctgatttgcacttgaaccagattatagatttaaaagtatatgacatgtattttgtatttaaaactagaatagccagtatttatgttttttataaaactgtgcaatacgaattatgcaatcacaatacatttgtagctcccgagtgtcctaaagggagtgcacttctttgaagctggtgtgttaatactatgtaataaatggttaactttcaaatgatgctgctgcca

SEQ ID NO: 126693 - DNA, 8088 bp, Artificial Sequence
  derived and/or modified sequence
atgtctgacaagatgagcagcttcctgcacatcggggacatctgcagcctgtatgcagagggcagcaccaacggcttcatcagcaccctgggcctggtggatgacagatgtgtggtgcagcctgagactggagacctgaacaacccccccaagaagttccgggactgcctcttcaagctgtgccccatgaaccgctacagcgcccagaagcagttctggaaggccgccaagccaggggccaacagcaccacagatgctgtgctgctgaacaagctgcaccacgccgctgacctggagaagaagcagaatgaaacagagaacaggaagctgctgggcaccgtcatccagtatggaaatgtcatccagctgctgcacctgaagagcaacaagtacctgactgtgaacaagaggctgcctgccctgctggagaagaatgccatgagggtgaccctggatgaggccggaaatgaaggctcctggttctacatccagcccttctacaagctgcggagcatcggggacagcgtggtgattggagacaaggtggtgctgaaccctgtgaatgccggccagcccctgcacgccagcagccaccagctggtggacaaccctggctgcaatgaggtgaacagcgtgaactgcaacacctcctggaagatcgtgctcttcatgaagtggagcgacaacaaggatgacatcctgaagggaggagatgtggtgcggctcttccacgccgagcaggagaagttcctgacctgtgatgagcacaggaagaagcagcacgtgttcctgcggaccaccggccggcagagcgccaccagcgccaccagcagcaaggccctgtgggaggtggaggtggtgcagcacgacccctgccggggcggggccggctactggaacagcctcttccgcttcaagcacctggccaccggccactacctggccgctgaggtggaccctgaccaggatgccagccgcagccggctgagaaatgcccaggagaagatggtgtacagcctggtgtctgtgcctgagggcaatgacatcagcagcatctttgagctggaccccaccaccctgcggggcggggacagcctggtgcccagaaattcctatgtgcggctgcggcacctgtgcaccaacacctgggtgcacagcaccaacatccccatcgacaaggaggaggagaagcctgtgatgctgaagattggcaccagccctgtgaaggaggacaaggaggcctttgccatcgtgcctgtgtccccagctgaggtgcgggacctggactttgccaatgatgccagcaaggtgctgggcagcattgctgggaagctggagaagggcaccatcacccagaatgaaagaagatctgtgaccaagctgctggaggacctggtgtactttgtgactggaggcaccaacagcggccaggatgtgctggaggtggtgttcagcaagcccaaccgggagcggcagaagctgatgagggagcagaacatcctgaagcagatcttcaagctgctgcaggcccccttcacagactgtggagatggccccatgctgcggctggaggagctgggggaccagagacatgcccccttccgccacatctgccgcctgtgctacagagtgctgcggcacagccagcaggactacaggaagaaccaggagtacatcgccaagcagtttggcttcatgcagaagcagatcggctatgatgtgctggccgaggacaccatcacagccctgctgcacaacaacaggaagctgctggagaagcacatcacagctgctgagattgacacctttgtgtccctggtgaggaagaaccgggagccccgcttcctggactacctgagtgacctgtgtgtgtccatgaacaagagcatccctgtgacccaggagctgatctgcaaggctgtgctgaaccccaccaatgctgacatcctgattgagaccaagctggtgctgagcagatttgaatttgagggcgtgagcagcactggagaaaatgccctggaggccggagaagatgaggaggaggtgtggctgttctggagggacagcaacaaggagatccgcagcaagtctgtgcgggagctggcccaggatgccaaggagggccagaaggaggacagagatgtgctgagctactaccgctaccagctgaacctgtttgccaggatgtgcctggaccggcagtacctggccatcaatgagatcagcggccagctggatgtggacctgatcctgcgctgcatgtctgatgagaacctgccctatgacctgcgggccagcttctgccgcctgatgctgcacatgcacgtggaccgggacccccaggagcaggtgacccctgtgaagtatgcccggctgtggagcgagatccccagcgagatcgccattgatgattatgacagcagcggggccagcaaggatgagatcaaggagagatttgcccagaccatggagtttgtggaggagtacctgagagatgtggtgtgccagcgcttccccttcagtgacaaggagaagaacaagctgacctttgaggtggtgaacctggccaggaacctgatctacttcggcttctacaacttcagtgacctgctgcggctgaccaagatcctgctggccatcctggactgtgtgcacgtgaccaccatcttccccatcagcaagatggccaagggggaggagaacaagggcagcaatgtgatgaggagcatccatggagtgggggagctgatgacccaggtggtgctgcggggcggcggcttcctgcccatgacccccatggctgctgcccctgagggcaatgtgaagcaggccgagcctgagaaggaggacatcatggtgatggacaccaagctgaagatcatcgagatcctgcagttcatcctgaatgtgcggctggactaccgcatcagctgcctgctgtgcatcttcaagcgggagtttgatgagagcaacagccagaccagcgagaccagcagcggcaacagcagccaggagggccccagcaatgtgcctggggccctggactttgagcacatcgaggagcaggccgagggcatctttggaggcagcgaggagaacacccccctggacctggatgaccatggaggccgcaccttcctgcgggtgctgctgcacctgaccatgcatgactacccacccctggtgtctggggccctgcagctgctcttccgccacttcagccagaggcaggaggtgctgcaggccttcaagcaggtgcagctgctggtgaccagccaggatgtggacaactacaagcagatcaagcaggacctggaccagctgcggagcatcgtggagaagtctgagctgtgggtgtacaagggccagggcccagatgagaccatggatggagccagcggagaaaatgagcacaagaagacagaggagggcaacaacaagccccagaagcatgagagcaccagcagctacaactacagagtggtgaaggagatcctgatccggctgagcaagctgtgtgtgcaggagagcgcctctgtgaggaagagcaggaagcagcagcagaggctgctgaggaacatgggcgcccatgctgtggtgctggagctgctgcagatcccctatgagaaggccgaggacaccaagatgcaggagatcatgaggctggcccacgagttcctgcagaacttctgtgccggcaaccagcagaaccaggccctgctgcacaagcacatcaacctcttcctgaaccctggcatcctggaggccgtgaccatgcagcacatcttcatgaacaacttccagctgtgcagcgagatcaatgaaagagtggtgcagcactttgtgcactgcatcgagacccacggcagaaatgtgcagtacatcaagttcctgcagaccatcgtgaaggccgagggcaagttcatcaagaagtgccaggacatggtgatggccgagctggtgaacagcggagaagatgtgctggtgttctacaatgaccgggccagcttccagaccctcatccagatgatgaggtctgagcgggacaggatggatgagaacagccccctgatgtaccacatccacctggtggagctgctggccgtgtgcacagagggcaagaatgtgtacacagagatcaagtgcaacagcctgctgcccctggatgacatcgtgcgggtggtgacccatgaggactgcatccctgaggtgaagatcgcctacatcaacttcctgaaccactgctacgtggacacagaggtggagatgaaggagatctacaccagcaaccacatgtggaagctgtttgagaacttcctggtggacatctgccgggcctgcaacaacaccagtgacaggaagcacgccgacagcatcctggagaagtatgtgacagaaattgtgatgagcatcgtgaccaccttcttcagcagccccttcagtgaccagagcaccaccctgcagacccggcagcctgtgtttgtgcagctgctgcagggcgtcttccgggtgtaccactgcaactggctgatgcccagccagaaggcctctgtggagagctgcatccgggtgctgagtgatgtggccaagagccgggccatcgccatccctgtggacctggacagccaggtgaacaacctcttcctgaagagccacagcatcgtgcagaagacagccatgaactggaggctgagcgccagaaatgctgcccggcgggacagcgtgctggccgccagccgggactacagaaacatcatcgagcggctgcaggacatcgtgtctgccctggaggaccggctgcggcccctggtgcaggccgagctgtctgtgctggtggatgtgctgcacaggcctgagctgctcttccctgagaacacagatgcccggaggaaatgtgagagcggcggcttcatctgcaagctgatcaagcacaccaagcagctgctggaggagaatgaggagaagctgtgcatcaaggtgctgcagaccctgcgggagatgatgaccaaggaccggggctacggggagaagggggaggccctgcggcaggtgctggtgaaccgctactatggaaatgtgcggcccagcggccggcgggagagcctgaccagctttggaaatggccccctgtctgctgggggccctgggaagccaggcggcggcggcggcggcagcggcagcagctccatgagcagaggagagatgagcctggccgaggtgcagtgccacctggacaaggagggcgccagcaacctggtgattgacctgatcatgaatgccagcagtgacagagtcttccacgagagcatcctgctggccatcgccctgctggagggcggcaacaccaccatccagcacagcttcttctgccgcctgacagaggacaagaagtctgagaagttcttcaaggtgttctatgacaggatgaaggtggcccagcaggagatcaaggccaccgtgacagtgaacaccagtgacctgggcaacaagaagaaggatgatgaggtggacagagatgcccccagcaggaagaaggccaaggagcccaccacccagatcacagaggaggtgcgggaccagctgctggaggccagcgctgccaccaggaaggccttcaccaccttccggcgggaggccgaccctgatgaccactaccagcctggagagggcacccaggccacagctgacaaggccaaggatgacctggagatgtctgctgtgatcaccatcatgcagcccatcctgcgcttcctgcagctgctgtgtgagaaccacaacagagacctgcagaacttcctgcgctgccagaacaacaagaccaactacaacctggtgtgtgagaccctgcagttcctggactgcatctgtggcagcaccaccggcggcctgggcctgctgggcctgtacatcaatgagaagaatgtggccctgatcaaccagaccctggagagcctgacagagtactgccagggcccctgccacgagaaccagaactgcatcgccacccatgagagcaatggcatcgacatcatcacagccctgatcctgaatgacatcaaccccctgggcaagaagaggatggacctggtgctggagctgaagaacaatgccagcaagctgctgctggccatcatggagagcagacatgattctgaaaatgctgagcgcatcctgtacaacatgaggcccaaggagctggtggaggtgatcaagaaggcctacatgcagggcgaggtggagtttgaagatggagaaaatggagaagatggagctgccagccccagaaatgtgggccacaacatctacatcctggcccaccagctggcccggcacaacaaggagctgcagagcatgctgaagccaggcggccaggtggatggagatgaggccctggagttctacgccaagcacacagcccagattgaaattgtgcggctggacaggaccatggagcagatcgtgtttcctgtgcccagcatctgtgagttcctgaccaaggagagcaagctgcgcatctactacaccacagaaagagatgagcagggcagcaagatcaatgacttcttcctgcggagtgaagatctcttcaatgagatgaactggcagaagaagctgcgggcccagcctgtgctgtactggtgtgccaggaacatgtccttctggagcagcatctccttcaacctggccgtgctgatgaacctgctggtggccttcttctaccccttcaagggcgtgcggggcggcaccctggagccccactggagcggcctgctgtggacagccatgctgatcagcctggccatcgtcatcgccctgcccaagccccacggcatccgggccctgattgccagcaccatcctgcggctcatcttctctgtgggcctgcagcccaccctcttcctgctgggcgccttcaacgtgtgcaacaagatcatcttcctgatgagctttgtgggcaactgtggcaccttcacccggggctaccgggccatggtgctggatgtggagttcctgtaccacctgctgtacctggtgatctgtgccatgggcctgtttgtgcatgagttcttctacagcctgctgctgtttgacctggtgtaccgggaggagaccctgctgaatgtcatcaagtctgtgaccagaaatggccgcagcatcatcctgacagctgtgctggccctgatcctggtgtacctgttcagcatcgtgggctacctgttcttcaaggatgacttcatcctggaggtggaccggctgcccaatgaaacagctgtgcctgagaccggggagagcctggccagcgagttcctgttcagtgatgtgtgccgggtggagagcggggagaactgcagcagccctgccccccgggaggagctggtgcctgctgaggagacagagcaggacaaggagcacacctgtgagaccctgctgatgtgcatcgtgacagtgctgagccacggcctgcggagcggcggcggcgtgggagatgtgctgaggaagcccagcaaggaggagcccctgtttgctgcccgggtcatctatgacctgctcttcttcttcatggtgatcatcatcgtgctgaacctgatctttggagtcatcatcgacacctttgctgacctgcggtctgagaagcagaagaaggaggagatcctgaagaccacctgcttcatctgtggcctggagcgggacaagtttgacaacaagacagtgacctttgaggagcacatcaaggaggagcacaacatgtggcactacctgtgcttcatcgtgctggtgaaggtgaaggacagcacagagtacacaggccctgagagctatgtggccgagatgatcaaggagaggaacctggactggttccccaggatgagggccatgagcctggtgtccagtgacagcgagggggagcagaatgagctgaggaacctgcaggagaagctggagagcaccatgaagctggtgaccaacctgagcggccagctgtctgagctgaaggaccagatgacagagcagaggaagcagaagcagagaattggcctgctgggccaccccccccacatgaatgtgaacccccagcagcctgcctag

SEQ ID NO: 126694 - DNA, 2166 bp, Artificial Sequence
  derived and/or modified sequence
atgtctgacaagatgagcagcttcctgcacatcggggacatctgcagcctgtatgcagagggcagcaccaacggcttcatcagcaccctgggcctggtggatgacagatgtgtggtgcagcctgagactggagacctgaacaacccccccaagaagttccgggactgcctcttcaagctgtgccccatgaaccgctacagcgcccagaagcagttctggaaggccgccaagccaggggccaacagcaccacagatgctgtgctgctgaacaagctgcaccacgccgctgacctggagaagaagcagaatgaaacagagaacaggaagctgctgggcaccgtcatccagtatggaaatgtcatccagctgctgcacctgaagagcaacaagtacctgactgtgaacaagaggctgcctgccctgctggagaagaatgccatgagggtgaccctggatgaggccggaaatgaaggctcctggttctacatccagcccttctacaagctgcggagcatcggggacagcgtggtgattggagacaaggtggtgctgaaccctgtgaatgccggccagcccctgcacgccagcagccaccagctggtggacaaccctggctgcaatgaggtgaacagcgtgaactgcaacacctcctggaagatcgtgctcttcatgaagtggagcgacaacaaggatgacatcctgaagggaggagatgtggtgcggctcttccacgccgagcaggagaagttcctgacctgtgatgagcacaggaagaagcagcacgtgttcctgcggaccaccggccggcagagcgccaccagcgccaccagcagcaaggccctgtgggaggtggaggtggtgcagcacgacccctgccggggcggggccggctactggaacagcctcttccgcttcaagcacctggccaccggccactacctggccgctgaggtggaccctgactttgaggaggagtgcctggagttccagcccagcgtgtgcaacaagatcatcttcctgatgagctttgtgggcaactgtggcaccttcacccggggctaccgggccatggtgctggatgtggagttcctgtaccacctgctgtacctggtgatctgtgccatgggcctgtttgtgcatgagttcttctacagcctgctgctgtttgacctggtgtaccgggaggagaccctgctgaatgtcatcaagtctgtgaccagaaatggccgcagcatcatcctgacagctgtgctggccctgatcctggtgtacctgttcagcatcgtgggctacctgttcttcaaggatgacttcatcctggaggtggaccggctgcccaatgaaacagctgtgcctgagaccggggagagcctggccagcgagttcctgttcagtgatgtgtgccgggtggagagcggggagaactgcagcagccctgccccccgggaggagctggtgcctgctgaggagacagagcaggacaaggagcacacctgtgagaccctgctgatgtgcatcgtgacagtgctgagccacggcctgcggagcggcggcggcgtgggagatgtgctgaggaagcccagcaaggaggagcccctgtttgctgcccgggtcatctatgacctgctcttcttcttcatggtgatcatcatcgtgctgaacctgatctttggagtcatcatcgacacctttgctgacctgcggtctgagaagcagaagaaggaggagatcctgaagaccacctgcttcatctgtggcctggagcgggacaagtttgacaacaagacagtgacctttgaggagcacatcaaggaggagcacaacatgtggcactacctgtgcttcatcgtgctggtgaaggtgaaggacagcacagagtacacaggccctgagagctatgtggccgagatgatcaaggagaggaacctggactggttccccaggatgagggccatgagcctggtgtccagtgacagcgagggggagcagaatgagctgaggaacctgcaggagaagctggagagcaccatgaagctggtgaccaacctgagcggccagctgtctgagctgaaggaccagatgacagagcagaggaagcagaagcagagaattggcctgctgggccaccccccccacatgaatgtgaacccccagcagcctgcctag

SEQ ID NO: 126695 - DNA, 8088 bp, Artificial Sequence
  derived and/or modified sequence
atgagcgacaagatgagcagcttcctgcacatcggcgacatctgcagcctatacgccgaaggcagcaccaatggctttatctccaccctcgggttggttgacgaccggtgtgtggtgcagcccgaaaccggcgatctgaataatccccccaagaaattccgcgactgcctttttaaactctgtccaatgaatcgctactctgcccagaagcagttctggaaagctgcaaagcccggcgctaattcaactactgatgctgtgttgcttaacaaactgcaccacgctgctgatctagagaagaaacagaatgagaccgaaaacagaaagctcctggggacagtgattcagtacggcaatgttattcagctgctacacctgaaaagcaataagtatttaactgtcaacaagcgcctgcccgctctgcttgaaaaaaacgcgatgcgggtgactctggacgaagctgggaatgaaggctcctggttttacattcagcccttttacaagctccggtcaattggagacagcgtggtgatcggtgacaaagttgtcttgaatcccgttaacgcgggtcagccccttcacgctagcagtcaccaactcgttgacaaccccggatgtaatgaggtgaatagtgtgaattgtaatacctcatggaagatcgttctgtttatgaagtggagcgataataaggacgatatactcaaggggggggacgtggtgcgcctgtttcatgctgagcaggagaaattcttgacttgcgacgagcaccgcaaaaagcagcacgttttcctgaggactaccggcaggcagtctgccactagtgctacctccagcaaagccttgtgggaagtggaggtggtccagcacgacccctgccgggggggagccggatactggaactcactgttccgatttaagcacttggccacaggccactacctggctgccgaagttgaccccgaccaggacgcaagtcgctcacgcttaagaaatgctcaggaaaagatggtctattccctggtgtcagtgccggagggaaatgatatctcctcgattttcgaactggatccaacaaccctgcgaggaggagattctctcgtccctcggaattcatatgtccggttgcggcatctttgcaccaatacctgggtgcactccactaacattcccattgacaaagaggaggagaagcccgtcatgctgaagatcggtacaagccctgtcaaagaggacaaagaagctttcgcaattgtccctgtgagtccagccgaggttcgcgacctagacttcgcgaatgacgcctcaaaagttcttggaagcatcgcggggaagttggagaagggcacgataactcagaacgagcggagatccgttactaagctcctggaagatcttgtttattttgtaacaggtggaactaactctgggcaggacgtcctcgaagttgtgttcagcaaacctaaccgggaacggcagaagcttatgcgggagcagaatatactaaagcagatcttcaagctacttcaggcaccttttaccgactgtggagatggtcctatgcttaggctggaggaactgggagaccaacgtcatgccccttttcggcacatctgcaggttgtgctaccgggtgctcaggcactcacaacaggattaccggaagaaccaggagtacattgctaaacagttcggtttcatgcagaagcaaatcgggtatgacgtcctggcagaggacactataaccgcactgctgcacaacaacaggaaactactggaaaagcacatcaccgccgccgagatcgatacgtttgtgagtctagtgcgtaagaacagggagccccgatttctagactatctctctgatctgtgcgtatctatgaacaagagcattcccgtcacgcaggagttgatttgcaaagcagtactgaacccaaccaacgccgacatcctcatcgagaccaagctggtcctatcacggtttgaattcgaaggtgtctcatccacgggggagaacgcgctggaggcaggggaggacgaggaggaagtctggctcttttggagagacagtaacaaggaaattcgcagtaagtctgttagagaactggcgcaggatgcgaaagaaggccagaaggaagatcgggatgtcctgtcatattaccgctaccaattaaacctgttcgctcggatgtgcctagaccgacaatatctggccataaatgaaataagcgggcagcttgatgtggacttgatcttgcgttgcatgtctgatgaaaatctcccgtacgacctacgagcaagcttctgtcggctgatgttacacatgcacgttgacagagaccctcaggagcaggtcaccccagtaaaatacgcccgtctatggagtgaaattccatcagagatcgctattgatgactatgattcttcaggagcatctaaagatgaaataaaagagcgcttcgctcagaccatggaattcgttgaggaatacttgagggatgtcgtctgtcagcgctttccttttagcgacaaagaaaagaataaactgaccttcgaagtggttaacctcgcgcgcaatctgatctactttggcttttacaacttttcagacctccttaggttaaccaagatcctactcgctattctggactgcgtgcatgttacaaccatatttccaattagtaagatggctaagggggaagagaataaaggctccaatgtgatgcgaagtatccatggtgtgggagagctgatgacccaagtggtgctcagggggggaggattcctaccgatgacccccatggcagccgccccagaaggtaatgtcaagcaggccgagcccgagaaggaggacatcatggtcatggacacaaagcttaaaattattgaaattttgcaattcatcctgaatgtccgcctcgactaccgcatctcctgcctactgtgtatttttaagcgagaatttgacgagtccaacagccagacaagcgagaccagcagtggcaactccagccaggaagggcccagcaacgtcccaggtgcactggatttcgaacacattgaagagcaggctgaaggcatcttcgggggctccgaggagaatactcccctggacctcgatgatcacggcggacggactttcttacgcgtcctgctccacctaacgatgcatgactaccctcccctagtgtccggggctctgcagctcttattcagacacttttctcagcgacaggaggtgctgcaggcgtttaaacaagtacagctgctggtcacttcacaggacgtggacaactacaagcaaatcaagcaggatcttgaccagttgagaagtattgtggaaaagtcggaattgtgggtttacaaaggacaggggccagacgaaactatggatggcgctagtggggagaacgagcacaagaagaccgaagaaggtaacaataaacctcagaagcatgagtctacatcttcctacaattacagggtggtgaaagagatacttatccgtttgtcgaaactctgtgtacaagaatctgcctctgtgaggaaaagccggaaacagcagcaacgactgttgcgaaacatgggtgcacatgctgtggtcttggaactgctgcagattccctacgaaaaagccgaggataccaaaatgcaggaaatcatgcgattggcgcacgaattcctgcagaacttttgcgcaggcaatcagcagaaccaggctctgttacacaagcatataaatctcttccttaacccgggcattttagaagcagtgaccatgcagcatatcttcatgaacaacttccaactttgctcagagattaacgagcgtgtggtgcaacactttgttcattgcattgaaacccacggccgaaatgtgcagtacattaaattcttgcagacaattgtgaaagctgagggcaaatttatcaaaaagtgccaggacatggtgatggccgagcttgtgaacagcggagaagacgttctggtgttctacaacgaccgcgcctccttccagacactgatccagatgatgcggagcgaaagggaccgtatggacgagaattccccactgatgtatcacattcacctcgtcgaactactggccgtgtgcaccgaggggaagaacgtttatactgaaatcaagtgcaacagtctgctacctctcgatgacattgtacgggtggtgactcacgaagattgtattcccgaggttaagatcgcctacatcaacttcctgaaccactgttatgtggacaccgaagtggagatgaaggaaatctacactagtaatcacatgtggaaactcttcgagaatttcctcgtggatatttgtcgcgcatgcaacaatacaagcgacagaaaacacgcagactccatactggagaagtacgtaactgagattgtcatgagcatcgtgacgacattcttcagcagcccctttagtgaccagtccacaaccctgcagactagacaaccagtctttgtccaactgctccagggggtgtttagggtataccactgcaactggctcatgccatcccagaaagcctcggtggaatcctgcatcagagtgctcagcgacgtcgcaaagtcgcgggctatagcaatccccgtggatctggattcacaggtgaacaatctatttctcaagtcacactccattgtccagaagaccgcgatgaattggcgcctgagtgctagaaacgcagcccgccgcgactccgttttagccgcatctcgtgactacaggaatatcattgagaggctgcaggacatcgtgagtgcactggaagaccgcttgcggccgttagtgcaggcagaactgtcagtgctcgtggatgtcctccaccggccggagttgcttttccccgagaatactgatgcacgaaggaagtgcgagagcgggggctttatctgtaaattgatcaaacataccaagcaacttcttgaagaaaatgaagagaagctgtgcatcaaggtgctccagacactgagggagatgatgactaaggaccgggggtatggagagaaaggtgaggctctgaggcaggtcttagttaataggtactacggcaacgtacggccgagtgggagacgcgaaagtcttacatccttcgggaacggcccgctcagtgcgggcgggccaggtaaaccgggaggggggggcggggggtccgggtcgtctagtatgtccaggggcgagatgtccctggccgaggtgcaatgccatctcgacaaagaaggcgcgtctaacctagtgatcgatctgattatgaatgcctcttccgacagggtcttccacgagagcattctcctcgccatcgcccttctagagggcgggaatactacaatccagcattccttcttctgccgactgacagaggataaaaagtccgaaaaattttttaaggttttctacgaccggatgaaagtggcgcagcaggagattaaagctactgtcacagtaaacacttccgatctgggaaacaaaaaaaaggacgatgaagtggatcgggatgccccatctcgcaaaaaagccaaggagcccactactcagataaccgaggaggtgcgcgatcagctgctagaggcttctgccgccacgagaaaggccttcacgacgtttcgtcgagaagccgatcctgacgaccactatcagccaggagagggtactcaggcaacggccgataaagccaaggacgatcttgaaatgagcgccgttatcacaatcatgcagccaatcctgaggttcctacaattgttgtgcgaaaatcataatagagacttacagaactttttgcgctgtcagaacaacaaaacaaattacaatctcgtctgcgagacactgcaattcctagattgtatttgcggctccacaacaggggggttgggtctccttggcctgtacatcaacgaaaagaacgtggccctaattaaccagacacttgagagccttacagaatactgtcaaggcccctgccacgagaatcagaactgcatcgcgactcacgagagtaatggcattgacatcatcacagcactcatactaaatgatattaatccactgggtaaaaaacgtatggatctcgtgctggagctgaaaaacaatgctagcaagctgctgctggctattatggagagtcgacacgacagcgaaaacgcagagcggatcctgtacaatatgagacctaaagagttggtggaggtaattaaaaaagcctatatgcagggcgaagtggaatttgaggatggtgaaaatggcgaggacggagcggcgtctcctcggaatgttggtcacaacatctatatccttgcccatcagctcgcccgccacaacaaagagctgcaatccatgttgaagcccggtggccaggttgatggcgatgaagcgttggaattctacgcaaagcacacagctcagatagagatcgttagacttgatcgcactatggagcagatagttttcccagtgccgagtatatgcgagtttcttacaaaagagtcaaaactgcggatttattatacgaccgaacgggatgagcaagggtccaagattaatgacttctttttgaggagtgaggacctgtttaatgaaatgaattggcagaaaaagctgcgcgcacaaccagtactgtactggtgcgctaggaatatgtcattttggtcttccatctcattcaatctggccgtgttgatgaatcttttggtggccttcttttacccgttcaagggcgtccgaggcggcacactcgaaccacactggagtggccttttgtggacagccatgctcatatccctcgcaattgtgattgcgctcccaaaaccacacgggatacgtgccctgattgccagcaccatattgcggttaatctttagcgtggggttacaaccaacactttttctgctgggtgccttcaacgtgtgcaacaaaatcatctttttgatgtctttcgtagggaactgtggtactttcacacggggctatcgtgcaatggtgttggatgttgaattcttgtatcacctgctgtacctggtcatctgcgctatgggcctgtttgtccatgaatttttctactccctgctattgttcgaccttgtgtaccgggaggagaccttattaaacgtcattaaatccgtcactagaaatggcagatccatcatactgactgccgtactggctctcattctcgtgtacctgttctcaatcgtcggttatcttttcttcaaagacgatttcatcctggaggtggatcgtctacccaatgagaccgccgtgccagaaactggggagagcctggccagcgagtttctctttagtgatgtgtgcagagtcgaaagcggggagaactgtagtagccccgccccccgggaggagcttgtacctgcagaggagacggaacaagacaaagagcacacttgcgaaaccttgctgatgtgtatcgttacggttctgagtcacgggttaagatcaggtggaggagttggggacgttctgagaaagccatccaaagaggagcctctctttgccgctcgagtcatctatgatctgctgttcttctttatggttattatcatcgtcctgaacctgatttttggcgtgattatcgataccttcgcggatcttaggagcgagaagcagaagaaagaggaaatcctgaagaccacctgttttatttgcggactggagcgagataagtttgacaataaaacggtgacctttgaagaacacattaaggaagagcacaacatgtggcactacctgtgctttattgttctggtcaaggtgaaggattccactgagtacacgggtcctgaaagctatgtcgctgagatgatcaaagaacgcaatcttgactggtttcctagaatgcgggccatgtctctggtctcatcggactcagagggggagcaaaatgagctgcgaaacttgcaagaaaagctggaatcaactatgaaactggtaacaaatctgtctgggcaactgtcagaactgaaggaccagatgaccgaacaacgcaaacagaaacaaagaatcgggctgctcgggcaccccccacatatgaatgttaatcctcaacaacctgcgtag

SEQ ID NO: 126696 - DNA, 2166 bp, Artificial Sequence
  derived and/or modified sequence
atgagcgacaagatgagcagcttcctgcacatcggcgacatctgctctctttatgccgagggctcaacaaatggcttcatcagcactttggggctcgttgatgacagatgcgtagtccagccggaaaccggcgatctgaacaatccgcctaagaagttcagagattgtttatttaagttatgccccatgaacaggtacagcgcccaaaagcaattctggaaagctgctaaaccgggtgccaattccactaccgacgctgtgctcttgaataaactgcatcacgccgcggatcttgagaagaaacaaaatgaaaccgaaaacagaaagctgctgggcaccgtcattcagtacggcaatgtcattcagttactacatttgaagtccaacaagtacctgaccgtgaataaacgcctgcctgctctgctcgaaaaaaacgctatgagggtgacattggacgaggccggcaatgagggaagttggttttacattcagcctttctacaaactccggtctattggtgactctgtggtgataggcgacaaggttgttctcaatccagtgaatgccggacagcctctgcacgcctcaagtcaccagctggtggacaatcccggttgtaatgaagttaatagcgttaattgcaacacatcctggaagattgtactgttcatgaagtggagtgacaacaaggacgacatcctgaaagggggagacgtcgtgcgactattccatgccgagcaggagaagttcctgacctgtgatgagcacaggaagaaacagcacgtgtttctgcgaactacaggcaggcagagtgcgacgtcagcaacttcttcaaaggcattgtgggaagtagaagtcgtgcagcacgacccatgcaggggcggcgccggatactggaatagtctgtttcgcttcaagcacttggcaaccggacactaccttgctgccgaagtagaccctgatttcgaagaagagtgtctggagttccagcccagcgtttgcaataaaatcattttcctgatgagctttgtcggcaattgcggcacttttacacgggggtatcgtgctatggtcctggacgtagagtttctgtaccatctgttatacctggtaatttgtgccatgggccttttcgtccacgaatttttttacagcctcctgctctttgacctcgtctatcgcgaagagactttattgaacgtgatcaagtcagtcaccagaaacggccgatcaataattctgacagctgttctggctctgatcctcgtatacctctttagcatagtgggttatctctttttcaaggacgacttcatcctggaggttgataggctgcccaacgagaccgcagtgcccgaaaccggcgaatcactggcaagtgaatttctgttctcagacgtctgcagggtggaaagcggcgaaaactgttcatctcccgctccacgagaggagctagtgcccgcggaagagacagaacaagataaggaacacacctgcgaaacgctcttaatgtgtatcgtcacagtcctgagccacggtctgaggtccggtgggggggtgggcgacgtactgcgaaagccttctaaggaggaacctcttttcgccgcacgggttatctatgacctgctcttcttcttcatggtaataatcatcgttctgaacctgattttcggtgttatcatcgacacttttgctgacctgcgatcggagaaacaaaagaaagaagagatcctgaagaccacatgcttcatctgcggtctcgagcgggacaagtttgataataaaactgtaacatttgaggagcacattaaagaagagcataatatgtggcactatttgtgcttcattgtgctcgtgaaggttaaagactcaacggagtatacggggccggagagttatgtggccgagatgatcaaagagaggaatctggactggttcccaagaatgagagcaatgtccctggtgtccagcgactcagagggagagcagaacgagctgcgcaatttgcaggaaaaattagaaagcactatgaaattagtgacgaatttgagcggacagttatctgagctcaaggaccaaatgacggagcagagaaaacagaagcagcgcattggcctcctcgggcacccacctcacatgaacgtaaacccacagcagccagcctag

SEQ ID NO: 126697 - DNA, 8087 bp, Artificial Sequence
  derived and/or modified sequence
atgtccgacaagatgtcaagctttctgcacattggggatatttgtagcttgtacgccgaggggtccactaacggattcatctcgacactgggtctggtggacgaccggtgcgtggtgcagcccgaaaccggtgatttgaacaacccccctaagaaatttcgggactgcctgttcaagctctgccctatgaataggtattctgctcagaaacagttctggaaggcagccaagcccggtgccaacagtacaaccgatgcggtgttactgaacaagctacaccatgctgccgacctcgagaaaaaacagaacgaaacagaaaaccgcaagttgttaggcacagtgatccaatatgggaatgtgattcagttacttcacttaaagtccaataagtatctgacagtcaacaagaggctacccgcactcctggaaaaaaatgccatgagggtgactctggatgaagccggaaatgaaggaagttggttttacatacagccattctacaaactgcgatccattggagattcagtcgtgatcggcgataaagtggtgctaaatcctgtgaatgcaggtcagccccttcacgcatcctcccatcagctggttgacaaccctggttgtaacgaggtcaactctgttaattgtaacacatcctggaaaatcgtgctgtttatgaaatggtccgataataaggacgatatcctgaaaggcggtgatgtggtgagactgttccacgcagaacaagagaagttcctgacgtgtgacgagcataggaagaaacaacatgtgtttctccgaaccacagggaggcagagcgcgacctccgcaacaagctccaaagccctctgggaggtggaggtagtgcagcacgacccatgccgcggaggagctgggtattggaatagccttttccggttcaagcacctcgccacggggcattatctagcagctgaagtagatcccgaccaggacgcgagtcggagccgtctgcgtaatgcgcaagagaagatggtttattcacttgtcagtgtccctgagggcaatgacattagttccatattcgagctcgaccccactactctgagagggggagactccctcgtccccagaaatagctacgttcggttaaggcacctgtgcacgaacacttgggtccactcgaccaacattcccatagataaagaagaagagaagcccgttatgctgaagataggcacttctcccgttaaggaggacaaggaggccttcgcaatcgtacccgtcagccccgcagaagtccgcgatctggactttgctaacgatgccagcaaagtgcttgggagtatagccggtaagctcgagaaagggacaattacccagaacgagaggcgaagtgttaccaaactgcttgaagacttggtctactttgttactgggggaacaaactccggccaggatgtgttggaagtcgtgttctccaagcccaatagagaacgccagaaactgatgcgcgagcagaacatactgaagcagatcttcaagttgctgcaggcaccgttcactgactgcggcgatgggccaatgctccgcctcgaggagctcggggatcagagacatgctcccttcagacatatctgccgtctgtgctacagggttctgaggcattcccagcaggattaccggaaaaatcaggaatatatcgccaaacagtttggttttatgcagaagcagataggttacgacgtcctcgctgaggacacgattactgccctcttgcacaataatagaaaactcctcgagaagcacatcacggctgccgagatagacacctttgtctccctggtccggaagaacagagaaccccgtttcttagattacctttcagacttgtgtgttagcatgaacaaatctataccggttactcaagaactcatctgcaaggccgtccttaacccaaccaacgccgacattctgatcgagactaagcttgtgctctcccgcttcgagtttgagggagtttcttcaactggcgaaaacgcactcgaggccggtgaagatgaggaggaggtgtggttgttctggcgggacagtaataaagaaatccgcagcaaaagcgttagagagctcgcccaagatgccaaagaaggtcagaaggaagaccgggacgttctgtcttactaccgctatcagctcaacctatttgcccgaatgtgtctcgacaggcagtatctagccattaacgagatcagtgggcagctggacgtcgatctcatccttcgatgcatgtctgacgagaaccttccctacgacctgagggcctccttttgtcgcctcatgttacacatgcacgttgacagagatcctcaagaacaggtgacacctgtgaaatacgcgaggctttggtccgagattcctagtgagatcgccatagacgactatgactctagtggcgcaagtaaggacgagataaaggaacgctttgcgcaaacaatggagttcgtagaggaatacctacgggacgtggtgtgccagcggtttccattttcggacaaagagaaaaacaagctgacctttgaggtcgttaacctcgctcggaaccttatctatttcgggttttataacttctctgatttactccgacttaccaagatcctgctggccattctcgactgcgttcacgtgacaacgatattcccgataagcaaaatggctaagggagaggagaacaaggggtctaacgtgatgcgatctatccacggagtgggcgagctgatgacgcaggtagttttaagggggggtgggtttttgcccatgaccccgatggccgctgctcctgaaggaaacgtgaagcaggccgagcctgaaaaggaggacattatggtgatggacacgaaactgaaaataatcgaaattctacagtttattctgaatgtcagactcgactatagaattagttgcctgctttgcattttcaaaagagaatttgatgaaagcaactcccagacttccgaaactagtagcggaaactcttcccaggagggtccatcgaacgtgcccggagccctcgactttgaacacatcgaggaacaagccgaaggaatctttggtggatcagaggagaatactccactcgacttggacgatcacggtggtcgaacctttcttagggtgcttctgcacttgaccatgcatgactaccctcctcttgtttctggtgctctccagctgcttttccgtcatttttcccaaaggcaagaagtcctccaggcctttaagcaggtgcaacttctggtcacttcacaagacgtagataattacaaacaaatcaaacaggatttggatcaactgaggtcgattgtggagaaaagtgaactctgggtctataaaggccagggccctgacgagaccatggatggggcttcaggagagaatgaacataagaaaaccgaggagggcaacaacaaaccacagaagcatgagtccacctcgagttataattatagggtggtcaaagagatactcatccgattgtctaagctctgtgtgcaggagagcgcgtccgtgcgtaagtctcgaaaacagcagcagagactgttaagaaacatgggggctcacgcggtcgtcctggagttacttcagattccctatgaaaaggctgaagacactaagatgcaagagataatgaggcttgcacacgagttcctccaaaatttctgtgccggtaaccagcagaaccaagcccttctgcacaaacatattaacttgttcctgaacccagggatcctggaagcggttacaatgcagcatatctttatgaataatttccaattgtgtagcgaaatcaacgaacgcgtggtgcagcactttgtgcattgcattgagacccatgggcgtaatgtccaatatattaaatttttgcagacgattgtgaaggctgagggcaagtttatcaagaaatgtcaagatatggtgatggccgaacttgtgaacagcggcgaggacgtgttggtgttctacaacgatagagcctccttccaaaccctgattcagatgatgcgatcagagagggacaggatggatgagaacagtcctctgatgtaccacatccacctcgttgagctcctggccgtgtgtactgagggcaagaacgtgtacacagaaattaaatgcaattcactcttgcccctagacgatatagttagagtggtaacacacgaagattgtatccctgaagtcaaaattgcttatattaacttcctgaatcattgttatgtcgataccgaagtggaaatgaaggagatctacacctctaaccacatgtggaagctgttcgagaacttccttgtcgacatttgtcgtgcttgcaataacacaagcgacagaaaacacgccgatagcatcctcgagaaatatgtaaccgagatcgtgatgtccatagtaacaacctttttttcttccccgtttagtgaccagtctactacgcttcagaccaggcaaccagtatttgtccagcttcttcaaggagtgtttcgggtgtatcattgcaactggctcatgccaagccagaaggcaagcgtggagagttgtatcagagtgctgtcagatgttgcaaagtctcgggctattgctatccccgtagatctggattcccaggtaaacaatctgtttctcaagagccatagcattgtccaaaagactgctatgaactggagactgtcagcgaggaacgccgcaagacgggattctgtgctggcagcctcaagagactaccggaacattatagaacggctccaggatatcgtgagtgccttggaagatcgcctgaggcccctagtgcaagcggaattgtccgtcctggtggatgtcctgcatcgacccgaattactgtttcccgagaataccgatgccaggagaaagtgtgagtcaggcggttttatctgtaagcttatcaagcacaccaaacagcttctcgaagagaatgaggaaaagctgtgcataaaagtcctacaaacactgagagagatgatgacgaaagacaggggatacggagaaaagggtgaggccctgcgacaggtgctcgtgaataggtactacggaaatgtaaggccgtctggacgaagagagtcactgacaagcttcggtaacggacctctcagcgctggagggcctgggaagcccggtgggggaggtggtggctccggatcttcgtcaatgtcaagaggggagatgtctctcgccgaagtgcagtgccatctcgacaaagaaggggcatctaatctcgtcatcgaccttattatgaacgcatcaagcgatcgagtctttcacgaaagcattttgctagccatagcactgctggagggcggaaacacaacaatccaacattccttcttttgtcggttaacagaagataaaaagtccgaaaaattctttaaggtcttctacgaccgcatgaaggttgcacagcaggagataaaagcgaccgtgactgtgaataccagcgacctggggaacaagaagaaagacgacgaagtcgacagggacgctccatcccgcaagaaagctaaggaacccaccactcagatcactgaagaagtgcgagaccagcttctcgaggctagtgctgccacacgtaaagctttcaccaccttccggagggaggcggacccggatgaccactaccagcctggagagggaactcaggctaccgcagacaaggcaaaggacgatctggaaatgtctgccgtcataaccataatgcaaccaatactgagatttttgcagctactgtgtgaaaaccataaccgcgacttgcagaatttcctgcgctgccaaaataacaaaaccaactacaatctggtatgtgagacgcttcagtttctggattgcatttgcgggtcaaccactggcggattggggctgctcggcctgtatataaatgaaaaaaacgtggctctgattaaccagacactggagtccctgacagagtattgtcagggtccttgccacgaaaaccagaactgcatcgcaacccatgaatcaaacggaattgatattatcacggccctcatattgaacgacatcaatcctttggggaagaaacgcatggacctcgtgttggagctgaagaataacgcttccaaacttttgctagctataatggaatcacgacacgacagcgagaacgctgagagaatactgtacaatatgcggccaaaggaattagtcgaagttattaaaaaggcatacatgcagggagaagtggaattcgaagacggtgagaacggtgaagacggcgctgctagtccacgcaacgtggggcacaatatttacattctggcccaccaattagccagacacaacaaggagctccaatctatgcttaagccaggaggacaggttgatggagatgaggccttggaattttacgccaagcacacagcacaaatagagattgtcagacttgacagaaccatggagcagatcgtgttccctgtccctagcatctgcgaattccttactaaagaatctaaacttcgcatttactatacaacggaacgggatgaacaggggtcaaagataaatgacttttttttgagaagtgaggatctgtttaacgaaatgaattggcaaaaaaaacttcgagcccagccagtgctttattggtgcgctcggaacatgagcttctggtcatctataagtttcaacctggctgtgttgatgaacctgctcgttgccttcttctatcctttcaagggagtgaggggcggaaccctagagccacactggtcgggccttctctggaccgcaatgctgatctccttagcgatagtgattgccttgccaaaaccacacggtataagagccttgatcgcatccacgatcttaaggcttattttttccgtggggcttcagccaacactattcctgctcggagcctttaacgtgtgtaacaaaatcattttcctcatgtcctttgtggggaattgcggcactttcactaggggttaccgcgctatggtgttagatgttgaattcttgtaccacctgctctacctggtgatctgcgcaatggggctttttgtccatgagttcttctactccctacttctgttcgacctggtgtacagagaagaaacactgctgaacgtcatcaaaagcgttactcgcaacggacggagcatcattcttactgccgtgcttgccctgatactggtctatctatttagtatagtaggctatctgttctttaaggacgactttattctggaggtcgatcggctaccgaacgaaacagcagtcccagaaacaggggagtctctagcttctgaattcctcttctctgatgtgtgcagagtagagagtggtgagaactgctcctcccccgcaccgagagaggaactggtccctgctgaagagaccgaacaggataaggagcatacctgcgaaactctgttgatgtgcatagtgactgtactcagtcatggcctgcgctccggcggtggcgtaggcgacgtgctccgaaagccttcaaaagaggagcccctcttcgccgctagagtgatttacgacttgctcttcttctttatggtgataattatagtgctgaatcttatttttggggtgattatagacacctttgcagaccttagatccgagaagcagaagaaagaagagatcctcaaaacgacgtgcttcatctgtggactggagcgggataagtttgacaacaagaccgtgactttcgaggaacacataaaagaagaacataacatgtggcattacctctgttttatcgtactagttaaggtgaaagactcaactgaatatactggccctgaaagctatgtggccgagatgataaaagaacggaatctagattggtttccccgtatgagagcgatgagtctggtgagctccgactctgagggtgaacagaacgaactcagaaacttgcaggagaagctggaatcgacaatgaagctagtaaccaacctatcggggcaactgagcgagcttaaggaccaaatgaccgaacaaagaaaacagaagcagcgcataggcctgctggggcatcccccacacatgaatgtgaacccccagcaacctgccta

SEQ ID NO: 126698 - DNA, 2166 bp, Artificial Sequence
  derived and/or modified sequence
atgtctgataaaatgagttccttcctccatatcggagacatctgctccctttacgcggaaggaagcacgaatgggtttatctccacccttggcttggtagacgatcgctgcgtagtgcaacctgagactggcgacctgaacaatccccctaaaaagtttcgggattgtctcttcaagttatgcccaatgaatcgttactctgcccagaaacagttttggaaggcagcaaagcccggtgcgaactctacgaccgacgccgtcctcctcaacaaactccatcacgctgctgacctagagaaaaaacagaacgaaacagagaatagaaagctactgggaactgtgatccagtatggaaacgtgatacagctgctgcacctcaagagtaacaagtatctcacagtaaacaaacgcttacctgcactgctcgagaagaatgcaatgcgcgtgactctcgacgaggcagggaacgaggggtcctggttttatattcagcctttttacaagttgagatccatcggagattccgtggttatcggcgacaaagtcgtcctgaatcctgttaatgccggacagcctctgcatgccagctcccatcagcttgtggataaccctggctgcaacgaagttaacagcgtaaattgcaacaccagttggaaaattgtcctgtttatgaagtggagtgataataaggacgacattctgaaaggtggcgatgtggtgagactgtttcatgcagaacaggaaaaatttctgacctgcgatgaacacaggaagaaacagcacgtcttccttaggactacagggcgtcagtccgctacgtccgcaacctccagtaaggcactgtgggaggttgaggtagtacagcacgacccttgcagaggaggtgcaggatactggaactcactctttaggttcaaacacttggcaacaggccattatctagccgctgaagtggatcctgacttcgaggaagagtgtctggagtttcaaccctcggtgtgcaataaaataatatttcttatgagtttcgtgggaaactgtggcacttttactagaggatacagagccatggtgcttgacgtggagtttctctaccatcttctctatctggtaatatgtgctatgggtctgttcgttcacgaattcttctacagtctattactgtttgacctcgtctacagggaagaaacactcttaaacgtgatcaaatccgtgaccagaaacggccgtagcattattttgaccgctgtgctggctctcatactcgtttatctgttttcgatcgtgggttatctgttcttcaaggatgatttcatattagaagtggatcggctcccaaatgagactgcagtgcctgagacgggtgagtccttggctagtgaatttctgtttagtgatgtttgtcgcgtggaaagcggtgaaaactgctctagtcccgctcctcgcgaggagttggtgccagctgaggagaccgaacaggacaaggagcacacatgcgagactctcctgatgtgtatagtaaccgtactttctcacgggttgcggtccgggggaggagttggggacgtgcttcgcaagccctcaaaggaggaaccattatttgctgccagggtaatctatgatttgctgttcttcttcatggtcattatcatcgtcttgaatctgatatttggcgttattatcgacacgttcgctgacttgcggtctgaaaagcagaaaaaagaggagatcctgaagactacttgctttatctgcgggcttgaacgtgacaaatttgacaacaaaacggtcacctttgaggagcacataaaagaagaacataacatgtggcattacttatgttttattgtgttagtgaaggtcaaggattcgaccgagtatacaggcccagaaagttatgtggccgagatgatcaaggagagaaacctcgattggttcccgcgaatgcgtgctatgtccctcgtgagttctgactcggagggcgagcagaacgaacttcgaaatttgcaggaaaagttggagagtacaatgaaattggtgactaatctctccggacagctgtcagaactgaaggatcagatgactgaacaaagaaagcagaaacagaggatcggtctgctcgggcatcctcctcacatgaacgtcaatccccagcagcctgcttag

SEQ ID NO: 126699 - DNA, 8088 bp, Artificial Sequence
  derived and/or modified sequence
atgagcgacaagatgagcagcttcctgcacatcggcgacatctgcagcctgtacgccgagggcagcaccaacggcttcatcagcaccctgggcctggtggacgacagatgcgtggtgcagcccgagaccggcgacctgaacaacccccccaagaagttcagagactgcctgttcaagctgtgccccatgaacagatacagcgcccagaagcagttctggaaggccgccaagcccggcgccaacagcaccaccgacgccgtgctgctgaacaagctgcaccacgccgccgacctggagaagaagcagaacgagaccgagaacagaaagctgctgggcaccgtgatccagtacggcaacgtgatccagctgctgcacctgaagagcaacaagtacctgaccgtgaacaagagactgcccgccctgctggagaagaacgccatgagagtgaccctggacgaggccggcaacgagggcagctggttctacatccagcccttctacaagctgagaagcatcggcgacagcgtggtgatcggcgacaaggtggtgctgaaccccgtgaacgccggccagcccctgcacgccagcagccaccagctggtggacaaccccggctgcaacgaggtgaacagcgtgaactgcaacaccagctggaagatcgtgctgttcatgaagtggagcgacaacaaggacgacatcctgaagggcggcgacgtggtgagactgttccacgccgagcaggagaagttcctgacctgcgacgagcacagaaagaagcagcacgtgttcctgagaaccaccggcagacagagcgccaccagcgccaccagcagcaaggccctgtgggaggtggaggtggtgcagcacgacccctgcagaggcggcgccggctactggaacagcctgttcagattcaagcacctggccaccggccactacctggccgccgaggtggaccccgaccaggacgccagcagaagcagactgagaaacgcccaggagaagatggtgtacagcctggtgagcgtgcccgagggcaacgacatcagcagcatcttcgagctggaccccaccaccctgagaggcggcgacagcctggtgcccagaaacagctacgtgagactgagacacctgtgcaccaacacctgggtgcacagcaccaacatccccatcgacaaggaggaggagaagcccgtgatgctgaagatcggcaccagccccgtgaaggaggacaaggaggccttcgccatcgtgcccgtgagccccgccgaggtgagagacctggacttcgccaacgacgccagcaaggtgctgggcagcatcgccggcaagctggagaagggcaccatcacccagaacgagagaagaagcgtgaccaagctgctggaggacctggtgtacttcgtgaccggcggcaccaacagcggccaggacgtgctggaggtggtgttcagcaagcccaacagagagagacagaagctgatgagagagcagaacatcctgaagcagatcttcaagctgctgcaggcccccttcaccgactgcggcgacggccccatgctgagactggaggagctgggcgaccagagacacgcccccttcagacacatctgcagactgtgctacagagtgctgagacacagccagcaggactacagaaagaaccaggagtacatcgccaagcagttcggcttcatgcagaagcagatcggctacgacgtgctggccgaggacaccatcaccgccctgctgcacaacaacagaaagctgctggagaagcacatcaccgccgccgagatcgacaccttcgtgagcctggtgagaaagaacagagagcccagattcctggactacctgagcgacctgtgcgtgagcatgaacaagagcatccccgtgacccaggagctgatctgcaaggccgtgctgaaccccaccaacgccgacatcctgatcgagaccaagctggtgctgagcagattcgagttcgagggcgtgagcagcaccggcgagaacgccctggaggccggcgaggacgaggaggaggtgtggctgttctggagagacagcaacaaggagatcagaagcaagagcgtgagagagctggcccaggacgccaaggagggccagaaggaggacagagacgtgctgagctactacagataccagctgaacctgttcgccagaatgtgcctggacagacagtacctggccatcaacgagatcagcggccagctggacgtggacctgatcctgagatgcatgagcgacgagaacctgccctacgacctgagagccagcttctgcagactgatgctgcacatgcacgtggacagagacccccaggagcaggtgacccccgtgaagtacgccagactgtggagcgagatccccagcgagatcgccatcgacgactacgacagcagcggcgccagcaaggacgagatcaaggagagattcgcccagaccatggagttcgtggaggagtacctgagagacgtggtgtgccagagattccccttcagcgacaaggagaagaacaagctgaccttcgaggtggtgaacctggccagaaacctgatctacttcggcttctacaacttcagcgacctgctgagactgaccaagatcctgctggccatcctggactgcgtgcacgtgaccaccatcttccccatcagcaagatggccaagggcgaggagaacaagggcagcaacgtgatgagaagcatccacggcgtgggcgagctgatgacccaggtggtgctgagaggcggcggcttcctgcccatgacccccatggccgccgcccccgagggcaacgtgaagcaggccgagcccgagaaggaggacatcatggtgatggacaccaagctgaagatcatcgagatcctgcagttcatcctgaacgtgagactggactacagaatcagctgcctgctgtgcatcttcaagagagagttcgacgagagcaacagccagaccagcgagaccagcagcggcaacagcagccaggagggccccagcaacgtgcccggcgccctggacttcgagcacatcgaggagcaggccgagggcatcttcggcggcagcgaggagaacacccccctggacctggacgaccacggcggcagaaccttcctgagagtgctgctgcacctgaccatgcacgactacccccccctggtgagcggcgccctgcagctgctgttcagacacttcagccagagacaggaggtgctgcaggccttcaagcaggtgcagctgctggtgaccagccaggacgtggacaactacaagcagatcaagcaggacctggaccagctgagaagcatcgtggagaagagcgagctgtgggtgtacaagggccagggccccgacgagaccatggacggcgccagcggcgagaacgagcacaagaagaccgaggagggcaacaacaagccccagaagcacgagagcaccagcagctacaactacagagtggtgaaggagatcctgatcagactgagcaagctgtgcgtgcaggagagcgccagcgtgagaaagagcagaaagcagcagcagagactgctgagaaacatgggcgcccacgccgtggtgctggagctgctgcagatcccctacgagaaggccgaggacaccaagatgcaggagatcatgagactggcccacgagttcctgcagaacttctgcgccggcaaccagcagaaccaggccctgctgcacaagcacatcaacctgttcctgaaccccggcatcctggaggccgtgaccatgcagcacatcttcatgaacaacttccagctgtgcagcgagatcaacgagagagtggtgcagcacttcgtgcactgcatcgagacccacggcagaaacgtgcagtacatcaagttcctgcagaccatcgtgaaggccgagggcaagttcatcaagaagtgccaggacatggtgatggccgagctggtgaacagcggcgaggacgtgctggtgttctacaacgacagagccagcttccagaccctgatccagatgatgagaagcgagagagacagaatggacgagaacagccccctgatgtaccacatccacctggtggagctgctggccgtgtgcaccgagggcaagaacgtgtacaccgagatcaagtgcaacagcctgctgcccctggacgacatcgtgagagtggtgacccacgaggactgcatccccgaggtgaagatcgcctacatcaacttcctgaaccactgctacgtggacaccgaggtggagatgaaggagatctacaccagcaaccacatgtggaagctgttcgagaacttcctggtggacatctgcagagcctgcaacaacaccagcgacagaaagcacgccgacagcatcctggagaagtacgtgaccgagatcgtgatgagcatcgtgaccaccttcttcagcagccccttcagcgaccagagcaccaccctgcagaccagacagcccgtgttcgtgcagctgctgcagggcgtgttcagagtgtaccactgcaactggctgatgcccagccagaaggccagcgtggagagctgcatcagagtgctgagcgacgtggccaagagcagagccatcgccatccccgtggacctggacagccaggtgaacaacctgttcctgaagagccacagcatcgtgcagaagaccgccatgaactggagactgagcgccagaaacgccgccagaagagacagcgtgctggccgccagcagagactacagaaacatcatcgagagactgcaggacatcgtgagcgccctggaggacagactgagacccctggtgcaggccgagctgagcgtgctggtggacgtgctgcacagacccgagctgctgttccccgagaacaccgacgccagaagaaagtgcgagagcggcggcttcatctgcaagctgatcaagcacaccaagcagctgctggaggagaacgaggagaagctgtgcatcaaggtgctgcagaccctgagagagatgatgaccaaggacagaggctacggcgagaagggcgaggccctgagacaggtgctggtgaacagatactacggcaacgtgagacccagcggcagaagagagagcctgaccagcttcggcaacggccccctgagcgccggcggccccggcaagcccggcggcggcggcggcggcagcggcagcagcagcatgagcagaggcgagatgagcctggccgaggtgcagtgccacctggacaaggagggcgccagcaacctggtgatcgacctgatcatgaacgccagcagcgacagagtgttccacgagagcatcctgctggccatcgccctgctggagggcggcaacaccaccatccagcacagcttcttctgcagactgaccgaggacaagaagagcgagaagttcttcaaggtgttctacgacagaatgaaggtggcccagcaggagatcaaggccaccgtgaccgtgaacaccagcgacctgggcaacaagaagaaggacgacgaggtggacagagacgcccccagcagaaagaaggccaaggagcccaccacccagatcaccgaggaggtgagagaccagctgctggaggccagcgccgccaccagaaaggccttcaccaccttcagaagagaggccgaccccgacgaccactaccagcccggcgagggcacccaggccaccgccgacaaggccaaggacgacctggagatgagcgccgtgatcaccatcatgcagcccatcctgagattcctgcagctgctgtgcgagaaccacaacagagacctgcagaacttcctgagatgccagaacaacaagaccaactacaacctggtgtgcgagaccctgcagttcctggactgcatctgcggcagcaccaccggcggcctgggcctgctgggcctgtacatcaacgagaagaacgtggccctgatcaaccagaccctggagagcctgaccgagtactgccagggcccctgccacgagaaccagaactgcatcgccacccacgagagcaacggcatcgacatcatcaccgccctgatcctgaacgacatcaaccccctgggcaagaagagaatggacctggtgctggagctgaagaacaacgccagcaagctgctgctggccatcatggagagcagacacgacagcgagaacgccgagagaatcctgtacaacatgagacccaaggagctggtggaggtgatcaagaaggcctacatgcagggcgaggtggagttcgaggacggcgagaacggcgaggacggcgccgccagccccagaaacgtgggccacaacatctacatcctggcccaccagctggccagacacaacaaggagctgcagagcatgctgaagcccggcggccaggtggacggcgacgaggccctggagttctacgccaagcacaccgcccagatcgagatcgtgagactggacagaaccatggagcagatcgtgttccccgtgcccagcatctgcgagttcctgaccaaggagagcaagctgagaatctactacaccaccgagagagacgagcagggcagcaagatcaacgacttcttcctgagaagcgaggacctgttcaacgagatgaactggcagaagaagctgagagcccagcccgtgctgtactggtgcgccagaaacatgagcttctggagcagcatcagcttcaacctggccgtgctgatgaacctgctggtggccttcttctaccccttcaagggcgtgagaggcggcaccctggagccccactggagcggcctgctgtggaccgccatgctgatcagcctggccatcgtgatcgccctgcccaagccccacggcatcagagccctgatcgccagcaccatcctgagactgatcttcagcgtgggcctgcagcccaccctgttcctgctgggcgccttcaacgtgtgcaacaagatcatcttcctgatgagcttcgtgggcaactgcggcaccttcaccagaggctacagagccatggtgctggacgtggagttcctgtaccacctgctgtacctggtgatctgcgccatgggcctgttcgtgcacgagttcttctacagcctgctgctgttcgacctggtgtacagagaggagaccctgctgaacgtgatcaagagcgtgaccagaaacggcagaagcatcatcctgaccgccgtgctggccctgatcctggtgtacctgttcagcatcgtgggctacctgttcttcaaggacgacttcatcctggaggtggacagactgcccaacgagaccgccgtgcccgagaccggcgagagcctggccagcgagttcctgttcagcgacgtgtgcagagtggagagcggcgagaactgcagcagccccgcccccagagaggagctggtgcccgccgaggagaccgagcaggacaaggagcacacctgcgagaccctgctgatgtgcatcgtgaccgtgctgagccacggcctgagaagcggcggcggcgtgggcgacgtgctgagaaagcccagcaaggaggagcccctgttcgccgccagagtgatctacgacctgctgttcttcttcatggtgatcatcatcgtgctgaacctgatcttcggcgtgatcatcgacaccttcgccgacctgagaagcgagaagcagaagaaggaggagatcctgaagaccacctgcttcatctgcggcctggagagagacaagttcgacaacaagaccgtgaccttcgaggagcacatcaaggaggagcacaacatgtggcactacctgtgcttcatcgtgctggtgaaggtgaaggacagcaccgagtacaccggccccgagagctacgtggccgagatgatcaaggagagaaacctggactggttccccagaatgagagccatgagcctggtgagcagcgacagcgagggcgagcagaacgagctgagaaacctgcaggagaagctggagagcaccatgaagctggtgaccaacctgagcggccagctgagcgagctgaaggaccagatgaccgagcagagaaagcagaagcagagaatcggcctgctgggccaccccccccacatgaacgtgaacccccagcagcccgcctag

SEQ ID NO: 126700 - DNA, 2166 bp, Artificial Sequence
  derived and/or modified sequence
atgagcgacaagatgagcagcttcctgcacatcggcgacatctgcagcctgtacgccgagggcagcaccaacggcttcatcagcaccctgggcctggtggacgacagatgcgtggtgcagcccgagaccggcgacctgaacaacccccccaagaagttcagagactgcctgttcaagctgtgccccatgaacagatacagcgcccagaagcagttctggaaggccgccaagcccggcgccaacagcaccaccgacgccgtgctgctgaacaagctgcaccacgccgccgacctggagaagaagcagaacgagaccgagaacagaaagctgctgggcaccgtgatccagtacggcaacgtgatccagctgctgcacctgaagagcaacaagtacctgaccgtgaacaagagactgcccgccctgctggagaagaacgccatgagagtgaccctggacgaggccggcaacgagggcagctggttctacatccagcccttctacaagctgagaagcatcggcgacagcgtggtgatcggcgacaaggtggtgctgaaccccgtgaacgccggccagcccctgcacgccagcagccaccagctggtggacaaccccggctgcaacgaggtgaacagcgtgaactgcaacaccagctggaagatcgtgctgttcatgaagtggagcgacaacaaggacgacatcctgaagggcggcgacgtggtgagactgttccacgccgagcaggagaagttcctgacctgcgacgagcacagaaagaagcagcacgtgttcctgagaaccaccggcagacagagcgccaccagcgccaccagcagcaaggccctgtgggaggtggaggtggtgcagcacgacccctgcagaggcggcgccggctactggaacagcctgttcagattcaagcacctggccaccggccactacctggccgccgaggtggaccccgacttcgaggaggagtgcctggagttccagcccagcgtgtgcaacaagatcatcttcctgatgagcttcgtgggcaactgcggcaccttcaccagaggctacagagccatggtgctggacgtggagttcctgtaccacctgctgtacctggtgatctgcgccatgggcctgttcgtgcacgagttcttctacagcctgctgctgttcgacctggtgtacagagaggagaccctgctgaacgtgatcaagagcgtgaccagaaacggcagaagcatcatcctgaccgccgtgctggccctgatcctggtgtacctgttcagcatcgtgggctacctgttcttcaaggacgacttcatcctggaggtggacagactgcccaacgagaccgccgtgcccgagaccggcgagagcctggccagcgagttcctgttcagcgacgtgtgcagagtggagagcggcgagaactgcagcagccccgcccccagagaggagctggtgcccgccgaggagaccgagcaggacaaggagcacacctgcgagaccctgctgatgtgcatcgtgaccgtgctgagccacggcctgagaagcggcggcggcgtgggcgacgtgctgagaaagcccagcaaggaggagcccctgttcgccgccagagtgatctacgacctgctgttcttcttcatggtgatcatcatcgtgctgaacctgatcttcggcgtgatcatcgacaccttcgccgacctgagaagcgagaagcagaagaaggaggagatcctgaagaccacctgcttcatctgcggcctggagagagacaagttcgacaacaagaccgtgaccttcgaggagcacatcaaggaggagcacaacatgtggcactacctgtgcttcatcgtgctggtgaaggtgaaggacagcaccgagtacaccggccccgagagctacgtggccgagatgatcaaggagagaaacctggactggttccccagaatgagagccatgagcctggtgagcagcgacagcgagggcgagcagaacgagctgagaaacctgcaggagaagctggagagcaccatgaagctggtgaccaacctgagcggccagctgagcgagctgaaggaccagatgaccgagcagagaaagcagaagcagagaatcggcctgctgggccaccccccccacatgaacgtgaacccccagcagcccgcctag

SEQ ID NO: 126701 - protein, 181 aa, Artificial Sequence
  derived and/or modified sequence
MTEKMSSFLYIGDIVSLYAEGSVNGFISTLGLVDDRCVVHPEAGDLANPPKKFRDCLFKVCPMNRYSAQKQYWKAKQAKQGNHTEAALLKKLQHAAELEQKQNESENKKLLGEIVKYSNVIQLLHIKSNKYLTVNKRLPALLEKNAMRVSLDAAGNEGSWFYIHPFWKLRSEGDNDASFWI

SEQ ID NO: 126702 - protein, 2701 aa, Artificial Sequence
  derived and/or modified sequence
MTEKMSSFLYIGDIVSLYAEGSVNGFISTLGLVDDRCVVHPEAGDLANPPKKFRDCLFKVCPMNRYSAQKQYWKAKQAKQGNHTEAALLKKLQHAAELEQKQNESENKKLLGEIVKYSNVIQLLHIKSNKYLTVNKRLPALLEKNAMRVSLDAAGNEGSWFYIHPFWKLRSEGDNIVVGDKVVLMPVNAGQPLHASNIELLDNPGCKEVNAVNCNTSWKITLFMKYSSYREDVLKGGDVVRLFHAEQEKFLTCDEYEKKQHIFLRTTLRQSATSATSSKALWEIEVVHHDPCRGGAGQWNSLFRFKHLATGNYLAAELNPDYRDAQNEGKNVRDGVPPTSKKKRQAGEKIMYTLVSVPHGNDIASLFELDATTLQRADCLVPRNSYVRLRHLCTNTWVTSTSIPIDTDEERPVMLKIGTCQTKEDKEAFAIVSVPLSEVRDLDFANDANKVLATTVKKLENGTITQNERRFVTKLLEDLIFFVADVPNNGQEVLDVVITKPNRERQKLMREQNILAQVFGILKAPFKEKAGEGSMLRLEDLGDQRYAPYKYMLRLCYRVLRHSQQDYRKNQEYIAKNFCVMQSQIGYDILAEDTITALLHNNRKLLEKHITAKEIETFVSLLRRNREPRFLDYLSDLCVSNTTAIPVTQELICKFMLSPGNADILIQTKVVSMQADNPMESSILSDDIDDEEVWLYWIDSNKEPHGKAIRHLAQEAKEGTKADLEVLTYYRYQLNLFARMCLDRQYLAINQISTQLSVDLILRCVSDESLPFDLRASFCRLMLHMHVDRDPQESVVPVRYARLWTEIPTKITIHEYDSITDSSRNDMKRKFALTMEFVEEYLKEVVNQPFPFGDKEKNKLTFEVVHLARNLIYFGFYSFSELLRLTRTLLAILDIVQAPMSSYFERLSKFQDGGNNVMRTIHGVGEMMTQMVLSRGSIFPMSVPDVPPSIHPSKQGSPTEHEDVTVMDTKLKIIEILQFILSVRLDYRISYMLSIYKKEFGEDNDNAETSASGSPDTLLPSAIVPDIDEIAAQAETMFAGRKEKNPVQLDDEGGRTFLRVLIHLIMHDYPPLLSGALQLLFKHFSQRAEVLQAFKQVQLLVSNQDVDNYKQIKADLDQLRLTVEKSELWVEKSSNYENGEIGESQVKGGEEPIEESNILSPVQDGTKKPQIDSNKSNNYRIVKEILIRLSKLCVQNKKCRNQHQRLLKNMGAHSVVLDLLQIPYEKNDEKMNEVMNLAHTFLQNFCRGNPQNQVLLHKHLNLFLTPGLLEAETMRHIFMNNYHLCNEISERVVQHFVHCIETHGRHVEYLRFLQTIVKADGKYVKKCQDMVMTELINGGEDVLIFYNDRASFPILLHMMCSERDRGDESGPLAYHITLVELLAACTEGKNVYTEIKCNSLLPLDDIVRVVTHDDCIPEVKIAYVNFVNHCYVDTEVEMKEIYTSNHIWKLFENFLVDMARVCNTTTDRKHADIFLEKCVTESIMNIVSGFFNSPFSDNSTSLQTHQPVFIQLLQSAFRIYNCTWPNPAQKASVESCIRTLAEVAKNRGIAIPVDLDSQVNTLFMKSHSNMVQRAAMGWRLSARSGPRFKEALGGPAWDYRNIIEKLQDVVASLEHQFSPMMQAEFSVLVDVLYSPELLFPEGSDARIRCGAFMSKLINHTKKLMEKEEKLCIKILQTLREMLEKKDSFVEEGNTLRKILLNRYFKGDYSIGVNGHLSGAYSKTAQVGGSFSGQDSDKMGISMSDIQCLLDKEGASELVIDVIVNTKNDRIFSEGIFLGIALLEGGNTQTQYSFYQQLHEQKKSEKFFKVLYDRMKAAQKEIRSTVTVNTIDLGNKKRDDDNELMTSGPRMRVRDSTLHLKEGMKGQLTEASSATSKAYCVYRREMDPEIDIMCTGPEAGNTEEKSAEEVTMSPAIAIMQPILRFLQLLCENHNRELQNFLRNQNNKTNYNLVCETLQFLDCICGSTTGGLGLLGLYINEKNVALVNQNLESLTEYCQGPCHENQTCIATHESNGIDIIIALILNDINPLGKYRMDLVLQLKNNASKLLLAIMESRHDSENAERILFNMRPRELVDVMKNAYNQGLECDHGDDEGGDDGVSPKDVGHNIYILAHQLARHNKLLQQMLKPGSDPDEGDEALKYYANHTAQIEIVRHDRTMEQIVFPVPNICEYLTRESKCRVFNTTERDEQGSKVNDFFQQTEDLYNEMKWQKKIRNNPALFWFSRHISLWGSISFNLAVFINLAVALFYPFGDDGDEGTLSPLFSVLLWIAVAICTSMLFFFSKPVGIRPFLVSIMLRSIYTIGLGPTLILLGAANLCNKIVFLVSFVGNRGTFTRGYRAVILDMAFLYHVAYVLVCMLGLFVHEFFYSFLLFDLVYREETLLNVIKSVTRNGRSIILTAVLALILVYLFSIIGFLFLKDDFTMEVDRLKNRTPVTGSHQVPTMTLTTMMEACAKENCSPTIPASNTADEEYEDGIERTCDTLLMCIVTVLNQGLRNGGGVGDVLRRPSKDEPLFAARVVYDLLFYFIVIIIVLNLIFGVIIDTFADLRSEKQKKEEILKTTCFICGLERDKFDNKTVSFEEHIKSEHNMWHYLYFIVLVKVKDPTEYTGPESYVAQMIVEKNLDWFPRMRAMSLVSNEGDSEQNEIRSLQEKLESTMSLVKQLSGQLAELKEQMTEQRKNKQRLGFLGSNTPHVNHHMPPH

SEQ ID NO: 126703 - DNA, 546 bp, Artificial Sequence
  derived and/or modified sequence
atgacagagaaaatgtctagctttctatatatcggagatatagtctcgctgtatgcagagggtagcgtgaatggcttcatttccacactgggacttgtggacgatcggtgtgttgtgcatcctgaagccggtgacctagctaaccctcccaagaaatttagggattgcctattcaaagtttgcccaatgaatcggtattctgcccagaaacagtactggaaggcaaagcaggccaaacaggggaatcatacagaggccgcgttgctgaagaaacttcagcacgccgctgagttagaacagaaacaaaatgaaagtgagaacaagaagctgctcggagaaatagtgaagtattcgaacgttattcaattgctgcatattaagagcaacaaatacctgacagtcaacaaaaggctaccggcgctgctggagaaaaacgccatgagagtttccctcgatgccgctggaaatgagggcagttggttctatattcatcccttctggaagctgaggtccgagggtgacaatgatgcgagcttttggatctag

SEQ ID NO: 126704 - DNA, 8106 bp, Artificial Sequence
  derived and/or modified sequence
atgacggaaaaaatgtctagctttctgtatattggggacatcgtatctctgtacgcagagggctcggttaatggatttatctccaccctcggactggtggatgatcgatgtgtcgtccatcccgaggcaggggatctcgccaacccccccaagaagttcagagactgcctgtttaaagtgtgtccaatgaacagatattctgctcagaaacaatactggaaggctaagcaggctaaacaggggaaccatacagaggctgcactacttaagaagctgcagcacgccgccgaactggagcaaaaacagaatgagtccgaaaataaaaagctacttggcgagatcgtgaaatactccaacgttatccagctccttcatattaagtccaacaaatacctgacggtgaataagaggttgcccgccttgctggagaagaatgctatgcgtgtgtctttggatgctgccggcaacgagggtagttggttttacattcacccattttggaagctacgctctgagggggataatatcgtagtcggagacaaagtcgtgttgatgcccgtcaatgctggtcagcccctgcatgccagcaatatcgaactgctggacaatcctggatgtaaggaagtaaacgctgtgaactgcaacacctcatggaagattactttattcatgaagtacagttcctacagggaggacgtgcttaagggcggagatgtagtgaggctattccatgctgaacaagaaaaattcctgacttgtgacgagtatgagaagaaacagcatattttcctgcgtacaacgctccgtcagagcgccacaagtgctacctcatctaaggccctgtgggagatcgaagtagtccaccacgacccatgccggggaggggccggccagtggaattccctgtttcggtttaagcaccttgcaactggaaactacctggcggccgagctgaatcctgattatcgggatgcacaaaacgaaggcaaaaatgtgcgggacggagtaccaccgacttctaagaaaaaacgccaagctggggagaagataatgtatacgctggttagcgtgccccatggtaacgatattgcctctctgtttgagctggacgccacaacacttcagcgcgcagactgcctggtacctagaaacagctatgtcaggctgaggcacctctgcacgaacacatgggtaaccagtacttctattcctattgataccgatgaggaacgtcccgtcatgctaaagataggtacctgccagaccaaggaagacaaggaagccttcgcaatagtgagcgtgcctttgtccgaagtccgggatctggatttcgccaacgatgcaaacaaggtgctggccaccactgtgaaaaaactggagaatggcacaatcactcagaacgagagacggtttgttacaaagctcctggaggatctaatcttcttcgttgcagatgtgccaaacaatggacaggaggtcttagacgttgtcataactaagccaaatcgcgaacgtcagaagcttatgagagagcagaatatcctggcacaggtgttcgggatcttgaaagcacctttcaaagagaaagccggcgagggcagcatgttgcgtctggaggacctgggcgaccaaaggtatgccccttataagtacatgttgcgactttgttaccgcgttctcagacattcgcagcaagattatagaaagaaccaagaatacatcgccaagaacttttgtgtaatgcagtcgcagatcggctatgacatactcgcggaggatacaatcaccgcactgctacataataaccgtaagctgctggagaagcacattacagctaaagaaatcgagacttttgtgtccctcctccggaggaatcgggaaccaagatttttggactacctgtctgatctatgtgtttccaacacaacagcgatcccagtaactcaggagcttatctgtaagttcatgctgagccctggcaatgccgatattttgatacagaccaaggtcgtatctatgcaggcagataatccgatggagagttccattctgagtgacgatatagacgatgaggaagtgtggctctactggatcgacagtaacaaagaacctcacggcaaggctataagacatctggctcaggaggctaaggagggcacaaaagcggatctggaagtcctcacctactaccgctaccagctcaatctgttcgctagaatgtgtctggaccggcaatacctagcaattaaccagatttcaacacagctgagtgttgacctcattctccggtgcgtgagcgacgagagtttgccatttgatttacgcgcttcattttgtaggctcatgcttcacatgcatgttgacagagacccacaagagtccgtggttcccgtgaggtacgctcgtttgtggacagagatccctactaagattaccattcatgagtacgattcaattaccgacagcagccgtaacgatatgaagcgaaagtttgcactgactatggagtttgttgaagaatatttaaaggaggtggtaaaccagccatttccattcggcgataaagaaaagaataagctgacttttgaagtggttcacctggctaggaacttaatttattttggattctattccttctccgagttgttgcgcctgactcgtactctcctcgccattctggacatcgtgcaggctccaatgagctcttatttcgaaagactcagcaagttccaggacggcggcaacaatgtcatgagaacaattcacggggtcggtgaaatgatgactcagatggtattatctagaggttctatttttccaatgagtgtgcccgacgtcccaccgtccatccacccgagcaagcaggggagtcccacagagcacgaggatgtcactgtgatggatacgaagttgaagatcattgaaattctgcagtttatcctgtccgtcaggttagattatagaatctcatatatgctgagtatctacaagaaagaatttggagaggacaacgacaacgctgagacttcagcctccggaagcccagatacacttctcccctccgccatcgtacctgatatagatgagatcgccgcgcaagcggaaacaatgtttgccggacggaaagaaaaaaaccccgtgcagctggacgatgaaggcggccgcacgttcctcagggtcctcattcacctgatcatgcatgactatccccctctgttaagtggggcactgcagcttctgtttaaacatttcagccaaagggctgaagttctccaagcgttcaaacaggtgcaattattggtctctaaccaagatgtggacaactacaaacaaataaaggccgatctagaccagttgagattgaccgtggaaaaatctgagttatgggtagagaaaagctcaaattacgaaaacggagaaattggcgaaagtcaggtcaaaggcggggaggaaccaatcgaggagtctaacatattgagcccagtgcaggatgggactaagaagcctcagattgattccaataaatctaataattaccggattgttaaggaaattcttatccgtctgtcaaagttgtgtgttcagaataagaaatgtaggaatcaacaccagagactgctgaaaaacatgggcgcacacagtgtagttctggacctgctccagattccctacgagaagaatgatgaaaaaatgaatgaagtgatgaatttagcccatacatttctgcagaacttttgccgggggaaccctcaaaatcaagtcttactccataagcacctgaatttgttcctcacacctggtttgctggaagccgaaaccatgcgccatatttttatgaacaattaccacctgtgtaatgagatatcggaacgggtggtccagcacttcgtccactgtattgagacccacggcagacacgtcgaatacctgagattcttacagaccattgtgaaggccgatggcaaatacgtcaaaaagtgccaagacatggtgatgaccgaactgatcaatggcggggaagacgttttgatattctataatgaccgtgccagcttcccgatactcctacatatgatgtgctctgaacgggacaggggcgacgagtctggacccctggcctaccatataacactcgtcgagcttttagctgcttgcaccgaaggaaaaaatgtctataccgagattaagtgtaatagcctcttaccgcttgacgatattgtgcgggtggtgacacacgatgattgcattccggaagtgaaaatagcctacgtaaattttgtgaaccactgttacgtcgacaccgaggttgaaatgaaagagatctacacaagtaaccatatttggaaattgtttgagaacttcctggtggacatggctcgcgtgtgtaacaccaccaccgatagaaaacatgcggacatcttccttgaaaaatgtgtgactgagtcgataatgaatattgtgtctgggttctttaactcacctttctccgataactccacttctcttcagacacaccaacccgtattcatccagctgctgcagagcgcgttccggatatacaattgtacctggcctaacccagcacagaaagcttccgtggaatcatgtatacggactttggcagaagtagctaagaaccgcggtattgcaatccccgtggacctcgactcccaagttaatactctgttcatgaaaagtcacagtaacatggtgcagcgggccgctatggggtggaggctgtcggctcggtctggaccccggttcaaggaagctctgggaggcccggcgtgggactacaggaacatcatcgagaagctgcaggacgtggtcgcatcccttgagcaccaattttcacctatgatgcaagcagagttcagtgtcttggtggatgtgctgtactcccctgaactcctgttcccagagggatcagatgcaagaatccgctgtggcgcttttatgagcaaactcattaatcacaccaaaaaattgatggagaaggaggaaaaattgtgcatcaagatcctgcagactctccgcgaaatgctcgagaagaaggattctttcgtggaggagggcaacacactgaggaaaattcttttgaaccggtattttaagggagactattcaatcggtgtgaacgggcacttatccggggcctactctaaaactgctcaagtcgggggaagcttctctgggcaagattctgataagatgggtattagtatgtctgatattcaatgtctgctcgataaagagggagcctcagaactcgttattgacgtaatagtcaataccaagaacgacaggatcttcagtgaaggcatatttctaggaatcgccctgctagagggcggaaatactcaaactcagtactcattctatcagcagcttcacgagcagaagaaatcggagaagttttttaaagtcttgtacgataggatgaaagccgcccagaaagagatccggagcaccgtgaccgtgaatacgatagatctcgggaataagaagcgcgacgacgacaatgagcttatgacttctggacccaggatgcgggtgcgcgactcaactctccatttgaaggaggggatgaaagggcagctgacagaggcgagctctgctactagcaaggcatactgtgtctatcggcgtgagatggatccagagatcgatattatgtgcacagggccagaggccggcaatacggaggagaagtctgcagaagaggtgacaatgtctcctgcgattgccatcatgcagcccatattgcggtttctccagctgctctgcgaaaatcataaccgggagttacagaactttctacgcaaccaaaacaacaaaaccaattataatttggtgtgcgaaacactccagttcctcgactgtatttgcgggtccacgaccggaggactaggtttacttggcctatatattaacgaaaaaaacgtggccctagtgaaccaaaatcttgagtctttgactgagtattgccaaggaccatgtcacgaaaaccaaacttgcatcgcgacgcacgagtcaaacggaatcgatataatcattgctctaatactgaacgatattaaccccctcgggaagtaccgaatggatctcgtgctccaattaaagaataacgcgtcgaaattgctgcttgccatcatggagagtaggcatgactccgagaacgctgaaaggatcttatttaacatgcggcctcgcgaactggtggatgtgatgaagaacgcttataaccaggggttagaatgtgaccatggagacgacgaaggcggggacgacggagtgagccccaaggacgtcggacataatatttacatcttagcacaccagcttgccaggcataataagctgctacagcaaatgctcaaaccggggagtgatcctgatgaaggagacgaggctctcaagtattacgcgaatcataccgctcagatagagatcgttaggcacgatcgcactatggagcagatcgtcttcccagtgcctaacatttgtgagtatctcactagagagagcaagtgccgggtcttcaataccaccgaacgggatgaacagggctccaaagtcaatgacttctttcagcagactgaagatctgtataacgaaatgaaatggcagaaaaagatcaggaataatccggccctgttctggttcagtagacacattagcctgtggggttcaatctcattcaatctggccgtctttattaacttggccgtggctctgttttatccttttggcgatgatggcgatgaaggaactctgtctcccctgttttccgtgctgctctggattgccgtggccatctgcacttccatgctgtttttcttctccaagcccgtggggattcggccttttttggttagcataatgttgagatccatctataccataggcctcggccctacactgatcctcctgggggctgcaaacctctgtaacaagattgtgttcttagtctcttttgtcggcaatcgtgggaccttcacccgggggtacagagctgttattctggacatggcattcttgtatcacgttgcctacgtgttggtgtgtatgctcggcttatttgtgcatgagttcttttattcgtttctgctgtttgaccttgtgtatagggaggagactctcctcaatgtcatcaagtctgttacacgtaacggaaggagcataatcttaaccgccgtgctcgccctcatcctggtctacctattctccatcatcggattcctgtttttgaaggacgacttcacgatggaggtggataggctgaagaatagaacccctgttaccggatctcatcaggttccaactatgactctgacaaccatgatggaagcatgcgccaaagagaactgttctcccaccatacccgccagtaataccgccgacgaggaatacgaggacggcatagaaagaacctgcgatacactgcttatgtgcatcgtaacagttctaaatcagggacttaggaatggcggtggggtgggcgatgttttgagacgtcctagtaaagacgagccactgtttgctgcaagagtggtttacgacttgctcttttactttatcgtcatcattattgttctgaaccttatattcggtgtcattattgatactttcgctgatctcaggtccgagaagcaaaagaaggaagaaatcctcaagacgacatgtttcatctgtggactcgaaagggacaagtttgacaataagaccgtgagcttcgaggaacacatcaagtcggaacataatatgtggcactatctgtatttcatcgtgctggtcaaggtcaaggaccctaccgagtataccggacctgaatcctatgtagcccagatgatcgtagagaaaaatctggactggttccctaggatgcgcgctatgagcctggtctccaacgaaggcgattctgaacaaaacgagatccggagtctgcaggaaaaactggagtctacaatgtccctggtgaagcagttaagcgggcagttggccgagctgaaggagcagatgaccgaacagcgcaagaataagcaaaggctgggtttcctgggatccaacactccccacgtgaaccaccacatgcccccacactag

SEQ ID NO: 126705 - DNA, 581 bp, Artificial Sequence
  derived and/or modified sequence
atgactgagaaaatgtccagcttcctctacataggggacatcgtgtccctgtacgcggagggctcggtcaacggcttcatcagcaccttggggttagtggatgacagatgtgtggtgcacccagaggccggggaccttgccaaccctcccaagaagttcagagactgccttttcaaggtgtgccctatgaacagatattctgcccagaagcaatattggaaagcaaagcaagccaaacaagggaaccacaccgaggcagccttgctgaagaaactacagcacgctgcagaactggaacaaaaacaaaatgaatcggagaataagaaactgttgggagaaattgtaaaatacagtaatgttatacaactactgcatataaaaagcaacaaatatcttactgtcaacaagagattacctgctttactggagaagaatgccatgcgtgtgtccttggatgctgcaggaaatgaagggtcttggttttatattcatccgttctggaaactgagaagcgagggtgacaatgatgcaagcttctggatttaatttggttaataaattatctggtgatatcttccttt

SEQ ID NO: 126706 - DNA, 10511 bp, Artificial Sequence
  derived and/or modified sequence
cttccagctcccgccgggcggctgtgacggccgcagcgggtcgcagagcagggagtggacacggagtggggagcggagagggaaggaggaggaggaggagcaaaggtgttggagagaaaacttcagaaaggaacaggaaacctgccggggaggcggcggcggctgcggcttctctgggcgcctgggctgcgctcttcgcggggtgtccgcagctgcggcttggccccggtctggcttccccggcgcgcacgcacggctgagccgcgacgctcagtggctcgggccgtgccctccgccgcggctcttggccgctgtagtcccgcgatccgatccgcttctgccgcggcggctccctggagagagggcggcgagggcgcagggaagaagagggacgtccactgtggaacatgaagcagcatgactgagaaaatgtccagcttcctctacataggggacatcgtgtccctgtacgcggagggctcggtcaacggcttcatcagcaccttggggttagtggatgacagatgtgtggtgcacccagaggccggggaccttgccaaccctcccaagaagttcagagactgccttttcaaggtgtgccctatgaacagatattctgcccagaagcaatattggaaagcaaagcaagccaaacaagggaaccacaccgaggcagccttgctgaagaaactacagcacgctgcagaactggaacaaaaacaaaatgaatcggagaataagaaactgttgggagaaattgtaaaatacagtaatgttatacaactactgcatataaaaagcaacaaatatcttactgtcaacaagagattacctgctttactggagaagaatgccatgcgtgtgtccttggatgctgcaggaaatgaagggtcttggttttatattcatccgttctggaaactgagaagcgagggtgacaatattgttgtaggagataaagttgttttgatgcctgtgaatgcagggcagccactacatgccagcaacatagagcttcttgataacccagggtgtaaagaggtgaatgctgtcaattgcaacaccagctggaaaatcactttattcatgaaatatagttcctatcgagaggatgtattaaaaggaggggacgttgttagattatttcatgcggaacaagagaagtttttgacttgtgatgaatatgagaaaaaacagcacattttccttcgtacgaccttgcgccaatcagctacttctgctactagttctaaagcactctgggaaatagaggtggttcatcatgacccatgccgtgggggtgcaggacagtggaacagcttgttcagatttaagcatcttgcaactggaaactatttagctgcagagcttaatcctgattatcgagatgcccaaaatgaaggaaaaaatgtgagagatggagtccctccaacttcaaagaaaaaacgccaggcaggggagaagatcatgtatactttggtttcagtcccgcatggcaatgacattgcatccctttttgaactagatgccacaactcttcagagagctgactgcctggttccaaggaactcatatgttcggttaaggcatttatgcaccaacacatgggtaaccagtactagtatccccatagacacagatgaagagaggcctgttatgttaaagattggaacctgccaaaccaaagaagataaagaagcgttcgcaatcgtgtctgttccactgtctgaagttcgagacttagactttgccaatgatgccaataaagtactagcgaccacagttaaaaagctagaaaacggcacaataactcagaatgaaaggaggtttgtaaccaaattattggaagatctcatattctttgttgctgatgtgcctaataatggacaagaagttctggatgtggttatcactaagccaaaccgagagcgtcaaaaattgatgagggaacaaaacatactggcacaggtatttggaattcttaaagcaccctttaaagagaaagcaggagaaggctcgatgctgagacttgaagatctgggggatcaaagatatgcaccctacaagtacatgctgcggctctgttaccgcgtcctgagacactcgcagcaggattaccggaaaaatcaggaatatattgctaagaatttctgtgtcatgcagtcccagattggctatgatattttggcagaagatactatcacagctttgttgcacaacaacagaaaactactagagaaacatatcacagcaaaagaaatagaaacatttgtcagtttactcaggagaaatcgggagccaaggtttttggattatttgtcagatctgtgtgtgtctaataccactgctatccctgtaactcaagaactcatctgtaaatttatgttgagtccaggcaatgcagacattctcattcaaactaaggtggtctcaatgcaagcagacaaccccatggagagctccatcctttcagatgacattgatgatgaagaagtttggctctattggattgacagcaacaaggaacctcatggcaaagctatcaggcaccttgctcaagaggcaaaagaaggcaccaaagctgacttagaagttcttacctattacaggtaccagctaaacctctttgcaaggatgtgcttggatcgccagtatctggccataaaccagatttctacacagctgtctgtagacctgatcctgcggtgtgtgtcggatgagagcctgccgttcgacctccgagcgtccttctgtcgcctcatgctccacatgcacgttgaccgggatccccaggagtccgtggtgcctgttcgctatgccaggctctggacagaaatccccacaaagatcacaattcatgaatatgattctataacagactcttccagaaatgatatgaagaggaaatttgccctgacaatggaatttgttgaagaatatttgaaagaagttgtaaaccagccctttccttttggggataaagaaaaaaataaactgacatttgaggtggtccacttggctcggaatcttatatactttggattttatagtttcagtgagttattaaggctaacaagaacacttctggctattttagacattgtacaggcccccatgtcatcatactttgaaagattaagcaaatttcaagatggaggaaacaatgtgatgagaaccattcatggggtgggagagatgatgacccagatggtactcagtagaggctccatcttccccatgagcgtgccggatgtgccacccagcatccacccgagcaagcaagggagccccaccgagcacgaggatgtgactgtgatggacaccaagctgaagatcattgagattttgcagtttatcctgagtgtcagactggattataggatctcatatatgctgtcaatatataagaaggagtttggagaggacaatgacaatgcggagacatctgccagtggatctccagacactttactaccatcagctattgttcctgatatagatgaaattgcagctcaggcagaaactatgtttgcgggaagaaaagaaaaaaatccagttcaacttgacgatgaaggaggcaggacgtttttacgggtcctcattcatctgatcatgcacgactacccgcctttgctgtctggagccctgcagctgttgtttaagcacttcagccagagggcagaggttttacaggcatttaagcaggtgcaattactggtgtctaatcaagacgtagataactacaagcaaatcaaggcagatctagaccagcttcgactgacagtagaaaagtctgagctatgggtggagaagagcagcaactatgagaatggagaaataggggaaagtcaagtgaaaggtggtgaagagccaattgaggaatcaaacattttaagtccagtgcaggatggaacaaagaaacctcagattgacagcaacaagagcaataactaccggattgtaaaggagattttgatcaggctaagtaaactctgtgtgcagaataaaaagtgtcggaatcaacatcaacgattactgaaaaatatgggggcgcattcggtggtgttggatcttctgcagataccctatgaaaagaatgatgaaaagatgaatgaagtaatgaatctagcccatacatttctgcagaatttctgtcgaggaaatccacagaatcaagttcttcttcataaacatctgaatttgtttttaactccaggtctccttgaagcagaaaccatgcggcacatcttcatgaacaattaccatctgtgcaacgaaattagcgagagagttgtacaacactttgtgcactgcattgagacacatggccgccacgtggagtacctgaggtttttgcaaacaattgtaaaagcagatggtaaatatgtgaagaaatgccaggatatggtaatgacagagttgataaatgggggtgaagacgtgctgatattttacaatgatagagcatcatttccaatccttctccatatgatgtgttcagagagagaccgaggggatgagagtggccccttagcctaccacatcaccctggtggagttgctggcagcatgcacagaggggaaaaatgtctacactgaaatcaagtgtaattcccttctcccgctggacgacatagtgagggtggtgacccatgacgactgcatccctgaggttaaaattgcttatgtgaactttgttaatcactgttatgttgacactgaagtggaaatgaaagaaatctatacaagtaaccacatttggaaattatttgagaacttcttggtggatatggcaagggtttgcaacacaactacagacaggaaacatgcagacatctttttggaaaagtgtgttactgagtcaataatgaatattgtgagcggcttctttaattctcccttttcagacaatagtaccagcctccagacacatcagccagtttttattcagctactgcaatctgccttcagaatttacaattgcacctggccaaacccagcgcagaaagcctcagtggaatcctgtatcagaactttggctgaagtggcaaaaaatcgtggaattgccattccagtggatttggacagccaagttaatactcttttcatgaagagccattcaaatatggtgcagagagcagcaatgggttggagactatcagctcgctctgggccacgctttaaggaagctcttggagggcctgcttgggattacagaaatattattgaaaagttacaggatgtagtggcctccttggagcaccagttcagcccaatgatgcaggctgaattctcagtgttggttgatgtattgtacagtccagaactgctgttccctgagggaagcgatgcaagaataagatgtggcgctttcatgtcgaagttgattaatcatacaaagaaactaatggagaaagaagaaaaactgtgcattaaaattcttcagacattacgagaaatgttagagaagaaagacagctttgtggaagagggtaacacattaagaaagatacttctgaatcgatactttaaaggtgattatagtattggtgtgaatggacacctatcaggagcctactccaaaactgcacaggtgggaggaagcttttctggacaagattcagataagatggggatatcaatgtcagacattcagtgtctgctggataaagaaggtgcatcagaacttgtcatcgatgttatagtgaacaccaaaaatgacagaattttttcagaaggcattttcctcggcattgccttgcttgaaggaggaaatacacaaacacagtattctttctaccagcagttgcatgaacaaaaaaagtcagaaaaattctttaaagttctctatgatcgaatgaaggctgctcagaaagaaataagatcaacagtgacagttaataccatagatttaggtaacaaaaaaagggacgatgacaatgaattgatgacatctggtccacgaatgagagtaagagattcaacactacatttaaaagagggaatgaaagggcaattaacagaagcttcttcagcaacatccaaagcatattgtgtatacagaagagaaatggatccagaaatagacattatgtgcacaggaccagaagcgggaaacactgaggaaaaatccgcagaggaagtaacaatgagtcccgcaattgccatcatgcagccaatactgagatttcttcagttactgtgtgagaatcacaaccgggaattgcagaacttcttgaggaatcaaaacaacaaaacaaattacaacctagtctgtgagacccttcagtttctggactgcatttgtggaagtacaaccggtggcctgggcctgttgggtctctacatcaatgagaagaatgtagcgctggtcaaccagaacctggagagcttgactgagtattgccagggcccttgccatgaaaatcagacctgtatcgctacacatgagtctaatgggattgatatcatcattgctttgattctgaatgacataaaccctcttggtaaataccgaatggacctggtgctccagctaaagaacaatgcatctaaacttttgctggccattatggaaagcagacatgacagtgagaatgcagaaagaattctttttaacatgagacccagagaactggtggatgtgatgaagaatgcctataaccaaggattggaatgtgaccatggggatgatgagggtggagatgatggtgtttctccaaaagatgttggacacaatatctatattctggcccatcagttggcccgccacaataaactgttgcagcagatgctcaaaccaggatcggatccagatgaaggagatgaagccttaaagtattatgccaaccacactgcacagattgagattgtccggcatgataggaccatggaacaaatagtttttcctgtccccaatatatgtgaatacctcactcgagaatccaagtgccgtgtgttcaatacaactgaaagggatgaacaaggaagtaaagtgaatgactttttccagcaaacagaagatctctacaatgaaatgaagtggcagaagaaaatcaggaataaccctgcactgttctggttctcgaggcacatctctctctgggggagcatttccttcaacctggctgtgttcatcaatttagctgttgctctcttctacccatttggggatgatggagatgaaggtacactttctccattgttctcggttcttctttggatagcagttgcgatctgcacatctatgctgtttttcttctccaagcctgtgggtattcggccgtttcttgtatcaataatgctcagatcaatatatacaataggtcttgggcctacattaatacttcttggtgcagctaatctttgtaataaaattgtttttctggtgagttttgttggaaatcgtggcacgttcacccgtgggtaccgagcagtcatcctggatatggcctttctctatcacgtggcgtatgtcctggtttgcatgctgggcctttttgtccatgaattcttctatagcttcctgctttttgatttggtgtacagggaagagactttgctgaatgtcataaaaagtgtcacacgaaatggccgctctattattctaactgcagtcctggctctcatcctcgtctacctgttttccattattgggttcctttttttgaaggatgacttcactatggaagttgataggctgaaaaaccgaactcctgttacaggcagtcatcaagtgcctactatgactttaactaccatgatggaagcatgtgccaaggagaactgttcacccacaattccagcttcaaatacagctgatgaagagtatgaagatggaattgaaaggacgtgtgacactctccttatgtgcattgtcaccgtgctgaaccagggcctcaggaatggcggtggtgtgggggatgtgctaagaaggccatcgaaagatgagcccttgtttgctgcccgagtggtttatgaccttcttttttatttcattgttatcattattgttctgaacttgatttttggtgttatcatcgatacttttgctgatctcagaagcgaaaaacagaaaaaagaagaaattctaaagacaacttgtttcatctgtggacttgagagagacaagtttgataataaaacggtttcatttgaggagcacattaagtcagaacacaatatgtggcattatttgtacttcatagtcctggtgaaagttaaagacccaacagaatacactggacctgaaagttatgtggctcaaatgattgtggagaagaatttggattggtttcctcggatgcgagccatgtccctcgttagcaatgaaggcgacagtgagcaaaatgaaattcggagccttcaggagaagttggaatcgaccatgagtctggtcaaacagctgtcgggtcagctggcggagctcaaggagcagatgacagaacaaaggaagaataagcagagactgggcttcctcggatcaaacacaccccatgtgaatcatcacatgccaccacactgataccatggggggaagccgtgactagcctttcatcagtgtcctgcctgatcactgaataaagaactgagatggaggggagtgaacagtgcctattgttgaaaagttaaaaacaaccaagtgccaagatgttgagtgggttagctccgagaacaatttataactgtgttttcatggttgcgaagacctaacctcaaatgcatctgctagaaagcgtacatcacacattcgcaatgcatcaggaagaaaaggcttgcccaaaaggctggagagggcagggagcggcaggatggaaggagacacggggcagggagaactctcttctgctaaatcgataggagtcagttttgtcttaaatgctgactacagccactgacatggttggctggaatttctttcttttaattgtggcatataggtttgtgacacaagaagtcatactttggtggctaagttttactaaggaaaataactgaaaagattaaaagtgagagctgaaaagagaaatgataatgcttccaaactgtagctgtcacagggcaatttctttatttataacatgaagcacaatggatttacagctctaggaacttagtactttggagcttttgcctctcacactgacaacataacaggatgtgattgccttctctgggattcagacaggctctgtcaatgtggagcacaaaaggagattttcatataacttgttaaaaacatgttctaagtcatgtataggctaagattttaagaagatctgggggaataaaaagccaacagtaagccccaggaaagggttttttgagaccatatgtatgctattaaaatatattgagattaatacatgaaaatgcttaaaagtgataggaattattgagaaacttatgatggtggcattgccttttataaacatggagtgaaagccatttgactcaacgtttgctgtgcttaaagaattgcttcaggacccgagcgtttttatgtatgctgttcctgcagttaggaaaaaaaaatccaagaaatgtattgaatactcaagaaaatgccacatttcaattacatatttaaaactgtatctgtaagggcttttcaaaatgtagcaagataaaaatctcttattcaaattgtttttgtattaaatcatgcactcagaatttgtcgagggagagaataacctggtgtgttcaggttattcttagagactacacatttggaatagcagagcaaaatatggataatgaaagtgttgggaaaaaagtgatgtgacagggagtgaagacacttgataccagactctgggagatactctgcaagttgacctggcctctcccccacaggaacaaaacactgcctccagagtctttaaattctcagttatcaacgccaaggtttaaggtctagatagggtttgctatagggtttgctctgacaatttttaaagcttttggattgttctaacatagcttaagctattggttcctaaaaatcccaaatcaagatctatgtagaatataaaggaagcctgaaccaatccttccacatactgttaagatgtagacttggaacaaagctgttgggacccagagcaatgaatttttgaactgaagctactggtactccccagcaccacctcatactaagaattcctcactctgacatgacagtattttttctgaccaggagctgaaagaccctgacattcatgatccaaagatataagaaattttgatatgtctgcatgcagcacagaactttgaacctaggaggcagtcaataaatacatgagaaattcagctgtcattcagttactcttaattctttataaaactttaaatgataccacatatttgtttgtttaaaatggctttcccaaaatcaaagtagactaaagcagccatctttaaaatccaggatcatcaatgctattaacagtatcaggtaaaaagtacactttaaaatattttaatcaggcagagttttatggatagaga

SEQ ID NO: 126707 - DNA, 546 bp, Artificial Sequence
  derived and/or modified sequence
atgacagagaagatgagcagcttcctgtacatcggggacatcgtgtccctgtatgcagagggctctgtgaatggcttcatcagcaccctgggcctggtggatgacagatgtgtggtgcaccctgaggccggggacctggccaacccccccaagaagttccgggactgcctcttcaaggtgtgccccatgaaccgctacagcgcccagaagcagtactggaaggccaagcaggccaagcagggcaaccacacagaggccgccctgctgaagaagctgcagcacgccgctgagctggagcagaagcagaatgaaagtgagaacaagaagctgctgggggagatcgtgaagtacagcaatgtcatccagctgctgcacatcaagagcaacaagtacctgactgtgaacaagaggctgcctgccctgctggagaagaatgccatgagggtgtccctggatgctgctggaaatgaaggctcctggttctacatccaccccttctggaagctgcggtctgagggggacaatgatgccagcttctggatctag

SEQ ID NO: 126708 - DNA, 8106 bp, Artificial Sequence
  derived and/or modified sequence
atgacagagaagatgagcagcttcctgtacatcggggacatcgtgtccctgtatgcagagggctctgtgaatggcttcatcagcaccctgggcctggtggatgacagatgtgtggtgcaccctgaggccggggacctggccaacccccccaagaagttccgggactgcctcttcaaggtgtgccccatgaaccgctacagcgcccagaagcagtactggaaggccaagcaggccaagcagggcaaccacacagaggccgccctgctgaagaagctgcagcacgccgctgagctggagcagaagcagaatgaaagtgagaacaagaagctgctgggggagatcgtgaagtacagcaatgtcatccagctgctgcacatcaagagcaacaagtacctgactgtgaacaagaggctgcctgccctgctggagaagaatgccatgagggtgtccctggatgctgctggaaatgaaggctcctggttctacatccaccccttctggaagctgcggtctgagggggacaacatcgtggtgggggacaaggtggtgctgatgcctgtgaatgccggccagcccctgcacgccagcaacatcgagctgctggacaaccctggctgcaaggaggtgaatgctgtgaactgcaacacctcctggaagatcaccctcttcatgaagtacagcagctacagagaagatgtgctgaagggaggagatgtggtgcggctcttccacgccgagcaggagaagttcctgacctgtgatgaatatgagaagaagcagcacatcttcctgcggaccaccctgcggcagagcgccaccagcgccaccagcagcaaggccctgtgggagattgaggtggtgcaccacgacccctgccggggcggggccggccagtggaacagcctcttccgcttcaagcacctggccaccggcaactacctggccgctgagctgaacccagactacagagatgcccagaatgaaggcaagaatgtgagagatggagtgccccccaccagcaagaagaagaggcaggccggggagaagatcatgtacaccctggtgtctgtgccccatggaaatgacatcgccagcctgtttgagctggatgccaccaccctgcagagagctgactgcctggtgcccagaaattcctatgtgcggctgcggcacctgtgcaccaacacctgggtgaccagcaccagcatccccatcgacacagatgaggagaggcctgtgatgctgaagattggcacctgccagaccaaggaggacaaggaggcctttgccatcgtgtctgtgcccctgtctgaggtgcgggacctggactttgccaatgatgccaacaaggtgctggccaccaccgtgaagaagctggagaatggcaccatcacccagaatgaaagaagatttgtgaccaagctgctggaggacctgatcttctttgtggctgatgtgcccaacaacggccaggaggtgctggatgtggtgatcaccaagcccaaccgggagcggcagaagctgatgagggagcagaacatcctggcccaggtgtttggcatcctgaaggcccccttcaaggagaaggccggggagggctccatgctgcggctggaggacctgggggaccagagatatgccccctacaagtacatgctgcggctgtgctacagagtgctgcggcacagccagcaggactacaggaagaaccaggagtacatcgccaagaacttctgtgtgatgcagagccagatcggctatgacatcctggccgaggacaccatcacagccctgctgcacaacaacaggaagctgctggagaagcacatcacagccaaggagattgagacctttgtgtccctgctgcggaggaaccgggagccccgcttcctggactacctgagtgacctgtgtgtgagcaacaccacagccatccctgtgacccaggagctgatctgcaagttcatgctgagccctggaaatgctgacatcctgatccagaccaaggtggtgtccatgcaggccgacaaccccatggagagcagcatcctgagtgatgacattgatgatgaggaggtgtggctgtactggattgacagcaacaaggagccccacggcaaggccatccgccacctggcccaggaggccaaggagggcaccaaggctgacctggaggtgctgacctactaccgctaccagctgaacctgtttgccaggatgtgcctggaccggcagtacctggccatcaaccagatcagcacccagctgtctgtggacctgatcctgcgctgtgtgtctgatgagagcctgccctttgacctgcgggccagcttctgccgcctgatgctgcacatgcacgtggaccgggacccccaggagagcgtggtgcctgtgcgctatgcccggctgtggacagagatccccaccaagatcaccatccacgagtatgacagcatcacagacagcagcagaaatgacatgaagaggaagtttgccctgaccatggagtttgtggaggagtacctgaaggaggtggtgaaccagcccttcccctttggagacaaggagaagaacaagctgacctttgaggtggtgcacctggccaggaacctgatctacttcggcttctacagcttcagcgagctgctgcggctgaccaggaccctgctggccatcctggacatcgtgcaggcccccatgagcagctactttgagcggctgagcaagttccaggacggcggcaacaacgtgatgaggaccatccacggcgtgggggagatgatgacccagatggtgctgagccggggcagcatcttccccatgtctgtgcctgatgtgcccccatccatccaccccagcaagcagggcagccccacagaacatgaagatgtgacagtgatggacaccaagctgaagatcatcgagatcctgcagttcatcctgtctgtgcggctggactaccgcatctcctacatgctgagcatctacaagaaggagtttggagaggacaatgacaatgctgagaccagcgccagcggcagcccagacaccctgctgcccagcgccatcgtgcctgacattgatgaaattgctgcccaggccgagaccatgtttgctggcaggaaggagaagaaccctgtgcagctggatgatgaaggaggccgcaccttcctgcgggtgctgatccacctgatcatgcatgactacccacccctgctgagcggggccctgcagctgctcttcaagcacttcagccagagagctgaggtgctgcaggccttcaagcaggtgcagctgctggtgagcaaccaggatgtggacaactacaagcagatcaaggctgacctggaccagctgcggctgactgtggagaagtctgagctgtgggtggagaagagcagcaactatgaaaatggagaaattggagagagccaggtgaagggcggggaggagcccatcgaggagagcaacatcctgagccctgtgcaggacggcaccaagaagccccagattgacagcaacaagagcaacaactacagaattgtgaaggagatcctgatccggctgagcaagctgtgtgtgcagaacaagaagtgcaggaaccagcaccagaggctgctgaagaacatgggcgcccacagcgtggtgctggacctgctgcagatcccctatgagaagaatgatgagaagatgaatgaggtgatgaacctggcccacaccttcctgcagaacttctgccggggcaacccccagaaccaggtgctgctgcacaagcacctgaacctcttcctgaccccaggcctgctggaggccgagaccatgaggcacatcttcatgaacaactaccacctgtgcaatgagatcagcgagcgggtggtgcagcactttgtgcactgcatcgagacccacggccgccacgtggagtacctgcgcttcctgcagaccatcgtgaaggcagatggcaagtatgtgaagaagtgccaggacatggtgatgacagagctgatcaatggaggagaagatgtgctgatcttctacaatgaccgggccagcttccccatcctgctgcacatgatgtgcagcgagcgggacagaggagatgaaagtggccccctggcctaccacatcaccctggtggagctgctggccgcctgcacagagggcaagaatgtgtacacagagatcaagtgcaacagcctgctgcccctggatgacatcgtgcgggtggtgacccatgatgactgcatccctgaggtgaagatcgcctacgtgaactttgtgaaccactgctacgtggacacagaggtggagatgaaggagatctacaccagcaaccacatctggaagctgtttgagaacttcctggtggacatggcccgggtgtgcaacaccaccacagacaggaagcatgctgacatcttcctggagaagtgtgtgacagagagcatcatgaacatcgtgtctggcttcttcaacagccccttcagtgacaacagcaccagcctgcagacccaccagcctgtgttcatccagctgctgcagagcgccttccgcatctacaactgcacctggcccaacccagcccagaaggcctctgtggagagctgcatccgcaccctggccgaggtggccaagaacagaggaattgccatccctgtggacctggacagccaggtgaacaccctcttcatgaagagccacagcaacatggtgcagagagctgccatgggctggaggctgagcgcccggagcggcccccgcttcaaggaggccctgggcggccctgcctgggactacagaaacatcatcgagaagctgcaggatgtggtggccagcctggagcaccagttcagccccatgatgcaggccgagttctctgtgctggtggatgtgctgtacagccctgagctgctcttccctgagggcagtgatgcccgcatccgctgtggggccttcatgagcaagctgatcaaccacaccaagaagctgatggagaaggaggagaagctgtgcatcaagatcctgcagaccctgcgggagatgctggagaagaaggacagctttgtggaggagggcaacaccctgaggaagatcctgctgaaccgctacttcaagggggactacagcattggagtgaatggccacctgagcggggcctacagcaagacagcccaggtgggcggcagcttcagcggccaggacagcgacaagatgggcatctccatgtctgacatccagtgcctgctggacaaggagggcgccagcgagctggtgattgatgtgattgtgaacaccaagaatgaccgcatcttcagcgagggcatcttcctgggcatcgccctgctggagggcggcaacacccagacccagtacagcttctaccagcagctgcacgagcagaagaagtctgagaagttcttcaaggtgctgtatgacaggatgaaggccgcccagaaggagatccgcagcacagtgacagtgaacaccatcgacctgggcaacaagaagagagatgatgacaatgagctgatgaccagcggccccaggatgagggtgcgggacagcaccctgcacctgaaggagggcatgaagggccagctgacagaggccagcagcgccaccagcaaggcctactgtgtgtaccgccgggagatggaccctgagattgacatcatgtgcaccggccctgaggccggcaacacagaggagaagtctgctgaggaggtgaccatgagccctgccatcgccatcatgcagcccatcctgcgcttcctgcagctgctgtgtgagaaccacaaccgggagctgcagaacttcctgaggaaccagaacaacaagaccaactacaacctggtgtgtgagaccctgcagttcctggactgcatctgtggcagcaccactggaggcctgggcctgctgggcctgtacatcaatgagaagaatgtggccctggtgaaccagaacctggagagcctgacagagtactgccagggcccctgccacgagaaccagacctgcatcgccacccatgagagcaatggaattgacatcatcatcgccctgatcctgaatgacatcaaccccctgggcaagtacaggatggacctggtgctgcagctgaagaacaatgccagcaagctgctgctggccatcatggagagcagacatgacagtgaaaatgctgagcgcatcctcttcaacatgaggccccgggagctggtggatgtgatgaagaatgcctacaaccagggcctggagtgtgaccatggagatgatgagggcggagatgatggagtgagccccaaggatgtgggccacaacatctacatcctggcccaccagctggcccggcacaacaagctgctgcagcagatgctgaagccaggcagtgaccctgatgaaggagatgaggccctgaagtactatgccaaccacacagcccagattgaaattgtgagacatgacaggaccatggagcagatcgtgtttcctgtgcccaacatctgtgagtacctgacccgggagagcaaatgtagagtcttcaacaccacagaaagagatgagcagggcagcaaggtgaatgacttcttccagcagacagaagatctctacaatgagatgaagtggcagaagaagatccggaacaacccagccctcttctggttcagccgccacatcagcctgtggggcagcatctccttcaacctggccgtgttcatcaacctggccgtggccctcttctacccctttggagatgatggagatgagggcaccctgagccccctcttctctgtgctgctgtggattgctgtggccatctgcacctccatgctgttcttcttcagcaagcctgtgggcatccggcccttcctggtgtccatcatgctgcggagcatctacaccatcggcctgggccccaccctcatcctgctgggcgccgccaacctgtgcaacaagatcgtgttcctggtgtcctttgtgggcaacagaggcaccttcacccggggctacagagctgtgatcctggacatggccttcctgtaccacgtggcctacgtgctggtgtgcatgctgggcctgtttgtgcatgagttcttctacagcttcctgctgtttgacctggtgtaccgggaggagaccctgctgaatgtcatcaagtctgtgaccagaaatggccgcagcatcatcctgacagctgtgctggccctgatcctggtgtacctgttcagcatcatcggcttcctgttcctgaaggatgacttcaccatggaggtggaccggctgaagaacagaacacctgtgacaggcagccaccaggtgcccaccatgaccctgaccaccatgatggaggcctgtgccaaggagaactgcagccccaccatcccagccagcaacacagcagatgaggagtatgaagatggcattgaaagaacctgtgacaccctgctgatgtgcatcgtgacagtgctgaaccagggcctgagaaatggaggaggagtgggagatgtgctgcggcggcccagcaaggatgagcccctgtttgctgcccgggtggtgtatgacctgctcttctacttcatcgtcatcatcatcgtgctgaacctgatctttggagtcatcatcgacacctttgctgacctgcggtctgagaagcagaagaaggaggagatcctgaagaccacctgcttcatctgtggcctggagcgggacaagtttgacaacaagacagtgtcctttgaggagcacatcaagtctgagcacaacatgtggcactacctgtacttcatcgtgctggtgaaggtgaaggaccccacagagtacacaggccctgagagctatgtggcccagatgattgtggagaagaacctggactggttccccaggatgagggccatgagcctggtgtccaatgaaggagacagcgagcagaatgagatccgcagcctgcaggagaagctggagagcaccatgagcctggtgaagcagctgagcggccagctggccgagctgaaggagcagatgacagagcagaggaagaacaagcagaggctgggcttcctgggcagcaacacccctcatgtgaaccaccacatgccaccccactag

SEQ ID NO: 126709 - DNA, 546 bp, Artificial Sequence
  derived and/or modified sequence
atgaccgagaagatgagcagcttcctgtacatcggcgacatcgtgtccctgtatgccgagggcagtgtcaatggttttatttccaccctgggactggtggacgaccgctgcgtggtccaccccgaggccggagacttggccaaccctcccaagaagttccgggattgcctgtttaaagtgtgcccgatgaacagatattctgcacagaagcagtattggaaggctaagcaggctaagcaaggaaaccacacagaggcagccctgctgaaaaaactgcaacacgctgcggaattggagcaaaagcagaacgagagcgagaataaaaaacttctcggcgagatcgtcaagtattcaaatgtcatccagctcctacacatcaagtctaataagtatctgacagtgaataagaggttgcccgcactgttggagaaaaacgccatgagagtgagcctcgacgctgccggcaacgagggctcttggttttacatacaccccttctggaagttgcggtcggagggagataatgatgccagcttctggatttag

SEQ ID NO: 126710 - DNA, 8106 bp, Artificial Sequence
  derived and/or modified sequence
atgaccgagaagatgagcagcttcctgtacatcggcgacatcgtgtcgctttacgccgaaggatccgttaacggtttcatatccaccttgggcttggttgacgaccgctgcgtcgtgcaccctgaggccggcgacctggccaatccccccaaaaagtttagggactgtctctttaaggtgtgccccatgaacaggtattctgctcagaagcagtactggaaagctaaacaagccaagcagggtaaccacaccgaggccgcgctgctgaaaaaactccagcatgccgccgaactcgagcagaagcagaatgagagcgagaacaagaagctgctaggggagatcgtcaaatattcaaatgttatccagctcctccacatcaagtcaaataagtacttgaccgtgaataagcgcctgcctgccttactcgaaaaaaacgcgatgagagtgtcccttgacgcagccggaaacgagggcagctggttctacattcatcccttctggaaactccgctccgaaggcgataacatcgtggtaggcgataaggtggtgttgatgcccgtgaacgcagggcagcctttgcacgcatccaacatcgaactcctagacaatcctgggtgtaaggaagtcaacgccgtgaattgcaatacttcctggaagattactctcttcatgaagtatagctcttacagagaggacgttctgaaaggcggggatgtggtccgattgtttcatgctgaacaggagaaatttctcacttgcgatgagtacgagaagaagcagcatatttttctacgcacaaccctgcggcaaagcgccacatcagcaacttcctctaaagcgctgtgggaaatcgaagtcgttcatcacgatccgtgccgaggaggagccggtcagtggaatagccttttccgcttcaaacacttggctacagggaactatctcgcggccgaactgaatcctgattacagagacgctcaaaatgagggtaaaaatgtcagagatggggtgccgcctacttccaaaaagaaacgtcaggccggtgaaaaaataatgtatactctggtttctgtgccccacggtaatgacatcgccagtctgtttgagcttgacgctactaccttgcagcgtgccgactgcctggtgcctagaaacagttacgtgagacttcgtcacttgtgtaccaacacctgggtcacaagcaccagtatccccattgacaccgacgaagagcgccctgtcatgttaaagattgggacatgtcagaccaaggaggacaaggaggcattcgcgatcgtctctgttccattaagcgaagtaagagacctggactttgctaatgacgcaaataaggtgctggccacaactgtgaaaaaactggaaaatggtactattacacagaatgagaggcggttcgtcacgaagcttcttgaggacctcattttctttgtggccgatgtaccaaacaacggccaggaggtgctcgacgtagtcattaccaagccaaacagagaacgccagaaactaatgagggagcagaacattttggcacaggtttttgggatcttaaaggcacccttcaaagaaaaggccggcgagggtagtatgctgcggctcgaggatctgggcgaccaacggtatgccccgtataaatacatgctgcgtttatgctatagagtcttgcgtcacagccagcaggattaccgcaaaaatcaagaatacatagctaaaaacttctgcgtgatgcaatcccagataggctatgatattcttgctgaagataccattactgctctgctccacaataatcgcaagctactcgaaaagcatatcactgccaaggaaattgagactttcgtgtctcttttgcggagaaatagggaaccaaggtttctcgactatctgtctgatttgtgtgtgagtaacactactgcaatacctgtgacacaggagctcatctgcaagtttatgctgtcgccgggcaacgctgacattctgatccagacgaaggtggtctcaatgcaggcggacaatcccatggagtcaagtatcctatccgatgacattgacgatgaggaagtttggctctactggatcgactccaataaagagcctcacggcaaggcaatccgccacctggcgcaagaagctaaagaggggactaaggccgatctggaagtcctgacatattatcgatatcaactcaacctcttcgcccgaatgtgtctggataggcagtatctggctatcaatcagatctctactcagctgtccgtggacctgattttacgatgcgtgtcagacgaaagcttgccatttgacctccgtgccagtttctgccgtctgatgctacacatgcacgtggatcgcgatcctcaggagagtgtggtaccagtgcgctacgctaggctgtggaccgagatacccactaaaatcacgatccatgagtacgattcaataactgattcaagtaggaacgatatgaaaagaaaattcgctctgacaatggagttcgtcgaagaatatttaaaagaggttgtgaatcagccttttccatttggagataaggaaaaaaataaactgaccttcgaagtcgtccacctcgcccggaaccttatatattttggattttacagctttagcgagttactgagactaaccaggacactgctggccatcctggatattgtccaggctcccatgtcaagttatttcgagcggttgtccaagttccaggatggcggtaacaacgtcatgagaacaatccacggcgtgggtgagatgatgactcagatggtactcagcagagggtcaatttttcctatgtctgtcccggacgtgccaccgtctattcatcctagcaaacaagggagtcccacagagcatgaggatgtgacagtgatggataccaagctcaagatcatagagatcttacagtttattctgagtgtgaggctagattatagaatatcttatatgctgtcaatttacaagaaggagtttggagaggataacgacaatgcggagacgagcgcctccggaagccccgataccttgctgcccagcgccatagtgccagacatcgatgaaattgctgcacaagctgaaacaatgttcgcaggaaggaaagaaaagaatccagttcagctggacgatgagggtggccgcacctttctgcgagtgctgattcacctgatcatgcacgattaccccccactgctgtctggcgctcttcaactgctcttcaagcacttctcacagagagcagaagtgctacaagcttttaagcaggtccagctgctcgtcagcaatcaggatgtcgataattacaagcagatcaaggctgaccttgaccagctgaggctaacagtcgagaagagtgagctctgggtggaaaagtcatccaactatgagaatggggaaatcggggagagccaggtgaagggaggggaggaacccatcgaggaatcgaacatattaagccccgtgcaggatggaaccaaaaagccccagatagattctaataagagtaataattatcgcatagttaaagagattctcattagactgagtaaactctgtgtgcaaaacaagaagtgccgaaatcagcaccagcgcctgctcaaaaacatgggggcccactccgtcgtcctcgatcttttgcagatcccttacgagaagaacgacgagaagatgaatgaggtgatgaatctggctcatacttttctgcagaatttttgcagggggaatccccagaatcaggttttgctgcacaagcacctgaacctgttcttaacccctggtctgctggaagcggagaccatgcgccacatttttatgaataattaccatctgtgtaacgagatctctgaacgagtggttcaacactttgtacactgtattgagacccacggccggcatgtggaatatctccgcttcctgcagacaattgtaaaggccgatggaaagtacgtcaagaaatgtcaagatatggtgatgactgagctgattaatggtggggaagacgttctgatcttctataacgacagagcctcattccccattcttcttcacatgatgtgtagcgaaagagacagaggtgatgagagtgggcccctcgcttaccatattacgcttgtcgaactgctcgctgcctgtaccgagggcaagaacgtgtataccgagatcaagtgcaattctctcctcccactggacgacatcgtacgggtggttacgcatgatgattgcattccggaggttaaaatcgcctacgtgaattttgttaatcattgttatgtggacacagaggttgaaatgaaagagatttatacatccaatcacatttggaagctgttcgagaactttctggtcgatatggcacgagtctgcaacacaaccactgatagaaagcatgccgatatctttttggaaaaatgtgtcacggaatcgataatgaatattgtctctggcttctttaattcacccttttcggataattctacctcccttcagacacatcagcctgtatttatccagctgctgcaatcagcattccgcatctataattgtacctggcccaatcctgcgcagaaggcttctgtcgagtcctgtattaggacccttgccgaggtcgccaaaaatcgtgggatcgctatcccagttgacttggactcacaggtgaacaccctgtttatgaagagccacagcaacatggtacagagggccgccatgggctggagactatcggcccgctccggcccgcgttttaaggaggccctcggcggtccagcctgggactaccgaaatatcattgaaaagttgcaagatgtggtcgctagtttagaacaccaattttctcccatgatgcaggcagagttcagcgttctcgtggatgttctttatagtcctgagctcctgttccctgagggctccgacgctcggatccgttgcggagcttttatgagcaaactcataaaccatacaaaaaaactcatggagaaagaggagaaactctgcataaaaattctacagaccctgagggaaatgttggagaaaaaagattcttttgtagaagagggaaacaccctccgcaaaattctgctcaacagatactttaagggggattatagcatcggcgtgaatggtcacctgagcggtgcttatagtaaaacagcccaagtgggcggatcattcagcggccaggacagcgataagatgggtatcagtatgtctgacatacagtgtctgttggataaggaaggggcgagtgagctggtgattgacgttatcgtcaacacgaagaatgataggattttttccgaaggcatcttcctcggtattgcgttactcgaggggggcaatacccagacacaatactccttctatcagcaactgcacgagcaaaaaaagagcgagaagtttttcaaggttctctacgaccggatgaaggcagcccagaaggagattcgctccaccgtcacggtaaacactatcgacttaggaaacaaaaagagggatgatgacaacgagcttatgacctcagggccccggatgcgagtgcgggacagcacgttgcatctcaaagaggggatgaaaggacagctcactgaagcatcaagcgctacctcgaaggcatactgcgtgtaccgacgagagatggatccagagatcgacattatgtgtaccggaccggaggcaggtaacacggaggagaagtcagctgaggaagtaactatgtcaccggctattgccataatgcaaccgatcctgaggtttttgcagcttttgtgcgaaaatcacaaccgtgaactacagaacttcctgagaaaccagaacaacaagaccaactacaaccttgtctgcgaaaccctgcaatttctagactgcatttgcggctcgacgaccgggggactgggtctgttagggctctatataaacgaaaagaacgtagctctggtcaatcagaatcttgagtcgctcacagagtactgtcaagggccctgccacgaaaatcagacctgtatagctacacacgagtccaacggaatcgatattattatagcactgatcctgaacgacataaaccccctgggaaagtatcggatggacctggtcctccagctaaagaacaacgcaagcaagctgctgttagcgattatggagtcccgtcatgattctgagaacgccgaaagaatcctgtttaacatgaggccacgagaactcgttgacgttatgaagaatgcctataatcagggactcgagtgcgaccatggcgatgatgaaggtggggatgacggcgtgtcgccaaaggacgtcggccataatatatacattttagcccaccagctcgcacgccacaataaattgctgcagcaaatgctcaagccaggatccgatccagatgaaggagatgaggcactgaagtattatgctaatcacactgcccaaattgagatcgtgaggcacgatcgcacgatggaacaaatcgtgtttcccgtacctaacatttgtgaatatctgacccgggaaagtaaatgcagggtcttcaatactacagaaagggatgaacagggaagcaaggtaaatgacttcttccagcaaactgaggacctgtataacgagatgaaatggcagaagaagattcggaacaatcccgcgctcttttggttctcacggcacatcagcctgtgggggtcgattagttttaatctagcagtgtttatcaacttagccgtcgccctgttctatcccttcggcgatgatggggacgaggggaccttatcccccctatttagtgtgctcttatggatcgccgtagctatctgcacaagcatgctttttttcttcagcaagcccgtgggcattcgtccttttttagtgtctatcatgctaagatctatttacactattggcctgggtcccactctcatactactcggagcagccaacctgtgcaacaagatcgtcttcctagtatcgttcgttggtaatcgaggaacatttacacgtgggtatagggctgtcattctggatatggctttcctatatcacgtagcttatgtgctggtctgcatgttggggttattcgtgcatgagttcttctactccttcctgttgttcgacttagtttaccgggaggaaaccctgcttaacgtgatcaagagtgtcactaggaacggaagatctattatactcactgccgtgttggccttgatcctggtctatctattctccattattggctttctgttcctgaaggacgacttcacgatggaagtggataggctgaagaacagaacccccgtcaccggctcacatcaggtgccgacaatgaccctgactacgatgatggaggcttgcgccaaagaaaactgctcacctaccatccccgcctccaacaccgctgatgaggagtacgaggatggcattgagagaacctgcgacactctcctaatgtgcatcgtaaccgttctgaaccaggggctgcggaatggaggcggagtaggagatgttctgagacgaccttctaaggatgagccactgtttgccgctcgggtcgtgtacgacttgttgttttactttattgttatcatcatcgtcttgaacctcatttttggggtgataatagacacgttcgctgatctgagatccgagaaacagaagaaggaggagattctgaagaccacatgttttatctgcggtctggagagagataagtttgataacaaaactgtgtccttcgaggagcacatcaaatccgaacacaatatgtggcattacctgtatttcatcgtcctggttaaggttaaggacccaacagagtacacaggtccagagtcatacgtggcccagatgatcgttgagaagaacctggactggtttccaagaatgcgcgccatgtctttagttagcaacgaaggggacagtgagcaaaatgagatccgttcactgcaagaaaagctggagtctactatgagcctcgtaaaacagctctccggccagttagctgaattgaaagagcagatgactgaacaaaggaagaacaagcaaagactgggattccttggatccaacacacctcacgtaaatcaccacatgccaccccactag

SEQ ID NO: 126711 - DNA, 546 bp, Artificial Sequence
  derived and/or modified sequence
atgacagagaaaatgagttcattcttgtatatcggggacatcgtttccctgtacgctgaagggtcagtgaacggattcatttctacgctgggactggtggacgataggtgcgtggtgcacccggaggcaggtgacttggcgaatcctcccaagaagttcagggattgcttgtttaaggtgtgtccaatgaataggtattctgcacaaaagcaatattggaaagcaaaacaagcaaagcagggcaaccatacggaagctgccctgctcaagaaactacagcacgccgctgaactggagcagaagcaaaacgaatcagagaacaagaagctcctgggtgaaattgtcaaatatagtaacgtcattcagctcctgcacataaagagtaacaagtacctgacagtgaacaaaaggctgccagctttgctggaaaagaacgccatgcgcgtctccctcgatgcagctggtaatgagggctcatggttttatatccacccattttggaaactacgctccgagggcgataacgacgcatcattttggatttag

SEQ ID NO: 126712 - DNA, 8105 bp, Artificial Sequence
  derived and/or modified sequence
atgaccgagaaaatgtcctccttcctctatattggagatatcgtgagcctctacgcggagggctccgtgaacggttttatatccacgctggggcttgtagatgaccgttgcgtggtgcacccagaggccggagatctggcaaaccctccgaaaaagtttagggattgcttatttaaggtctgtcctatgaacaggtatagcgcccagaagcagtactggaaagcgaagcaggccaaacagggcaatcacaccgaggcggcactcttaaaaaaattgcagcatgccgctgagctggagcaaaagcaaaacgagtcagagaacaaaaaactcctcggagagatcgtgaagtactccaatgtcattcagctcctccacatcaaatctaacaagtacttgacagttaacaaaagactgcccgctctcctggagaagaacgccatgcgggtgtcactggacgccgctggaaatgagggcagctggttttacatacacccgttttggaagcttcggagtgaaggtgacaatattgtggtgggcgacaaggtcgtgctgatgcccgtaaacgccggacaacctttacacgcctctaacatagagctcctggacaatccgggttgtaaagaagtgaacgccgtaaactgcaacacttcctggaagattactctgtttatgaagtactccagctacagagaggacgtgttgaagggaggggacgtggtcaggctattccatgccgagcaggaaaagtttcttacatgtgatgaatacgagaaaaagcagcacatcttcctgagaacaaccctgaggcagtctgctactagcgccacaagctccaaagctctctgggagatcgaggtggtgcatcatgacccttgtaggggaggggctgggcagtggaactccctcttcaggtttaagcacctggctaccggtaattaccttgccgctgagcttaatccagattatcgcgacgcccagaacgaagggaaaaacgtgcgagatggtgtccctccgacctcaaaaaagaagagacaggcaggggagaagattatgtatacactcgtgtccgtaccccatgggaacgacatagcaagtctgtttgagctcgatgctactacactgcagagagctgattgtctggttccgagaaattcctacgtcaggctgcgacacctctgcaccaacacctgggtgaccagcacttccatacctatcgatactgatgaagagagaccagtcatgctgaaaatcggcacctgccagacgaaggaggacaaggaagcattcgccattgtgtctgttcctctgagcgaagtccgagacctggatttcgccaatgacgctaataaagtcctggccacaacggtaaagaagctggaaaacggcacaatcacacagaatgagaggcggttcgtgaccaaactgctcgaggacctgattttctttgtggctgatgtgccaaataatggccaagaggtgttggacgttgtaatcacaaaacccaaccgggaacggcaaaagctgatgagagaacagaacattctggcacaggtgttcgggatcctgaaagctccattcaaggagaaggccggagaaggctcgatgctgcgccttgaagatcttggagatcagaggtacgcaccatataaatatatgttgcgactctgctatagagtcctgcggcatagccaacaggactatcgaaagaatcaggagtatattgcgaagaacttctgcgttatgcagtctcagataggatacgatattctggccgaagatactataactgcgctgttgcataacaatcgcaaactgctggaaaagcacatcaccgctaaggaaattgagacattcgtgtccttgttgaggcgtaacagagaaccacggtttctggactacctgtccgatctgtgcgttagcaacactaccgccattcccgtgacccaggaactgatttgtaaatttatgttatctcctgggaatgccgacatcctgattcagacaaaggtcgtatctatgcaggcagataaccccatggagtcctctattctcagtgatgatatcgacgacgaggaagtgtggctctactggattgactccaacaaagaaccacacggcaaggctattcgtcacctggcacaggaggccaaagaagggacaaaggcggacctggaagtattaacatactatcgttaccagctgaacctcttcgcaagaatgtgcctggatcgacaatacctggcgatcaatcagatctccacccagctcagcgtggatctgatcttaaggtgcgtgagtgacgaatccttgcctttcgacctccgagcatcattttgccggctcatgctccacatgcacgtcgatcgagatcctcaggaaagcgtggtgcctgtgcgatatgcgagactctggacagaaatcccaacaaagattaccattcacgagtatgactcgatcaccgactcgtctcgcaatgacatgaaaaggaaattcgccctgaccatggagttcgtggaggaatacctcaaggaagtggtaaatcagccctttccattcggcgataaggaaaagaataaattaacctttgaagtggtccacctcgccagaaatcttatttatttcggcttttacagtttttctgagctactccgcctgactcggaccctgctagcaatcctcgacattgtccaggccccaatgtccagctactttgaaagattgtcaaaattccaggatggtggcaataatgtgatgagaaccatccacggcgtaggcgagatgatgacccagatggtgttgagcaggggatccattttcccaatgagcgtgccagacgtgccgccatccattcatccaagcaaacaggggtcacctaccgagcatgaggacgtcaccgttatggatacaaagctgaaaattattgagattctacagttcatcctctccgtaaggcttgactatcgcatctcgtacatgctgtccatatataagaaggagttcggggaggacaatgacaacgctgagaccagcgccagcggatctcccgatacactactaccttcagctattgtacctgacattgatgaaatcgccgctcaggcagaaaccatgttcgctggtaggaaggaaaagaatcctgtccagctggacgatgagggtggcaggacttttttacgggtgttaattcacctgatcatgcatgattatcctcctctgctttccggggcactccagctactgtttaaacacttctctcagcgggctgaggtgctgcaagcttttaaacaggttcagctgctggtatccaatcaagacgtggacaactacaaacaaatcaaagcagatctggaccagctaagactgacagtggaaaagtccgagttatgggtcgaaaaatcttctaattacgagaacggagagataggtgagagccaggtgaaaggaggggaggagccgattgaggagtctaatatcctatctccagttcaggatggcaccaagaagccccagatcgatagcaataaatcaaacaactaccgaattgtgaaagagatccttattagactcagcaaactgtgtgtgcaaaataaaaagtgtagaaatcaacaccagagactgctgaagaacatgggagcccacagcgtggttctcgacttgctgcagatcccttacgaaaaaaatgatgagaagatgaatgaagtgatgaatctcgcacatacgttcctgcagaatttttgtcggggaaaccctcaaaatcaggtcttattgcacaaacacctcaacctgtttctcacccctgggttactcgaagccgaaaccatgaggcatatatttatgaataactaccatctttgtaatgaaatttctgagcgcgtggtccaacactttgttcactgtattgagacccacggaaggcatgttgagtatttgagattcttacagacaattgttaaagcagacggcaagtacgtaaagaaatgtcaggacatggtgatgaccgaactgatcaatgggggtgaagatgtgttgatcttctacaatgatcgcgcatcttttcctattcttctgcacatgatgtgcagcgagagggatcgcggagatgagtccggcccactggcttaccacatcacccttgttgagttgctggcagcctgtaccgagggcaaaaatgtctacacagaaatcaagtgtaacagcctgctgcctttggatgatatcgtgcgagtggtaacacacgatgattgcatcccagaggttaagattgcttatgttaattttgtgaatcactgctatgtcgatacagaggtcgaaatgaaggagatttatacctcaaatcatatatggaagctgttcgagaatttcttggtcgacatggcaagggtctgcaacaccaccactgatcgaaaacacgccgacatctttttggagaagtgtgtcactgagagtattatgaacattgtctctggctttttcaattctccatttagcgacaattctacctctctccagacacatcaaccggttttcatccagttattgcaaagtgcttttaggatctataactgtacttggcctaatcctgctcagaaagcctctgtggagtcctgtataaggaccctggcagaagtggctaaaaatcggggtatagcaatccctgtcgacctggacagtcaggtaaacactctgttcatgaagtcccattcaaatatggtacagcgtgccgctatgggctggcggctgtcagcccgtagtggcccaaggttcaaggaagccctaggcggtccagcttgggattatcggaatatcatcgagaagctccaggatgtggtggcctcactggaacatcaattttctccaatgatgcaagctgagtttagtgtcttggtggatgtcctgtatagtcccgagctgctttttcccgaggggagcgacgctcgcattcgctgtggcgcatttatgagcaagttaattaaccatactaagaagctcatggaaaaggaagaaaaactttgtattaagatcctgcaaacgctgagggagatgctagaaaaaaaagattcttttgtagaggaagggaataccctgagaaagatcctgttaaacagatatttcaagggggactatagtatcggcgtcaatgggcacctgtctggggcatactctaagaccgcacaagttggaggcagctttagtggccaggattccgacaagatgggcatttccatgagcgacatccagtgcctgctggataaagagggggcaagtgaactcgtgattgatgtgatcgttaatacaaagaacgaccgaattttctccgagggtatatttctcgggattgctctcttggaaggaggcaacactcagacccaatattcattttaccaacaattgcacgaacagaaaaagagcgagaagttcttcaaagtgctttacgatcgaatgaaagccgcacaaaaggagatccggtccacagttactgtgaacaccattgatttgggcaacaagaaacgagacgacgataacgagttgatgacgtccggcccacgcatgcgtgttagagattctacactgcatcttaaggaaggaatgaagggccaactgacagaggccagtagcgcaacatcaaaggcctactgcgtgtaccggagggagatggatcccgaaatcgacatcatgtgcacaggccctgaggccggaaatacggaagaaaagagtgctgaagaggtcacaatgtccccagcaattgccataatgcagcccattcttcgctttctgcaacttctgtgcgagaaccacaaccgcgaattgcaaaactttcttaggaaccagaacaacaaaaccaactacaaccttgtatgcgaaactctccaatttctagattgcatctgtgggtccactacaggaggcctgggtcttctgggtttatatattaatgaaaaaaatgtggctcttgttaaccagaacctggagtccctgaccgagtactgccaagggccttgccacgagaatcagacatgtatagcaactcacgaaagcaatggaatcgatataatcatcgccctgatactgaatgatataaatcctttgggcaaatacagaatggatctcgtgctccagctgaaaaataatgcctctaaactcctattagcgatcatggaatccagacatgattctgagaacgctgaaagaatcttgttcaacatgcgtccgagggagttagttgacgttatgaaaaacgcctataatcaaggcctggaatgcgaccacggggatgatgagggaggcgatgacggagtcagccctaaggacgttggccataatatctacatcttggcccatcagctcgcaagacacaacaagctgttgcagcagatgctgaagcctggaagcgatcctgatgagggcgatgaggccctcaagtattatgcgaatcatacggctcaaatagaaattgtgcgccatgaccgcaccatggaacagatagtcttcccagtccctaatatctgcgagtatttgacgagggaaagtaagtgcagggtgttcaacaccacagagcgagatgaacagggaagcaaagtgaacgatttttttcagcagacagaggatctctacaacgagatgaaatggcaaaaaaaaattcggaataacccagcactattctggttctcaagacacatttccctgtggggcagcatcagcttcaaccttgccgtctttattaatctcgcggtggctctgttttacccattcggtgatgatggggacgagggtaccctctctcccttgttctcggtgctgctgtggattgcagtagctatttgtacatccatgctcttcttcttcagcaagccagtggggattcgaccattcctggtctcaatcatgttaaggagcatttataccatcggcttagggccaacattgatcctccttggcgcagctaatctgtgtaataaaatcgtgtttctggtgtcctttgtaggcaaccggggaacatttacacgtggatatcgggcagtgattcttgatatggcattcctgtatcacgtcgcctacgttttggtgtgcatgttagggctgtttgttcacgaattcttctacagttttctcttattcgatctggtttatagggaggaaacactccttaatgttatcaaaagtgtcacgcgcaatgggagatccattatattgactgcagttctggctctgatattggtgtacctcttcagtataatcggatttcttttcttaaaagatgactttactatggaggtggaccgattaaaaaaccgcactcctgtcactggcagtcaccaggttccgacaatgacgctgaccactatgatggaagcttgtgcaaaggaaaactgcagcccaacgatccccgcaagtaatacagccgacgaggaatacgaagatggcatcgagaggacttgtgacactctgcttatgtgtatagtcactgtacttaatcaggggctaaggaatggcggtggtgtgggcgacgtgctgagacggccaagcaaggatgaaccattgttcgctgccagagtggtttacgacctgctgttctacttcatagtcatcatcatcgtactgaacttgatcttcggcgtcatcatcgacacgttcgcagatctgaggagcgaaaagcagaaaaaagaggaaattctgaagactacctgtttcatctgtggcctggagagggacaaattcgacaataaaacagtgagcttcgaagagcacattaagagcgagcataacatgtggcattacctttattttatcgtcctggtcaaggtcaaagatcctaccgaatataccggccctgagagctacgttgcacaaatgattgtcgaaaaaaaccttgattggtttccacgtatgcgcgcaatgagcctggttagcaacgagggagattccgagcagaacgaaatcaggagtctgcaagaaaagctggagagtactatgtcactcgtgaagcagttgagcggacagttggccgaactgaaagagcagatgaccgagcagcgaaagaacaaacaaagactggggttcctcggcagcaataccccacatgtgaaccatcacatgcctccacacta

SEQ ID NO: 126713 - DNA, 546 bp, Artificial Sequence
  derived and/or modified sequence
atgaccgagaagatgagcagcttcctgtacatcggcgacatcgtgagcctgtacgccgagggcagcgtgaacggcttcatcagcaccctgggcctggtggacgacagatgcgtggtgcaccccgaggccggcgacctggccaacccccccaagaagttcagagactgcctgttcaaggtgtgccccatgaacagatacagcgcccagaagcagtactggaaggccaagcaggccaagcagggcaaccacaccgaggccgccctgctgaagaagctgcagcacgccgccgagctggagcagaagcagaacgagagcgagaacaagaagctgctgggcgagatcgtgaagtacagcaacgtgatccagctgctgcacatcaagagcaacaagtacctgaccgtgaacaagagactgcccgccctgctggagaagaacgccatgagagtgagcctggacgccgccggcaacgagggcagctggttctacatccaccccttctggaagctgagaagcgagggcgacaacgacgccagcttctggatctag

SEQ ID NO: 126714 - DNA, 8106 bp, Artificial Sequence
  derived and/or modified sequence
atgaccgagaagatgagcagcttcctgtacatcggcgacatcgtgagcctgtacgccgagggcagcgtgaacggcttcatcagcaccctgggcctggtggacgacagatgcgtggtgcaccccgaggccggcgacctggccaacccccccaagaagttcagagactgcctgttcaaggtgtgccccatgaacagatacagcgcccagaagcagtactggaaggccaagcaggccaagcagggcaaccacaccgaggccgccctgctgaagaagctgcagcacgccgccgagctggagcagaagcagaacgagagcgagaacaagaagctgctgggcgagatcgtgaagtacagcaacgtgatccagctgctgcacatcaagagcaacaagtacctgaccgtgaacaagagactgcccgccctgctggagaagaacgccatgagagtgagcctggacgccgccggcaacgagggcagctggttctacatccaccccttctggaagctgagaagcgagggcgacaacatcgtggtgggcgacaaggtggtgctgatgcccgtgaacgccggccagcccctgcacgccagcaacatcgagctgctggacaaccccggctgcaaggaggtgaacgccgtgaactgcaacaccagctggaagatcaccctgttcatgaagtacagcagctacagagaggacgtgctgaagggcggcgacgtggtgagactgttccacgccgagcaggagaagttcctgacctgcgacgagtacgagaagaagcagcacatcttcctgagaaccaccctgagacagagcgccaccagcgccaccagcagcaaggccctgtgggagatcgaggtggtgcaccacgacccctgcagaggcggcgccggccagtggaacagcctgttcagattcaagcacctggccaccggcaactacctggccgccgagctgaaccccgactacagagacgcccagaacgagggcaagaacgtgagagacggcgtgccccccaccagcaagaagaagagacaggccggcgagaagatcatgtacaccctggtgagcgtgccccacggcaacgacatcgccagcctgttcgagctggacgccaccaccctgcagagagccgactgcctggtgcccagaaacagctacgtgagactgagacacctgtgcaccaacacctgggtgaccagcaccagcatccccatcgacaccgacgaggagagacccgtgatgctgaagatcggcacctgccagaccaaggaggacaaggaggccttcgccatcgtgagcgtgcccctgagcgaggtgagagacctggacttcgccaacgacgccaacaaggtgctggccaccaccgtgaagaagctggagaacggcaccatcacccagaacgagagaagattcgtgaccaagctgctggaggacctgatcttcttcgtggccgacgtgcccaacaacggccaggaggtgctggacgtggtgatcaccaagcccaacagagagagacagaagctgatgagagagcagaacatcctggcccaggtgttcggcatcctgaaggcccccttcaaggagaaggccggcgagggcagcatgctgagactggaggacctgggcgaccagagatacgccccctacaagtacatgctgagactgtgctacagagtgctgagacacagccagcaggactacagaaagaaccaggagtacatcgccaagaacttctgcgtgatgcagagccagatcggctacgacatcctggccgaggacaccatcaccgccctgctgcacaacaacagaaagctgctggagaagcacatcaccgccaaggagatcgagaccttcgtgagcctgctgagaagaaacagagagcccagattcctggactacctgagcgacctgtgcgtgagcaacaccaccgccatccccgtgacccaggagctgatctgcaagttcatgctgagccccggcaacgccgacatcctgatccagaccaaggtggtgagcatgcaggccgacaaccccatggagagcagcatcctgagcgacgacatcgacgacgaggaggtgtggctgtactggatcgacagcaacaaggagccccacggcaaggccatcagacacctggcccaggaggccaaggagggcaccaaggccgacctggaggtgctgacctactacagataccagctgaacctgttcgccagaatgtgcctggacagacagtacctggccatcaaccagatcagcacccagctgagcgtggacctgatcctgagatgcgtgagcgacgagagcctgcccttcgacctgagagccagcttctgcagactgatgctgcacatgcacgtggacagagacccccaggagagcgtggtgcccgtgagatacgccagactgtggaccgagatccccaccaagatcaccatccacgagtacgacagcatcaccgacagcagcagaaacgacatgaagagaaagttcgccctgaccatggagttcgtggaggagtacctgaaggaggtggtgaaccagcccttccccttcggcgacaaggagaagaacaagctgaccttcgaggtggtgcacctggccagaaacctgatctacttcggcttctacagcttcagcgagctgctgagactgaccagaaccctgctggccatcctggacatcgtgcaggcccccatgagcagctacttcgagagactgagcaagttccaggacggcggcaacaacgtgatgagaaccatccacggcgtgggcgagatgatgacccagatggtgctgagcagaggcagcatcttccccatgagcgtgcccgacgtgccccccagcatccaccccagcaagcagggcagccccaccgagcacgaggacgtgaccgtgatggacaccaagctgaagatcatcgagatcctgcagttcatcctgagcgtgagactggactacagaatcagctacatgctgagcatctacaagaaggagttcggcgaggacaacgacaacgccgagaccagcgccagcggcagccccgacaccctgctgcccagcgccatcgtgcccgacatcgacgagatcgccgcccaggccgagaccatgttcgccggcagaaaggagaagaaccccgtgcagctggacgacgagggcggcagaaccttcctgagagtgctgatccacctgatcatgcacgactacccccccctgctgagcggcgccctgcagctgctgttcaagcacttcagccagagagccgaggtgctgcaggccttcaagcaggtgcagctgctggtgagcaaccaggacgtggacaactacaagcagatcaaggccgacctggaccagctgagactgaccgtggagaagagcgagctgtgggtggagaagagcagcaactacgagaacggcgagatcggcgagagccaggtgaagggcggcgaggagcccatcgaggagagcaacatcctgagccccgtgcaggacggcaccaagaagccccagatcgacagcaacaagagcaacaactacagaatcgtgaaggagatcctgatcagactgagcaagctgtgcgtgcagaacaagaagtgcagaaaccagcaccagagactgctgaagaacatgggcgcccacagcgtggtgctggacctgctgcagatcccctacgagaagaacgacgagaagatgaacgaggtgatgaacctggcccacaccttcctgcagaacttctgcagaggcaacccccagaaccaggtgctgctgcacaagcacctgaacctgttcctgacccccggcctgctggaggccgagaccatgagacacatcttcatgaacaactaccacctgtgcaacgagatcagcgagagagtggtgcagcacttcgtgcactgcatcgagacccacggcagacacgtggagtacctgagattcctgcagaccatcgtgaaggccgacggcaagtacgtgaagaagtgccaggacatggtgatgaccgagctgatcaacggcggcgaggacgtgctgatcttctacaacgacagagccagcttccccatcctgctgcacatgatgtgcagcgagagagacagaggcgacgagagcggccccctggcctaccacatcaccctggtggagctgctggccgcctgcaccgagggcaagaacgtgtacaccgagatcaagtgcaacagcctgctgcccctggacgacatcgtgagagtggtgacccacgacgactgcatccccgaggtgaagatcgcctacgtgaacttcgtgaaccactgctacgtggacaccgaggtggagatgaaggagatctacaccagcaaccacatctggaagctgttcgagaacttcctggtggacatggccagagtgtgcaacaccaccaccgacagaaagcacgccgacatcttcctggagaagtgcgtgaccgagagcatcatgaacatcgtgagcggcttcttcaacagccccttcagcgacaacagcaccagcctgcagacccaccagcccgtgttcatccagctgctgcagagcgccttcagaatctacaactgcacctggcccaaccccgcccagaaggccagcgtggagagctgcatcagaaccctggccgaggtggccaagaacagaggcatcgccatccccgtggacctggacagccaggtgaacaccctgttcatgaagagccacagcaacatggtgcagagagccgccatgggctggagactgagcgccagaagcggccccagattcaaggaggccctgggcggccccgcctgggactacagaaacatcatcgagaagctgcaggacgtggtggccagcctggagcaccagttcagccccatgatgcaggccgagttcagcgtgctggtggacgtgctgtacagccccgagctgctgttccccgagggcagcgacgccagaatcagatgcggcgccttcatgagcaagctgatcaaccacaccaagaagctgatggagaaggaggagaagctgtgcatcaagatcctgcagaccctgagagagatgctggagaagaaggacagcttcgtggaggagggcaacaccctgagaaagatcctgctgaacagatacttcaagggcgactacagcatcggcgtgaacggccacctgagcggcgcctacagcaagaccgcccaggtgggcggcagcttcagcggccaggacagcgacaagatgggcatcagcatgagcgacatccagtgcctgctggacaaggagggcgccagcgagctggtgatcgacgtgatcgtgaacaccaagaacgacagaatcttcagcgagggcatcttcctgggcatcgccctgctggagggcggcaacacccagacccagtacagcttctaccagcagctgcacgagcagaagaagagcgagaagttcttcaaggtgctgtacgacagaatgaaggccgcccagaaggagatcagaagcaccgtgaccgtgaacaccatcgacctgggcaacaagaagagagacgacgacaacgagctgatgaccagcggccccagaatgagagtgagagacagcaccctgcacctgaaggagggcatgaagggccagctgaccgaggccagcagcgccaccagcaaggcctactgcgtgtacagaagagagatggaccccgagatcgacatcatgtgcaccggccccgaggccggcaacaccgaggagaagagcgccgaggaggtgaccatgagccccgccatcgccatcatgcagcccatcctgagattcctgcagctgctgtgcgagaaccacaacagagagctgcagaacttcctgagaaaccagaacaacaagaccaactacaacctggtgtgcgagaccctgcagttcctggactgcatctgcggcagcaccaccggcggcctgggcctgctgggcctgtacatcaacgagaagaacgtggccctggtgaaccagaacctggagagcctgaccgagtactgccagggcccctgccacgagaaccagacctgcatcgccacccacgagagcaacggcatcgacatcatcatcgccctgatcctgaacgacatcaaccccctgggcaagtacagaatggacctggtgctgcagctgaagaacaacgccagcaagctgctgctggccatcatggagagcagacacgacagcgagaacgccgagagaatcctgttcaacatgagacccagagagctggtggacgtgatgaagaacgcctacaaccagggcctggagtgcgaccacggcgacgacgagggcggcgacgacggcgtgagccccaaggacgtgggccacaacatctacatcctggcccaccagctggccagacacaacaagctgctgcagcagatgctgaagcccggcagcgaccccgacgagggcgacgaggccctgaagtactacgccaaccacaccgcccagatcgagatcgtgagacacgacagaaccatggagcagatcgtgttccccgtgcccaacatctgcgagtacctgaccagagagagcaagtgcagagtgttcaacaccaccgagagagacgagcagggcagcaaggtgaacgacttcttccagcagaccgaggacctgtacaacgagatgaagtggcagaagaagatcagaaacaaccccgccctgttctggttcagcagacacatcagcctgtggggcagcatcagcttcaacctggccgtgttcatcaacctggccgtggccctgttctaccccttcggcgacgacggcgacgagggcaccctgagccccctgttcagcgtgctgctgtggatcgccgtggccatctgcaccagcatgctgttcttcttcagcaagcccgtgggcatcagacccttcctggtgagcatcatgctgagaagcatctacaccatcggcctgggccccaccctgatcctgctgggcgccgccaacctgtgcaacaagatcgtgttcctggtgagcttcgtgggcaacagaggcaccttcaccagaggctacagagccgtgatcctggacatggccttcctgtaccacgtggcctacgtgctggtgtgcatgctgggcctgttcgtgcacgagttcttctacagcttcctgctgttcgacctggtgtacagagaggagaccctgctgaacgtgatcaagagcgtgaccagaaacggcagaagcatcatcctgaccgccgtgctggccctgatcctggtgtacctgttcagcatcatcggcttcctgttcctgaaggacgacttcaccatggaggtggacagactgaagaacagaacccccgtgaccggcagccaccaggtgcccaccatgaccctgaccaccatgatggaggcctgcgccaaggagaactgcagccccaccatccccgccagcaacaccgccgacgaggagtacgaggacggcatcgagagaacctgcgacaccctgctgatgtgcatcgtgaccgtgctgaaccagggcctgagaaacggcggcggcgtgggcgacgtgctgagaagacccagcaaggacgagcccctgttcgccgccagagtggtgtacgacctgctgttctacttcatcgtgatcatcatcgtgctgaacctgatcttcggcgtgatcatcgacaccttcgccgacctgagaagcgagaagcagaagaaggaggagatcctgaagaccacctgcttcatctgcggcctggagagagacaagttcgacaacaagaccgtgagcttcgaggagcacatcaagagcgagcacaacatgtggcactacctgtacttcatcgtgctggtgaaggtgaaggaccccaccgagtacaccggccccgagagctacgtggcccagatgatcgtggagaagaacctggactggttccccagaatgagagccatgagcctggtgagcaacgagggcgacagcgagcagaacgagatcagaagcctgcaggagaagctggagagcaccatgagcctggtgaagcagctgagcggccagctggccgagctgaaggagcagatgaccgagcagagaaagaacaagcagagactgggcttcctgggcagcaacaccccccacgtgaaccaccacatgcccccccactag

SEQ ID NO: 126715 - protein, 2671 aa, Artificial Sequence
  derived and/or modified sequence
MSEMSSFLHIGDIVSLYAEGSVNGFISTLGLVDDRCVVEPAAGDLDNPPKKFRDCLFKVCPMNRYSAQKQYWKAKQTKQDKEKIADVVLLQKLQHAAQMEQKQNDTENKKVHGDVVKYGSVIQLLHMKSNKYLTVNKRLPALLEKNAMRVTLDATGNEGSWLFIQPFWKLRSNGDNVVVGDKVILNPVNAGQPLHASNYELSDNAGCKEVNSVNCNTSWKINLFMQFRDHLEEVLKGGDVVRLFHAEQEKFLTCDEYKGKLQVFLRTTLRQSATSATSSNALWEVEVVHHDPCRGGAGHWNGLYRFKHLATGNYLAAEENPSYKGDASDPKAAGMGAQGRTGRRNAGEKIKYCLVAVPHGNDIASLFELDPTTLQKTDSFVPRNSYVRLRHLCTNTWIQSTNVPIDIEEERPIRLMLGTCPTKEDKEAFAIVSVPVSEIRDLDFANDASSMLASAVEKLNEGFISQNDRRFVIQLLEDLVFFVSDVPNNGQNVLDIMVTKPNRERQKLMREQNILKQVFGILKAPFREKGGEGPLVRLEELSDQKNAPYQHMFRLCYRVLRHSQEDYRKNQEHIAKQFGMMQSQIGYDILAEDTITALLHNNRKLLEKHITKTEVETFVSLVRKNREPRFLDYLSDLCVSNHIAIPVTQELICKCVLDPKNSDILIRTELRPVKEMAQSHEYLSIEYSEEEVWLTWTDKNNEHHEKSVRQLAQEARAGNAHDENVLSYYRYQLKLFARMCLDRQYLAIDEISQQLGVDLIFLCMADEMLPFDLRASFCHLMLHVHVDRDPQELVTPVKFARLWTEIPTAITIKDYDSNLNASRDDKKNKFANTMEFVEDYLNNVVSEAVPFANEEKNKLTFEVVSLAHNLIYFGFYSFSELLRLTRTLLGIIDCVQGPPAMLQAYEDPGGKNVRRSIQGVGHMMSTMVLSRKQSVFSAPSLSAGASAAEPLDRSKFEENEDIVVMETKLKILEILQFILNVRLDYRISYLLSVFKKEFVEVFPMQDSGADGTAPAFDSTTANMNLDRIGEQAEAMFGVGKTSSMLEVDDEGGRMFLRVLIHLTMHDYAPLVSGALQLLFKHFSQRQEAMHTFKQVQLLISAQDVENYKVIKSELDRLRTMVEKSELWVDKKGSGKGEEVEAGAAKDKKERPTDEEGFLHPPGEKSSENYQIVKGILERLNKMCGVGEQMRKKQQRLLKNMDAHKVMLDLLQIPYDKGDAKMMEILRYTHQFLQKFCAGNPGNQALLHKHLHLFLTPGLLEAETMQHIFLNNYQLCSEISEPVLQHFVHLLATHGRHVQYLDFLHTVIKAEGKYVKKCQDMIMTELTNAGDDVVVFYNDKASLAHLLDMMKAARDGVEDHSPLMYHISLVDLLAACAEGKNVYTEIKCTSLLPLEDVVSVVTHEDCITEVKMAYVNFVNHCYVDTEVEMKEIYTSNHIWTLFENFTLDMARVCSKREKRVADPTLEKYVLSVVLDTINAFFSSPFSENSTSLQTHQTIVVQLLQSTTRLLECPWLQQQHKGSVEACIRTLAMVAKGRAILLPMDLDAHISSMLSSGASCAAAAQRNASSYKATTRAFPRVTPTANQWDYKNIIEKLQDIITALEERLKPLVQAELSVLVDVLHWPELLFLEGSEAYQRCESGGFLSKLIQHTKDLMESEEKLCIKVLRTLQQMLLKKTKYGDRGNQLRKMLLQNYLQNRKSTSRGDLPDPIGTGLDPDWSAIAATQCRLDKEGATKLVCDLITSTKNEKIFQESIGLAIHLLDGGNTEIQKSFHNLMMSDKKSERFFKVLHDRMKRAQQETKSTVAVNMNDLGSQPHEDREPVDPTTKGRVASFSIPGSSSRYSLGPSLRRGHEVSERVQSSEMGTSVLIMQPILRFLQLLCENHNRDLQNFLRCQNNKTNYNLVCETLQFLDIMCGSTTGGLGLLGLYINEDNVGLVIQTLETLTEYCQGPCHENQTCIVTHESNGIDIITALILNDISPLCKYRMDLVLQLKDNASKLLLALMESRHDSENAERILISLRPQELVDVIKKAYLQEEERENSEVSPREVGHNIYILALQLSRHNKQLQHLLKPVKRIQEEEAEGISSMLSLNNKQLSQMLKSSAPAQEEEEDPLAYYENHTSQIEIVRQDRSMEQIVFPVPGICQFLTEETKHRLFTTTEQDEQGSKVSDFFDQSSFLHNEMEWQRKLRSMPLIYWFSRRMTLWGSISFNLAVFINIIIAFFYPYMEGASTGVLDSPLISLLFWILICFSIAALFTKRYSIRPLIVALILRSIYYLGIGPTLNILGALNLTNKIVFVVSFVGNRGTFIRGYKAMVMDMEFLYHVGYILTSVLGLFAHELFYSILLFDLIYREETLFNVIKSVTRNGRSILLTALLALILVYLFSIVGFLFLKDDFILEVDRLPNNHSTASPLGMPHGAAAFVDTCSGDKMDCVSGLSVPEVLEEDRELDSTERACDTLLMCIVTVMNHGLRNGGGVGDILRKPSKDESLFPARVVYDLLFFFIVIIIVLNLIFGVIIDTFADLRSEKQKKEEILKTTCFICGLERDKFDNKTVSFEEHIKLEHNMWNYLYFIVLVRVKNKTDYTGPESYVAQMIKNKNLDWFPRMRAMSLVSNEGEGEQNEIRILQDKLNSTMKLVSHLTAQLNELKEQMTEQRKRRQRLGFVDVQNCISR

SEQ ID NO: 126716 - DNA, 8016 bp, Artificial Sequence
  derived and/or modified sequence
atgtctgagatgagctcgtttctgcacatcggggacatcgtgtccctgtacgcggagggaagcgtaaacgggttcattagcacccttgggctcgtagacgacaggtgcgtcgttgaaccagcagccggagatttagacaatccccctaagaagttccgagactgtctgtttaaagtgtgcccaatgaacaggtattcggcccagaagcagtattggaaagcaaagcaaacaaaacaagacaaggagaagattgccgacgtagtgctcctgcagaaactacagcacgccgctcagatggaacagaaacagaatgataccgagaataaaaaggtgcacggtgacgtggtaaagtacggctcagttatacagctgctgcacatgaagtctaataaatacctgacggtgaataagagattgcctgcccttctggagaaaaacgccatgagggttactcttgacgcaacggggaacgagggaagctggttgttcatacaacctttttggaaacttcggagcaacggtgacaatgtggtggtgggcgacaaggttatcctgaatccggtcaatgcaggtcaacctctccacgcctcgaattacgaattgtctgataacgccggatgtaaagaggtcaattcagtgaattgtaacacttcctggaagattaatctgttcatgcagttcagggatcatctggaagaggtcctcaaaggaggagacgtagtccgcctgttccacgcggaacaggagaagtttctaacctgcgacgagtacaagggcaagctgcaagttttcctgaggaccaccctccgacagtcagctaccagcgcaacctccagcaatgctctgtgggaagtagaggtagtccatcatgatccctgcagagggggtgccggacattggaacggcctctataggttcaaacacctcgcaaccgggaactacctggccgctgaggagaacccctcgtataagggggacgcaagtgatcctaaggccgcagggatgggagctcagggtaggacaggtaggcggaatgccggggaaaagattaagtactgcctggtggctgtaccgcacggaaatgacatcgcaagtctgttcgagttagatcccaccacattgcaaaaaactgatagcttcgttcctagaaatagctacgtgcgcttgcgtcacctctgtactaacacatggattcagagtacgaatgtgcccatcgatattgaagaggaacggccgatcagactaatgctagggacatgccctaccaaagaagacaaggaggccttcgccattgtgagcgttccagtgagcgagattcgtgatttagatttcgccaacgatgcctcttctatgctcgctagtgctgtcgagaagctcaatgagggtttcatcagccagaacgatcggcggttcgtgatccagttgttggaagatcttgttttctttgtctcagacgttcctaacaacgggcagaatgtgctggatattatggtgacgaagcccaaccgcgaaagacagaaactgatgcgggagcagaatatacttaagcaggtcttcggcatcctgaaggccccctttagagaaaagggcggtgagggcccgctcgtgcgcctggaagaactcagcgatcagaagaatgctccttaccagcatatgttcaggctctgctatcgcgtgctacggcattctcaggaggattacaggaaaaaccaggaacacatcgcaaagcagttcggtatgatgcagagtcaaatcggatacgacatactagccgaggataccattaccgctctgttacacaataatcgcaaactgttggagaaacatattactaaaactgaagtcgagactttcgtgtctctcgtgagaaaaaacagggaaccccgttttttggattacttgagtgacctgtgtgtgagcaaccatattgcaattccggtgactcaggaactgatctgcaaatgtgtgctggaccccaagaatagcgatattcttatcagaacagagctgcggccagtgaaagagatggcacaatctcatgagtatctctccattgaatatagtgaagaggaggtgtggcttacatggactgataagaataatgaacaccacgagaaatctgtgcggcagctggctcaggaagcacgcgctggaaatgctcatgacgaaaacgtcctgtcttattaccgctatcagcttaagctctttgcacggatgtgtttggaccggcaatacctggcaatcgatgagatttcacagcagctgggggtggatttaatcttcctgtgcatggctgatgagatgctgccattcgacctgcgcgccagcttttgccatcttatgttgcacgtccatgtggatagggatccacaggaactcgtgaccccagtgaagttcgcccgactatggacagagataccaacagcaattaccataaaagactacgactccaatctaaatgcatcccgcgatgataagaagaataaatttgctaataccatggagttcgtggaagattatctaaataacgtagtctccgaagctgtaccattcgctaatgaggaaaagaacaagctcaccttcgaggtcgtttctcttgctcataacctgatctactttggcttctacagtttctcagagctgctcaggctgaccaggaccctgctcggtatcatcgactgcgtccagggtcctcccgccatgcttcaagcatacgaggaccctggtggcaaaaacgtgcgccggtccatccaaggggtggggcacatgatgagcaccatggtactgagtcgcaagcagtcggttttcagtgcgccctctctgtccgctggcgcctcagcagccgagcccctggacaggtctaaatttgaggagaacgaggacattgtggtcatggagactaagctaaagatacttgaaattctgcaattcatactgaacgtgcgacttgactaccgcattagctacctcctatccgtgtttaagaaggagttcgtcgaggtttttcctatgcaggactcaggagccgacgggaccgcacccgccttcgactcaactacagccaatatgaatctcgatcggattggggagcaggctgaagcaatgttcggagtcggcaaaacaagcagcatgcttgaagtggacgacgaaggcggccggatgttcctcagagtgctgattcaccttacaatgcacgattacgctccgcttgtttccggtgcgctacaactgctgtttaaacacttcagccagcgccaagaagccatgcacacattcaagcaggtgcaactactcatttccgcccaggacgtggagaactacaaggtgatcaagagtgagcttgaccgtctccggaccatggtggaaaaatccgaactttgggtggacaaaaaggggagtggtaaaggagaggaagtggaagctggcgcagctaaggacaagaaggaacggcccacagacgaagaaggcttcttgcacccgcccggcgaaaaatcaagtgagaattatcagatcgtgaagggcatactcgaacgactgaataaaatgtgtggggttggggaacagatgcgcaagaagcaacagcgcctgttaaagaacatggatgcacataaagtgatgctagatctcctgcagataccatatgacaaaggggacgctaagatgatggagatcctccgctatacccatcagtttttgcaaaaattttgtgcaggcaaccccgggaaccaggcactgctccataagcatctgcacctgttcctgactccgggcctcttagaggcagaaaccatgcagcacattttcctgaacaactaccagctgtgcagtgagatatcggaacccgtcctgcagcacttcgttcatctgctcgccacacatgggcgccatgtacagtatcttgatttcctgcatacagtgatcaaggccgagggaaaatatgtcaagaagtgccaagatatgatcatgacagagctgacaaatgcaggtgatgatgtggtggttttttacaacgacaaggccagccttgctcacctgctggacatgatgaaggcggcaagggatggagtcgaggatcattcacccttaatgtatcatatctctctggtggacctgttagccgcatgtgctgaaggtaagaatgtgtataccgagattaagtgcacatccttactgccacttgaagatgttgtgtccgtggttacacacgaggactgtatcaccgaagtaaagatggcctacgtgaacttcgtgaatcactgttatgtggacactgaggtcgagatgaaagagatttacaccagtaaccatatctggactttatttgagaattttacgttggacatggccagggtgtgtagcaaacgggagaagcgagtggcagatccgaccctcgaaaagtatgtgctctcagtggtgctcgataccatcaatgcctttttcagcagcccatttagcgagaactcaacctcgctgcagacccatcagacgatcgtagttcaactgctgcagagtactacccgattgctggagtgcccatggttgcagcaacaacacaaggggtcagtggaggcctgtatacgcactttagctatggtagcaaaaggacgagcaatactgctgccaatggatcttgacgcacacattagttctatgttatcttcaggggcctcctgtgcagcagctgctcagaggaacgcgagtagctacaaggctacaactcgggcattcccaagggtgacccccacagccaaccagtgggactacaaaaacattatcgagaagctgcaagacataattaccgcactagaggaaaggttaaaacctctcgtccaggccgagctatctgttctagtggatgtgttacattggcctgaactcctcttcctggaaggcagtgaagcatatcagagatgcgagtcagggggattcctttcgaagcttattcagcacacaaaggacctgatggagtccgaggaaaagctgtgcatcaaggtgttgcgtacattgcagcagatgctgctgaaaaagaccaaatacggcgaccgcggaaatcagctaaggaaaatgctcctgcagaattacttgcagaacaggaaatctacgagtcggggagacctacctgatccgattggaactggactggacccggactggagcgcaatagcggccacccagtgcagactggacaaagagggcgccactaagttagtgtgcgatctaatcactagcaccaaaaacgagaagatcttccaggagtccattggactggcaatacacctccttgatggtggtaatactgagatacagaaatctttccataatttaatgatgtctgataaaaaatctgaaagattttttaaggtgttgcatgacagaatgaagcgcgcccagcaggagactaaatctaccgtggccgtcaacatgaacgacctaggtagtcagccccatgaggatagagagccggtcgatcccactacgaaaggtcgtgtggcctctttttctatccccggatcgagctccaggtacagtttggggccttctctgcggcgcgggcacgaagtttcagaacgtgtgcaatccagcgagatgggtacatcagtgcttattatgcagcctatactgagattcctgcagctgctgtgcgagaaccacaaccgggacctgcagaattttcttagatgccagaacaataaaactaattataacctggtgtgcgaaacactgcagttcctagacataatgtgcggaagcactacagggggcttagggctgctgggcctgtatataaatgaagacaacgtcggcttggtgatccagacactagaaactctgaccgagtactgtcagggcccctgccatgaaaaccaaacctgtatcgtgacccacgaatcaaacgggattgatataatcacagccctgatactaaacgacatatcacccttgtgcaaatatcgcatggaccttgtcttacagcttaaggacaatgcatctaaacttcttctggcactgatggaaagccggcatgattccgaaaatgccgaacggattctgatctctctgcgacctcaggaactcgtggatgttatcaagaaagcttatcttcaggaggaagagagggagaactccgaagtgtccccacgggaagtgggacataacatctatattctcgccttgcagctcagtcggcacaataagcaactccagcatctcttgaagccagtcaaaagaattcaagaagaggaggccgaaggaatttcttcaatgctgtctctgaacaataagcagcttagccaaatgctcaagagctccgccccagcccaggaggaagaggaggatcccttggcttactatgaaaaccataccagccagattgaaatcgtccgccaagaccgatccatggagcagatagtgtttccggttcccggtatctgccaattcctcaccgaggaaaccaaacatcgtttgtttacaaccactgaacaggacgaacagggttccaaggtgtctgactttttcgaccagtcttcgtttctccacaatgagatggagtggcagagaaaactcagaagcatgcccctcatctattggttctcccggagaatgactctttgggggtccatttcgttcaacctcgctgttttcatcaatatcatcatcgctttcttctacccgtatatggagggagcatccacaggcgtgctcgatagccctctgatctcccttctcttttggattttgatttgcttttccatcgctgccctgtttaccaagcgatattccatacggcctctgatagtcgccctcatccttcgcagcatctactacttaggcataggtcccacattgaatatcctgggagctttaaacctgaccaacaaaattgtctttgtggtatcattcgtgggcaacaggggcactttcatcaggggctataaggcaatggtaatggacatggaatttctttaccatgtaggatacatcttgacctcagtgttaggcctgttcgcccacgaactcttttacagcatcctgctattcgacctgatctatagagaggaaaccctctttaatgtgatcaaaagtgtgactagaaacggtagaagcatccttcttactgccttactcgcacttatcctggtctatttattcagcatagtcgggttccttttcttgaaggatgacttcatattggaggtcgaccgcctaccaaataaccattccactgcaagccccttgggcatgccacacggggctgccgcctttgttgacacctgctctggggataagatggattgtgtgtcaggcctctctgttccagaagtgctagaggaagatagagagctcgattccactgagcgtgcctgcgataccctgcttatgtgcattgtgactgttatgaaccatggcttgcgaaacggcggaggggtaggtgacatcctgaggaagccttcgaaggatgagtcactgttcccagctagggtagtatatgacctactgtttttttttattgtaatcattatcgttctgaatctcatcttcggcgttatcatcgacacctttgccgacctgcgcagtgagaaacagaaaaaggaggaaatcctcaaaaccacatgctttatctgtggactcgaaagggacaagttcgataataaaaccgtctcattcgaagaacacatcaagctggagcacaacatgtggaattacctctactttattgtgctggtgcgtgtgaagaataaaaccgactatacagggccagagtcttacgtggcacagatgatcaaaaataagaaccttgattggtttcccagaatgagagccatgtctctcgtctccaacgagggtgagggggaacagaatgagatccggattcttcaagataaactgaatagcacaatgaagttggttagtcacctgacagcgcagctaaacgaactcaaagaacagatgactgagcagaggaagaggcgtcaacgtctgggcttcgtcgatgtccaaaactgcatttcaaggtag

SEQ ID NO: 126717 - DNA, 9668 bp, Artificial Sequence
  derived and/or modified sequence
atttcccctccaagcctgagcactttctattgtgcaatgaaaaggcttttcacgttgagaaaaatgaatcccgaatttgctctgcaaagggatgagcgcgcctctgggcgccagcctgctctcagctgggcgcggagaccgcgcggtggccgcagggcggccgcggccagggcgctccagggcgcgccctccgcgagcggctccggggtgacgcccgccggagagctggactcccccttccgcgggcgcctgcactggctcttagccagccgagggcccgggtgcagatagtccgggaaccccgagggcggagagctccccactacgcctgggcctcccagggatggcagctccgagagccccctagacccggtgccttgcaggacgcctctggagatcaggagggctggcggcgcattcggcgtccgggaggccgggccccggacgcgcgaggagcgcggggcgcgggaaggcaggcgggtgcacatgggtgccggcgggcgagctgcggggggagggggggcggggtgtggcctccccgcctcccgggcgggatttgcatgtgtgtggtggccccagacttcctgctccttctacgctgcaggtacgcgcgggccgggcggggcgggcgggcggcgggcgcgccaagacgtgggcacctcctcacccggaccccgggccccgccgagccgcctcctggctcccgtggccgccagcccgccccggccgcaccgagcgtcgggatccgaggtgggagcgtacccctccccgctccccggacgcctcagtcctccgcactgagcttggccacgcgcccctaggcgccccccacgccctgggccccggagggccgcagccatgagtgaaatgtccagctttcttcacatcggggacatcgtctccctgtacgccgagggctccgtcaatggcttcatcagcactttggggctggtggatgaccgctgtgtggtggagcccgcggccggggacctggacaacccccctaagaagttccgtgactgcctcttcaaggtgtgccccatgaaccgctactcggcccagaagcagtactggaaggccaagcagactaagcaggacaaggagaagatcgctgatgtggtgttgctgcagaagctgcagcatgcggcgcagatggagcagaagcaaaatgacacggagaacaagaaggtgcatggggatgtcgtgaagtatggcagtgtgatccagctcctgcacatgaagagcaacaagtacctgacagtgaacaagcggcttccggccttgctggagaagaacgccatgcgggtgactctggatgccacaggcaacgagggttcctggctcttcatccagcccttctggaagctgcggagcaacggggacaacgtggtcgtgggggacaaggtgatcctgaatcctgtcaatgccgggcagcctctgcatgccagcaattacgagctcagcgacaacgccggctgcaaggaggtcaattctgtgaactgcaacaccagctggaagatcaacctgtttatgcagtttcgggaccacctggaggaggtgttgaaagggggagacgtggtgcggctgttccatgcggagcaggagaagttcctgacgtgtgacgagtacaagggcaagctgcaggtgttcctgcgaactacactgcgccagtctgccacctcggccaccagctccaatgctctctgggaggtggaggtggtccaccacgacccctgccgtggaggagctgggcactggaatggcttgtaccgcttcaagcacctggctacaggcaactacctggctgctgaggagaaccccagttacaaaggtgatgcctcagatcccaaggcagcaggaatgggggcacagggccgcacaggccgcaggaatgctggggagaagatcaagtactgcctggtggctgtgcctcatggcaatgacatcgcctctctctttgagctggaccccaccaccttgcagaaaaccgactctttcgtgccccggaactcgtacgtccggctgcggcacctctgcaccaacacgtggattcagagcaccaatgtgcccattgacatcgaggaggagcggcccatccggctcatgctgggcacctgccccaccaaggaggacaaggaggcctttgccatcgtgtcagtgcccgtgtctgagatccgagacctggactttgccaatgacgccagctccatgctggccagtgccgtggagaaactcaacgagggcttcatcagccagaatgaccgcaggtttgtcatccagctgctggaagacctggtgttctttgtcagcgatgtccccaacaatgggcagaatgtcctggacatcatggtcactaagcccaaccgggaacggcagaagctgatgagggagcagaacatcctcaaacaggtctttggcattctgaaggccccgttccgtgagaaggggggtgaaggtcccctggtgcggctggaggagctgtcagaccagaagaacgccccctaccagcacatgttccgcctgtgctaccgcgtgttgcggcattcccaggaggactaccgcaagaaccaggagcacattgccaagcagtttgggatgatgcagtcccagattggctacgacatcctggccgaggacaccatcactgccctgctgcacaacaaccgcaagctcctggaaaagcacatcaccaagaccgaggtggagaccttcgtcagccttgtgcgcaagaaccgggagcccaggttcctggactacctctctgacctgtgtgtgtccaaccacatcgccatccccgtcacccaagagctcatctgcaagtgtgtgctggaccccaagaacagtgacattctcatccggaccgagcttcggcccgtgaaggagatggcccaatcccacgagtacctgagcatcgagtactcagaagaggaagtgtggctcacgtggactgacaagaataacgagcatcatgagaagagtgtgaggcagctggcccaggaggcgcgggccggcaacgcccacgacgagaatgtgctcagctactacaggtaccagctgaagctctttgcccgcatgtgcttggaccgccagtacttggccatcgacgagatctcccagcagctgggcgtggacctgattttcctgtgcatggcagacgagatgctgccctttgacctgcgcgcctccttctgccacctgatgctgcacgtgcacgtggaccgtgacccccaggagctggtcacgccggtcaagtttgcccgtctctggactgagatccccacagccatcaccatcaaggactatgattccaacctcaacgcgtcccgagatgacaagaagaacaagtttgccaacaccatggagttcgtggaggactacctcaacaatgtagtcagcgaggccgtgccctttgccaacgaggagaagaacaagctcacttttgaggtggtcagcctggcgcacaatctcatctacttcggcttctacagcttcagcgagctgctgcggctcactcgcacactgctgggcatcatcgactgtgtgcaggggcccccggccatgctgcaggcctatgaggaccccggtggcaagaatgtgcggcggtccatccagggcgtggggcacatgatgtccaccatggtgctgagccgcaagcagtccgtcttcagtgcccccagcctgtctgctggggccagtgctgctgagccgctggacagaagcaagtttgaggagaatgaggacattgtggtgatggagaccaagctgaagatcctggaaatccttcagttcatcctcaatgtccgcctggattaccgcatatcctacctgctgtctgtcttcaagaaggagtttgtggaggtgtttcccatgcaggacagtggggctgatggcacagcccctgccttcgactctaccactgccaacatgaacctggatcgcatcggggagcaggcggaggccatgtttggagtggggaagacaagcagcatgctggaggtggatgacgagggcggccgcatgttcctgcgcgtgctcatccacctcaccatgcacgactatgcgccgctggtctcgggtgccctgcagctgctcttcaagcacttcagccagcgccaggaggccatgcacaccttcaagcaggttcagctgctgatctcagcgcaggacgtggagaactacaaggtgatcaagtcggagctggaccggctgcggaccatggtggagaagtcagagctgtgggtggacaagaagggcagtggcaagggtgaggaggtggaggcaggcgccgccaaggacaagaaagagcgtcccacggacgaggagggctttctgcacccaccaggggagaaaagcagtgagaactaccagatcgtcaagggcatcctggaaaggctgaacaagatgtgcggggttggggagcaaatgaggaagaagcagcaacggctgctgaagaacatggatgcccacaaggtcatgctggacctgctgcagatcccctatgacaagggtgatgccaagatgatggagatcctgcgctacacgcaccagttcctgcagaagttctgtgcagggaaccccggcaaccaggccctgctgcacaaacacctgcacctcttcctcacgccagggctcctggaggcagagaccatgcagcacatcttcctgaacaactatcagctctgctccgagatcagcgagcctgtgttgcagcacttcgtgcacctgctggccacgcacgggcgccatgtgcagtacctggacttcctgcacaccgtcattaaggccgagggcaagtacgtcaagaagtgccaggacatgatcatgactgagctgaccaatgcaggtgacgatgtggtcgtgttctacaatgataaggcatcgctggcccacctgctggacatgatgaaggccgcccgcgacggcgtggaggaccacagccccctcatgtaccacatttccctggtggacctgctggccgcctgtgccgagggcaaaaacgtctacactgagatcaagtgcacctccctgctgccgctggaggacgtggtgtctgtggtgacgcatgaggactgcatcactgaggtgaaaatggcctatgtgaacttcgtgaaccactgctacgtggacacggaggtggagatgaaggagatctacaccagcaaccacatctggacgctctttgagaacttcaccctggacatggcccgggtctgcagcaagcgtgagaagcgcgtggctgaccccaccttggagaagtacgtgctgagcgttgtgctggacaccatcaacgccttcttcagctccccattctctgagaacagcacttccctgcagacacaccagacgattgtggtgcagctgctgcagtctaccacacgcctcctcgagtgtccgtggctacagcagcagcacaagggctccgtggaggcctgcatccggaccctcgccatggtggccaagggccgggccatcttgctgcccatggacctggatgcccacatcagctcgatgctcagcagtggagccagctgtgcagctgccgcccagcggaacgcctccagctacaaggcaaccacgcgggccttcccccgcgtcacccccaccgccaaccagtgggactacaagaacatcattgagaagctgcaggacatcatcacagccctggaggagcggctgaagcccctggtacaggctgagctgtccgtgctggtggatgtcctgcactggcctgagctgctcttcctggagggcagtgaggcctaccagcgctgcgagagtgggggcttcctgtccaagctgatccagcacaccaaggacctcatggagtcggaggagaagctgtgcatcaaggtgctgcggaccctgcagcagatgctgctcaagaagaccaagtacggggaccggggcaaccagctgcgcaagatgctgctgcaaaactacctccagaaccggaagtccacctcgcggggggaccttcccgaccccataggcactggcctggacccagactggtcggcaatcgcagccacccagtgccggctggacaaggagggggccaccaagttggtatgcgacctcatcaccagcaccaagaacgagaagatcttccaggagagcatcggcctggccatccacctgctggatggtggcaacacagagatccagaaatccttccacaacctgatgatgagtgacaagaagtcagagcgcttcttcaaggtgctgcacgaccgcatgaagcgggcccagcaggagaccaagtccacggtggcagtcaacatgaatgacctgggcagccagccacatgaggaccgcgagccagtcgaccccaccaccaaaggccgcgtggcctccttctcgatacctggctcctcatcccgctactcgctgggccccagcctgcgccgggggcacgaggtgagcgaacgtgtgcagagcagtgagatgggcacatccgtgctcatcatgcagcccatcctgcgctttctgcagctgctgtgtgagaaccacaaccgggacctgcagaacttcctgcgctgtcagaacaacaaaaccaactacaacttggtatgcgagacgctgcagttcctggacatcatgtgcggcagcaccacgggcggcctggggctgctggggctctacatcaatgaggacaacgtgggcctcgtcatccagaccttggagaccctcactgagtactgccagggcccctgccatgagaaccagacttgcattgtgactcacgagtccaatggcatagacatcatcaccgcactgatcctcaatgacatcagccccctgtgcaagtaccgcatggatctggtgctgcagctcaaggacaatgcctccaagctgctcctggctctgatggagagccggcatgacagtgaaaatgctgagcgaatcctcatcagcctgcggccccaggagctggtggacgtcatcaagaaggcctacctgcaggaggaagagcgtgagaactcggaggtgagcccacgtgaagtgggccataacatctatatcctggcgctgcagctctccaggcacaataaacagctgcagcacctgctgaagccggtgaagcgcattcaagaggaggaggccgagggtatctcttccatgctcagcctcaacaacaagcagctgtcacagatgctcaagtcctcagcgccagcacaggaggaggaggaagaccccctggcctactatgagaaccacacgtcccagatcgagattgtgcggcaggaccgcagcatggagcagatcgtgttcccagtgcccggcatctgccagttcctgacggaggaaaccaagcaccggctcttcaccactactgagcaggacgagcagggcagcaaagtgagcgacttcttcgaccagtcctccttcctgcacaacgagatggagtggcagcgcaagctccgcagcatgccgctgatctactggttctcccgccgcatgaccctgtggggcagcatctccttcaacctggccgtgtttatcaacatcatcattgccttcttctacccttacatggagggcgcgtccacaggcgtgctggactcccctctcatctcattgctcttctggatcctcatctgcttctccatcgcggccctgttcaccaagcgctacagcatccgccccctcatcgtggcgctcatcctgcgctccatctactatctgggcatcgggcccacactcaacatcctgggtgccctcaatctgaccaacaagatcgtgtttgtggtgagcttcgtgggcaaccgtggcaccttcatccggggctataaggccatggtcatggacatggaattcctctaccacgtgggctacatcctgaccagtgtcctgggcctctttgctcatgagctgttctacagcatcctgctctttgacctcatctaccgcgaggagacgctgttcaacgtcatcaagagtgtgacccgcaatggccgctccatcctgctgacagccctgctggccctcatcctggtctacctcttctccatcgtcggcttcctcttcctcaaggatgacttcattctcgaggtcgaccggctgcccaacaaccactccacagccagccccctggggatgccacatggagctgctgcatttgtggacacctgcagtggggacaagatggactgtgtctcagggctctcggtgcctgaggtcctggaagaggacagggagctggacagcacagagcgggcctgtgacactctgttgatgtgcatcgtcactgtcatgaaccatgggctacgcaacggtggtggcgtgggcgacattctccgcaagccctccaaagatgagtctctcttcccagcccgagtggtctatgacctcctgttcttcttcatcgtcatcatcattgtgctgaacctcatctttggggtaatcatcgacaccttcgctgacctgcgtagtgagaagcagaagaaggaggagattcttaagacgacatgcttcatctgtggtctggagagggacaagtttgataacaagacagtgtcatttgaggaacacatcaagctggagcacaacatgtggaactacttgtacttcattgtgctggtccgcgtgaagaacaagaccgactacacgggccctgagagctacgtggcccagatgatcaagaacaagaacctggactggttcccccggatgcgggccatgtcccttgtcagcaatgagggcgagggggagcagaatgagattcggattctccaggacaagctcaactccaccatgaagctggtgtcccacctcactgcccagctcaacgagctcaaggagcagatgacggagcagcggaaacgcaggcaacgcctaggctttgtggatgtccagaactgcattagccgctgaggagagccaccgaaggccccaacaggggatgctcatcactggagactgcgactgggaagaacactgccccctccctcgggttgggtggcccagccagctggccagcctccactcccactctgccagacaccctgacacccacccaggctttgaagagcatggagggggagcctcagagctgacagtcctgcttagagcccttaaaaagacttgaaagttcactgggactcagtttaccttaatgccttagcagaagataaatcctacctagagacctttgttccttaaagcaataactgacaactctttgtagtcctccttgtgggtagttaagagtggggtcacccctttaactccaagcactacattttggcggctgccggcctctgggggaggtggcagttatgctgttactagtgattttagggctttgttatttaacttatttcaagggtgctgtgctcagccctgcccatggctgtgcagctccctccgtgcctcagatctgctgtagccagtgcagacctcactgtcgtgtccatgccacccccggcatggctccaggtggcctggtgactccatgatggacgatcttgctcccaggacctgcctcttcccaggcttcctggggaagagttgtacgcccaggcaacaagggctgagctgcgcttgcgtggctgtttcatgaccgcttgtttttctccttttggtgtaatgttttacaaatcctttggcctgagaactaatatgttaattgccttaaataaattaatagaaatctagtccgttaaaaa

SEQ ID NO: 126718 - DNA, 8016 bp, Artificial Sequence
  derived and/or modified sequence
atgtctgagatgagcagcttcctgcacatcggggacatcgtgtccctgtatgcagagggctctgtgaatggcttcatcagcaccctgggcctggtggatgacagatgtgtggtggagcctgctgctggggacctggacaacccccccaagaagttccgggactgcctcttcaaggtgtgccccatgaaccgctacagcgcccagaagcagtactggaaggccaagcagaccaagcaggacaaggagaagattgctgatgtggtgctgctgcagaagctgcagcacgccgcccagatggagcagaagcagaatgacacagagaacaagaaggtgcatggagatgtggtgaagtatggcagcgtcatccagctgctgcacatgaagagcaacaagtacctgactgtgaacaagaggctgcctgccctgctggagaagaatgccatgagggtgaccctggatgccactggaaatgaaggctcctggctgttcatccagcccttctggaagctgcggagcaatggagacaacgtggtggtgggggacaaggtgatcctgaaccctgtgaatgccggccagcccctgcacgccagcaactatgagctgagtgacaatgccggctgcaaggaggtgaacagcgtgaactgcaacacctcctggaagatcaacctcttcatgcagttccgggaccacctggaggaggtgctgaagggaggagatgtggtgcggctcttccacgccgagcaggagaagttcctgacctgtgatgagtacaagggcaagctgcaggtgttcctgcggaccaccctgcggcagagcgccaccagcgccaccagcagcaatgccctgtgggaggtggaggtggtgcaccacgacccctgccggggcggggccggccactggaatggcctgtaccgcttcaagcacctggccactggaaactacctggccgctgaggagaaccccagctacaagggagatgccagtgaccccaaggctgctggcatgggcgcccagggccgcactggaagaagaaatgctggggagaagatcaagtactgcctggtggccgtgccccatggaaatgacatcgccagcctgtttgagctggaccccaccaccctgcagaagacagacagctttgtgcccagaaattcctatgtgcggctgcggcacctgtgcaccaacacctggatccagagcaccaacgtgcccattgatattgaggaggagcggcccatccggctgatgctgggcacctgccccaccaaggaggacaaggaggcctttgccatcgtgtctgtgcctgtgtctgagatccgggacctggactttgccaatgatgccagctccatgctggccagcgctgtggagaagctgaatgaaggcttcatcagccagaatgacagaagatttgtgatccagctgctggaggacctggtgttctttgtgtctgatgtgcccaacaacggccagaatgtgctggacatcatggtgaccaagcccaaccgggagcggcagaagctgatgagggagcagaacatcctgaagcaggtgtttggcatcctgaaggcccccttccgggagaagggcggggagggccccctggtgcggctggaggagctgagtgaccagaagaatgccccctaccagcacatgttccggctgtgctacagagtgctgcggcacagccaggaggactacaggaagaaccaggagcacatcgccaagcagtttggcatgatgcagagccagatcggctatgacatcctggccgaggacaccatcacagccctgctgcacaacaacaggaagctgctggagaagcacatcaccaagacagaggtggagacctttgtgtccctggtgaggaagaaccgggagccccgcttcctggactacctgagtgacctgtgtgtgagcaaccacatcgccatccctgtgacccaggagctgatctgcaagtgtgtgctggaccccaagaacagcgacatcctgatcagaacagagctgcggcctgtgaaggagatggcccagagccatgagtacctgagcattgagtacagcgaggaggaggtgtggctgacctggacagacaagaacaatgagcaccacgagaagtctgtgcggcagctggcccaggaggcccgggctggaaatgcccatgatgaaaatgtgctgagctactaccgctaccagctgaagctgtttgccaggatgtgcctggaccggcagtacctggccattgatgagatcagccagcagctgggcgtggacctgatcttcctgtgcatggctgatgagatgctgccctttgacctgcgggccagcttctgccacctgatgctgcacgtgcacgtggaccgggacccccaggagctggtgacccctgtgaagtttgcccggctgtggacagagatccccacagccatcaccatcaaggactatgacagcaacctgaatgccagcagagatgacaagaagaacaagtttgccaacaccatggagtttgtggaggactacctgaacaacgtggtgtctgaggccgtgccctttgccaatgaggagaagaacaagctgacctttgaggtggtgtccctggcccacaacctgatctacttcggcttctacagcttcagcgagctgctgcggctgaccaggaccctgctgggcatcatcgactgtgtgcagggccccccagccatgctgcaggcctatgaggaccccggcggcaagaatgtgcggcgcagcatccagggcgtgggccacatgatgagcaccatggtgctgagcaggaagcagagcgtcttcagcgcccccagcctgtctgctggggccagcgctgctgagcccctggacaggagcaagtttgaggagaatgaagacatcgtggtgatggagaccaagctgaagatcctggagatcctgcagttcatcctgaatgtgcggctggactaccgcatctcctacctgctgagcgtcttcaagaaggagtttgtggaggtgttccccatgcaggacagcggggctgatggaacagccccagcctttgacagcaccacagccaacatgaacctggaccgcatcggggagcaggccgaggccatgtttggagtgggcaagaccagctccatgctggaggtggatgatgaaggaggccgcatgttcctgcgggtgctgatccacctgaccatgcatgactatgcccccctggtgtctggggccctgcagctgctcttcaagcacttcagccagaggcaggaggccatgcacaccttcaagcaggtgcagctgctgatcagcgcccaggatgtggagaactacaaggtgatcaagtctgagctggaccggctgcggaccatggtggagaagtctgagctgtgggtggacaagaagggcagcgggaaaggagaggaggtggaggccggggccgccaaggacaagaaggagcggcccacagatgaggagggcttcctgcaccccccaggagagaagagcagcgagaactaccagatcgtgaagggcatcctggagcggctgaacaagatgtgtggggtgggggagcagatgaggaagaagcagcagaggctgctgaagaacatggatgcccacaaggtgatgctggacctgctgcagatcccctatgacaagggagatgccaagatgatggagatcctgcgctacacccaccagttcctgcagaagttctgtgccggcaaccctggcaaccaggccctgctgcacaagcacctgcacctgttcctgaccccaggcctgctggaggccgagaccatgcagcacatcttcctgaacaactaccagctgtgcagcgagatcagcgagcctgtgctgcagcactttgtgcacctgctggccacccacggccgccacgtgcagtacctggacttcctgcacacagtcatcaaggccgagggcaagtatgtgaagaagtgccaggacatgatcatgacagagctgaccaatgctggagatgatgtggtggtgttctacaatgacaaggccagcctggcccacctgctggacatgatgaaggccgccagagatggagtggaggaccacagccccctgatgtaccacatcagcctggtggacctgctggccgcctgtgccgagggcaagaatgtgtacacagagatcaagtgcaccagcctgctgcccctggaggatgtggtgtctgtggtgacccatgaggactgcatcacagaggtgaagatggcctacgtgaactttgtgaaccactgctacgtggacacagaggtggagatgaaggagatctacaccagcaaccacatctggaccctgtttgagaacttcaccctggacatggcccgggtgtgcagcaagcgggagaagagggtggccgaccccaccctggagaagtatgtgctgtctgtggtgctggacaccatcaatgccttcttcagcagccccttcagcgagaacagcaccagcctgcagacccaccagaccatcgtggtgcagctgctgcagagcaccacccggctgctggagtgcccctggctgcagcagcagcacaagggctctgtggaggcctgcatccgcaccctggccatggtggccaagggccgggccatcctgctgcccatggacctggatgcccacatcagctccatgctgagcagcggggccagctgtgccgctgctgcccagagaaatgccagcagctacaaggccaccacccgggccttcccccgggtgacccccacagccaaccagtgggactacaagaacatcatcgagaagctgcaggacatcatcacagccctggaggagcggctgaagcccctggtgcaggccgagctgtctgtgctggtggatgtgctgcactggccagagctgctcttcctggagggcagcgaggcctaccagagatgtgagagcggcggcttcctgagcaagctgatccagcacaccaaggacctgatggagagcgaggagaagctgtgcatcaaggtgctgcggaccctgcagcagatgctgctgaagaagaccaagtatggagaccggggcaaccagctgaggaagatgctgctgcagaactacctgcagaacaggaagagcaccagcagaggagacctgcctgaccccatcggcaccggcctggaccctgactggagcgccatcgccgccacccagtgccgcctggacaaggagggcgccaccaagctggtgtgtgacctgatcaccagcaccaagaatgagaagatcttccaggagagcatcggcctggccatccacctgctggatggcggcaacacagagatccagaagagcttccacaacctgatgatgtctgacaagaagtctgagcgcttcttcaaggtgctgcatgacaggatgaagagggcccagcaggagaccaagagcacagtggccgtgaacatgaatgacctgggcagccagccccatgaagatcgggagcctgtggaccccaccaccaagggccgggtggccagcttcagcatccctggcagcagcagccgctacagcctgggccccagcctgcggcggggccacgaggtgtctgagcgggtgcagagcagcgagatgggcacctctgtgctgatcatgcagcccatcctgcgcttcctgcagctgctgtgtgagaaccacaacagagacctgcagaacttcctgcgctgccagaacaacaagaccaactacaacctggtgtgtgagaccctgcagttcctggacatcatgtgtggcagcaccactggaggcctgggcctgctgggcctgtacatcaatgaagataatgtgggcctggtgatccagaccctggagaccctgacagagtactgccagggcccctgccacgagaaccagacctgcatcgtgacccatgagagcaatggaattgacatcatcacagccctgatcctgaatgacatcagccccctgtgcaagtacaggatggacctggtgctgcagctgaaggacaatgccagcaagctgctgctggccctgatggagagcagacatgacagtgaaaatgctgagcgcatcctgatcagcctgcggccccaggagctggtggatgtgatcaagaaggcctacctgcaggaggaggagcgggagaacagcgaggtgagcccccgggaggtgggccacaacatctacatcctggccctgcagctgagccgccacaacaagcagctgcagcacctgctgaagcctgtgaagaggatccaggaggaggaggccgagggcatcagctccatgctgagcctgaacaacaagcagctgagccagatgctgaagagcagcgccccagcccaggaggaggaggaggaccccctggcctactatgagaaccacaccagccagatcgagatcgtgcggcaggaccgctccatggagcagatcgtgtttcctgtgcccggcatctgccagttcctgacagaggagaccaagcacaggctcttcaccaccacagagcaggatgagcagggcagcaaggtgtctgacttctttgaccagagcagcttcctgcacaatgagatggagtggcagaggaagctgcgctccatgcccctcatctactggttcagcaggaggatgaccctgtggggcagcatctccttcaacctggccgtgttcatcaacatcatcatcgccttcttctacccctacatggagggcgccagcactggagtgctggacagccccctcatcagcctgctcttctggatcctgatctgcttcagcattgctgccctcttcaccaagcgctacagcatccggcccctgattgtggccctgatcctgcggagcatctactacctgggcatcggccccaccctgaacatcctgggcgccctgaacctgaccaacaagatcgtgtttgtggtgtcctttgtgggcaacagaggcaccttcatccggggctacaaggccatggtgatggacatggagttcctgtaccacgtgggctacatcctgacctctgtgctgggcctgtttgcccacgagctgttctacagcatcctgctgtttgacctgatctaccgggaggagaccctcttcaacgtcatcaagtctgtgaccagaaatggccgcagcatcctgctgacagccctgctggccctgatcctggtgtacctgttcagcatcgtgggcttcctgttcctgaaggatgacttcatcctggaggtggaccggctgcccaacaaccacagcacagccagccccctgggcatgccccacggggctgctgcctttgtggacacctgcagcggggacaagatggactgtgtgtctggcctgtctgtgcctgaggtgctggaggaggaccgggagctggacagcacagagcgggcctgtgacaccctgctgatgtgcatcgtgacagtgatgaaccacggcctgagaaatggaggaggagtgggggacatcctgaggaagcccagcaaggatgagagcctcttccctgcccgggtggtgtatgacctgctcttcttcttcatcgtcatcatcatcgtgctgaacctgatctttggagtcatcatcgacacctttgctgacctgcggtctgagaagcagaagaaggaggagatcctgaagaccacctgcttcatctgtggcctggagcgggacaagtttgacaacaagacagtgtcctttgaggagcacatcaagctggagcacaacatgtggaactacctgtacttcatcgtgctggtgcgggtgaagaacaagacagactacacaggccctgagagctatgtggcccagatgatcaagaacaagaacctggactggttccccaggatgagggccatgagcctggtgtccaatgaaggagagggggagcagaatgagatccgcatcctgcaggacaagctgaacagcaccatgaagctggtgagccacctgacagcccagctgaatgagctgaaggagcagatgacagagcagaggaagaggcggcagaggctgggctttgtggatgtgcagaactgcatcagcaggtag

SEQ ID NO: 126719 - DNA, 8016 bp, Artificial Sequence
  derived and/or modified sequence
atgagcgagatgagcagcttcctgcacatcggcgacatcgtgagcctgtacgcggaggggtccgtgaacggctttattagtactctgggattagtggatgatcgctgcgtggtagaacctgctgccggagacctagacaacccgcctaaaaagtttcgggattgtctctttaaggtttgccctatgaatagatactcagctcaaaaacagtactggaaagctaaacagacaaagcaggacaaggagaagatagccgacgtggtcttgctccagaagctgcagcacgcggctcaaatggaacaaaagcaaaacgacaccgaaaacaagaaagtgcacggtgatgtggtgaagtatggcagcgtaatacagttgctgcatatgaagtcaaacaagtatctcaccgtcaacaagagactacccgcactgttggaaaaaaatgcgatgagggtgaccctggacgctacgggcaacgagggctcctggctgttcattcagcccttttggaaactccggtctaatggcgataatgtcgtggtgggcgacaaggttattttaaatcctgtgaatgccggtcagccattacacgcctccaactacgagctgagcgataacgctggctgcaaggaggtcaattctgtgaactgcaatacgtcatggaaaattaatctgtttatgcagtttcgagaccacctggaagaggtcctcaaggggggcgatgtcgtcaggctgttccatgcggaacaagaaaaatttctcacatgcgacgaatacaagggtaagttgcaggtctttcttcggacgacccttaggcagtccgccacatctgcgacttcatctaacgctttatgggaggtggaggtcgtccatcacgatccctgtcgggggggcgccggtcactggaacggattataccgcttcaagcatcttgctacaggaaactatttagccgctgaggagaatccttcctataagggcgacgcttccgatcccaaggcagctgggatgggggctcagggacggaccggtcggcgcaacgctggagagaaaatcaagtactgccttgttgccgtcccccacggaaacgacatcgcctccctgttcgaactggatcctacaaccctccagaagaccgatagcttcgtgcctcggaactcctatgtccggctgcgacacttgtgtacaaatacttggattcagtcaacgaacgtacctattgatatcgaggaagaacgtcctatcagacttatgctaggcacttgtccaacgaaggaagacaaagaagcttttgccatcgtgtctgtgccggtgtctgagataagagatctggattttgcgaacgacgctagtagcatgctggccagtgctgtcgaaaagcttaatgagggcttcatctcccaaaatgacagaagattcgtgatccaactgcttgaggacctggtgttctttgtctctgatgttcctaataatggccagaacgttttagatatcatggtgaccaaaccgaatagggagaggcagaagctgatgagggaacaaaatattctaaagcaggtatttggcattctgaaggccccatttcgggagaaaggaggtgaagggcctttagtcagactcgaggaactgtcagatcagaaaaacgcaccttaccagcatatgtttcgcctctgttaccgggtgttaaggcactcccaggaagattatcgaaaaaatcaagagcatattgcgaagcaattcggaatgatgcagtctcagatcggttatgatatactggccgaagacacgatcaccgctttactgcacaataataggaagttgctggaaaaacatattactaaaacagaggtggagacatttgtcagcctagtccgcaaaaatcgcgagcctcggtttttagattacttgagcgacctgtgtgtgagtaaccatattgccattccagtgactcaggagcttatatgcaagtgcgtgctggatccaaagaactccgatatactcatcagaactgaactgcgcccggtcaaggaaatggcccagagccacgagtacctgagtattgaatatagcgaggaagaagtgtggctcacctggacagacaaaaataacgaacatcacgagaaatcggtacgtcaactagctcaagaggctcgggcaggaaacgctcacgacgagaatgtcctgtcctattatcggtatcagctgaaactcttcgcccgcatgtgtctggatcgtcagtacctggctattgatgagataagccaacagcttggtgtggatcttatcttcttatgtatggcagatgaaatgttgcccttcgacctgcgcgcctcattttgtcacctcatgttacacgtgcacgtcgatagggacccccaggaactcgtgactccagtgaagttcgcaaggctctggaccgagataccaacagcaattacaattaaagactacgactctaacctgaacgcgagcagagacgataaaaaaaacaagttcgccaatacaatggagttcgtggaggactacctcaataatgtggtttctgaagccgtgccttttgcgaacgaagagaaaaataaacttacttttgaggtggtctcactggcgcataacctcatctattttgggttctatagtttttctgagctgttgaggctcaccaggacgttgctgggcatcatcgattgcgtacagggaccacctgcaatgctccaggcttacgaagaccccggagggaagaacgtccgacgcagcatccaaggtgtggggcatatgatgagcacaatggtcttaagcaggaagcagtccgtgttctccgcacccagtctcagcgccggcgccagtgcagccgagccactggacagatctaagtttgaggagaatgaagatattgtcgtgatggagacaaagctgaagatccttgaaatattacagtttatacttaatgtgcgcctcgattacagaatctcatatttgctgagtgtgttcaaaaaggaattcgtcgaagtcttccctatgcaggacagtggagctgacgggacggcacctgcgttcgatagtacaaccgctaacatgaacttggaccggattggtgaacaggctgaagcaatgttcggagtaggcaaaaccagttctatgctggaggtcgatgacgagggcgggcggatgttcctccgtgtcctcattcacttgactatgcacgattatgcgcccctcgtttcaggcgctctccaactcttgtttaaacactttagtcagagacaggaggccatgcatacttttaagcaagtgcagctcctaatcagcgctcaggacgtggaaaactacaaggtcatcaagtccgagctagaccggctgaggaccatggtagaaaaatcagaactctgggtcgataaaaagggttcagggaagggggaagaggtcgaagcgggagcggcaaaagataagaaagagcgacctaccgacgaggaggggtttctccatcccccaggggagaaaagttcggaaaattaccagattgtgaaggggatcctggagaggctcaacaaaatgtgtggcgtcggcgagcagatgcgaaagaaacaacaaaggctcctgaagaatatggacgcccacaaagtgatgctggatctcttacagataccatatgacaagggtgatgccaagatgatggaaattttacgttacacacaccagtttcttcaaaagttctgtgctggtaatcccggcaaccaggccctgctccataaacacctgcatctcttcttaactccaggactactggaagcggaaacaatgcaacatatcttccttaataactatcagctctgctccgagattagcgagcccgtactacagcacttcgtacacctattagctacccacgggcggcatgtccagtacctggatttcttgcacacagtgatcaaagccgagggtaagtacgtgaagaaatgtcaggacatgatcatgacagagctgactaacgcaggcgatgatgtcgtagtcttctacaatgataaggcttcgctggctcatctgctggatatgatgaaagctgctagggatggggtggaagaccactcccccttgatgtaccacatcagtctcgtggacctccttgctgcatgcgccgaggggaaaaatgtttacacagagatcaaatgcaccagcttattgccactggaggatgtcgtttctgtagttacccacgaagattgtattaccgaagtcaagatggcttatgttaacttcgtgaatcattgctatgtggacaccgaggtggagatgaaagaaatctatacgagcaatcatatctggacacttttcgagaacttcaccctggatatggctcgggtttgttctaagcgagaaaaacgcgtggcggacccaacattggaaaaatacgttctgtctgtcgtgctggatacaatcaatgcctttttcagttctccgttctccgagaatagtacttccctgcaaactcatcagaccatagttgtacagttactgcagagcactacccgattgcttgagtgtccatggctgcagcagcaacataaggggtctgtcgaagcgtgtatccgcacactggctatggtggcaaagggcagagctatcttgctgccgatggacttggatgcgcacatcagctcgatgctttcatcaggcgcttcctgcgccgctgcggcgcagaggaacgctagtagctacaaagccactacccgggcttttcctagggtgacacctacggccaaccaatgggactacaaaaatatcattgaaaaactgcaggatattataaccgccctcgaagagcggctcaagccactcgttcaggctgagttaagtgtactggtggatgtattgcactggcccgaactgttgttcctggagggatctgaggcctaccagcgatgtgagtcgggaggttttctgagcaaactcatccagcataccaaggatctgatggaatccgaggagaaactgtgtataaaagtgctcagaaccttgcagcagatgcttctgaagaagaccaagtatggagatagagggaatcagctgcgcaagatgctactgcaaaactatctacaaaacaggaagtccactagcaggggggatctacctgatcctattggaactggtcttgacccagattggtctgccattgccgccacccagtgcagactcgataaggagggggcaacaaagctggtgtgtgacctaatcacatctactaagaatgagaagatcttccaggaatctataggcctggcgattcatctcttagacggcggcaataccgagatccagaaaagctttcacaacttaatgatgagtgacaagaagtctgagcgcttctttaaggtgttacatgataggatgaaacgggcccaacaggaaaccaagtccaccgttgccgtaaacatgaatgatttgggaagccaaccccacgaggacagggagcccgttgatccaaccacaaagggaagagtggcttcctttagcatcccgggatcttctagtcgctatagtctgggtcccagtctgagaaggggccacgaggttagtgagagagtgcagagctccgaaatggggacctccgtcctcatcatgcagcctatcttgcgcttcctccagctcctatgcgagaatcacaaccgggacctgcaaaattttctaagatgtcaaaataataagacaaactataacttggtttgtgagacactccagtttctagatatcatgtgtgggtctactacagggggactgggcctgctcgggctgtatataaatgaggacaatgtgggcctggtgatccagaccctggaaaccctcacggagtactgtcaaggaccttgtcacgagaatcagacttgtattgtcacccatgaatcaaacgggattgatatcattacagcgcttatcctgaacgatatttcccccctgtgcaaatatagaatggacttagtgctccagcttaaagacaacgcatcaaagcttcttctcgcattaatggaatcacggcacgactccgaaaatgctgagcgtattctgatatctctccgtccccaggaactggtggacgtgatcaaaaaggcttacctccaagaggaggagcgggaaaactctgaagtttctccaagggaggtcggacacaacatctatatcctcgcgttgcaactctcacgtcacaacaaacaacttcagcacctgctgaagccagttaagcggatccaggaggaagaagcggagggcatcagcagcatgctgtctctgaacaacaagcaactgtctcagatgctaaagtcatctgcacctgctcaagaagaagaggaagatccgctcgcctactacgagaaccatacgtctcagatagagatcgttaggcaggacagatcaatggaacagatcgtgttcccggtgcccggcatttgccaattcctgaccgaggagacaaaacataggctcttcaccacaactgagcaagacgagcagggatctaaagtttccgatttttttgatcaaagttcattcctgcacaacgaaatggagtggcagaggaaactcagatcaatgccactgatatactggttttcccggagaatgacactgtggggaagcatcagcttcaaccttgccgtgtttatcaatatcatcattgcgttcttttacccttatatggagggtgcttccacgggagtcttggactcaccattgatctcactcctgttctggatccttatctgcttctcgattgcagcactgttcaccaaacggtacagtattcggccactgatcgtcgccctcatcctgaggtcaatctactacttgggcataggccccaccctgaacattttaggtgcccttaatctaaccaacaaaattgtattcgttgtgagctttgttggcaatagaggcacgtttattagaggatataaagcaatggtgatggacatggagtttctctaccacgtgggctatatactgaccagtgtcttgggactatttgctcatgagctgttttatagtatactgctttttgatcttatttaccgtgaagagactctctttaatgtaatcaagagcgtgacacggaatgggaggagcattctcttgactgccctgctggccctgatcctagtgtacctgtttagcatagtggggtttttatttctcaaggacgacttcatcctggaagtggatcggctgcctaacaaccattctaccgctagccctctggggatgccacatggagccgcagccttcgtggacacctgcagcggcgacaagatggactgcgtctctggtctgtccgtccccgaagtcctcgaggaagacagggaattggacagtacagagcgagcctgtgacacactcctcatgtgcatcgtcacagtgatgaaccacggactgcgtaacggcggaggcgttggtgacatcttgagaaaaccctcaaaggacgaatccctattccctgcaagagtagtgtatgaccttctgttcttttttattgtgatcatcatcgtactgaatttgatctttggagtgatcatcgatactttcgcagaccttagatccgagaagcagaaaaaagaagagatccttaagactacttgcttcatctgcgggctcgaaagggacaagttcgataataaaacagtgtcctttgaagagcacataaaacttgaacacaacatgtggaactacttatatttcatagtgctggtgcgggtcaagaacaagactgattataccggaccagagtcatacgtggcccagatgattaagaataagaaccttgactggttccctcgcatgcgggccatgtcattggtgtccaatgagggggaaggtgaacaaaatgagatccggatacttcaggataagctgaacagtaccatgaagctggttagccatctgacggcacagctcaatgaactgaaggagcaaatgacagagcaacgcaaaaggaggcagagacttggatttgtggacgtgcagaactgcataagccggtag

SEQ ID NO: 126720 - DNA, 8015 bp, Artificial Sequence
  derived and/or modified sequence
atgtctgagatgtctagtttcctacatattggtgatatcgtgagcctgtatgccgaagggtcagttaatgggtttatctctactttagggttggtggacgacagatgtgtggtggaaccagctgctggggaccttgacaatcccccaaaaaaattccgcgactgcctttttaaagtgtgtcccatgaaccgctactcagcccagaaacagtactggaaagccaagcagacaaaacaggacaaggaaaagattgccgacgtggtactcctgcaaaaactccagcacgcagcccagatggaacagaaacagaatgatacggagaacaagaaggttcacggcgacgtggtaaagtatggatcagtgatccaactgcttcacatgaaatcgaataaatacctaaccgtgaacaagcggttacctgccttgctggagaaaaacgccatgagggtgaccctggacgctacaggcaatgaaggcagttggttgtttatacaacctttctggaagctgcgcagcaacggagacaacgttgttgttggggacaaggtaattctgaaccccgtgaacgccggacagcctctgcatgccagcaattacgaactgtccgataacgccggatgtaaggaggtaaattcagtgaactgcaacacatcctggaaaatcaatctgtttatgcagttccgcgaccacctagaggaagtgctgaaggggggagacgtggtaaggctgttccacgccgagcaggaaaaatttctgacatgcgacgaatataagggcaaacttcaagtgtttttaaggactaccctgaggcaatcggcaacctctgccacatcaagtaacgccctgtgggaggtggaagtggtgcaccacgatccttgccgcggtggggctggtcattggaatggactctatcggttcaagcatctggccaccggcaactatctcgccgctgaggaaaatcccagttataaaggggatgcttcggatcccaaagccgctgggatgggtgcacaaggcaggacaggacggagaaatgccggtgagaaaatcaaatactgcctcgttgcagtgccccatggaaacgatatcgcatctctgtttgagctggaccccaccactctccagaaaaccgactcctttgtcccgagaaactcatacgtgagactacggcatttgtgtacaaatacgtggattcagagtacaaacgtgccgattgacatcgaggaggagaggcccattcgtctgatgctgggtacttgtcccacaaaggaggacaaagaagcctttgcaatcgtctccgtacctgtgtctgagatccgggacctggacttcgcaaacgacgcgtctagtatgttagccagcgccgtagagaaattgaatgagggatttatttctcagaatgacaggcgttttgtgatccagttgctcgaagacctggtgttttttgtttctgatgtgcccaacaatggccagaacgtgttggatattatggttactaaacctaacagggagcgccagaaactgatgcgggagcagaacatcctcaaacaagtctttggaatccttaaggctcctttcagagaaaagggtggagagggacccctggtgcgccttgaagaactgtcagatcagaagaatgccccttatcagcatatgttccgactgtgttatagggtccttcgccacagccaggaagactatcgtaagaaccaggaacatattgccaaacagtttggaatgatgcagtcccaaattggctacgatatcctggctgaggacacaataaccgccctactccacaataaccgtaaactgttagagaagcacatcactaagactgaagtggaaactttcgtttccctggtgcgcaagaaccgcgagccaaggtttctggattacttgtctgatctgtgtgtaagcaaccacattgctattcctgtaacccaggagctaatctgcaaatgcgtcctggatccaaagaacagcgacattctgattagaactgagctgcgtccagtgaaggagatggcccagtcccacgagtacctgtctattgagtacagtgaggaagaggtctggttgacttggaccgataaaaataatgagcatcacgagaaatctgtgcgccagctggcacaagaggcccgtgccggaaacgcacatgatgagaatgtcctcagctattatcggtaccagcttaaactgttcgccagaatgtgtctggatagacagtatctcgcaatcgatgagatctcacagcagttaggagttgatctcattttcctgtgcatggcagacgagatgctccccttcgaccttcgtgcgtcgttctgccacttgatgttgcacgttcatgttgaccgggatcctcaggagttggtgaccccagtcaagttcgccaggctgtggacggagatacctaccgccataaccatcaaggactatgattcaaatttgaatgctagccgagatgacaaaaaaaacaagttcgctaatactatggaattcgttgaagactatctgaataatgtggtaagcgaagccgtcccatttgctaacgaagaaaagaataagttgacattcgaagtggtcagtctagcccacaatttgatatacttcggattctatagcttctcggaactccttcgcttgactaggaccttactgggcataatcgactgtgtgcagggtccccctgccatgctgcaggcttacgaagacccgggtgggaagaacgtgagacgatcaatccagggcgttggacacatgatgagcacaatggtgctcagtcggaaacagtccgttttcagcgcaccaagcctgagtgccggagcatctgccgcagaacctctggacagatctaagtttgaggaaaacgaagatattgtcgtaatggagactaagctgaagattcttgagatccttcagttcatacttaacgtccggctcgattatcggatatcgtatctgctgagcgttttcaagaaagaattcgtggaagtgttccctatgcaggactccggtgccgacggtaccgcacccgctttcgacagtaccactgccaatatgaatttagaccgaattggggaacaggcggaggctatgttcggggtgggtaagactagcagcatgctggaggtggacgatgaaggcggtcggatgttcctgcgggttctgatccatctgaccatgcacgattatgcaccacttgtgtcgggcgctctccaactgttgttcaagcatttttcccagcgccaggaggcaatgcacacctttaaacaagttcaattattgatcagcgcccaagatgtggagaattacaaagtcatcaagtccgagctggaccggctccgaacgatggtggaaaagagcgagctctgggtggataaaaagggcagcggcaagggggaggaagtagaagccggagctgccaaagataagaaagagcgtcccaccgacgaagaggggttcctgcaccctcctggcgagaaaagttctgagaattaccagatcgtgaaaggcattctggagaggctgaacaagatgtgcggcgtcggcgaacagatgcggaagaaacaacagcgcctcctgaagaacatggacgcccacaaggttatgctggatctgctccagattccctatgacaaaggggacgctaagatgatggagatcctgagatacacccaccagtttctgcagaagttctgtgccggtaatcctgggaatcaagctttgctgcataagcatctgcatctatttctcacccctgggctgctggaggcggagaccatgcagcacatctttctgaacaactaccaactgtgctccgagattagcgaaccagtactacaacacttcgtgcacctcttggcaacacacgggagacacgtacagtacctggactttctgcacactgtgatcaaagcggagggcaagtacgtcaagaagtgccaagacatgattatgaccgagctgactaacgccggagacgatgtagtcgtgttctacaatgacaaggcctctctcgctcatctgttggatatgatgaaagcagctcgcgacggggtagaggaccacagccctttaatgtatcatatctcgcttgtggacctgctggccgcttgtgctgagggcaagaacgtgtatacagagattaagtgcacttctttgctgccactggaagacgtggtgtccgtggtgacacatgaggactgtattaccgaggttaaaatggcgtacgtcaatttcgtgaaccattgttacgtggatacagaagtggagatgaaggagatctatacttctaaccacatttggacactgtttgagaactttaccctcgatatggcgcgagtatgttccaagagagaaaagcgagttgcggaccccactctggaaaagtacgtactttccgtggtactggatactatcaacgctttcttttcctcacctttttccgagaattcgacaagcctacagacacaccagaccattgtagtccaattgctccagtccactacaagacttctggaatgtccctggttgcagcagcagcacaaagggtccgtggaagcctgcatccgaacactggccatggtcgccaaagggagggccattctattgccaatggatctggacgcccacatctcttccatgctgtctagcggtgccagttgcgccgcagccgcacaacggaatgcctcatcctataaagctaccactagggccttcccaagggtcacgcccaccgcaaaccaatgggactacaaaaacatcattgagaagctgcaggacatcataaccgctctggaggagcgactgaaacccctggtgcaggctgagctgtctgtgctggtcgacgtgttgcactggccagaactcctatttctggagggaagcgaagcctaccagagatgcgaatctggaggattcttgtcgaaactgatccaacacacaaaagacctgatggaatctgaggagaagttatgtattaaagtgttaagaacactacagcagatgttactcaagaagacgaaatatggcgatcgtgggaaccagctgcgcaagatgctcctccagaactacctgcaaaaccgtaaatccactagtaggggcgacctccccgatccgatcggcacgggccttgatccagattggtccgccatcgctgctactcagtgtcggctcgacaaagagggggctaccaagctggtatgtgatctcatcacttccactaagaacgaaaaaatctttcaagagagcataggcctggctattcacctactggatggcggtaatacagagatccaaaagtctttccacaacttgatgatgtcggataagaaatccgagcgtttcttcaaggtgcttcacgatagaatgaagagggctcaacaggagacgaagagcaccgttgcagtgaacatgaacgacctcgggtcccaaccccacgaggaccgtgagcctgtcgaccccactactaaaggacgcgtagcgtcattttctatccctgggagctccagtaggtattccttaggaccatccctgcgtcgaggacacgaagtgagcgaacgggtgcagtcatcagaaatggggacatccgtgctcatcatgcagccaatcctcaggtttctccagttactgtgcgagaaccataaccgagacctgcagaacttcctgcgatgtcaaaacaacaagacaaattacaatctggtttgtgagacactgcagttcctcgatatcatgtgtggcagcacgaccggcggattgggactcctaggcctttatatcaacgaagacaatgttggccttgtgatccagactttagagactttaacagaatactgccaggggccatgtcatgagaatcagacatgtatcgtgactcacgaatcaaacggcattgatataatcaccgccctgatcctgaatgatatttctcctctttgcaagtatagaatggatctggtcctccagctaaaagataacgcaagcaagctgctgcttgcacttatggaatcccgacacgacagtgaaaacgctgagcggatcttgatttcacttagaccacaagagctagttgatgtgatcaaaaaggcctacttgcaggaggaggagcgcgagaacagcgaggtgtcccctagggaggttggacacaacatttacattttagccctgcaactcagcagacacaacaagcagctgcagcacctcctaaagccagtgaagcgcatccaggaggaggaggcggaaggcatttctagcatgctaagcctgaataacaaacaactgagccagatgttgaaaagttctgctcctgcccaggaggaagaagaagacccactcgcctactatgaaaaccacacttctcagatcgagatcgtgagacaagatagatccatggagcaaatcgtgtttccagtcccgggtatttgtcagttcctgacagaggaaacaaagcaccgactcttcacaacaactgagcaggatgaacagggatcaaaagtgagcgacttctttgaccagtcctctttcctccacaacgagatggaatggcagagaaagctccggagcatgccactgatctattggttttctaggcggatgacattatgggggtctatctctttcaatttggccgtgtttatcaacattatcatcgcgttcttttacccgtacatggagggcgcttctactggtgtccttgactctcctctgattagtctgctcttctggattttgatttgcttctccatagccgctctgttcactaagcgctatagtattaggcctctgatcgtggccctaatactgcggagtatctactatttgggcattggtcctacactgaatattctgggtgcactcaatctcacaaacaagatcgtgttcgtcgtttcttttgttggcaaccgaggaacatttatcagagggtataaggcaatggttatggatatggaatttttgtatcacgtaggttacatattgacctccgtgctgggcctgtttgcacacgagcttttttactctatcctcctgttcgatctgatttacagggaagagacactctttaatgtgataaagtcggtgactagaaacggaaggtccattctcctgaccgcgctgctggcactgattctggtttatctcttctctatagtcgggtttctttttcttaaggacgattttatcctggaggtcgacaggttgccaaataatcacagtacagctagccctctggggatgcctcatggcgctgcagcttttgttgatacctgttccggcgacaagatggactgcgtctctggattgtctgtaccagaggtactcgaggaggacagagagcttgattccacggaacgtgcatgcgatacgctgttgatgtgcatagtgacagtgatgaaccatggcctccgcaatgggggtggggttggtgacatcttgcggaagcccagcaaagatgagtcactgtttcctgccagagtagtttatgatctactgttcttctttattgtgataatcatcgttctgaaccttatttttggagtaatcattgacacctttgctgatctgcgaagcgaaaagcagaaaaaagaggagattctgaaaaccacttgttttatctgcgggctggagcgcgataagttcgacaataaaacagttagcttcgaggagcacattaaactggagcacaatatgtggaactacctctacttcattgtgctagtgcgagtcaaaaacaaaacagactacacgggcccagaaagctacgtggcccagatgatcaagaacaagaatttggactggttccctcggatgagagccatgagtcttgtctctaacgagggggagggtgaacagaatgagataagaatacttcaagataaactcaacagcacaatgaagctggtctcacatttgacagctcagctgaacgaactgaaagaacagatgaccgaacagcgcaagaggcgccagaggcttgggttcgtggatgtgcagaattgtatctctcgtta

SEQ ID NO: 126721 - DNA, 8016 bp, Artificial Sequence
  derived and/or modified sequence
atgagcgagatgagcagcttcctgcacatcggcgacatcgtgagcctgtacgccgagggcagcgtgaacggcttcatcagcaccctgggcctggtggacgacagatgcgtggtggagcccgccgccggcgacctggacaacccccccaagaagttcagagactgcctgttcaaggtgtgccccatgaacagatacagcgcccagaagcagtactggaaggccaagcagaccaagcaggacaaggagaagatcgccgacgtggtgctgctgcagaagctgcagcacgccgcccagatggagcagaagcagaacgacaccgagaacaagaaggtgcacggcgacgtggtgaagtacggcagcgtgatccagctgctgcacatgaagagcaacaagtacctgaccgtgaacaagagactgcccgccctgctggagaagaacgccatgagagtgaccctggacgccaccggcaacgagggcagctggctgttcatccagcccttctggaagctgagaagcaacggcgacaacgtggtggtgggcgacaaggtgatcctgaaccccgtgaacgccggccagcccctgcacgccagcaactacgagctgagcgacaacgccggctgcaaggaggtgaacagcgtgaactgcaacaccagctggaagatcaacctgttcatgcagttcagagaccacctggaggaggtgctgaagggcggcgacgtggtgagactgttccacgccgagcaggagaagttcctgacctgcgacgagtacaagggcaagctgcaggtgttcctgagaaccaccctgagacagagcgccaccagcgccaccagcagcaacgccctgtgggaggtggaggtggtgcaccacgacccctgcagaggcggcgccggccactggaacggcctgtacagattcaagcacctggccaccggcaactacctggccgccgaggagaaccccagctacaagggcgacgccagcgaccccaaggccgccggcatgggcgcccagggcagaaccggcagaagaaacgccggcgagaagatcaagtactgcctggtggccgtgccccacggcaacgacatcgccagcctgttcgagctggaccccaccaccctgcagaagaccgacagcttcgtgcccagaaacagctacgtgagactgagacacctgtgcaccaacacctggatccagagcaccaacgtgcccatcgacatcgaggaggagagacccatcagactgatgctgggcacctgccccaccaaggaggacaaggaggccttcgccatcgtgagcgtgcccgtgagcgagatcagagacctggacttcgccaacgacgccagcagcatgctggccagcgccgtggagaagctgaacgagggcttcatcagccagaacgacagaagattcgtgatccagctgctggaggacctggtgttcttcgtgagcgacgtgcccaacaacggccagaacgtgctggacatcatggtgaccaagcccaacagagagagacagaagctgatgagagagcagaacatcctgaagcaggtgttcggcatcctgaaggcccccttcagagagaagggcggcgagggccccctggtgagactggaggagctgagcgaccagaagaacgccccctaccagcacatgttcagactgtgctacagagtgctgagacacagccaggaggactacagaaagaaccaggagcacatcgccaagcagttcggcatgatgcagagccagatcggctacgacatcctggccgaggacaccatcaccgccctgctgcacaacaacagaaagctgctggagaagcacatcaccaagaccgaggtggagaccttcgtgagcctggtgagaaagaacagagagcccagattcctggactacctgagcgacctgtgcgtgagcaaccacatcgccatccccgtgacccaggagctgatctgcaagtgcgtgctggaccccaagaacagcgacatcctgatcagaaccgagctgagacccgtgaaggagatggcccagagccacgagtacctgagcatcgagtacagcgaggaggaggtgtggctgacctggaccgacaagaacaacgagcaccacgagaagagcgtgagacagctggcccaggaggccagagccggcaacgcccacgacgagaacgtgctgagctactacagataccagctgaagctgttcgccagaatgtgcctggacagacagtacctggccatcgacgagatcagccagcagctgggcgtggacctgatcttcctgtgcatggccgacgagatgctgcccttcgacctgagagccagcttctgccacctgatgctgcacgtgcacgtggacagagacccccaggagctggtgacccccgtgaagttcgccagactgtggaccgagatccccaccgccatcaccatcaaggactacgacagcaacctgaacgccagcagagacgacaagaagaacaagttcgccaacaccatggagttcgtggaggactacctgaacaacgtggtgagcgaggccgtgcccttcgccaacgaggagaagaacaagctgaccttcgaggtggtgagcctggcccacaacctgatctacttcggcttctacagcttcagcgagctgctgagactgaccagaaccctgctgggcatcatcgactgcgtgcagggcccccccgccatgctgcaggcctacgaggaccccggcggcaagaacgtgagaagaagcatccagggcgtgggccacatgatgagcaccatggtgctgagcagaaagcagagcgtgttcagcgcccccagcctgagcgccggcgccagcgccgccgagcccctggacagaagcaagttcgaggagaacgaggacatcgtggtgatggagaccaagctgaagatcctggagatcctgcagttcatcctgaacgtgagactggactacagaatcagctacctgctgagcgtgttcaagaaggagttcgtggaggtgttccccatgcaggacagcggcgccgacggcaccgcccccgccttcgacagcaccaccgccaacatgaacctggacagaatcggcgagcaggccgaggccatgttcggcgtgggcaagaccagcagcatgctggaggtggacgacgagggcggcagaatgttcctgagagtgctgatccacctgaccatgcacgactacgcccccctggtgagcggcgccctgcagctgctgttcaagcacttcagccagagacaggaggccatgcacaccttcaagcaggtgcagctgctgatcagcgcccaggacgtggagaactacaaggtgatcaagagcgagctggacagactgagaaccatggtggagaagagcgagctgtgggtggacaagaagggcagcggcaagggcgaggaggtggaggccggcgccgccaaggacaagaaggagagacccaccgacgaggagggcttcctgcacccccccggcgagaagagcagcgagaactaccagatcgtgaagggcatcctggagagactgaacaagatgtgcggcgtgggcgagcagatgagaaagaagcagcagagactgctgaagaacatggacgcccacaaggtgatgctggacctgctgcagatcccctacgacaagggcgacgccaagatgatggagatcctgagatacacccaccagttcctgcagaagttctgcgccggcaaccccggcaaccaggccctgctgcacaagcacctgcacctgttcctgacccccggcctgctggaggccgagaccatgcagcacatcttcctgaacaactaccagctgtgcagcgagatcagcgagcccgtgctgcagcacttcgtgcacctgctggccacccacggcagacacgtgcagtacctggacttcctgcacaccgtgatcaaggccgagggcaagtacgtgaagaagtgccaggacatgatcatgaccgagctgaccaacgccggcgacgacgtggtggtgttctacaacgacaaggccagcctggcccacctgctggacatgatgaaggccgccagagacggcgtggaggaccacagccccctgatgtaccacatcagcctggtggacctgctggccgcctgcgccgagggcaagaacgtgtacaccgagatcaagtgcaccagcctgctgcccctggaggacgtggtgagcgtggtgacccacgaggactgcatcaccgaggtgaagatggcctacgtgaacttcgtgaaccactgctacgtggacaccgaggtggagatgaaggagatctacaccagcaaccacatctggaccctgttcgagaacttcaccctggacatggccagagtgtgcagcaagagagagaagagagtggccgaccccaccctggagaagtacgtgctgagcgtggtgctggacaccatcaacgccttcttcagcagccccttcagcgagaacagcaccagcctgcagacccaccagaccatcgtggtgcagctgctgcagagcaccaccagactgctggagtgcccctggctgcagcagcagcacaagggcagcgtggaggcctgcatcagaaccctggccatggtggccaagggcagagccatcctgctgcccatggacctggacgcccacatcagcagcatgctgagcagcggcgccagctgcgccgccgccgcccagagaaacgccagcagctacaaggccaccaccagagccttccccagagtgacccccaccgccaaccagtgggactacaagaacatcatcgagaagctgcaggacatcatcaccgccctggaggagagactgaagcccctggtgcaggccgagctgagcgtgctggtggacgtgctgcactggcccgagctgctgttcctggagggcagcgaggcctaccagagatgcgagagcggcggcttcctgagcaagctgatccagcacaccaaggacctgatggagagcgaggagaagctgtgcatcaaggtgctgagaaccctgcagcagatgctgctgaagaagaccaagtacggcgacagaggcaaccagctgagaaagatgctgctgcagaactacctgcagaacagaaagagcaccagcagaggcgacctgcccgaccccatcggcaccggcctggaccccgactggagcgccatcgccgccacccagtgcagactggacaaggagggcgccaccaagctggtgtgcgacctgatcaccagcaccaagaacgagaagatcttccaggagagcatcggcctggccatccacctgctggacggcggcaacaccgagatccagaagagcttccacaacctgatgatgagcgacaagaagagcgagagattcttcaaggtgctgcacgacagaatgaagagagcccagcaggagaccaagagcaccgtggccgtgaacatgaacgacctgggcagccagccccacgaggacagagagcccgtggaccccaccaccaagggcagagtggccagcttcagcatccccggcagcagcagcagatacagcctgggccccagcctgagaagaggccacgaggtgagcgagagagtgcagagcagcgagatgggcaccagcgtgctgatcatgcagcccatcctgagattcctgcagctgctgtgcgagaaccacaacagagacctgcagaacttcctgagatgccagaacaacaagaccaactacaacctggtgtgcgagaccctgcagttcctggacatcatgtgcggcagcaccaccggcggcctgggcctgctgggcctgtacatcaacgaggacaacgtgggcctggtgatccagaccctggagaccctgaccgagtactgccagggcccctgccacgagaaccagacctgcatcgtgacccacgagagcaacggcatcgacatcatcaccgccctgatcctgaacgacatcagccccctgtgcaagtacagaatggacctggtgctgcagctgaaggacaacgccagcaagctgctgctggccctgatggagagcagacacgacagcgagaacgccgagagaatcctgatcagcctgagaccccaggagctggtggacgtgatcaagaaggcctacctgcaggaggaggagagagagaacagcgaggtgagccccagagaggtgggccacaacatctacatcctggccctgcagctgagcagacacaacaagcagctgcagcacctgctgaagcccgtgaagagaatccaggaggaggaggccgagggcatcagcagcatgctgagcctgaacaacaagcagctgagccagatgctgaagagcagcgcccccgcccaggaggaggaggaggaccccctggcctactacgagaaccacaccagccagatcgagatcgtgagacaggacagaagcatggagcagatcgtgttccccgtgcccggcatctgccagttcctgaccgaggagaccaagcacagactgttcaccaccaccgagcaggacgagcagggcagcaaggtgagcgacttcttcgaccagagcagcttcctgcacaacgagatggagtggcagagaaagctgagaagcatgcccctgatctactggttcagcagaagaatgaccctgtggggcagcatcagcttcaacctggccgtgttcatcaacatcatcatcgccttcttctacccctacatggagggcgccagcaccggcgtgctggacagccccctgatcagcctgctgttctggatcctgatctgcttcagcatcgccgccctgttcaccaagagatacagcatcagacccctgatcgtggccctgatcctgagaagcatctactacctgggcatcggccccaccctgaacatcctgggcgccctgaacctgaccaacaagatcgtgttcgtggtgagcttcgtgggcaacagaggcaccttcatcagaggctacaaggccatggtgatggacatggagttcctgtaccacgtgggctacatcctgaccagcgtgctgggcctgttcgcccacgagctgttctacagcatcctgctgttcgacctgatctacagagaggagaccctgttcaacgtgatcaagagcgtgaccagaaacggcagaagcatcctgctgaccgccctgctggccctgatcctggtgtacctgttcagcatcgtgggcttcctgttcctgaaggacgacttcatcctggaggtggacagactgcccaacaaccacagcaccgccagccccctgggcatgccccacggcgccgccgccttcgtggacacctgcagcggcgacaagatggactgcgtgagcggcctgagcgtgcccgaggtgctggaggaggacagagagctggacagcaccgagagagcctgcgacaccctgctgatgtgcatcgtgaccgtgatgaaccacggcctgagaaacggcggcggcgtgggcgacatcctgagaaagcccagcaaggacgagagcctgttccccgccagagtggtgtacgacctgctgttcttcttcatcgtgatcatcatcgtgctgaacctgatcttcggcgtgatcatcgacaccttcgccgacctgagaagcgagaagcagaagaaggaggagatcctgaagaccacctgcttcatctgcggcctggagagagacaagttcgacaacaagaccgtgagcttcgaggagcacatcaagctggagcacaacatgtggaactacctgtacttcatcgtgctggtgagagtgaagaacaagaccgactacaccggccccgagagctacgtggcccagatgatcaagaacaagaacctggactggttccccagaatgagagccatgagcctggtgagcaacgagggcgagggcgagcagaacgagatcagaatcctgcaggacaagctgaacagcaccatgaagctggtgagccacctgaccgcccagctgaacgagctgaaggagcagatgaccgagcagagaaagagaagacagagactgggcttcgtggacgtgcagaactgcatcagcagatag

SEQ ID NO: 126722 - protein, 423 aa, Artificial Sequence
  derived and/or modified sequence
MATATRLLGWRVASWRLRPPLAGFVSQRAHSLLPVDDAINGLSEEQRQLRQTMAKFLQEHLAPKAQEIDRSNEFKNLREFWKQLGNLGVLGITAPVQYGGSGLGYLEHVLVMEEISRASGAVGLSYGAHSNLCINQLVRNGNEAQKEKYLPKLISGEYIGALAMSEPNAGSDVVSMKLKAEKKGNHYILNGNKFWITNGPDADVLIVYAKTDLAAVPASRGITAFIVEKGMPGFSTSKKLDKLGMRGSNTCELIFEDCKIPAANILGHENKGVYVLMSGLDLERLVLAGGPLGLMQAVLDHTIPYLHVREAFGQKIGHFQLMQGKMADMYTRLMACRQYVYNVAKACDEGHCTAKDCAGVILYSAECATQVALDGIQCFGGNGYINDFPMGRFLRDAKLYEIGAGTSEVRRLVIGRAFNADFH

SEQ ID NO: 126723 - protein, 426 aa, Artificial Sequence
  derived and/or modified sequence
MAEMATATRLLGWRVASWRLRPPLAGFVSQRAHSLLPVDDAINGLSEEQRQLRQTMAKFLQEHLAPKAQEIDRSNEFKNLREFWKQLGNLGVLGITAPVQYGGSGLGYLEHVLVMEEISRASGAVGLSYGAHSNLCINQLVRNGNEAQKEKYLPKLISGEYIGALAMSEPNAGSDVVSMKLKAEKKGNHYILNGNKFWITNGPDADVLIVYAKTDLAAVPASRGITAFIVEKGMPGFSTSKKLDKLGMRGSNTCELIFEDCKIPAANILGHENKGVYVLMSGLDLERLVLAGGPLGLMQAVLDHTIPYLHVREAFGQKIGHFQLMQGKMADMYTRLMACRQYVYNVAKACDEGHCTAKDCAGVILYSAECATQVALDGIQCFGGNGYINDFPMGRFLRDAKLYEIGAGTSEVRRLVIGRAFNADFH

SEQ ID NO: 126724 - DNA, 1272 bp, Artificial Sequence
  derived and/or modified sequence
atggccactgcaacgagactgctcggctggcgtgtagcctcttggaggcttaggccccccctggccggctttgtgagccagagggcccactccttgctgcctgtcgatgatgctataaatgggctcagcgaggaacagcggcagttaagacagacaatggctaaatttttgcaagagcacctggctcctaaagcccaggagatcgaccgaagcaacgagttcaaaaatttgcgggagttttggaagcaactgggcaatcttggggtgctgggcatcaccgcgcccgtgcagtacggagggtccggcctgggctacttagagcacgtgcttgttatggaggagatttcccgtgctagtggagccgtgggactgagctacggcgcccactccaacctgtgcatcaatcagctcgtacggaacgggaatgaagcacagaaagaaaagtacctgccgaaattgatatccggtgaatacattggtgctttagctatgtctgagcctaatgccgggagcgacgtagtctccatgaaactgaaagcagagaaaaaaggcaaccactacatactgaatggaaataaattttggatcaccaatggtccagacgcagacgtgctgatagtgtacgccaagaccgatctggccgcagtgccggcatcaaggggtatcacagccttcattgtggaaaaggggatgcctgggttctccacctcaaagaaactggataagctgggcatgcggggtagtaacacatgcgagttgatctttgaagactgcaaaatacccgctgctaacattctgggtcacgagaataagggggtatatgttctcatgtctgggctagatctggagaggctcgtcctcgctggtgggcctctaggtcttatgcaggccgttctggaccacacgattccatacctccacgtcagagaggccttcggccagaaaatcggccatttccaattgatgcagggcaaaatggctgacatgtacactcgcctgatggcatgccgccagtacgtgtacaatgtggctaaagcgtgcgatgaggggcactgtacagccaaggattgcgccggtgtaatcctttattctgctgagtgcgccacacaggtggctctggatggcattcaatgctttggcggaaacggttatattaatgattttcctatgggccgattcctgagggacgctaagctgtatgaaataggcgcagggaccagcgaagtccggcggctcgtcattggccgcgcattcaacgccgacttccactag

SEQ ID NO: 126725 - DNA, 1281 bp, Artificial Sequence
  derived and/or modified sequence
atggctgagatggcaactgccacccgcttgttaggttggagagttgcatcatggcggctgcggcccccacttgctgggttcgttagccagagggctcatagcttactaccagtggacgacgctatcaatggcctgtcagaggaacagaggcagcttcgccaaaccatggctaagtttttgcaggaacatctcgctccaaaggcccaggaaatcgatcgttcaaatgaatttaagaatctgcgagagttctggaaacaactgggtaatctgggagttctgggcatcacagccccggttcaatacggcgggtcgggtctcggatacctggaacacgttttagtgatggaggaaatatctcgcgcaagcggagccgttggcctatcttacggggcccacagcaacctgtgtatcaatcaactagtgagaaacggtaacgaggctcagaaagagaagtacttacctaaattaatctccggcgagtatatcggggccctggcaatgagcgagccaaatgccggctctgacgtcgtgtcaatgaagctgaaagcggagaagaaagggaaccactatattctcaatggaaataaattttggataaccaacggtcccgatgcagacgtcctgatagtttatgccaagaccgatcttgcagccgtgccggccagcagaggtattaccgcattcattgtcgagaagggcatgccgggtttttccacttccaaaaagctggacaaactgggaatgagaggcagtaacacatgtgagctgatcttcgaggattgcaagattccggctgctaacatcctgggccacgaaaacaaaggagtctatgtgctcatgagcggcctcgacctggaaaggctggtgctcgcaggaggacccctgggactcatgcaagccgtccttgaccataccatcccttatttgcacgtaagagaagcttttggtcagaagattggacacttccagctcatgcagggaaagatggccgacatgtatactaggctaatggcctgtcgacaatatgtctataatgtagctaaggcgtgcgatgagggacattgcacagctaaagactgcgcaggggtaattctgtacagcgcggaatgcgccacccaggtggctcttgacggaattcagtgttttgggggcaacgggtacatcaatgacttccccatgggcaggttcctgagagatgccaaactctacgaaattggagccggcacatctgaggtcagaaggttggtgataggccgcgctttcaacgctgatttccattag

SEQ ID NO: 126726 - DNA, 4665 bp, Artificial Sequence
  derived and/or modified sequence
tttccgcagttaggggctgctatttcaacgcagggagataaaaagaaaaaaacacttgctcttctaccccgctaaaaacactcatcctagggagcacgccagcatttgcagcgttcggggcagggccactcggcctgcggccgttgcactggctggaagctggcaggcgatcacggttgattggctcgggtgcggtccaagggcagcaacgccttcggcgggccgcctagggtgattggctgctgcagcccaccccctagccggtttggtgggcggcgaagcctggattggtggagctaagagctggctcagtttcagcgctggctcttcgtgcatggcagagatggcgactgcgactcggctgctggggtggcgtgtggcgagctggaggctgcggccgccgcttgccggcttcgtttcccagcgggcccactcgcttttgcccgtggacgatgcaatcaatgggctaagcgaggagcagaggcagcttcgtcagaccatggctaagttccttcaggagcacctggcccccaaggcccaggagatcgatcgcagcaatgagttcaagaacctgcgagaattttggaagcagctggggaacctgggcgtattgggcatcacagcccctgttcagtatggcggctccggcctgggctacctggagcatgtgctggtgatggaggagatatcccgagcttccggagcagtggggctcagttacggtgcccactccaacctctgcatcaaccagcttgtacgcaatgggaatgaggcccagaaagagaagtatctcccgaagctgatcagtggtgagtacatcggagccctggccatgagtgagcccaatgcaggctctgatgttgtctctatgaagctcaaagcggaaaagaaaggaaatcactacatcctgaatggcaacaagttctggatcactaatggccctgatgctgacgtcctgattgtctatgccaagacagatctggctgctgtgccagcttctcggggcatcacagccttcattgtggagaagggtatgcctggctttagcacctctaagaagctggacaagctggggatgaggggctctaacacctgtgagctaatctttgaagactgcaagattcctgctgccaacatcctgggccatgagaataagggtgtctacgtgctgatgagtgggctggacctggagcggctggtgctggccggggggcctcttgggctcatgcaagcggtcctggaccacaccattccctacctgcacgtgagggaagcctttggccagaagatcggccacttccagttgatgcaggggaagatggctgacatgtacacccgcctcatggcgtgtcggcagtatgtctacaatgtcgccaaggcctgcgatgagggccattgcactgctaaggactgtgcaggtgtgattctttactcagctgagtgtgccacacaggtagccctggacggcattcagtgttttggtggcaatggctacatcaatgactttcccatgggccgctttcttcgagatgccaagctgtatgagataggggctgggaccagcgaggtgaggcggctggtcatcggcagagccttcaatgcagactttcactagtcctgagacccttcgcccccttttcctgcacctagtggcctttcttgggaagtagagatgtggcggctttcccaccctgcccacagcaggccctcctgcccagctgctcttgtcagccctctggcctctggatgaggttgagttctccacaacagctcccaagcatcatgggcctcgcagccgggcctgtgccacggctagtgttgtgtgatttaaaatggactcagcaggaagcatattgtctggggattgttgggacaggttttggtgactctgtgcccttgctctctaacttctgagcccacctcccagggtaggcacctgggggcatgcaggtgcccacctcccagggtaggcacctgggggcatgcaggtacccacctctttctcttgggtgaggctctggcaaggagatctctctgctcaagcacagcagaatcatggcccctctccatgaattggaacttggtacaggttaagtatccctaatcctgaaatctgaaacacttgtggttccaagcattttggataaggcaaattcaactttcagtctcttttctgggggaaaaaaataataaacctagcctagccaggcgtggtggctcatgcttgtaatcccagcacttcaggaggctgagatgggtggatcacctgaggtcaggagttcaagaccagcctggccaacatgtggaaacctcgcctcaactaaaaatagaaaaaaattagttgggcatggtggtgggcacctgtaatcccagctacttcaggaggctgaggcaggagaattacttgaacccaggaggcggacgttgcagtgagccgagcttgtgccattgcactccagcctgggcgacaagagcaaaactcttcaaaaaacaaaacaaaacaaaaaaaccctggcccttgtttcttccagtttctagaggtatcagctcctagcagcttatgaacacatatgcttgcttggccaggcaaggtggtgtgtgcctgtaatcccagcactttgggaggccaaggcaggtggatcacttgcagtcaggagttcaagaccagcctgtccaacgtggtgaaaccccatctctactaaaaatacaaaaattagccaggggtggtggtgcacgtctgtaatcccagctactcaggaggctgaggcaggagaatcacttgaacccgggaggtggaggttgcaatgagccaatatgacaccgctgcagtccagcctgggccatagagtgagactctgtctcaaaaaaggaaagaaaaataggctgggcacagtgactcatgcctgtaatcccaacactttgggaggccgaggcaggtggatcacgaggtcaggagttcaagaccagcctggccaagatggtaaaacctcgtctctactaaaaatacaaaaattagccaggtgtggtggcaggctcctgtaatcccagctactcaggaggctgaggcagagaattgcttgaacccgggaggcagagtttgcagtgagccaagatcacaccactgcactccagcttggacgacagagcgagactctgtctcaaaaaataataggccaggcatggtggctcaacgtctgtaatcccagcactttgggaggccgaggcgggcagatcacaaggtcaggagttcgagaccagcctgacgaccaacatggtgaaacctcgtctctactaaaaatacaaaaattagccaggcctggtggcacgcgcctgtaatcccagttacacagaagactgaggcaggagaatcgcttgaacgcaggaggcagaggttgcaggagctgagatcgcgccattgcactccagcctgggcaacagagtgagactctgtctcaaaaaataataataaaataaatgaacacacatgctgctgagtccgcagggggggcagagcagaggacagcgtgcttttgtgtactgttggaagactggctcctcctgtacagcacctctgagcccttgtgcaccgccctgccacgggcaccatccagtcctggccgtgtgaccacccacagctgactgggcagcaggcacaggccctacccgagcaggccggagttggctcgcatgactccagctgaggctgcctgtgtacatttctccagataccctatggctaattttgttataactgcacagtggctgctgccattttgtattaaatatattgtgaaacaaacctatctggggagaagcaatctacttgccgctgcttcctgtctggatccagcttgtgtccttggagagtggctggcccaggtcctattcctgtcctccagcccgttctttcatgagggacaggaaggtaaaatcagcccttaggagagaggtctcagcctccctttcccagatctcccagtgagttttaaaggaagcagggagcccagagtgctaagttcttacagccagaaggaagcttatagatttctgaaaaccgcccctttgtttttaaaaagatcaacacaatttgactttctcaaggtcaaaacgaactagaatccagatctgctcatggcaaaaatgggggtgttctgagaattccagctttgggccgcactgtacagcagtctggatagagtgtgatctgagaagggaatgggtctgggttgttccaccccttccgagttccaaaaagagggaactggttttcttggttctcagcccagcagcacctatcctggctcttggtcctggcctgcagccaagtgctgttcctagcctgaggcttgagacaggtggggttggctcctcaccaaccccagttccgtcccatcctgagggcaagatcctgggctcataggcagtccctttcacttccttgtcttgctccctgctatgttggagatgaatgtgactaaaagggccatcttgctggcttaatgtgtggctggagagaccagcctggagacaatgtggcaaaatggggcgcttcatccagtctgtctaagccctgtcgacttggggaggtgatttctttcctggttctatatgtgaagcaaaataaatgttttaaaattaaaagcaaaaaaaacaaaatgaaccatg

SEQ ID NO: 126727 - DNA, 1809 bp, Artificial Sequence
  derived and/or modified sequence
agtttcagcgctggctcttcgtgcatggcagagatggcgactgcgactcggctgctggggtggcgtgtggcgagctggaggctgcggccgccgcttgccggcttcgtttcccagcgggcccactcgcttttgcccgtggacgatgcaatcaatgggctaagcgaggagcagaggcagcttcgtcagaccatggctaagttccttcaggagcacctggcccccaaggcccaggagatcgatcgcagcaatgagttcaagaacctgcgagaattttggaagcagctggggaacctgggcgtattgggcatcacagcccctgttcagtatggcggctccggcctgggctacctggagcatgtgctggtgatggaggagatatcccgagcttccggagcagtggggctcagttacggtgcccactccaacctctgcatcaaccagcttgtacgcaatgggaatgaggcccagaaagagaagtatctcccgaagctgatcagtggtgagtacatcggagccctggccatgagtgagcccaatgcaggctctgatgttgtctctatgaagctcaaagcggaaaagaaaggaaatcactacatcctgaatggcaacaagttctggatcactaatggccctgatgctgacgtcctgattgtctatgccaagacagatctggctgctgtgccagcttctcggggcatcacagccttcattgtggagaagggtatgcctggctttagcacctctaagaagctggacaagctggggatgaggggctctaacacctgtgagctaatctttgaagactgcaagattcctgctgccaacatcctgggccatgagaataagggtgtctacgtgctgatgagtgggctggacctggagcggctggtgctggccggggggcctcttgggctcatgcaagcggtcctggaccacaccattccctacctgcacgtgagggaagcctttggccagaagatcggccacttccagttgatgcaggggaagatggctgacatgtacacccgcctcatggcgtgtcggcagtatgtctacaatgtcgccaaggcctgcgatgagggccattgcactgctaaggactgtgcaggtgtgattctttactcagctgagtgtgccacacaggtagccctggacggcattcagtgttttggtggcaatggctacatcaatgactttcccatgggccgctttcttcgagatgccaagctgtatgagataggggctgggaccagcgaggtgaggcggctggtcatcggcagagccttcaatgcagactttcactagtcctgagacccttcgcccccttttcctgcacctagtggcctttcttgggaagtagagatgtggcggctttcccaccctgcccacagcaggccctcctgcccagctgctcttgtcagccctctggcctctggatgaggttgagttctccacaacagctcccaagcatcatgggcctcgcagccgggcctgtgccacggctagtgttgtgtgatttaaaatggactcagcaggaagcatattgtctggggattgttgggacaggttttggtgactctgtgcccttgctctctaacttctgagcccacctcccagggtaggcacctgggggcatgcaggtgcccacctcccagggtaggcacctgggggcatgcaggtacccacctctttctcttgggtgaggctctggcaaggagatctctctgctcaagcacagcagaatcatggcccctctccatgaattggaacttggtacaggttaagtatccctaatcctgaaatctgaaa

SEQ ID NO: 126728 - DNA, 1272 bp, Artificial Sequence
  derived and/or modified sequence
atggccacagccacccggctgctgggctggagggtggcctcctggaggctgcggccccccctggccggctttgtgtcccagagggcccacagcctgctgcctgtggatgatgccatcaatggcctgtctgaggagcagaggcagctgcggcagaccatggccaagttcctgcaggagcacctggcccccaaggcccaggagattgacaggagcaatgagttcaagaacctgcgggagttctggaagcagctgggcaacctgggcgtgctgggcatcacagcccctgtgcagtatggaggcagcggcctgggctacctggagcacgtgctggtgatggaggagatcagccgggccagcggggctgtgggcctgtcctatggagcccacagcaacctgtgcatcaaccagctggtgagaaatggaaatgaggcccagaaggagaagtacctgcccaagctgatctctggagagtacatcggggccctggccatgtctgagcccaatgccggcagtgatgtggtgtccatgaagctgaaggccgagaagaagggcaaccactacatcctgaatggaaacaagttctggatcaccaacggcccagatgctgatgtgctgattgtgtatgccaagacagacctggccgctgtgcctgccagccggggcatcacagccttcatcgtggagaagggcatgcctggcttcagcaccagcaagaagctggacaagctgggcatgaggggcagcaacacctgtgagctgatctttgaggactgcaagatcccagctgccaacatcctgggccatgaaaataaaggagtgtatgtgctgatgagcggcctggacctggagcggctggtgctggccggcggccccctgggcctgatgcaggccgtgctggaccacaccatcccctacctgcacgtgcgggaggccttcggccagaagattggccacttccagctgatgcagggcaagatggctgacatgtacacccggctgatggcctgccggcagtatgtgtacaacgtggccaaggcctgtgatgagggccactgcacagccaaggactgtgccggggtcatcctgtacagcgcagaatgtgccacccaggtggccctggatggcatccagtgctttggaggaaatggctacatcaatgacttccccatgggccgcttcctgagagatgccaagctgtatgagatcggggccggcaccagcgaggtgcggcggctggtgattggccgggccttcaatgctgacttccactag

SEQ ID NO: 126729 - DNA, 1281 bp, Artificial Sequence
  derived and/or modified sequence
atggccgagatggccacagccacccggctgctgggctggagggtggcctcctggaggctgcggccccccctggccggctttgtgtcccagagggcccacagcctgctgcctgtggatgatgccatcaatggcctgtctgaggagcagaggcagctgcggcagaccatggccaagttcctgcaggagcacctggcccccaaggcccaggagattgacaggagcaatgagttcaagaacctgcgggagttctggaagcagctgggcaacctgggcgtgctgggcatcacagcccctgtgcagtatggaggcagcggcctgggctacctggagcacgtgctggtgatggaggagatcagccgggccagcggggctgtgggcctgtcctatggagcccacagcaacctgtgcatcaaccagctggtgagaaatggaaatgaggcccagaaggagaagtacctgcccaagctgatcagcggggagtacatcggggccctggccatgtctgagcccaatgccggcagtgatgtggtgtccatgaagctgaaggccgagaagaagggcaaccactacatcctgaatggaaacaagttctggatcaccaatggaccagatgctgatgtgctgattgtgtatgccaagacagacctggccgctgtgcctgccagccggggcatcacagccttcatcgtggagaagggcatgcctggcttcagcaccagcaagaagctggacaagctgggcatgaggggcagcaacacctgtgagctgatctttgaggactgcaagatcccagctgccaacatcctgggccacgagaacaagggcgtgtatgtgctgatgagcggcctggacctggagcggctggtgctggccggcggccccctgggcctgatgcaggccgtgctggaccacaccatcccctacctgcacgtgcgggaggccttcggccagaagattggccacttccagctgatgcagggcaagatggctgacatgtacacccggctgatggcctgccggcagtatgtgtacaacgtggccaaggcctgtgatgagggccactgcacagccaaggactgtgccggggtcatcctgtacagcgcagaatgtgccacccaggtggccctggatggcatccagtgcttcggcggcaatggctacatcaatgacttccccatgggccgcttcctgagagatgccaagctgtatgaaattggagctggcaccagcgaggtgcggcggctggtgattggccgggccttcaatgctgacttccactag

SEQ ID NO: 126730 - DNA, 1272 bp, Artificial Sequence
  derived and/or modified sequence
atggccaccgccacccggctgctgggctggcgggtggccagctggaggctgcggcctccactggcagggtttgtgtctcagcgggctcactctctccttccagttgacgacgcaatcaacgggctgtccgaggagcagaggcaactccgacaaaccatggcaaagttcttgcaagagcacttggcaccaaaggcgcaggaaattgaccggtcaaacgagtttaagaatctccgcgagttctggaagcagctggggaatctgggtgtgctcggtataacggcccctgtccaatacggaggttccggcttggggtaccttgagcatgtgctggtcatggaggaaatcagccgggcttcaggagcagtaggcttgtcctacggagcccatagcaatctgtgtatcaaccagttagtccgaaatggcaacgaggcccagaaggaaaaatacctccccaagcttatcagcggcgaatacatcggcgcccttgcaatgtcggaacccaatgccggctctgatgtggtgagcatgaaactgaaagcggagaaaaagggcaaccactatatactcaatggaaataagttctggattaccaacggtcctgatgcagacgtcttgatcgtgtacgccaagaccgacttggctgcagtacccgcaagccgcggcattacagcgtttattgtcgagaaagggatgccaggtttcagtacaagcaagaagctggataagctcggtatgaggggtagtaacacctgcgagttgatattcgaggactgcaagataccggctgccaacattctgggacatgagaataagggcgtgtacgtgttgatgtcagggctggatctcgaacgcttggtgctggccgggggacccctgggtctgatgcaggctgtgctggatcacactatcccgtaccttcacgtgagagaggcgttcgggcagaagattggccacttccagctcatgcagggtaagatggccgacatgtatacgaggctgatggcttgcagacaatacgtgtacaatgtggctaaggcctgtgacgaaggacactgcactgcgaaagattgcgccggcgttattctttatagtgcagaatgtgccacacaggtggcacttgacggcatacaatgctttggcggcaacgggtacatcaacgattttcccatgggacggttcctgagggatgcaaagctatacgagataggcgcaggaacatccgaggttcggcgcctggtgattggtcgcgctttcaacgcggacttccactag

SEQ ID NO: 126731 - DNA, 1281 bp, Artificial Sequence
  derived and/or modified sequence
atggccgagatggccaccgccacccggctgctgggctggcgggtggcttcttggcgccttcgcccacctctggccggatttgtgagtcagcgcgcccatagcttactgcccgtagacgatgccataaatgggctgagcgaagaacagcgtcagttacgccaaacgatggccaagtttttacaggagcacctagcccccaaagcacaagagatcgacaggtccaatgaattcaagaacttgagagagttctggaagcaactgggtaatctgggagtgcttggaattacagctccggtacagtatggcggctcaggactggggtacttagaacacgtcctcgtaatggaagaaatctctagagcatcaggtgcggttggtctgtcttatggcgcccatagcaatctgtgtattaatcaattggttcggaatgggaatgaggctcaaaaggagaagtatctccccaagctgatctcaggtgagtacatcggggccctcgcaatgagtgagcccaatgctggttccgacgtcgtgtctatgaagctgaaggctgaaaagaagggaaaccactatatcctcaacggaaacaaattctggattacaaacggacctgatgctgacgtgctgattgtatacgcaaagactgacctagccgctgttccagcttcacgaggcatcaccgccttcatagtcgagaaaggcatgccggggtttagcaccagcaagaaactggacaagctcggcatgcgagggagcaacacgtgcgaactgatttttgaagactgcaaaatccctgctgctaacatcctgggtcatgaaaacaagggtgtatatgtgctgatgagtggtctggatcttgagcgtcttgtactggccgggggccccctgggactgatgcaggctgtgcttgatcacactatcccatacttacacgtgagggaagctttcggacagaaaattggacactttcagctgatgcagggtaaaatggccgatatgtatactcgactaatggcttgccgtcagtacgtgtataatgtggctaaggcgtgtgatgagggccactgtacagcaaaagactgcgccggagtaatcctttacagcgccgagtgcgccactcaggttgctctggacggcatccaatgctttggggggaatggatacattaatgatttccccatgggtcggtttctaagagacgctaaactgtatgagatcggggccgggacctcagaggtcaggagattagttatcgggcgtgctttcaacgctgacttccactag

SEQ ID NO: 126732 - DNA, 1272 bp, Artificial Sequence
  derived and/or modified sequence
atggcaacagctacacgcctgttggggtggagagtcgcttcatggagactacgcccacctttggctggctttgtgtctcagcgtgcacacagccttcttcccgtggacgacgcgattaatggcttgtcagaagaacagcggcaactgagacagaccatggctaagttcctgcaggagcatctagctccgaaggctcaggaaatcgatcgatccaacgagtttaaaaatctgagggagttctggaaacagctcggtaatcttggagtgctgggaataacagctcccgtacaatatggcggttctggattagggtatctggaacacgtcttggtcatggaggaaatttcccgagcgagtggagcggttgggttgtcctacggtgcccatagcaatttgtgcatcaatcagctggtccggaacgggaatgaagcccagaaggagaaatacctaccaaaactgattagtggcgagtacataggcgcattagctatgtccgagcctaatgctggttccgatgttgtgagcatgaagttgaaagcagagaaaaaaggaaaccactacatcttgaacggcaataagttctggatcacaaacggtccagacgctgacgtgttgattgtttacgcaaaaacagacctcgcggctgtaccggcaagccgcggtatcacagcttttatagtggagaagggaatgcccggatttagcactagcaaaaaactggataagttaggtatgaggggatcgaacacatgcgagttgatttttgaagactgcaagatcccagcagctaatatccttgggcatgagaataagggagtttacgtgttaatgtccggtctggacctagagagattggtgttggctggtggcccactggggctgatgcaggcagtgttagaccacacgataccctatttgcacgtcagagaggcattcggacagaaaatcggtcactttcagctgatgcaggggaaaatggccgatatgtataccaggctcatggcctgccgccaatatgtctataacgttgctaaggcttgtgatgaggggcactgtaccgctaaagattgtgccggtgtaatattatacagcgccgaatgcgccacacaagtggccctagatggaatccagtgcttcggaggaaacggctacattaacgacttcccaatgggacgcttcctgcgcgacgccaagctatatgaaatcggagccggtacttcggaagtgcggaggcttgtgataggacgtgctttcaacgctgactttcattag

SEQ ID NO: 126733 - DNA, 1281 bp, Artificial Sequence
  derived and/or modified sequence
atggcagagatggcaactgctacaagacttcttggatggagagtggccagttggagactgagacctcctcttgcaggtttcgtgagccagcgagctcatagtctcctccctgtagacgacgctataaatgggttgagtgaggaacagcggcagctgcgccagaccatggctaaattcctacaagaacacctggctccaaaagcccaggagatcgaccggagcaatgaattcaagaaccttagagagttttggaaacagcttgggaatctcggtgtgcttggcatcaccgcacctgtgcagtacggaggaagcggtctcggatacctggagcacgttctcgtgatggaggagatcagcagagcttccggggctgttggactatcttacggcgctcatagtaacttgtgcataaaccagctggtgaggaacggcaacgaggcccagaaagagaagtacctgccaaagttgatttcaggtgagtacataggcgcactcgccatgagtgaacctaacgccggaagcgatgtcgtctcaatgaagctcaaggctgagaaaaagggcaaccactacattttgaacggcaataagttctggatcactaacggtccggacgccgatgtcctcatcgtatacgctaagacagacctggcagctgttccagctagtagagggattaccgcttttatcgtcgagaaaggaatgccaggcttttcaacatctaaaaaactggataagctggggatgcgtggcagcaatacttgtgagctgatatttgaggactgcaaaataccagccgcaaacatcttgggacacgagaataaaggggtctatgtgttaatgagcggcctcgacctggagagacttgtgcttgctggaggccctcttggactcatgcaggccgttctggatcacaccattccatatctgcatgtgcgcgaggctttcggacaaaaaatcggtcattttcagcttatgcaggggaagatggcagacatgtacacacgacttatggcatgcaggcagtacgtgtataatgtggcgaaagcctgtgacgagggtcactgtactgcaaaagactgtgcaggcgtcatactttacagtgcggagtgtgccactcaagtggcccttgacgggattcagtgttttgggggaaatggctatattaatgacttccctatggggaggttccttagagatgctaaattatacgagattggagctgggactagcgaggtgcgaaggttggtaatcggccgtgcctttaatgctgacttccactag

SEQ ID NO: 126734 - DNA, 1272 bp, Artificial Sequence
  derived and/or modified sequence
atggccaccgccaccagactgctgggctggagagtggccagctggagactgagaccccccctggccggcttcgtgagccagagagcccacagcctgctgcccgtggacgacgccatcaacggcctgagcgaggagcagagacagctgagacagaccatggccaagttcctgcaggagcacctggcccccaaggcccaggagatcgacagaagcaacgagttcaagaacctgagagagttctggaagcagctgggcaacctgggcgtgctgggcatcaccgcccccgtgcagtacggcggcagcggcctgggctacctggagcacgtgctggtgatggaggagatcagcagagccagcggcgccgtgggcctgagctacggcgcccacagcaacctgtgcatcaaccagctggtgagaaacggcaacgaggcccagaaggagaagtacctgcccaagctgatcagcggcgagtacatcggcgccctggccatgagcgagcccaacgccggcagcgacgtggtgagcatgaagctgaaggccgagaagaagggcaaccactacatcctgaacggcaacaagttctggatcaccaacggccccgacgccgacgtgctgatcgtgtacgccaagaccgacctggccgccgtgcccgccagcagaggcatcaccgccttcatcgtggagaagggcatgcccggcttcagcaccagcaagaagctggacaagctgggcatgagaggcagcaacacctgcgagctgatcttcgaggactgcaagatccccgccgccaacatcctgggccacgagaacaagggcgtgtacgtgctgatgagcggcctggacctggagagactggtgctggccggcggccccctgggcctgatgcaggccgtgctggaccacaccatcccctacctgcacgtgagagaggccttcggccagaagatcggccacttccagctgatgcagggcaagatggccgacatgtacaccagactgatggcctgcagacagtacgtgtacaacgtggccaaggcctgcgacgagggccactgcaccgccaaggactgcgccggcgtgatcctgtacagcgccgagtgcgccacccaggtggccctggacggcatccagtgcttcggcggcaacggctacatcaacgacttccccatgggcagattcctgagagacgccaagctgtacgagatcggcgccggcaccagcgaggtgagaagactggtgatcggcagagccttcaacgccgacttccactag

SEQ ID NO: 126735 - DNA, 1281 bp, Artificial Sequence
  derived and/or modified sequence
atggccgagatggccaccgccaccagactgctgggctggagagtggccagctggagactgagaccccccctggccggcttcgtgagccagagagcccacagcctgctgcccgtggacgacgccatcaacggcctgagcgaggagcagagacagctgagacagaccatggccaagttcctgcaggagcacctggcccccaaggcccaggagatcgacagaagcaacgagttcaagaacctgagagagttctggaagcagctgggcaacctgggcgtgctgggcatcaccgcccccgtgcagtacggcggcagcggcctgggctacctggagcacgtgctggtgatggaggagatcagcagagccagcggcgccgtgggcctgagctacggcgcccacagcaacctgtgcatcaaccagctggtgagaaacggcaacgaggcccagaaggagaagtacctgcccaagctgatcagcggcgagtacatcggcgccctggccatgagcgagcccaacgccggcagcgacgtggtgagcatgaagctgaaggccgagaagaagggcaaccactacatcctgaacggcaacaagttctggatcaccaacggccccgacgccgacgtgctgatcgtgtacgccaagaccgacctggccgccgtgcccgccagcagaggcatcaccgccttcatcgtggagaagggcatgcccggcttcagcaccagcaagaagctggacaagctgggcatgagaggcagcaacacctgcgagctgatcttcgaggactgcaagatccccgccgccaacatcctgggccacgagaacaagggcgtgtacgtgctgatgagcggcctggacctggagagactggtgctggccggcggccccctgggcctgatgcaggccgtgctggaccacaccatcccctacctgcacgtgagagaggccttcggccagaagatcggccacttccagctgatgcagggcaagatggccgacatgtacaccagactgatggcctgcagacagtacgtgtacaacgtggccaaggcctgcgacgagggccactgcaccgccaaggactgcgccggcgtgatcctgtacagcgccgagtgcgccacccaggtggccctggacggcatccagtgcttcggcggcaacggctacatcaacgacttccccatgggcagattcctgagagacgccaagctgtacgagatcggcgccggcaccagcgaggtgagaagactggtgatcggcagagccttcaacgccgacttccactag

SEQ ID NO: 126736 - protein, 1238 aa, Artificial Sequence
  derived and/or modified sequence
MRAQGRGRLPRRLLLLLALWVQAARPMGYFELQLSALRNVNGELLSGACCDGDGRTTRAGGCGHDECDTYVRVCLKEYQAKVTPTGPCSYGHGATPVLGGNSFYLPPAGAAGDRARARARAGGDQDPGLVVIPFQFAWPRSFTLIVEAWDWDNDTTPNEELLIERVSHAGMINPEDRWKSLHFSGHVAHLELQIRVRCDENYYSATCNKFCRPRNDFFGHYTCDQYGNKACMDGWMGKECKEAVCKQGCNLLHGGCTVPGECRCSYGWQGRFCDECVPYPGCVHGSCVEPWQCNCETNWGGLLCDKDLNYCGSHHPCTNGGTCINAEPDQYRCTCPDGYSGRNCEKAEHACTSNPCANGGSCHEVPSGFECHCPSGWSGPTCALDIDECASNPCAAGGTCVDQVDGFECICPEQWVGATCQLDANECEGKPCLNAFSCKNLIGGYYCDCIPGWKGINCHINVNDCRGQCQHGGTCKDLVNGYQCVCPRGFGGRHCELERDECASSPCHSGGLCEDLADGFHCHCPQGFSGPLCEVDVDLCEPSPCRNGARCYNLEGDYYCACPDDFGGKNCSVPREPCPGGACRVIDGCGSDAGPGMPGTAASGVCGPHGRCVSQPGGNFSCICDSGFTGTYCHENIDDCLGQPCRNGGTCIDEVDAFRCFCPSGWEGELCDTNPNDCLPDPCHSRGRCYDLVNDFYCACDDGWKGKTCHSREFQCDAYTCSNGGTCYDSGDTFRCACPPGWKGSTCAVAKNSSCLPNPCVNGGTCVGSGASFSCICRDGWEGRTCTHNTNDCNPLPCYNGGICVDGVNWFRCECAPGFAGPDCRINIDECQSSPCAYGATCVDEINGYRCSCPPGRAGPRCQEVIGFGRSCWSRGTPFPHGSSWVEDCNSCRCLDGRRDCSKVWCGWKPCLLAGQPEALSAQCPLGQRCLEKAPGQCLRPPCEAWGECGAEEPPSTPCLPRSGHLDNNCARLTLHFNRDHVPQGTTVGAICSGIRSLPATRAVARDRLLVLLCDRASSGASAVEVAVSFSPARDLPDSSLIQGAAHAIVAAITQRGNSSLLLAVTEVKVETVVTGGSSTGLLVPVLCGAFSVLWLACVVLCVWWTRKRRKERERSRLPREESANNQWAPLNPIRNPIERPGGHKDVLYQCKNFTPPPRRADEALPGPAGHAAVREDEEDEDLGRGEEDSLEAEKFLSHKFTKDPGRSPGRPAHWASGPKVDNRAVRSINEARYAGKE

SEQ ID NO: 126737 - DNA, 3717 bp, Artificial Sequence
  derived and/or modified sequence
atgcgggctcagggacgtggcagactgccgaggagactgctgttactgctcgccttatgggtgcaagctgctcgaccaatgggatactttgaactccagttgtctgctctccgcaacgtgaatggtgagctgctttccggcgcatgttgtgatggcgacggccggaccacgcgtgccggaggatgcgggcacgatgaatgtgatacatacgttagggtttgtctgaaggagtaccaggcaaaggtcacacctactggcccctgttcatacggtcatggggccactcctgttctgggtggaaactccttttatcttccccccgcaggggctgccggggatcgcgcacgggcccgggcgagggctggtggggaccaagatccaggtttagtggtaatccctttccagtttgcgtggccacgctccttcaccctgatcgtggaggcctgggactgggataacgataccactcctaatgaggagcttctcatagagcgggtcagccacgctggaatgataaatccggaagaccggtggaaatctctccacttcagtggacacgttgcccatctggaactgcagattcgagtccgctgcgacgagaattactattctgccacatgcaacaaattctgccggccaagaaatgacttctttggccactacacttgcgatcaatatggaaacaaagcctgcatggatggctggatggggaaggagtgtaaagaagccgtctgtaagcaggggtgcaacttacttcatggcggttgtacagttcccggcgaatgtaggtgctcctacggctggcagggcagattttgcgacgagtgcgtgccatacccagggtgcgtacacggtagctgcgtggaaccatggcagtgcaactgcgagacaaattggggagggttgctttgcgataaagacctcaactactgtgggagccaccacccctgcacaaacggaggaacctgcataaacgcggagccggaccagtaccgatgcacctgccctgatggctattcagggcggaactgcgagaaggctgaacacgcatgtacgtctaatccttgtgccaacggtggctcatgtcacgaggtcccatccggcttcgagtgtcactgtcccagtggatggtctgggcccacatgtgccctggacatcgatgaatgcgcctctaacccctgtgccgccggagggacatgtgttgatcaagtcgatggctttgagtgtatttgcccagagcagtgggtgggagcaacctgccagctggacgcgaacgaatgtgagggcaaaccctgtttgaacgcatttagttgcaagaatctcatcggaggttattattgtgactgcatccctggttggaaagggattaattgtcatataaatgtgaacgattgcaggggtcagtgccagcacgggggcacctgcaaggacctggtgaacgggtaccaatgtgtgtgcccacggggtttcggagggagacattgcgaactggaaagggatgaatgcgcttctagcccctgtcacagcggaggcttgtgtgaagaccttgccgacggctttcactgtcactgccctcaggggttttcagggcccctgtgcgaggtggatgtggatctctgcgagccaagcccttgtcgcaatggagcccgttgttacaatttagagggcgactattattgtgcttgccctgatgattttgggggaaaaaattgtagtgtgcctagagagccatgccccgggggcgcatgtcgcgtgatcgacgggtgcgggtctgatgctgggcctgggatgccaggaacagctgcctccggtgtgtgtggaccccatgggcgctgcgtctcgcaaccaggaggcaattttagctgcatctgcgatagtggttttactggcacatattgtcacgagaatatcgacgattgcctggggcagccctgtcgaaacgggggcacatgcatcgacgaggtcgatgcattcagatgcttctgtccgagcggatgggagggagaactctgcgataccaacccaaatgattgcctgcccgacccgtgccatagtagaggcagatgttacgatcttgtgaatgatttttactgtgcctgcgacgacggctggaaagggaaaacatgtcactctcgcgagtttcagtgtgacgcctatacctgttctaatggcggaacctgctatgatagcggtgacacgttccggtgtgcttgtcctcccggatggaagggctccacctgcgcagtcgccaagaactcatcttgtctgccaaacccctgtgtgaatgggggcacctgcgttggcagcggagctagcttttcctgcatttgccgtgatggctgggaaggacgcacatgtacccataacactaacgactgcaatcctctgccttgctacaacggggggatttgcgtagacggagttaattggtttcgctgcgagtgtgccccaggctttgccggcccagattgccgcatcaatatcgatgaatgccagtcatcaccttgtgcctatggggctacctgcgttgacgagattaacgggtatcgatgtagttgtccccccggaagggcagggcccaggtgccaagaggtgatcggctttggaagaagctgttggtcccgggggaccccttttccacatggttcttcatgggtggaagattgcaattcttgtaggtgcctagatgggcgcagagactgctctaaagtgtggtgtggatggaagccctgcctgctcgcaggtcagccagaggcactcagtgcgcagtgtcccctagggcagcgttgtctggagaaggcgcctggacagtgcctgagacccccatgtgaagcttggggcgaatgtggtgctgaagaaccacccagcacgccatgcctaccacgttccgggcacctagataacaattgtgcccgattgacgctacacttcaaccgggaccacgtcccccaggggacaaccgtaggggccatctgcagcggcattagatctcttccagcaacaagagccgtcgcacgggacagactcctggtgctgctgtgcgaccgcgcctcgtccggtgcttctgcagtggaagttgccgtgagcttcagccccgccagggatctgcctgatagctccctgattcagggtgctgcccatgctatcgtagcagccattactcagagaggcaactcatcgctcttgctggccgtgactgaggtgaaagttgaaacggtggtgaccggagggtcatccaccggtctcctggtcccggtactgtgcggcgctttttccgtgttatggttagcatgtgtcgtgctgtgtgtttggtggacccgtaaacgcaggaaggagagagagagaagtcggcttccgagagaagagtcagccaacaaccagtgggcgcccctgaatcctatccggaacccgatagagcggcccggtggccacaaggatgttttgtatcagtgtaagaatttcactcccccaccccggagagccgatgaagcccttcctggtccagccggtcacgccgccgtgagggaggatgaagaagatgaagatcttggccggggcgaggaagatagtctggaggcggagaagttcctgtcccacaaattcactaaggacccaggccgcagtcctgggcgccctgcacattgggctagcggcccaaaggtcgataaccgggcggttaggtctataaacgaggcacggtacgccgggaaggagtag

SEQ ID NO: 126738 - DNA, 5835 bp, Artificial Sequence
  derived and/or modified sequence
ctcatgcatatgcaggtgcgcgggtgacgaatgggcgagcgagctgtcagtctcgttccgaacttgttggctgcggtgccgggagcgcgggcgcgcagagccgaggccgggacccgctgccttcaccgccgccgccgtcgccgccgggtgggagccgggccgggcagccggagcgcggccgccagcgagccggagctgccgccgcccctgcacgcccgccgcccaggcccgcgcgccgcggcgctgcgctcgaccccgcccgcgccgccgccgccgccgcctctgccgctgccgctgcctctgcgggcgctcggagggcgggcgggcgctgggaggccggcgcggcggctgggagccgggcgcgggcggcggcggcggggccgggcgggcgggtcgcgggggcaatgcgggcgcagggccgggggcgccttccccggcggctgctgctgctgctggcgctctgggtgcaggcggcgcggcccatgggctatttcgagctgcagctgagcgcgctgcggaacgtgaacggggagctgctgagcggcgcctgctgtgacggcgacggccggacaacgcgcgcggggggctgcggccacgacgagtgcgacacgtacgtgcgcgtgtgccttaaggagtaccaggccaaggtgacgcccacggggccctgcagctacggccacggcgccacgcccgtgctgggcggcaactccttctacctgccgccggcgggcgctgcgggggaccgagcgcgggcgcgggcccgggccggcggcgaccaggacccgggcctcgtcgtcatccccttccagttcgcctggccgcgctcctttaccctcatcgtggaggcctgggactgggacaacgataccaccccgaatgaggagctgctgatcgagcgagtgtcgcatgccggcatgatcaacccggaggaccgctggaagagcctgcacttcagcggccacgtggcgcacctggagctgcagatccgcgtgcgctgcgacgagaactactacagcgccacttgcaacaagttctgccggccccgcaacgactttttcggccactacacctgcgaccagtacggcaacaaggcctgcatggacggctggatgggcaaggagtgcaaggaagctgtgtgtaaacaagggtgtaatttgctccacgggggatgcaccgtgcctggggagtgcaggtgcagctacggctggcaagggaggttctgcgatgagtgtgtcccctaccccggctgcgtgcatggcagttgtgtggagccctggcagtgcaactgtgagaccaactggggcggcctgctctgtgacaaagacctgaactactgtggcagccaccacccctgcaccaacggaggcacgtgcatcaacgccgagcctgaccagtaccgctgcacctgccctgacggctactcgggcaggaactgtgagaaggctgagcacgcctgcacctccaacccgtgtgccaacgggggctcttgccatgaggtgccgtccggcttcgaatgccactgcccatcgggctggagcgggcccacctgtgcccttgacatcgatgagtgtgcttcgaacccgtgtgcggccggtggcacctgtgtggaccaggtggacggctttgagtgcatctgccccgagcagtgggtgggggccacctgccagctggacgccaatgagtgtgaagggaagccatgccttaacgctttttcttgcaaaaacctgattggcggctattactgtgattgcatcccgggctggaagggcatcaactgccatatcaacgtcaacgactgtcgcgggcagtgtcagcatgggggcacctgcaaggacctggtgaacgggtaccagtgtgtgtgcccacggggcttcggaggccggcattgcgagctggaacgagacgagtgtgccagcagcccctgccacagcggcggcctctgcgaggacctggccgacggcttccactgccactgcccccagggcttctccgggcctctctgtgaggtggatgtcgacctttgtgagccaagcccctgccggaacggcgctcgctgctataacctggagggtgactattactgcgcctgccctgatgactttggtggcaagaactgctccgtgccccgcgagccgtgccctggcggggcctgcagagtgatcgatggctgcgggtcagacgcggggcctgggatgcctggcacagcagcctccggcgtgtgtggcccccatggacgctgcgtcagccagccagggggcaacttttcctgcatctgtgacagtggctttactggcacctactgccatgagaacattgacgactgcctgggccagccctgccgcaatgggggcacatgcatcgatgaggtggacgccttccgctgcttctgccccagcggctgggagggcgagctctgcgacaccaatcccaacgactgccttcccgatccctgccacagccgcggccgctgctacgacctggtcaatgacttctactgtgcgtgcgacgacggctggaagggcaagacctgccactcacgcgagttccagtgcgatgcctacacctgcagcaacggtggcacctgctacgacagcggcgacaccttccgctgcgcctgcccccccggctggaagggcagcacctgcgccgtcgccaagaacagcagctgcctgcccaacccctgtgtgaatggtggcacctgcgtgggcagcggggcctccttctcctgcatctgccgggacggctgggagggtcgtacttgcactcacaataccaacgactgcaaccctctgccttgctacaatggtggcatctgtgttgacggcgtcaactggttccgctgcgagtgtgcacctggcttcgcggggcctgactgccgcatcaacatcgacgagtgccagtcctcgccctgtgcctacggggccacgtgtgtggatgagatcaacgggtatcgctgtagctgcccacccggccgagccggcccccggtgccaggaagtgatcgggttcgggagatcctgctggtcccggggcactccgttcccacacggaagctcctgggtggaagactgcaacagctgccgctgcctggatggccgccgtgactgcagcaaggtgtggtgcggatggaagccttgtctgctggccggccagcccgaggccctgagcgcccagtgcccactggggcaaaggtgcctggagaaggccccaggccagtgtctgcgaccaccctgtgaggcctggggggagtgcggcgcagaagagccaccgagcaccccctgcctgccacgctccggccacctggacaataactgtgcccgcctcaccttgcatttcaaccgtgaccacgtgccccagggcaccacggtgggcgccatttgctccgggatccgctccctgccagccacaagggctgtggcacgggaccgcctgctggtgttgctttgcgaccgggcgtcctcgggggccagtgctgtggaggtggccgtgtccttcagccctgccagggacctgcctgacagcagcctgatccagggcgcggcccacgccatcgtggccgccatcacccagcgggggaacagctcactgctcctggctgtcaccgaggtcaaggtggagacggttgttacgggcggctcttccacaggtctgctggtgcctgtgctgtgtggtgccttcagcgtgctgtggctggcgtgcgtggtcctgtgcgtgtggtggacacgcaagcgcaggaaagagcgggagaggagccggctgccgcgggaggagagcgccaacaaccagtgggccccgctcaaccccatccgcaaccccattgagcggccggggggccacaaggacgtgctctaccagtgcaagaacttcacgccgccgccgcgcagggcggacgaggcgctgcccgggccggccggccacgcggccgtcagggaggatgaggaggacgaggatctgggccgcggtgaggaggactccctggaggcggagaagttcctctcacacaaattcaccaaagatcctggccgctcgccggggaggccggcccactgggcctcaggccccaaagtggacaaccgcgcggtcaggagcatcaatgaggcccgctacgccggcaaggagtaggggcggctgccagctgggccgggacccagggccctcggtgggagccatgccgtctgccggacccggaggccgaggccatgtgcatagtttctttattttgtgtaaaaaaaccaccaaaaacaaaaaccaaatgtttattttctacgtttctttaaccttgtataaattattcagtaactgtcaggctgaaaacaatggagtattctcggatagttgctatttttgtaaagtttccgtgcgtggcactcgctgtatgaaaggagagagcaaagggtgtctgcgtcgtcaccaaatcgtagcgtttgttaccagaggttgtgcactgtttacagaatcttccttttattcctcactcgggtttctctgtggctccaggccaaagtgccggtgagacccatggctgtgttggtgtggcccatggctgttggtgggacccgtggctgatggtgtggcctgtggctgtcggtgggactcgtggctgtcaatgggacctgtggctgtcggtgggacctacggtggtcggtgggaccctggttattgatgtggccctggctgccggcacggcccgtggctgttgacgcacctgtggttgttagtggggcctgaggtcatcggcgtggcccaaggctggcaggtcaacctcgcgcttgctggccagtccaccctgcctgccgtctgtgcttcctcctgcccagaacgcccgctccagcgatctctccactgtgctttcagaagtgcccttcctgctgcgcagttctcccatcctgggacggcggcagtattgaagctcgtgacaagtgccttcacacagacccctcgcaactgtccacgcgtgccgtggcaccaggcgctgcccacctgccggccccggccgcccctcctcgtgaaagtgcatttttgtaaatgtgtacatattaaaggaagcactctgtatatttgattgaataatgccaccattccggcctcccttgttctttcggtgctgtcccttttgtattgagagtgaggttgggggagagccacgccggcagagaggcttggggcagtggggcgcgtgctgggtattggcccacgtggctgtggtggctgtagagggcgagacggttctgttgagtcggggcctgccagggcctcgaatgcgttggcatgccaaggtggtggatgcaggtttggccaaaaccttcctgggaatggggaggggggtgtctaggtgcctggcacccgaccctgactaaaacagctgaaaacagttttataaaatagtataaaattgcttacccacgaatacgtatcaaggtcttaaggaattaacaggtcaaaatttttattcattcatttattcctttgttttgcttggtcattcagaggcaaggtcagcatttgatggaggcaggagagaagcagcccttccacctggccctggagctggttttgcccctcactgcttgagccaactggaacgtggcatggtggcctcagggctgggcatggaaggccgactccaaggctgactccgagccgcctgtcagtgatgtgcaagtctttaccctgctgtgaggggtaggaggtcaactgagtcaaggagcaaagccaagaaccagatctgtacaaaagagaaaaaaaaagtcctgctgacagcctgggagtgaggctgccttgcacaggcagaacaaatgaataaatgaatgaacgaataaaaattttgacctggtaa

SEQ ID NO: 126739 - DNA, 3717 bp, Artificial Sequence
  derived and/or modified sequence
atgagggcccagggccggggccgcctgccccggcggctgctgctgctgctggccctgtgggtgcaggccgcccggcccatgggctactttgagctgcagctgagcgccctgagaaatgtgaatggagagctgctgagcggggcctgctgtgatggagatggccgcaccaccagggctgggggctgcggccatgatgaatgtgacacctacgtgcgggtgtgcctgaaggagtaccaggccaaggtgacccccaccggcccctgcagctatggccacggggccacccctgtgctgggcggcaacagcttctacctgcccccagctggagctgctggggaccgggcccgggcccgggcccgggccggcggggaccaggaccccggcctggtggtgatccccttccagtttgcctggcccaggagcttcaccctgattgtggaggcctgggactgggacaatgacaccaccccaaatgaggagctgctgattgagcgggtgtcccatgctggcatgatcaacccagaagatcgctggaagagcctgcacttcagcggccacgtggcccacctggagctgcagatccgggtgcgctgtgatgagaactactacagcgccacctgcaacaagttctgccggcccagaaatgacttcttcggccactacacctgtgaccagtatggcaacaaggcctgcatggatggctggatgggcaaggagtgcaaggaggccgtgtgcaagcagggctgcaacctgctgcatggaggctgcaccgtgcctggagaatgtcgctgcagctatggctggcagggccgcttctgtgatgaatgtgtgccctacccaggctgtgtgcacggcagctgtgtggagccctggcagtgcaactgtgagaccaactggggcggcctgctgtgtgacaaggacctgaactactgcggcagccaccacccctgcaccaatggaggcacctgcatcaatgctgagccagaccagtaccgctgcacctgcccagatggctacagcggcaggaactgtgagaaggccgagcacgcctgcaccagcaacccctgtgccaacggcggcagctgccacgaggtgcccagcggctttgagtgccactgccccagcggctggagcggccccacctgtgccctggacattgatgaatgtgccagcaacccctgtgccgccggcggcacctgtgtggaccaggtggatggctttgagtgcatctgcccagagcagtgggtgggcgccacctgccagctggatgccaatgaatgtgagggcaagccctgcctgaatgccttcagctgcaagaacctgattggaggctactactgtgactgcatccctggctggaagggcatcaactgccacatcaacgtgaatgactgccggggccagtgccagcacggcggcacctgcaaggacctggtgaatggctaccagtgtgtgtgcccccggggctttggaggccgccactgtgagctggagagagatgaatgtgccagcagcccctgccacagcggcggcctgtgtgaggacctggctgatggcttccactgccactgcccccagggcttcagcggccccctgtgtgaggtggatgtggacctgtgtgagcccagcccctgcagaaatggagcccgctgctacaacctggagggggactactactgtgcctgcccagatgactttggaggcaagaactgcagcgtgccccgggagccctgccctggaggagcctgccgggtgattgatggctgcggcagtgatgctggccctggcatgcctggaacagctgccagcggcgtgtgtggcccccacggccgctgtgtgtcccagcccggcggcaacttcagctgcatctgtgacagcggcttcaccggcacctactgccatgaaaatattgatgactgcctgggccagccctgcagaaatggaggcacctgcattgatgaggtggatgccttccgctgcttctgccccagcggctgggagggggagctgtgtgacaccaaccccaatgactgcctgcctgacccctgccacagccggggccgctgctatgacctggtgaatgacttctactgtgcctgtgatgatggctggaagggcaagacctgccacagccgggagttccagtgtgatgcctacacctgcagcaatggaggcacctgctatgacagcggggacaccttccgctgtgcctgccccccaggctggaagggcagcacctgtgctgtggccaagaacagcagctgcctgcccaacccctgtgtgaatggaggcacctgtgtgggcagcggggccagcttcagctgcatctgcagagatggctgggagggccgcacctgcacccacaacaccaatgactgcaaccccctgccctgctacaacggcggcatctgtgtggatggagtgaactggttccgctgtgaatgtgcccctggctttgctggccctgactgccgcatcaacattgatgagtgccagagcagcccctgtgcctacggggccacctgtgtggatgagatcaatggctaccgctgcagctgccccccaggccgggccggcccccgctgccaggaggtgattggcttcggccgcagctgctggagccggggcacccccttcccccacggcagctcctgggtggaggactgcaacagctgccgctgcctggatggccggcgggactgcagcaaggtgtggtgtggctggaagccctgcctgctggccggccagcctgaggccctgagcgcccagtgccccctgggccagcgctgcctggagaaggcccctggccagtgcctgcggcccccctgtgaggcctggggagaatgtggggctgaggagccccccagcaccccctgcctgcccaggagcggccacctggacaacaactgtgcccggctgaccctgcacttcaacagagaccacgtgccccagggcaccaccgtgggcgccatctgcagcggcatccgcagcctgcctgccaccagggctgtggcccgggaccggctgctggtgctgctgtgtgaccgggccagcagcggggccagcgctgtggaggtggccgtgtccttcagccctgcccgggacctgcctgacagcagcctcatccagggcgccgcccacgccatcgtggccgccatcacccagaggggcaacagcagcctgctgctggccgtgacagaggtgaaggtggagaccgtggtgactggaggcagcagcacaggcctgctggtgcctgtgctgtgtggggccttctctgtgctgtggctggcctgtgtggtgctgtgtgtgtggtggaccaggaagaggaggaaggagcgggagaggagccggctgccccgggaggagagcgccaacaaccagtgggcccccctgaaccccatccggaaccccatcgagaggcctgggggccacaaggatgtgctgtaccagtgcaagaacttcaccccacctccaagaagagcagatgaggccctgcccggccctgctggccacgccgctgtgcgggaggatgaagaagatgaggacctgggccgcggggaggaggacagcctggaggccgagaagttcctgagccacaagttcaccaaggaccccggccgcagccctggccggcctgcccactgggccagcggccccaaggtggacaacagagctgtgcgcagcatcaatgaggcccgctatgccggcaaggagtag

SEQ ID NO: 126740 - DNA, 3717 bp, Artificial Sequence
  derived and/or modified sequence
atgcgggcccagggccggggccggctgccccggcggctgctgctgctgcttgctctttgggtccaagccgctcggcccatggggtacttcgaactccaactttcagctctccgcaatgtcaacggggagctcttgtctggggcctgctgtgacggggatggccgcacaacaagggccggagggtgtggacacgacgaatgcgacacatatgtccgcgtttgtttaaaagagtatcaagccaaagtcactcctaccggaccatgctcgtatggacacggggcaacgcccgttctgggtggcaactctttctacctgccgcccgcaggagctgccggcgacagagcaagggctcgtgccagagcgggcggagatcaggacccaggactagtcgtcatcccatttcaattcgcttggcccaggtccttcacacttatcgtggaagcatgggattgggacaacgacacaactcccaacgaggaactgctaatagagcgtgtctctcacgccgggatgatcaaccctgaagacagatggaagagcctgcatttctctggccatgtagctcatctggagctgcaaatacgagttaggtgtgacgagaattactacagcgcaacgtgtaataaattttgtcggcctcgaaacgacttctttggacactacacatgcgaccaatatggcaataaagcatgtatggatggttggatgggcaaagagtgtaaggaggccgtctgcaaacaggggtgtaatctgctacatggtggctgtaccgtacccggggaatgtcgctgctcgtacggttggcagggccgattttgcgacgaatgcgtgccctacccaggatgtgtgcacggttcatgcgtggaaccctggcagtgcaactgcgagacaaattggggcggattgctgtgtgacaaagacctgaattattgcggaagtcaccacccctgtaccaacgggggaacttgcattaacgctgagcccgatcagtataggtgcacttgtccagatggctactcaggcaggaactgcgagaaagcagagcacgcttgtacaagcaatccttgtgctaacggcgggtcctgccacgaagttcccagcggatttgagtgccattgtccatcaggatggtcaggcccaacctgcgccttagatattgacgaatgtgctagtaatccctgcgcagctggagggacatgtgtggatcaggtggacggtttcgagtgcatctgccccgaacagtgggtgggggccacatgtcagctggacgctaacgagtgtgagggcaaaccttgtctgaatgctttttcctgtaaaaacctcattggagggtattattgcgactgtatacccggctggaagggcatcaattgtcacattaatgtcaatgactgccggggtcagtgccaacatggcgggacatgtaaggatctggtgaacggttatcagtgtgtttgccctaggggattcggcggaaggcactgcgaattggagagagatgagtgtgctagctctccgtgccatagcggggggctgtgtgaagatctcgcagacggtttccattgtcactgtccgcagggattcagcggtccactgtgtgaggtggatgtcgacctttgtgagcctagcccctgccgcaatggtgctaggtgctacaacctcgagggagactattactgcgcatgtccagatgattttgggggcaagaactgttctgtgcctagagaaccctgtcctggcggcgcttgccgagtaattgatggatgcggctctgacgccggtcctggaatgcctggaactgcggccagcggcgtctgtgggccccacggaaggtgcgtctcccagcccggcggaaacttcagctgcatatgcgattccggattcaccgggacgtattgtcatgagaacattgacgactgcctaggccagccttgtcgcaatggcggcacatgcatcgacgaagtggacgccttccgatgcttttgtccttccggctgggaaggcgagctatgcgataccaaccccaatgattgtttaccagacccttgccacagccgcggacgttgttacgatctggtaaacgatttttactgtgcttgcgatgacggatggaagggcaaaacttgtcatagtcgcgaattccagtgtgacgcctatacatgttctaacggaggaacatgctatgacagcggtgatacatttcggtgcgcctgtcccccggggtggaagggaagtacctgtgcggtggctaagaacagctcgtgtttaccaaatccttgtgtgaatggagggacatgcgtgggaagcggggcctcgtttagttgcatttgtagagacggctgggagggtagaacatgtacacacaacactaatgactgcaatcccctgccgtgctataatgggggaatttgtgtggacggagtgaactggtttcgctgtgagtgcgctccagggtttgccggccctgactgccgaatcaatattgacgaatgtcagagctctccctgtgcatatggtgctacatgcgtagacgaaatcaatggatataggtgtagctgcccacccggacgagctggcccccgatgccaagaggttatcggcttcggacggtcttgctggtcacggggaacacctttcccacacggatcctcttgggttgaggattgcaactcctgtcgctgtctcgacggcaggagagactgttcaaaagtttggtgtgggtggaaaccctgtttgttggccggacagcctgaagcattgagtgctcagtgtccgcttggccagcggtgtctggaaaaggcgccaggacagtgcctgagaccaccgtgtgaagcctggggggaatgcggagccgaagaaccgccttcaaccccatgtttaccccgctctggccacctggataataattgtgcacgcttgaccttacattttaaccgtgaccacgtgcctcagggaacaaccgtcggtgccatatgttctgggattcgcagtctcccagccacgcgcgctgttgccagggacaggctcctggtgctgctgtgtgaccgggccagcagtggagcctccgctgtagaagtggcagtcagcttttctcctgcacgcgacctgcctgactcttctcttatccaaggcgctgctcatgccatagtggcagccataacacagcgcgggaatagtagcctgctcctggctgtcactgaagtaaaagttgaaacggtcgtgaccgggggttcctcgactggcttgctcgtgccggtgctgtgcggtgcattttccgtgctgtggctagcttgtgtcgttctgtgcgtttggtggactcggaagcgaagaaaagagcgtgagagaagtcgcctgccgcgggaggaaagtgccaataatcagtgggccccacttaatcctatcaggaatcctatcgagcggccaggaggacataaggacgtgctgtaccaatgcaaaaatttcacaccgcccccacgaagagccgacgaggcactgcccggcccagctggacacgccgccgttcgcgaggatgaggaagacgaggacttgggccgtggggaggaagatagtttagaggcagagaagtttctgtcacataagtttactaaggatccaggacggtctcctggacggccagcccattgggcctccggcccaaaggtagataatcgggctgtccggtcaataaacgaagctcggtatgctggcaaagaatag

SEQ ID NO: 126741 - DNA, 3717 bp, Artificial Sequence
  derived and/or modified sequence
atgcgggcacagggtcgcggtcgactgcccaggcgcctcctcctcctgttggcattgtgggttcaagccgcacggccaatgggttacttcgagttgcagttgagcgccctgcgcaatgtcaatggggaactattgagcggagcatgttgcgacggcgatggtaggacaacccgtgctggagggtgtgggcacgacgagtgcgatacatacgtgcgcgtctgcctgaaggaataccaagcgaaggtcacacccacgggcccttgtagttacggccacggcgcaacccctgtgctaggcggaaatagcttttatctgcctccagccggtgctgctggggatagagcacgggctagagccagggcaggaggagatcaggacccgggactggtcgtcataccttttcagtttgcatggcccaggagctttaccctcatagtggaagcgtgggattgggacaatgacacaacccccaacgaggaattgctcatcgaaagggtgtcccacgccggtatgataaacccagaagaccggtggaagagcctgcactttagcgggcacgtcgctcacctggagctgcagatccgagtcagatgcgacgaaaattattatagtgccacttgtaataagttctgtcggccaagaaatgatttttttggacattacacctgtgaccagtacggaaacaaggcttgtatggacggttggatgggaaaggaatgcaaagaggccgtttgcaagcagggctgcaacctgctccatgggggttgcacagtacccggagagtgccgctgctcgtacggttggcaggggaggttttgcgatgagtgcgtgccctaccctggctgtgtgcatgggtcatgcgtcgagccctggcagtgcaattgcgagactaattggggcggactcctgtgtgacaaagatctgaattactgcgggtctcaccatccgtgcaccaatggaggcacatgcatcaacgctgagcctgaccagtacagatgcacatgccccgatggctacagtggtagaaattgcgagaaagccgagcacgcctgtaccagtaacccttgcgccaatgggggaagctgccacgaagttccttctggcttcgaatgtcactgcccctcaggctggtccggccctacatgtgccctggacatagatgaatgcgcatccaatccttgtgcagcaggaggcacttgcgtggaccaggtcgatgggttcgagtgtatctgccccgaacagtgggtgggtgccacatgccagttggatgcaaatgagtgcgagggaaaaccctgtctgaacgctttttcctgtaagaacctgattggcggatactattgtgattgtatacccggttggaaaggcattaactgccacataaatgttaatgactgccgcggtcaatgtcagcacggtggaacctgcaaggatctcgtgaatgggtaccagtgtgtgtgccccagaggctttggtgggagacactgtgagctggagcgggacgagtgtgccagcagcccgtgccattccggaggtctgtgtgaagatctggccgatgggttccactgccactgtccgcagggcttttctggcccactctgcgaggtcgacgtagacctgtgcgagcctagcccctgccggaatggggctaggtgttacaacctggagggagactactattgcgcttgccctgacgatttcgggggtaaaaactgtagcgtgcctcgtgaaccatgtcctggcggagcatgtagagtcattgacgggtgtggtagcgatgctggcccagggatgcccggaacagccgcatcaggggtctgtggcccacatggtcgttgcgtatctcagccgggaggcaatttcagctgtatatgcgattcagggtttaccggcacatactgtcatgaaaacatagacgattgtctcggtcagccctgtaggaacgggggaacatgcatcgacgaggttgatgcgttcagatgtttttgccccagtggatgggaaggcgaactgtgtgacacaaaccccaacgactgcctcccagatccctgtcacagccgcggacgatgttacgatctggtcaatgacttctattgtgcatgcgatgacgggtggaagggcaagacctgtcacagtagggagttccagtgtgacgcttatacatgcagtaacggcggtacttgctacgactccggggacactttcaggtgtgcatgtccacccggatggaagggaagcacctgcgctgtggctaaaaactcaagctgcctccccaatccttgcgtgaatggtggaacatgcgtgggctccggtgcaagttttagttgcatttgtagagatggctgggaaggcaggacatgtactcacaacaccaacgactgtaacccactcccctgctacaacggcggtatctgtgtcgatggggtcaactggtttcggtgcgagtgcgcgccaggatttgccggtcccgactgtagaataaacatagacgaatgtcaatcaagtccctgcgcctacggcgcaacctgcgtggacgagattaacggctataggtgcagttgccctccaggcagggccggtcctagatgccaggaagtgatcggcttcgggaggtcatgctggagccgcggtacacccttcccgcacggtagctcatgggtggaagactgcaattcatgtcgttgcctagacgggaggcgggactgtagcaaggtgtggtgcgggtggaagccatgtctgctagcaggccagccagaagcactttctgcgcaatgccctttgggtcaaaggtgcctggaaaaagcgccaggacagtgcctgaggccaccttgcgaagcttggggggagtgtggagcagaagaacccccttctaccccctgcctgccaaggtccgggcatctggataacaattgcgcccgtctcaccctacattttaatcgggatcacgtgccccaagggaccaccgtcggtgccatttgcagtggaatccgctctcttcctgccacaagagcagtggccagagaccggttgttggttttactctgtgatagagctagctctggggctagcgcagtggaagtggcagtatccttcagtcccgctcgcgacctacctgactctagcctcatccagggcgctgctcacgcgattgttgcggcaatcacccagaggggcaacagtagcctactgttggccgttacggaagttaaggtcgagacagtggttactggaggctcctccacaggcctcctagtacctgtgctatgtggcgcatttagcgttctttggctggcgtgtgttgtcctgtgcgtgtggtggactagaaaaagacgaaaggagagagagagatcgcgcttgccccgagaagagtccgctaacaatcagtgggccccactgaatccgatccggaatccaatcgagcgtccgggagggcacaaggacgtgctgtatcagtgtaagaattttactcctccgcctcggagggcggatgaggctctaccaggacccgctggtcacgctgcagtccgagaggacgaggaggatgaagacttaggtcggggagaggaggactccctggaagctgagaagtttctgtcacataagttcactaaagatcccggtcggagcccgggaagacccgcacattgggcttcgggcccaaaggtcgataatcgcgcagtcagatccatcaacgaggctcggtatgcagggaaggaatag

SEQ ID NO: 126742 - DNA, 3717 bp, Artificial Sequence
  derived and/or modified sequence
atgagagcccagggcagaggcagactgcccagaagactgctgctgctgctggccctgtgggtgcaggccgccagacccatgggctacttcgagctgcagctgagcgccctgagaaacgtgaacggcgagctgctgagcggcgcctgctgcgacggcgacggcagaaccaccagagccggcggctgcggccacgacgagtgcgacacctacgtgagagtgtgcctgaaggagtaccaggccaaggtgacccccaccggcccctgcagctacggccacggcgccacccccgtgctgggcggcaacagcttctacctgccccccgccggcgccgccggcgacagagccagagccagagccagagccggcggcgaccaggaccccggcctggtggtgatccccttccagttcgcctggcccagaagcttcaccctgatcgtggaggcctgggactgggacaacgacaccacccccaacgaggagctgctgatcgagagagtgagccacgccggcatgatcaaccccgaggacagatggaagagcctgcacttcagcggccacgtggcccacctggagctgcagatcagagtgagatgcgacgagaactactacagcgccacctgcaacaagttctgcagacccagaaacgacttcttcggccactacacctgcgaccagtacggcaacaaggcctgcatggacggctggatgggcaaggagtgcaaggaggccgtgtgcaagcagggctgcaacctgctgcacggcggctgcaccgtgcccggcgagtgcagatgcagctacggctggcagggcagattctgcgacgagtgcgtgccctaccccggctgcgtgcacggcagctgcgtggagccctggcagtgcaactgcgagaccaactggggcggcctgctgtgcgacaaggacctgaactactgcggcagccaccacccctgcaccaacggcggcacctgcatcaacgccgagcccgaccagtacagatgcacctgccccgacggctacagcggcagaaactgcgagaaggccgagcacgcctgcaccagcaacccctgcgccaacggcggcagctgccacgaggtgcccagcggcttcgagtgccactgccccagcggctggagcggccccacctgcgccctggacatcgacgagtgcgccagcaacccctgcgccgccggcggcacctgcgtggaccaggtggacggcttcgagtgcatctgccccgagcagtgggtgggcgccacctgccagctggacgccaacgagtgcgagggcaagccctgcctgaacgccttcagctgcaagaacctgatcggcggctactactgcgactgcatccccggctggaagggcatcaactgccacatcaacgtgaacgactgcagaggccagtgccagcacggcggcacctgcaaggacctggtgaacggctaccagtgcgtgtgccccagaggcttcggcggcagacactgcgagctggagagagacgagtgcgccagcagcccctgccacagcggcggcctgtgcgaggacctggccgacggcttccactgccactgcccccagggcttcagcggccccctgtgcgaggtggacgtggacctgtgcgagcccagcccctgcagaaacggcgccagatgctacaacctggagggcgactactactgcgcctgccccgacgacttcggcggcaagaactgcagcgtgcccagagagccctgccccggcggcgcctgcagagtgatcgacggctgcggcagcgacgccggccccggcatgcccggcaccgccgccagcggcgtgtgcggcccccacggcagatgcgtgagccagcccggcggcaacttcagctgcatctgcgacagcggcttcaccggcacctactgccacgagaacatcgacgactgcctgggccagccctgcagaaacggcggcacctgcatcgacgaggtggacgccttcagatgcttctgccccagcggctgggagggcgagctgtgcgacaccaaccccaacgactgcctgcccgacccctgccacagcagaggcagatgctacgacctggtgaacgacttctactgcgcctgcgacgacggctggaagggcaagacctgccacagcagagagttccagtgcgacgcctacacctgcagcaacggcggcacctgctacgacagcggcgacaccttcagatgcgcctgcccccccggctggaagggcagcacctgcgccgtggccaagaacagcagctgcctgcccaacccctgcgtgaacggcggcacctgcgtgggcagcggcgccagcttcagctgcatctgcagagacggctgggagggcagaacctgcacccacaacaccaacgactgcaaccccctgccctgctacaacggcggcatctgcgtggacggcgtgaactggttcagatgcgagtgcgcccccggcttcgccggccccgactgcagaatcaacatcgacgagtgccagagcagcccctgcgcctacggcgccacctgcgtggacgagatcaacggctacagatgcagctgcccccccggcagagccggccccagatgccaggaggtgatcggcttcggcagaagctgctggagcagaggcacccccttcccccacggcagcagctgggtggaggactgcaacagctgcagatgcctggacggcagaagagactgcagcaaggtgtggtgcggctggaagccctgcctgctggccggccagcccgaggccctgagcgcccagtgccccctgggccagagatgcctggagaaggcccccggccagtgcctgagacccccctgcgaggcctggggcgagtgcggcgccgaggagccccccagcaccccctgcctgcccagaagcggccacctggacaacaactgcgccagactgaccctgcacttcaacagagaccacgtgccccagggcaccaccgtgggcgccatctgcagcggcatcagaagcctgcccgccaccagagccgtggccagagacagactgctggtgctgctgtgcgacagagccagcagcggcgccagcgccgtggaggtggccgtgagcttcagccccgccagagacctgcccgacagcagcctgatccagggcgccgcccacgccatcgtggccgccatcacccagagaggcaacagcagcctgctgctggccgtgaccgaggtgaaggtggagaccgtggtgaccggcggcagcagcaccggcctgctggtgcccgtgctgtgcggcgccttcagcgtgctgtggctggcctgcgtggtgctgtgcgtgtggtggaccagaaagagaagaaaggagagagagagaagcagactgcccagagaggagagcgccaacaaccagtgggcccccctgaaccccatcagaaaccccatcgagagacccggcggccacaaggacgtgctgtaccagtgcaagaacttcacccccccccccagaagagccgacgaggccctgcccggccccgccggccacgccgccgtgagagaggacgaggaggacgaggacctgggcagaggcgaggaggacagcctggaggccgagaagttcctgagccacaagttcaccaaggaccccggcagaagccccggcagacccgcccactgggccagcggccccaaggtggacaacagagccgtgagaagcatcaacgaggccagatacgccggcaaggagtag

SEQ ID NO: 126743 - protein, 347 aa, Artificial Sequence
  derived and/or modified sequence
MCTKMEQPFYHDDSYTATGYGRAPGGLSLHDYKLLKPSLAVNLADPYRSLKAPGARGPGPEGGGGGSYFSGQGSDTGASLKLASSELERLIVPNSNGVITTTPTPPGQYFYPRGGGSGGGAGGAGGGVTEEQEGFADGFVKALDDLHKMNHVTPPNVSLGATGGPPAGPGGVYAGPEPPPVYTNLSSYSPASASSGGAGAAVGTGSSYPTTTISYLPHAPPFAGGHPAQLGLGRGASTFKEEPQTVPEARSRDATPPVSPINMEDQERIKVERKRLRNRLAATKCRKRKLERIARLEDKVKTLKAENAGLSSTAGLLREQVAQLKQKVMTHVSNGCQLLLGVKGHAF

SEQ ID NO: 126744 - DNA, 1832 bp, Artificial Sequence
  derived and/or modified sequence
gagcggccaggccagcctcggagccagcagggagctgggagctgggggaaacgacgccaggaaagctatcgcgccagagagggcgacgggggctcgggaagcctgacagggcttttgcgcacagctgccggctggctgctacccgcccgcgccagcccccgagaacgcgcgaccaggcacccagtccggtcaccgcagcggagagctcgccgctcgctgcagcgaggcccggagcggccccgcagggaccctccccagaccgcctgggccgcccggatgtgcactaaaatggaacagcccttctaccacgacgactcatacacagctacgggatacggccgggcccctggtggcctctctctacacgactacaaactcctgaaaccgagcctggcggtcaacctggccgacccctaccggagtctcaaagcgcctggggctcgcggacccggcccagagggcggcggtggcggcagctacttttctggtcagggctcggacaccggcgcgtctctcaagctcgcctcttcggagctggaacgcctgattgtccccaacagcaacggcgtgatcacgacgacgcctacacccccgggacagtacttttacccccgcgggggtggcagcggtggaggtgcagggggcgcagggggcggcgtcaccgaggagcaggagggcttcgccgacggctttgtcaaagccctggacgatctgcacaagatgaaccacgtgacaccccccaacgtgtccctgggcgctaccggggggcccccggctgggcccgggggcgtctacgccggcccggagccacctcccgtttacaccaacctcagcagctactccccagcctctgcgtcctcgggaggcgccggggctgccgtcgggaccgggagctcgtacccgacgaccaccatcagctacctcccacacgcgccgcccttcgccggtggccacccggcgcagctgggcttgggccgcggcgcctccaccttcaaggaggaaccgcagaccgtgccggaggcgcgcagccgggacgccacgccgccggtgtcccccatcaacatggaagaccaagagcgcatcaaagtggagcgcaagcggctgcggaaccggctggcggccaccaagtgccggaagcggaagctggagcgcatcgcgcgcctggaggacaaggtgaagacgctcaaggccgagaacgcggggctgtcgagtaccgccggcctcctccgggagcaggtggcccagctcaaacagaaggtcatgacccacgtcagcaacggctgtcagctgctgcttggggtcaagggacacgccttctgaacgtcccctgcccctttacggacaccccctcgcttggacggctgggcacacgcctcccactggggtccagggagcaggcggtgggcacccaccctgggacctaggggcgccgcaaaccacactggactccggccctcctaccctgcgcccagtccttccacctcgacgtttacaagcccccccttccacttttttttgtatgttttttttctgctggaaacagactcgattcatattgaatataatatatttgtgtatttaacagggaggggaagagggggcgatcgcggcggagctggccccgccgcctggtactcaagcccgcggggacattgggaaggggacccccgccccctgccctcccctctctgcaccgtactgtggaaaagaaacacgcacttagtctctaaagagtttattttaagacgtgtttgtgtttgtgtgtgtttgttctttttattgaatctatttaagtaaaaaaaaaattggttctttaaaaaaaaaaaaaaaaa

SEQ ID NO: 126745 - DNA, 1044 bp, Artificial Sequence
  derived and/or modified sequence
atgtgcaccaagatggagcagcccttctaccacgacgacagctacaccgccaccggctacggcagagcccccggcggcctgagcctgcacgactacaagctgctgaagcccagcctggccgtgaacctggccgacccctacagaagcctgaaggcccccggcgccagaggccccggccccgagggcggcggcggcggcagctacttcagcggccagggcagcgacaccggcgccagcctgaagctggccagcagcgagctggagagactgatcgtgcccaacagcaacggcgtgatcaccaccacccccaccccccccggccagtacttctaccccagaggcggcggcagcggcggcggcgccggcggcgccggcggcggcgtgaccgaggagcaggagggcttcgccgacggcttcgtgaaggccctggacgacctgcacaagatgaaccacgtgaccccccccaacgtgagcctgggcgccaccggcggcccccccgccggccccggcggcgtgtacgccggccccgagcccccccccgtgtacaccaacctgagcagctacagccccgccagcgccagcagcggcggcgccggcgccgccgtgggcaccggcagcagctaccccaccaccaccatcagctacctgccccacgccccccccttcgccggcggccaccccgcccagctgggcctgggcagaggcgccagcaccttcaaggaggagccccagaccgtgcccgaggccagaagcagagacgccaccccccccgtgagccccatcaacatggaggaccaggagagaatcaaggtggagagaaagagactgagaaacagactggccgccaccaagtgcagaaagagaaagctggagagaatcgccagactggaggacaaggtgaagaccctgaaggccgagaacgccggcctgagcagcaccgccggcctgctgagagagcaggtggcccagctgaagcagaaggtgatgacccacgtgagcaacggctgccagctgctgctgggcgtgaagggccacgccttctag

SEQ ID NO: 126746 - DNA, 1044 bp, Artificial Sequence
  derived and/or modified sequence
atgtgcactaaaatggaacagcccttctaccatgacgattcttataccgcaacgggctacgggagagccccagggggtttgtctcttcacgattacaagctactcaaaccatcactcgctgttaacttggccgacccctaccgttcccttaaagcccccggcgcccgtggaccagggcccgaaggaggcggaggcgggtcatacttctccgggcaggggtctgacactggtgccagtctcaagttagcaagctccgagctggaacggcttatcgtgcccaactccaacggggtgattacgacgacccctacaccaccaggacagtacttctatcctcgtgggggcggaagcggggggggggccggaggagccggggggggtgttacagaagagcaggaaggcttcgccgacggcttcgttaaggcgctggatgatctccataagatgaatcatgtgacaccacctaatgtgtctcttggcgccactggcgggccgcccgccggccctggcggagtatatgcagggcccgaaccacctcccgtgtataccaaccttagctcttactcccccgcttctgcctcctccggaggagctggggccgccgtgggcaccggttcctcatatccgacaactacaatctcgtacctcccccatgctcctccattcgcgggagggcaccccgctcagcttgggcttgggcggggcgctagcaccttcaaagaagagccacaaacggtgcccgaggcccggtcgagggacgccaccccaccagtgagccccattaatatggaagaccaagagcggattaaagtggaacggaaacgcctgaggaacagactggccgccaccaaatgcagaaaacgtaagttagagcgcattgcccgcttggaagataaggtgaagacactaaaggccgagaatgcagggctgtcctcaaccgcgggcctcttgcgcgaacaggtagcccagctgaagcagaaagtgatgacacacgtgagcaatgggtgccagttgctcctgggtgtgaagggccatgccttttag

SEQ ID NO: 126747 - DNA, 1044 bp, Artificial Sequence
  derived and/or modified sequence
atgtgcaccaagatggagcagcccttctaccatgatgacagctacacagccaccggctacggccgggcccctgggggcctgagcctgcatgactacaagctgctgaagcccagcctggccgtgaacctggccgacccctaccgcagcctgaaggcccctggggcccggggccctggccctgagggcggcggcggcggcagctacttcagcggccagggcagtgacaccggggccagcctgaagctggccagcagcgagctggagcggctgattgtgcccaacagcaatggagtcatcaccaccacccccaccccacctggccagtacttctacccccggggcggcggcagcggcggcggggccggcggggccggcggcggcgtgacagaggagcaggagggctttgctgatggctttgtgaaggccctggatgacctgcacaagatgaaccacgtgaccccacccaacgtgtccctgggcgccaccggcggccccccagctggccctggaggagtgtatgccggccctgagcccccacctgtgtacaccaacctgagcagctacagccctgccagcgccagcagtggaggagctggagctgctgtgggcaccggcagcagctaccccaccaccaccatctcctacctgccccacgcccccccatttgctgggggccacccagcccagctgggcctgggccgcggggccagcaccttcaaggaggagccccagacagtgcctgaggcccggagcagagatgccaccccacctgtgagccccatcaacatggaggaccaggagcgcatcaaggtggagaggaagaggctgaggaaccggctggccgccaccaagtgcaggaagaggaagctggagagaattgcccggctggaggacaaggtgaagaccctgaaggccgagaatgccggcctgagcagcacagctggcctgctgcgggagcaggtggcccagctgaagcagaaggtgatgacccacgtgtccaatggctgccagctgctgctgggcgtgaagggccacgccttctag

SEQ ID NO: 126748 - DNA, 1815 bp, Artificial Sequence
  derived and/or modified sequence
gagcggccaggccagcctcggagccagcagggagctgggagctgggggaaacgacgccaggaaagctatcgcgccagagagggcgacgggggctcgggaagcctgacagggcttttgcgcacagctgccggctggctgctacccgcccgcgccagcccccgagaacgcgcgaccaggcacccagtccggtcaccgcagcggagagctcgccgctcgctgcagcgaggcccggagcggccccgcagggaccctccccagaccgcctgggccgcccggatgtgcactaaaatggaacagcccttctaccacgacgactcatacacagctacgggatacggccgggcccctggtggcctctctctacacgactacaaactcctgaaaccgagcctggcggtcaacctggccgacccctaccggagtctcaaagcgcctggggctcgcggacccggcccagagggcggcggtggcggcagctacttttctggtcagggctcggacaccggcgcgtctctcaagctcgcctcttcggagctggaacgcctgattgtccccaacagcaacggcgtgatcacgacgacgcctacacccccgggacagtacttttacccccgcgggggtggcagcggtggaggtgcagggggcgcagggggcggcgtcaccgaggagcaggagggcttcgccgacggctttgtcaaagccctggacgatctgcacaagatgaaccacgtgacaccccccaacgtgtccctgggcgctaccggggggcccccggctgggcccgggggcgtctacgccggcccggagccacctcccgtttacaccaacctcagcagctactccccagcctctgcgtcctcgggaggcgccggggctgccgtcgggaccgggagctcgtacccgacgaccaccatcagctacctcccacacgcgccgcccttcgccggtggccacccggcgcagctgggcttgggccgcggcgcctccaccttcaaggaggaaccgcagaccgtgccggaggcgcgcagccgggacgccacgccgccggtgtcccccatcaacatggaagaccaagagcgcatcaaagtggagcgcaagcggctgcggaaccggctggcggccaccaagtgccggaagcggaagctggagcgcatcgcgcgcctggaggacaaggtgaagacgctcaaggccgagaacgcggggctgtcgagtaccgccggcctcctccgggagcaggtggcccagctcaaacagaaggtcatgacccacgtcagcaacggctgtcagctgctgcttggggtcaagggacacgccttctgaacgtcccctgcccctttacggacaccccctcgcttggacggctgggcacacgcctcccactggggtccagggagcaggcggtgggcacccaccctgggacctaggggcgccgcaaaccacactggactccggccctcctaccctgcgcccagtccttccacctcgacgtttacaagcccccccttccacttttttttgtatgttttttttctgctggaaacagactcgattcatattgaatataatatatttgtgtatttaacagggaggggaagagggggcgatcgcggcggagctggccccgccgcctggtactcaagcccgcggggacattgggaaggggacccccgccccctgccctcccctctctgcaccgtactgtggaaaagaaacacgcacttagtctctaaagagtttattttaagacgtgtttgtgtttgtgtgtgtttgttctttttattgaatctatttaagtaaaaaaaaaattggttcttt

SEQ ID NO: 126749 - DNA, 1044 bp, Artificial Sequence
  derived and/or modified sequence
atgtgcaccaagatggagcagcccttctaccacgacgacagctacaccgccacagggtacgggcgggcccctgggggtctctcactccacgactataagctgctgaaaccctctctagctgtcaatttggccgacccctacagatcgcttaaggcccctggtgcgcgagggcctggaccagagggcggaggaggtggatcctacttcagcggacaggggagcgacactggagccagtctgaaattggcttcatccgagctcgaacgtctaatcgtgccaaactccaacggggttatcacgacaacacccacgcctcctggacagtatttctaccccagagggggcggcagcggcgggggcgcaggaggagcaggagggggtgtgactgaggagcaggaaggtttcgcggacggcttcgtcaaggcattagacgacctgcacaagatgaatcatgttacaccgcctaacgtcagcttgggcgcgaccggtggacctcctgccggaccaggaggcgtgtacgccgggccggagccccctccggtgtacacaaacctgtcctcttattctcccgcttccgcatccagcgggggcgccggagccgcagtgggcacgggcagctcttaccccacgaccaccataagctacttgccccacgctcctccgttcgccggaggtcacccggcccagctgggcctgggaaggggagcgtctaccttcaaggaggaaccacaaaccgtgccagaagccagaagcagggacgccaccccccctgtgtctcccattaatatggaggatcaggaacgaataaaagtggaaagaaagagactgaggaacaggctagccgctacaaagtgcaggaagaggaaactggaaagaattgcccgtctcgaggacaaggtaaagacactgaaagcagaaaatgcgggcttgagctctacagcggggctgctgcgtgagcaggtcgcacagctgaaacagaaggtcatgacccacgtgtccaatggttgtcagttgctcctgggcgtgaaaggccacgccttttag

SEQ ID NO: 126750 - DNA, 1044 bp, Artificial Sequence
  derived and/or modified sequence
atgtgtactaaaatggagcagcctttttatcacgatgactcctacacagcaaccggctacgggagagcccctggaggcctgtcgctgcacgactacaagctgttaaagccgtctcttgccgtcaatctagccgatccttacaggtccttaaaagcccctggagcgcgaggacctgggcctgagggcggaggtggaggatcatacttttctggtcaagggtccgatactggtgcctctctgaaactcgcctcttccgaactggaaaggctaatcgttccaaacagcaacggagtaattaccactactccaaccccaccaggtcaatacttctaccctcggggaggaggatcaggcggaggtgccggtggcgcaggcggaggagttacagaggagcaggaaggtttcgctgatggattcgttaaagcactggacgacctccacaagatgaaccatgtgacccctcccaacgtatccctgggtgccaccgggggtcctccggcaggaccaggtggcgtctatgctggccctgaacctccaccggtgtataccaacctgtcttcctactcaccagcttccgcatccagtggcggagccggagccgctgtcgggactggaagttcctatcccactactactatatcttacttgccccatgcccctccatttgcaggaggccatccagcccagctggggttggggagaggggcatccacatttaaagaggagccgcaaactgtcccagaagccagaagtcgggacgccacccctcctgtgagcccaatcaatatggaggatcaggagcggattaaagtggagagaaagcgactcaggaacaggctcgccgctaccaagtgccgaaaaagaaagctcgagaggatagctcgcctggaagacaaggttaagaccctgaaggccgaaaacgccggtctgagctccaccgcaggcctcttgagggaacaggtcgcccagcttaaacagaaggtgatgacgcatgtgtccaacggctgtcagcttctccttggcgtcaaagggcacgctttttag

SEQ ID NO: 126751 - protein, 653 aa, Artificial Sequence
  derived and/or modified sequence
MEVAMVSAESSGCNSHMPYGYAAQARARERERLAHSRAAAAAAVAAATAAVEGSGGSGGGSHHHHQSRGACTSHDPQSSRGSRRRRRQRSEKKKAHYRQSSFPHCSDLMPSGSEEKILRELSEEEEDEEEEEEEEEEGRFYYSEDDHGDECSYTDLLPQDEGGGGYSSVRYSDCCERVVINVSGLRFETQMKTLAQFPETLLGDPEKRTQYFDPLRNEYFFDRNRPSFDAILYYYQSGGRLKRPVNVPFDIFTEEVKFYQLGEEALLKFREDEGFVREEEDRALPENEFKKQIWLLFEYPESSSPARGIAIVSVLVILISIVIFCLETLPEFRDDRDLVMALSAGGHGGLLNDTSAPHLENSGHTIFNDPFFIVETVCIVWFSFEFVVRCFACPSQALFFKNIMNIIDIVSILPYFITLGTDLAQQQGGGNGQQQQAMSFAILRIIRLVRVFRIFKLSRHSKGLQILGHTLRASMRELGLLIFFLFIGVILFSSAVYFAEADEPTTHFQSIPDAFWWAVVTMTTVGYGDMKPITVGGKIVGSLCAIAGVLTIALPVPVIVSNFNYFYHRETENEEQTQLTQNAVSCPYLPSNLLKKFRSSTSSSLGDKSEYLEMEEGVKESLCAKEEKCQGKGDDSETDKNNCSNAKAVETDV

SEQ ID NO: 126752 - DNA, 1962 bp, Artificial Sequence
  derived and/or modified sequence
atggaggtggccatggtctccgccgagagttccgggtgcaattcacacatgccttatggctacgctgctcaagcccgtgcacgcgagagagagcggctcgctcacagccgtgccgctgccgctgcggctgtcgcagctgctaccgcagccgtagagggatctggtggttcaggtggggggagccatcaccatcatcaatcccggggggcttgtaccagtcacgatccccagtcgtcaaggggaagccggcgccgccgcaggcagcgctccgagaagaaaaaggctcattaccggcagagttccttccctcactgctccgatctgatgccgtctggctccgaagagaaaatactccgcgagctgtctgaggaggaggaggacgaagaggaagaggaggaggaggaagaggagggacggttttactattccgaagacgatcatggggacgaatgctcctatacggacttgttgccccaggatgaaggaggtggcggatactcctcagtgcgctattccgactgttgtgagagagtagtgatcaatgtttctgggcttcgtttcgaaacccagatgaaaacactagcacagttccctgaaaccttgttaggagacccagagaagcggacccagtacttcgatcccctgcggaatgaatactttttcgacagaaacaggcctagttttgacgctattctgtactattaccagtccggtggacggctcaagcggcctgttaatgttcccttcgacatcttcaccgaggaagtgaaattttatcaattaggagaggaagctctgctcaaattccgagaagatgagggcttcgtacgggaagaggaagatcgggctctaccagagaacgaattcaaaaagcagatttggcttttatttgaatatccggaaagctccagccccgcacgtgggatcgccattgtctctgttctcgtaattttgatctccatcgttatattttgtttggagacactgcccgagtttagagatgatcgggatttggtcatggccttaagcgccggagggcatggagggctgctgaacgatacctcagcacctcacctggaaaacagcggacacactattttcaatgatcccttctttatcgtggagactgtgtgcatcgtctggttctctttcgaattcgtggtgaggtgctttgcttgcccatcgcaggctttgttcttcaaaaatattatgaatatcatagatattgtcagcattctgccttactttatcacgctggggacagacctcgcccagcagcagggtggaggaaatgggcagcagcagcaagctatgtcttttgcgatactgcgtataatacgccttgtacgcgtgttcaggatcttcaagttgtctcgacactcgaaggggctacagatacttgggcatacactccgagctagcatgagagaactgggactgcttatcttttttttgtttatcggagtgatcctgttttcatcagccgtctatttcgccgaggcagacgagcccaccacacactttcagtcaatccctgacgccttttggtgggctgtggttaccatgacgactgttggatatggagacatgaagcctatcacagtcggcggaaaaatcgtcgggtcactgtgcgctattgccggcgtgctgaccatagctctgccagtgccggtaatcgtgagtaattttaattacttctatcaccgagaaaccgagaacgaggagcaaacccagttgactcagaatgcagtgagctgcccctatctgccatcgaacctcctgaaaaagtttcggagctctactagttcttcactgggtgataaatcggaatatctagagatggaggagggcgtcaaagaatccctgtgcgctaaagaggagaagtgccaaggcaaaggtgatgattccgaaaccgataagaataattgttctaacgctaaggcggttgagacagatgtgtag

SEQ ID NO: 126753 - DNA, 1962 bp, Artificial Sequence
  derived and/or modified sequence
atggaggtggccatggtgtctgctgagagcagcggctgcaacagccacatgccctacggctacgccgcccaggcccgggcccgggagcgggagcggctggcccacagcagagctgctgctgctgctgctgtggccgccgccacagctgctgtggagggcagcggcggcagcggcggcggcagccaccaccaccaccagagcagaggagcctgcaccagccatgacccccagagcagccggggcagcagaagaagaagacggcagaggtctgagaagaagaaggcccactaccggcagagcagcttcccccactgcagcgacctgatgcccagcggcagcgaggagaagatcctgcgggagctgtctgaggaggaggaggatgaggaggaggaggaggaggaggaggaggagggccgcttctactacagtgaagatgaccatggagatgagtgcagctacacagacctgctgccccaggatgagggcggcggcggctacagctctgtgcgctacagcgactgctgtgagcgggtggtgatcaacgtgtctggcctgcgctttgagacccagatgaagaccctggcccagtttcctgagaccctgctgggggaccctgagaagaggacccagtactttgaccccctgagaaatgagtacttctttgacaggaaccggcccagctttgatgccatcctgtactactaccagagcggcggccgcctgaagaggcctgtgaatgtgccctttgacatcttcacagaggaggtgaagttctaccagctgggggaggaggccctgctgaagttcagagaagatgagggctttgtgcgggaggaggaggaccgggccctgcctgaaaatgagttcaagaagcagatctggctgctgtttgagtacccagagagcagcagccctgcccggggcatcgccatcgtgtctgtgctggtgatcctgatcagcatcgtcatcttctgcctggagaccctgcctgagttcagagatgaccgggacctggtgatggccctgtctgctgggggccatggaggcctgctgaatgacaccagcgccccccacctggagaacagcggccacaccatcttcaatgaccccttcttcatcgtggagaccgtgtgcatcgtgtggttctcctttgaatttgtggtgcgctgctttgcctgccccagccaggccctcttcttcaagaacatcatgaacatcattgatattgtgtccatcctgccctacttcatcaccctgggcacagacctggcccagcagcagggcggcggcaatggccagcagcagcaggccatgagctttgccatcctgcgcatcatccggctggtgcgggtcttccgcatcttcaagctgagccgccacagcaagggcctgcagatcctgggccacaccctgcgggcctccatgagggagctgggcctgctgatcttcttcctgttcatcggggtcatcctcttcagcagcgctgtgtactttgctgaggctgatgagcccaccacccacttccagagcatcccagatgccttctggtgggccgtggtgaccatgaccaccgtgggctatggagacatgaagcccatcaccgtgggcggcaagatcgtgggcagcctgtgtgccatcgccggcgtgctgaccatcgccctgcctgtgcctgtgattgtgagcaacttcaactacttctaccaccgggagacagaaaatgaggagcagacccagctgacccagaatgctgtgtcctgcccctacctgcccagcaacctgctgaagaagttccgcagcagcaccagcagcagcctgggggacaagtctgagtacctggagatggaggagggcgtgaaggagagcctgtgtgccaaggaggagaagtgccagggcaaaggagatgacagcgagacagacaagaacaactgcagcaatgccaaggctgtggagacagatgtgtag

SEQ ID NO: 126754 - DNA, 1962 bp, Artificial Sequence
  derived and/or modified sequence
atggaggtggccatggtgagcgccgagagcagcggctgcaacagccacatgccgtatgggtatgctgcgcaagcacgcgcacgcgagcgtgagcgattagctcatagcagggcggcagctgcggctgccgtcgcagcagcgacagccgctgtggagggctctggggggagcggcggtggcagccaccaccatcaccagagtcggggggcctgcacaagccacgacccccaatcttcaaggggctcaagacgcagacgtagacaacgctccgagaagaagaaggcccattatcgccaaagcagcttcccccattgttctgaccttatgccgagcgggtctgaggagaaaatcctgcgcgagttaagcgaggaagaagaagatgaagaggaggaggaggaggaagaggaggagggacggttctattactccgaggacgatcatggagacgaatgtagttacaccgacctgctcccacaggatgaaggcggcggaggatactccagcgtccggtattctgactgctgcgagagggtggtcatcaacgtgagtggccttagattcgaaacccagatgaaaacgcttgcacagttccccgagaccctgctgggcgatcccgagaaacgaacacagtacttcgacccactccggaatgaatactttttcgaccgaaatagaccaagtttcgatgccattttgtattattaccagtcgggtggtaggctgaagcggccagtaaacgtgcccttcgatatctttactgaggaggttaaattctaccagctaggagaagaggcactcctgaagttccgcgaggacgagggctttgtgagagaggaggaggatcgtgccctcccggagaacgagtttaagaagcagatttggctcctgttcgaataccctgaaagcagttccccggcacgcggaatcgccatcgtgtcggtgctcgtgatactgatttctatagtgatcttctgcctagagacacttcccgagtttcgcgatgaccgggacctagtgatggccctcagcgccggtggtcatggcgggcttcttaatgataccagtgctccgcatctggaaaactcaggccacactatctttaacgacccattctttattgttgagacagtgtgtatcgtctggttctccttcgagttcgttgtcagatgcttcgcatgcccctcccaagcgctgttctttaaaaatatcatgaacattatcgacattgtctcaatcctgccatatttcataacattggggacagatcttgcgcagcaacagggcggcggaaatggtcagcagcaacaggccatgtcttttgccatcctgcggataattcgtttggtccgggttttccgaatattcaaattgtccagacattccaaaggactgcagattctgggacatacactgagggcgagcatgcgggagttggggcttcttatttttttcctgtttatcggagtgattctgtttagtagcgcggtctacttcgcagaagcggatgagcctactactcacttccaatccattccagatgccttctggtgggctgtggtcactatgaccacagttgggtacggagatatgaagcccattactgtgggcggtaagatcgtaggttccttgtgtgccatcgctggggtgcttacaattgcattgcctgtccccgtaatcgtatccaatttcaattatttttaccaccgcgaaacagaaaatgaggagcagactcagctcacccagaatgcagtgagctgtccctatctgccttctaacctcctcaagaaattcaggtcttcaacaagcagcagtctgggagataagagcgaatatttagagatggaggaaggtgtgaaagaatccttatgtgcaaaagaggaaaaatgtcaggggaagggggatgacagtgaaacagacaagaataattgtagtaatgctaaagccgtggagactgacgtatag

SEQ ID NO: 126755 - DNA, 4172 bp, Artificial Sequence
  derived and/or modified sequence
gttcgcggccaggggaggcgtgtgctgctcccgcagccagcgagagcgagagagggatggatgttggaggaggaattcgggcttaacaagtgatcgctgctgtctaggattttgtttcttttcgggggaaccttgacttcctttcccaggcaatccctcctgtgctgaactccagaggaaccaggagtcttggggtcttctctggggcagccccaacccccacccccaggctccagccgcgaggactctgtgcacccctcgggccaggcaacagaacttgttccgtggatatttggagcctccacctgccaaacccgagtgattccttttaccaccccccgccccccacccaggatcattcttcccctcctccagctgttgcagcttgagggggaaaaacaagccagccggtggattttctttatttttatttttcgccccgccggggaacggtgaagtgcttcttctgcatgattttggctgaagaatgctctgcatttccttgatttctatggagacctcagagctggttttgcttctgctgacacctcatctagcaccttctctacctcccagggtctttgcctctatctgtggtttggcattgtacctgggtacaggaagcctttgatgaacttaaaaggagagcctggagaatcatcctgatagactttgagtagaaatggctggacatacttcaaaccacatcttaacatggttcgagccatcactagaaggcaagtgctaacagtaaaggcttatttgcattttatttacatttaatggactgagcattggccaatttccatggcagaaaaatatatttcattttctaggcacaacttctggctgtcagacacttgctgcctttgaatcttgcagcaacatcactaaccacatcccagacatatttccaaatttcaacatctacccccaaaacataggtgtctgagagactccagcattttcggacttcttagtcttgagagtgccaggctatttatctcgaccagccaagctctggagagcaatgttgaatccctgagaagagagagcatggggcgtgctgatttaaaaacagaaaatgcaaagttggactgaaaatatccttagtcttccaagcaatctgcttaagggttccaaacttaccttaatttggtgagaaaagaagctgccctatttttctttcttcttcttctacaactggaaccagccatttccgaaaaccaccaccatggaggttgcaatggtgagtgcggagagctcagggtgcaacagtcacatgccttatggttatgctgcccaggcccgggcccgggagcgggagaggcttgctcactccagggcagctgcagcagctgctgttgcagcggccacagctgctgtcgaaggtagcgggggttctggtgggggctcccaccaccaccaccagtcacgcggggcctgtacctcccatgaccctcagagcagccggggtagtcggaggaggaggcgacagcggtctgagaagaagaaagcccactaccggcagagcagcttccctcattgctctgacctgatgcccagtggctctgaggagaagatcctgagggagctgagtgaggaggaggaagatgaggaggaggaggaagaggaggaagaggagggaaggttttactatagtgaagatgaccatggtgatgagtgttcctacacggatctgctgcctcaggatgagggcggtggcggctacagttcagtccgctacagtgactgttgtgaacgtgtggtgataaatgtgtcaggcctacgctttgagacccaaatgaaaactctggcccagtttccagagactttgttgggagaccctgaaaagaggactcagtactttgaccctttgcgcaatgagtatttttttgacaggaaccgccccagctttgatgccatcttgtattattatcaatcaggaggccgcctgaagaggccagtcaatgtcccctttgatatcttcactgaggaggtgaagttctatcagttgggggaggaggccctgttgaagtttcgggaggacgagggctttgtgagagaagaggaagacagggccctccccgagaatgaatttaaaaagcagatttggctcctctttgaatatccagagagctccagtcctgcaaggggcatagccattgtgtccgtcctggtcatcttaatctccattgtcatcttttgcctggaaaccttgcctgagtttagggacgacagggatctcgtcatggcactgagtgctggcgggcatggtgggttgttgaatgatacttcagcaccccatctggagaactcagggcacacaatattcaatgaccccttcttcatcgtggaaacagtctgtattgtatggttttcctttgagtttgtggttcgctgctttgcttgtcccagccaagcactcttcttcaaaaacatcatgaacatcattgacattgtctccattttgccttacttcatcacactgggcactgacctggcccagcaacaggggggtggcaatggtcagcagcagcaggccatgtcctttgccatcctcagaatcattcgtctggtccgagtattccggatcttcaaactctccaggcactccaaaggcctgcagatcctgggccacaccctcagagccagcatgcgggaactgggccttctgatcttcttcctcttcattggggtcatcctcttttctagtgctgtgtattttgcagaggcggatgaacctactacccatttccaaagcatcccagatgcattttggtgggctgtggtgaccatgacaactgtgggctatggggacatgaagcccatcactgtagggggcaagattgtcgggtccctgtgtgccattgcgggtgtcttaaccattgctttgccagtgccagtgattgtctctaactttaactatttctaccacagagagactgaaaatgaggaacagacacagctaacgcagaatgcagtcagttgtccatacctcccctctaatttgctcaagaaatttcggagctctacttcttcttccctgggggacaagtcagagtatctagagatggaagaaggagttaaggaatctctgtgtgcaaaggaggagaagtgtcagggaaagggggatgacagtgagacagataaaaacaactgttctaatgcaaaggctgtggagactgatgtgtgaatctttttccacctgccactgctcccccctcagcatctccaaatatatttatgcatagagagtgcagttatgaaaatgaaatatgcaaatgatccaatgcatacagtagtacactatttaatggttatacatggcataattgttactaaacttgtattacatatcaaataaatgatacatcttggagaagagggaggaataggagcaaatctatctttatatttttattagaatgcaagaattttgcacattaactggaaaagatgttaacagtaaagatggagagagagagtgtgtgcgtgtgtgtgtatatgtgtgtgtgtgtgaagtaaattgtcaatgttagtaattgtgcagtgaagggaaaagttggcattttgaagtatttactatgtaagaactaatgaatctgagcagtcatttatcagtgctttaacagcatatcgtatgtctttggattctgtagttgttttttaaaaattgtaagaaatactgtgtagagaaaaaagaaagtaaattatttaatagactataggtcacaattttatcttggatttaattaaaatttatttttaactggaaattaacttttaaaaaggctgcaagggcctttagaaattgattatattttgttattaattttgggaagacttaacagcaaatgtctaacattatagaataagtgaaattggagaatatgtaataagttttgtttgcaggtaacaggactggatttttttttctttgcactactttatatgctggagattgagagagacttcaaactgtgaatgtttactaatgtaacagttcaatgacaatcattggaagaatgatttctttagtcttattttattgttttcttttcattgtgtgagactaatgatcatgcagataacatcacaggattctctcctcttttaaaatctaaataactgattgacaaaggaattatgaagtaaaatttagcaactga

SEQ ID NO: 126756 - DNA, 1962 bp, Artificial Sequence
  derived and/or modified sequence
atggaggttgccatggtgagtgcagagagctctggctgcaatagccatatgccatatggctacgcagcacaagcccgtgccagggagagggaacgactggcccattcacgagctgccgcagctgcagccgtggcagcagctacagccgcagtggagggatcaggaggatccggagggggttcccatcaccatcatcagtcaagaggcgcatgcacatcacatgacccacagagtagtagaggctcacgcagacgacggagacagaggagcgagaaaaagaaagcgcactaccgccagagttcgttccctcattgtagcgacctgatgccatcaggaagtgaagagaagatcctccgcgaattgagcgaagaagaagaggatgaggaggaggaggaggaagaggaggaagaaggtcgattctattatagcgaagatgaccacggtgatgaatgctcttatactgatctcctgcctcaggacgaaggcggaggcggatactcttctgtgagatattccgattgttgcgagagagtggttatcaacgttagtggactaaggttcgagacacagatgaaaacgcttgcacagttcccagagactctccttggtgatccagaaaagagaacccaatatttcgatccactgaggaatgagtatttcttcgatagaaatcgcccatccttcgacgccattttgtactattaccaatctggaggtcggctgaaaagacctgtaaacgtacccttcgatatttttaccgaagaggtcaagttctaccagttgggagaggaagcccttctcaagttccgagaggatgagggctttgttagggaagaagaagacagggccctaccagagaatgagtttaaaaagcagatatggctcttgttcgaatatcctgaatcttcctcacccgctagaggtatcgcaatcgtgtcagtgctggtcattctcatttctatagtgatcttctgtttggagactcttcccgagttcagagatgaccgggatctggtgatggctctcagtgcaggtgggcacggtggactgctcaacgatacctcggctccccacctggaaaatagcggacacactatcttcaacgatcctttctttatcgttgagacagtgtgtatcgtatggttcagctttgagtttgtcgtcagatgtttcgcatgtccttcccaagcactgttcttcaaaaacattatgaacatcattgacatcgtgtccatcctgccttatttcatcaccctgggcacggatctggcccagcaacaggggggaggaaatggccagcagcagcaggcgatgagcttcgctattctgaggattattaggttggtacgcgttttcagaattttcaaactgtctcggcatagcaaaggattacagattctcgggcataccttgcgtgccagtatgcgcgagctggggctgctcatcttttttttgtttataggagtcatcctgttcagcagcgcagtctatttcgccgaggctgatgaacctacaacgcacttccagagcatacccgacgccttttggtgggctgtcgtcaccatgaccactgtgggatacggcgatatgaaaccaatcacggtcgggggaaagatcgtaggcagcctgtgtgcgattgctggagtactgactatcgccttgcccgtgccagttattgtgagcaactttaactatttttatcatagggagaccgagaacgaagaacaaacgcaactcacccagaatgcggtctcctgtccgtatctgccttccaacctgttaaagaagtttagatcttctacttctagctctttgggcgacaaaagcgagtatctggagatggaggaaggtgttaaagagtctctgtgtgccaaagaggagaagtgtcaaggcaaaggggatgatagcgaaaccgacaagaacaactgttccaatgcaaaagcggtggaaacagatgtctag

SEQ ID NO: 126757 - DNA, 1962 bp, Artificial Sequence
  derived and/or modified sequence
atggaggtggccatggtgagcgccgagagcagcggctgcaacagccacatgccctacggctacgccgcccaggccagagccagagagagagagagactggcccacagcagagccgccgccgccgccgccgtggccgccgccaccgccgccgtggagggcagcggcggcagcggcggcggcagccaccaccaccaccagagcagaggcgcctgcaccagccacgacccccagagcagcagaggcagcagaagaagaagaagacagagaagcgagaagaagaaggcccactacagacagagcagcttcccccactgcagcgacctgatgcccagcggcagcgaggagaagatcctgagagagctgagcgaggaggaggaggacgaggaggaggaggaggaggaggaggaggagggcagattctactacagcgaggacgaccacggcgacgagtgcagctacaccgacctgctgccccaggacgagggcggcggcggctacagcagcgtgagatacagcgactgctgcgagagagtggtgatcaacgtgagcggcctgagattcgagacccagatgaagaccctggcccagttccccgagaccctgctgggcgaccccgagaagagaacccagtacttcgaccccctgagaaacgagtacttcttcgacagaaacagacccagcttcgacgccatcctgtactactaccagagcggcggcagactgaagagacccgtgaacgtgcccttcgacatcttcaccgaggaggtgaagttctaccagctgggcgaggaggccctgctgaagttcagagaggacgagggcttcgtgagagaggaggaggacagagccctgcccgagaacgagttcaagaagcagatctggctgctgttcgagtaccccgagagcagcagccccgccagaggcatcgccatcgtgagcgtgctggtgatcctgatcagcatcgtgatcttctgcctggagaccctgcccgagttcagagacgacagagacctggtgatggccctgagcgccggcggccacggcggcctgctgaacgacaccagcgccccccacctggagaacagcggccacaccatcttcaacgaccccttcttcatcgtggagaccgtgtgcatcgtgtggttcagcttcgagttcgtggtgagatgcttcgcctgccccagccaggccctgttcttcaagaacatcatgaacatcatcgacatcgtgagcatcctgccctacttcatcaccctgggcaccgacctggcccagcagcagggcggcggcaacggccagcagcagcaggccatgagcttcgccatcctgagaatcatcagactggtgagagtgttcagaatcttcaagctgagcagacacagcaagggcctgcagatcctgggccacaccctgagagccagcatgagagagctgggcctgctgatcttcttcctgttcatcggcgtgatcctgttcagcagcgccgtgtacttcgccgaggccgacgagcccaccacccacttccagagcatccccgacgccttctggtgggccgtggtgaccatgaccaccgtgggctacggcgacatgaagcccatcaccgtgggcggcaagatcgtgggcagcctgtgcgccatcgccggcgtgctgaccatcgccctgcccgtgcccgtgatcgtgagcaacttcaactacttctaccacagagagaccgagaacgaggagcagacccagctgacccagaacgccgtgagctgcccctacctgcccagcaacctgctgaagaagttcagaagcagcaccagcagcagcctgggcgacaagagcgagtacctggagatggaggagggcgtgaaggagagcctgtgcgccaaggaggagaagtgccagggcaagggcgacgacagcgagaccgacaagaacaactgcagcaacgccaaggccgtggagaccgacgtgtag

SEQ ID NO: 126758 - protein, 613 aa, Artificial Sequence
  derived and/or modified sequence
MEIALVPLENGGAMTVRGGDEARAGCGQATGGELQCPPTAGLSDGPKEPAPKGRGAQRDADSGVRPLPPLPDPGVRPLPPLPEELPRPRRPPPEDEEEEGDPGLGTVEDQALGTASLHHQRVHINISGLRFETQLGTLAQFPNTLLGDPAKRLRYFDPLRNEYFFDRNRPSFDGILYYYQSGGRLRRPVNVSLDVFADEIRFYQLGDEAMERFREDEGFIKEEEKPLPRNEFQRQVWLIFEYPESSGSARAIAIVSVLVILISIITFCLETLPEFRDERELLRHPPAPHQPPAPAPGANGSGVMAPPSGPTVAPLLPRTLADPFFIVETTCVIWFTFELLVRFFACPSKAGFSRNIMNIIDVVAIFPYFITLGTELAEQQPGGGGGGQNGQQAMSLAILRVIRLVRVFRIFKLSRHSKGLQILGKTLQASMRELGLLIFFLFIGVILFSSAVYFAEADNQGTHFSSIPDAFWWAVVTMTTVGYGDMRPITVGGKIVGSLCAIAGVLTIALPVPVIVSNFNYFYHRETDHEEPAVLKEEQGTQSQGPGLDRGVQRKVSGSRGSFCKAGGTLENADSARRGSCPLEKCNVKAKSNVDLRRSLYALCLDTSRETDL

SEQ ID NO: 126759 - DNA, 1842 bp, Artificial Sequence
  derived and/or modified sequence
atggaaattgccctcgtccctctggagaatggcggagccatgaccgtcaggggcggcgacgaggccagagccgggtgtggccaggcaacaggaggtgaattgcagtgcccccctaccgctgggctcagcgatggacctaaggaacccgcccctaagggcaggggcgctcagcgggacgccgattcaggtgttcgcccactgccgcccctgcctgacccaggggtgcggccccttccacctcttcctgaagagctgccacgccctcggagacctcctcctgaggacgaggaggaagagggtgaccccgggcttggtacggtggaagatcaagctctcggtactgccagccttcatcatcagcgtgtccatatcaatatttctggattaaggttcgagactcaattagggaccctggcacagttcccaaacactcttctgggcgatcccgccaaaagattgcggtacttcgatccattgagaaacgagtattttttcgatcggaaccgcccctctttcgatggaattctgtactattaccaatccggcggtcgcctgaggcgtccagtgaacgtgagcctcgatgttttcgccgacgagattcgcttctaccagctgggcgacgaagccatggaacgctttcgcgaagacgaaggctttatcaaggaagaagaaaagccattgcctcggaacgagtttcaacgtcaagtctggttaatctttgagtatcctgagagcagcggcagcgcacgcgccattgcgatcgtatcagttctggtcatcctgatttcaatcatcacgttttgcctggagacgctgccagagtttcgagacgaaagggaactcctgagacatccccctgccccacatcaacccccagccccggctcccggcgctaatgggagtggcgttatggccccaccgagcgggccgacggtggctcccctgctgccacgtacattggcagatcccttctttattgtggaaaccacttgtgtcatctggttcaccttcgagttgttagtgaggttctttgcttgtccatccaaggctggcttcagccggaatattatgaatattatcgacgtggtcgcaatctttccctattttatcactctcggaactgaactagctgaacagcaaccagggggtgggggtggaggtcagaatggccagcaggccatgtcacttgcgattttacgggttatccgcttagtgcgcgttttcagaattttcaaactgtcccgccacagcaagggtctccagattctgggcaaaacccttcaagccagtatgagggagctcggacttttgatcttctttctatttatcggcgtcatcctgttctcgtccgccgtgtattttgccgaagcagataaccaagggacacacttctcctctatccctgacgccttctggtgggctgtcgtgaccatgaccactgtcggttacggtgacatgaggcctatcactgtaggcgggaagattgttggctctctgtgcgcgattgccggcgtcttgactatcgccttacctgtccctgttatcgttagtaactttaactacttctaccatagggagaccgatcacgaggagcccgccgtactgaaggaggagcagggcacacagagtcaggggccaggcctggacaggggtgttcagcgtaaggtttccggttcaaggggctccttttgcaaggctggaggaacactggaaaacgctgacagcgcccgccgcggcagctgccctctcgagaagtgtaacgtaaaggctaaatcaaatgtggatctgcgccggtccttgtacgccttgtgccttgatacaagtagagaaacggatctttag

SEQ ID NO: 126760 - DNA, 1842 bp, Artificial Sequence
  derived and/or modified sequence
atggagatcgccctggtgcccctggagaatggaggagccatgacagtgagaggaggagatgaggcccgggccggctgcggccaggccaccggcggggagctgcagtgccccccaacagctggcctgagtgatggccccaaggagcccgcccccaagggccgcggggcccagagagatgctgacagcggcgtgcggcccctgccccccctgcctgaccccggggtgcggcccctgccccccctgcctgaggagctgccccggcccaggaggcctcctccagaagatgaggaggaggagggggaccccggcctgggcaccgtggaggaccaggccctgggcacagccagcctgcaccaccagagggtgcacatcaacatcagcggcctgcgctttgagacccagctgggcaccctggcccagttccccaacaccctgctgggggaccctgccaagaggctgcgctactttgaccccctgagaaatgagtacttctttgacaggaaccggcccagctttgatggcatcctgtactactaccagagcggcggccgcctgcggcggcctgtgaatgtgtccctggatgtgtttgctgatgagatccgcttctaccagctgggagatgaggccatggagcgcttcagagaagatgagggcttcatcaaggaggaggagaagcccctgcccagaaatgagttccagaggcaggtgtggctgatctttgagtacccagagagcagcggcagcgcccgggccatcgccatcgtgtctgtgctggtgatcctgatcagcatcatcaccttctgcctggagaccctgcctgagttcagagatgagcgggagctgctgcggcaccccccagccccccaccagcccccagccccagcccctggggccaatggaagtggagtgatggccccacccagcggccccaccgtggcccccctgctgcccaggaccctggccgaccccttcttcatcgtggagaccacctgtgtgatctggttcacctttgagctgctggtgcgcttctttgcctgccccagcaaggccggcttcagcaggaacatcatgaacatcattgatgtggtggccatcttcccctacttcatcaccctgggcacagagctggccgagcagcagcccggcggcggcggcggcggccagaatggccagcaggccatgagcctggccatcctgcgggtcatccggctggtgcgggtcttccgcatcttcaagctgagccgccacagcaagggcctgcagatcctgggcaagaccctgcaggcctccatgagggagctgggcctgctgatcttcttcctgttcatcggggtcatcctcttcagcagcgctgtgtactttgctgaggccgacaaccagggcacccacttcagcagcatcccagatgccttctggtgggccgtggtgaccatgaccaccgtgggctatggagacatgaggcccatcaccgtgggcggcaagatcgtgggcagcctgtgtgccatcgccggcgtgctgaccatcgccctgcctgtgcctgtgattgtgagcaacttcaactacttctaccaccgggagacagaccacgaggagcctgctgtgctgaaggaggagcagggcacccagagccagggccctggcctggacagaggagtgcagaggaaggtgtctggcagccggggcagcttctgcaaggccggcggcaccctggagaatgctgacagcgcccggcggggcagctgccccctggagaagtgcaatgtgaaggccaagagcaatgtggacctgcggcgcagcctgtatgccctgtgcctggacaccagccgggagacagacctgtag

SEQ ID NO: 126761 - DNA, 1842 bp, Artificial Sequence
  derived and/or modified sequence
atggagatcgccctggtgcccctggagaacggcggcgccatgaccgttagaggtggcgacgaggcgcgtgcgggctgcgggcaggctaccggaggagagctccagtgtccgcccaccgccggcttatcagatggtccgaaagaacctgcccctaaaggaaggggggctcagcgggacgcagacagcggcgtgcgcccactgcccccgttgcctgatcctggagttcgcccccttcccccactcccagaagagcttcctaggcccaggaggcctccacctgaggacgaggaagaagagggcgaccccgggctcggtaccgtcgaggatcaggccctgggaactgcctccctccaccatcagcgggtacatatcaacatctccggattacgctttgaaacacaactggggacactggcacagtttcctaacacgttacttggagaccccgccaagagactccgctacttcgatcctctgcgaaacgagtatttctttgacagaaataggcctagtttcgatgggatcttgtactactaccagagtggaggcaggttgagacggcccgtgaatgtcagcctcgatgtgttcgcagacgagatcaggttctaccagttgggagatgaggccatggaacgtttcagggaggatgaaggctttataaaggaggaggagaagcccctgccccgtaacgagtttcagcgacaggtgtggctcatcttcgaataccccgagtcaagcgggtctgctcgcgccatcgcgatagtgtctgtcctcgtcatactcatcagcatcataactttctgtcttgagacgcttccagaattcagggatgagcgcgagctccttcggcacccacccgctccccaccaacctccagccccagcgccgggtgctaatggcagcggggttatggcacctccttctggacctacagtcgcccctcttctgcccagaacgctggccgatccttttttcatcgtggaaaccacttgcgtgatttggttcacattcgagctccttgtgaggtttttcgcctgtcccagcaaagctgggtttagcaggaatatcatgaatatcatcgacgtagttgcaatattcccttactttatcaccctggggactgaactggccgagcagcagcctggcgggggcgggggaggccagaacggtcagcaggcgatgtctctcgctatactcagagttattaggctggtgcgcgtgttccggatcttcaaattaagccgacacagcaagggcctccagattctgggtaaaacactgcaggcttccatgcgcgagctgggcctactgatattcttcttgttcatcggcgtgatcttgttcagctctgccgtgtatttcgccgaagcggacaaccaaggtactcatttctcgagcatccctgatgcgttctggtgggctgtggtgacaatgacaactgttggatacggtgacatgcgccccattacagtgggagggaagattgtcgggtccttgtgcgctatcgcaggcgtgctaactatagccctgccagtaccggtcatcgtaagcaacttcaattatttttaccaccgcgaaaccgaccacgaagaacctgcagtgctgaaggaggagcaaggcactcaaagtcagggaccagggttagacaggggcgtgcagcgtaaagtgtccggtagccgaggctccttctgtaaggctggggggactttggaaaatgccgatagcgccaggcggggatcctgtccattggagaaatgtaatgtcaaagccaagtctaatgtggatctgcgccgctctctgtacgccttgtgtctcgatacctcacgggagaccgatctgtag

SEQ ID NO: 126762 - DNA, 2865 bp, Artificial Sequence
  derived and/or modified sequence
ttttcggctgcttggtaacgggctgccagaagagagagaggcagagagcagggcagcggcttcttgacgtcagggccaagcgaggggatcgcgccagcaaccccagctctccccagagaggggccggccgaccgctggagcggagcctgacgccaggcgcccgcggagcgtgagtagggggcgcgggagccggtcagctggggcgcagcatgccctctgctcccgcgccatggagatcgccctggtgcccctggagaacggcggtgccatgaccgtcagaggaggcgatgaggcccgggcaggctgcggccaggccacagggggagagctccagtgtcccccgacggctgggctcagcgatgggcccaaggagccggcgccaaaggggcgcggcgcgcagagagacgcggactcgggagtgcggcccttgcctccgctgccggacccgggagtgcggcccttgcctccgctgccagaggagctgccacggcctcgacggccgcctcccgaggacgaggaggaagaaggcgatcccggcctgggcacggtggaggaccaggctctgggcacggcgtccctgcaccaccagcgcgtccacatcaacatctccgggctgcgctttgagacgcagctgggcaccctggcgcagttccccaacacactcctgggggaccccgccaagcgcctgcgctacttcgaccccctgaggaacgagtacttcttcgaccgcaaccggcccagcttcgacggtatcctctactactaccagtccgggggccgcctgcggaggccggtcaacgtctccctggacgtgttcgcggacgagatacgcttctaccagctgggggacgaggccatggagcgcttccgcgaggatgagggcttcattaaagaagaggagaagcccctgccccgcaacgagttccagcgccaggtgtggcttatcttcgagtatccggagagctctgggtccgcgcgggccatcgccatcgtctcggtcttggttatcctcatctccatcatcaccttctgcttggagaccctgcctgagttcagggatgaacgtgagctgctccgccaccctccggcgccccaccagcctcccgcgcccgcccctggggccaacggcagcggggtcatggccccgccctctggccctacggtggcaccgctcctgcccaggaccctggccgaccccttcttcatcgtggagaccacgtgcgtcatctggttcaccttcgagctgctcgtgcgcttcttcgcctgccccagcaaggcagggttctcccggaacatcatgaacatcatcgatgtggtggccatcttcccctacttcatcaccctgggcaccgaactggcagagcagcagccagggggtggaggaggcggccagaatgggcagcaggccatgtccctggccatcctccgagtcatccgcctggtccgggtgttccgcatcttcaagctctcccgccactccaaggggctgcagatcctgggcaagaccttgcaggcctccatgagggagctggggctgctcatcttcttcctcttcatcggggtcatcctcttctccagtgccgtctacttcgcagaggctgacaaccagggaacccatttctctagcatccctgacgccttctggtgggcagtggtcaccatgaccactgtgggctacggggacatgaggcccatcactgttgggggcaagatcgtgggctcgctgtgtgccatcgccggggtcctcaccattgccctgcctgtgcccgtcatcgtctccaacttcaactacttctaccaccgggaaacggatcacgaggagccggcagtccttaaggaagagcagggcactcagagccaggggccggggctggacagaggagtccagcggaaggtcagcgggagcaggggatccttctgcaaggctggggggaccctggagaatgcagacagtgcccgaaggggcagctgccccctagagaagtgtaacgtcaaggccaagagcaacgtggacttgcggaggtccctttatgccctctgcctggacaccagccgggaaacagatttgtgaaaggagattcaggcagactggtggcagtggagtagggaatgggaggcttgctgaacatggatatctacattataccgcagagtatttgaagtcacactgtaacctcagtctacccctctcctttcactcctttcctccctccctcgatccccccattttctctattctttccatgacacccaagggtcgcctatttttaaaaagtaccacattccatgacgcaggagctgtggaaatggtgagcgctgtgagatggatgtatttgtagccagtctcctatacccagcagagggataacccaaacaaaaatgactctaaatagcccagatcccaagagattatgtaactcctccatccatgtgttccaaatttgctttacatatgattgtatttgtgtataggggaaaatattatttttatgcctggtaagtggctttttgtactgtagttcagatagagatattttgggtatattttcaagatacatgttgtatttatggaagaaagagttgtcctgatgtttttctgtgttacttatattagagtcagagatcttggtatgggctgttctgtttcctgtgtctccaagcctctgtcttttctgggatgtggtattggtgctttgtgtctagggcagagtatgttcttgaagaaaggcaaatctgactttttctgtgcgccttaaacaattcttgtaactttcttcaaaaagcattttaatgatattggaggaatacttctgataatttattgtctttatttttatcccaggaaataaaaggttaccttgttga

SEQ ID NO: 126763 - DNA, 1842 bp, Artificial Sequence
  derived and/or modified sequence
atggaaatagcacttgtcccattggaaaacggaggagctatgaccgtgaggggcggtgacgaggctagggcaggctgtggacaagctactggcggagagcttcagtgtccaccaacagctggactctccgatgggccaaaagagcccgctccaaagggaaggggcgctcagcgcgatgcagattctggagtgaggccactcccgccactgccagatcctggggtccgaccattacctcccttgccagaagagttaccaaggcccagaaggcccccaccagaggatgaggaggaggagggggacccaggcctaggtaccgtcgaagatcaggccctgggtacggccagtttacatcatcaaagagtccatatcaacattagcggcttgagatttgagacccaactgggcacattggcccagtttcccaacacactcctgggagatcccgcaaagcggctaaggtatttcgatcctctgagaaacgagtactttttcgacaggaaccgcccttcatttgatgggatactgtactactaccaatcaggcggtagattgcgcaggccagtgaacgtgagcctggatgtgtttgcagatgagatccggttctatcagctgggggatgaggcgatggaacggtttcgagaggacgaaggcttcattaaagaagaggaaaaaccgttacctcgaaatgaattccagagacaggtatggttgattttcgagtacccagagagttccgggagtgccagagctatcgcgattgtctcagtgctggtaattctgatctcaatcataactttttgtttggagaccctgccagagttcagagacgaaagggagctccttcgccacccccctgcaccccatcagccccctgctccagctccaggcgctaacggcagcggtgtgatggcaccgcctagtgggccaacagttgccccactcctgcccagaactttggccgacccttttttcattgtcgaaactacctgcgtcatttggtttacctttgagctgctggtgaggtttttcgcctgcccatctaaggccggattctctaggaacatcatgaacattatcgatgttgtagctattttcccatattttatcaccctcggaacagagctggccgagcagcagcccggtggaggaggtggcggtcagaacgggcagcaggctatgtccctagcgatccttagggtaattagacttgtacgcgtttttcgcatttttaaactctccaggcattccaaaggtctgcagattctggggaagaccttgcaggcttcaatgagagaactgggcctcctgattttctttctctttatcggtgttatcctgttcagctcggccgtatatttcgctgaggccgacaaccaggggacacactttagcagtatcccggacgctttttggtgggcggttgtgaccatgacgaccgtgggttacggagatatgaggccaattacagttggaggcaaaatcgtaggatcattgtgcgccattgctggggtattgactattgcactgccagtccctgtcatcgtctccaactttaactacttttaccatcgcgagaccgaccacgaggaaccggcagttcttaaggaagaacaaggaacgcagtctcaaggtcctggccttgacaggggtgtacagcgcaaagtctctgggagtaggggaagcttctgtaaggcaggcggaactctggagaatgctgattcagccaggaggggatcatgcccattggaaaaatgtaatgtaaaagccaagtccaatgttgacctccgacggtctctttatgctctgtgtctggacacgagtagagagacggatctgtag

SEQ ID NO: 126764 - DNA, 1842 bp, Artificial Sequence
  derived and/or modified sequence
atggagatcgccctggtgcccctggagaacggcggcgccatgaccgtgagaggcggcgacgaggccagagccggctgcggccaggccaccggcggcgagctgcagtgcccccccaccgccggcctgagcgacggccccaaggagcccgcccccaagggcagaggcgcccagagagacgccgacagcggcgtgagacccctgccccccctgcccgaccccggcgtgagacccctgccccccctgcccgaggagctgcccagacccagaagacccccccccgaggacgaggaggaggagggcgaccccggcctgggcaccgtggaggaccaggccctgggcaccgccagcctgcaccaccagagagtgcacatcaacatcagcggcctgagattcgagacccagctgggcaccctggcccagttccccaacaccctgctgggcgaccccgccaagagactgagatacttcgaccccctgagaaacgagtacttcttcgacagaaacagacccagcttcgacggcatcctgtactactaccagagcggcggcagactgagaagacccgtgaacgtgagcctggacgtgttcgccgacgagatcagattctaccagctgggcgacgaggccatggagagattcagagaggacgagggcttcatcaaggaggaggagaagcccctgcccagaaacgagttccagagacaggtgtggctgatcttcgagtaccccgagagcagcggcagcgccagagccatcgccatcgtgagcgtgctggtgatcctgatcagcatcatcaccttctgcctggagaccctgcccgagttcagagacgagagagagctgctgagacacccccccgccccccaccagccccccgcccccgcccccggcgccaacggcagcggcgtgatggccccccccagcggccccaccgtggcccccctgctgcccagaaccctggccgaccccttcttcatcgtggagaccacctgcgtgatctggttcaccttcgagctgctggtgagattcttcgcctgccccagcaaggccggcttcagcagaaacatcatgaacatcatcgacgtggtggccatcttcccctacttcatcaccctgggcaccgagctggccgagcagcagcccggcggcggcggcggcggccagaacggccagcaggccatgagcctggccatcctgagagtgatcagactggtgagagtgttcagaatcttcaagctgagcagacacagcaagggcctgcagatcctgggcaagaccctgcaggccagcatgagagagctgggcctgctgatcttcttcctgttcatcggcgtgatcctgttcagcagcgccgtgtacttcgccgaggccgacaaccagggcacccacttcagcagcatccccgacgccttctggtgggccgtggtgaccatgaccaccgtgggctacggcgacatgagacccatcaccgtgggcggcaagatcgtgggcagcctgtgcgccatcgccggcgtgctgaccatcgccctgcccgtgcccgtgatcgtgagcaacttcaactacttctaccacagagagaccgaccacgaggagcccgccgtgctgaaggaggagcagggcacccagagccagggccccggcctggacagaggcgtgcagagaaaggtgagcggcagcagaggcagcttctgcaaggccggcggcaccctggagaacgccgacagcgccagaagaggcagctgccccctggagaagtgcaacgtgaaggccaagagcaacgtggacctgagaagaagcctgtacgccctgtgcctggacaccagcagagagaccgacctgtag

SEQ ID NO: 126765 - protein, 962 aa, Artificial Sequence
  derived and/or modified sequence
MTMAGGRRGLVAPQNTFLENIVRRSNDTNFVLGNAQIVDWPIVYSNDGFCKLSGYHRAEVMQKSSTCSFMYGELTDKDTIEKVRQTFENYEMNSFEILMYKKNRTPVWFFVKIAPIRNEQDKVVLFLCTFSDITAFKQPIEDDSCKGWGKFARLTRALTSSRGVLQQLAPSVQKGENVHKHSRLAEVLQLGSDILPQYKQEAPKTPPHIILHYCVFKTTWDWIILILTFYTAILVPYNVSFKTRQNNVAWLVVDSIVDVIFLVDIVLNFHTTFVGPAGEVISDPKLIRMNYLKTWFVIDLLSCLPYDVINAFENVDEGISSLFSSLKVVRLLRLGRVARKLDHYIEYGAAVLVLLVCVFGLAAHWMACIWYSIGDYEIFDEDTKTIRNNSWLYQLAMDIGTPYQFNGSGSGKWEGGPSKNSVYISSLYFTMTSLTSVGFGNIAPSTDIEKIFAVAIMMIGSLLYATIFGNVTTIFQQMYANTNRYHEMLNSVRDFLKLYQVPKGLSERVMDYIVSTWSMSRGIDTEKVLQICPKDMRADICVHLNRKVFKEHPAFRLASDGCLRALAMEFQTVHCAPGDLIYHAGESVDSLCFVVSGSLEVIQDDEVVAILGKGDVFGDVFWKEATLAQSCANVRALTYCDLHVIKRDALQKVLEFYTAFSHSFSRNLILTYNLRKRIVFRKISDVKREEEERMKRKNEAPLILPPDHPVRRLFQRFRQQKEARLAAERGGRDLDDLDVEKGNVLTEHASANHSLVKASVVTVRESPATPVSFQAASTSGVPDHAKLQAPGSECLGPKGGGGDCAKRKSWARFKDACGKSEDWNKVSKAESMETLPERTKASGEATLKKTDSCDSGITKSDLRLDNVGEARSPQDRSPILAEVKHSFYPIPEQTLQATVLEVRHELKEDIKALNAKMTNIEKQLSEILRILTSRRSSQSPQELFEISRPQSPESERDIFGAS

SEQ ID NO: 126766 - DNA, 2889 bp, Artificial Sequence
  derived and/or modified sequence
atgacaatggccggcgggaggcgcggtctggttgctccccagaacacattcctggagaacatcgtgcgaagatctaacgacactaatttcgtgctgggtaatgctcagattgtggactggcccatcgtctatagtaatgatggattctgcaaattatcaggataccaccgcgccgaggtgatgcagaagtcctccacttgctctttcatgtacggcgagttgactgataaagacacgatagagaaagtgaggcagacattcgaaaattacgagatgaatagtttcgagatcctcatgtacaaaaaaaacagaacacccgtgtggttttttgtaaaaatcgcccctatccgcaatgagcaggacaaagtggtgctgtttctgtgtaccttctccgatatcacagcattcaagcaacctattgaggacgacagctgcaaagggtggggaaagttcgcacgtctgaccagggccttaacttcctctaggggggtcttgcagcagttagcccctagcgtgcagaaaggagagaacgtgcacaagcacagtcggctggctgaagtgctccagcttggctctgacatcctcccccaatataagcaagaagccccaaagacacctcctcatataatcttgcactattgcgtgtttaaaacaacctgggattggattattctcattttgacattttacaccgccatcctggtgccctataatgtatcttttaaaacacggcagaataacgttgcgtggctggtagtggatagtatcgtggacgtcatattccttgtggacatcgtactcaactttcataccaccttcgtggggccagcaggggaggtgattagcgacccaaaactgataagaatgaattacttaaagacatggttcgtcattgacctgctgagttgcttgccttatgacgttataaatgcatttgagaacgtcgacgaaggaatctcctctctgttctcttctctcaaggttgtcagactcctgcgcctggggagagtcgcgagaaaattggatcactatatcgaatacggagcagccgtcctagtgctcctggtttgtgtctttggactagcggcccactggatggcgtgtatttggtatagcatcggtgattatgaaattttcgatgaagatacaaaaaccattagaaataactcctggctgtatcagctcgcaatggatatcgggactccataccagttcaacggaagcggttctggtaagtgggaaggcggcccctccaaaaactccgtgtacataagttctctctatttcaccatgacctccctgaccagtgtcggcttcggcaacatcgcgccatcgactgacatcgagaaaatctttgccgtagccattatgatgatcggttctttgctgtatgccacaatattcggaaacgtcacaactatcttccaacagatgtacgcaaacacgaatcggtatcacgaaatgctgaattccgtgcgggacttcctaaaattatatcaagtgccaaaaggactgtctgaacgggtaatggactatatagtgtcaacatggagtatgtcacgagggatcgataccgaaaaggtgctccaaatttgcccgaaagacatgagggctgatatctgcgttcatttgaacagaaaagtcttcaaggagcatcccgcattcaggctggcgagcgatgggtgcctgcgcgcacttgccatggagttccagaccgtgcattgtgctccgggagatctcatctatcacgcgggcgagagtgtagactcactgtgcttcgtggtgtccgggtccttggaggtcattcaggatgacgaggtcgtggctatcctcggtaagggggatgtgtttggtgatgtgttctggaaggaggcgacgttggcgcagagctgcgccaatgtgagagcccttacatactgcgacttgcatgtgatcaaaagagatgctctgcagaaggtgctggaattttataccgcattcagccactccttctctcggaatctcatcctaacttacaaccttcgcaaaaggattgtgttcagaaaaatatcagatgtgaaacgcgaggaagaggagcggatgaaacggaaaaacgaggcaccactgatcctgccacctgatcatcccgtgcgtagattgtttcagcggttccggcagcaaaaggaggccaggctcgcggccgagcggggaggtagggacctcgacgacctagatgttgagaaggggaacgtactgacagagcacgcttctgccaatcattcactggtcaaggcctcagtggtgacagtacgcgagagccctgccacaccagtgagctttcaggccgcctccacttccggtgttcctgaccacgctaagctgcaggcacctggcagtgagtgtctgggccctaagggcggcggtggcgactgtgcaaaacgcaaatcatgggcccgattcaaggacgcctgtggcaaaagtgaagactggaacaaagtcagcaaggccgagtccatggagacgttgcctgagcgcacgaaagcctcaggtgaagcaaccctgaagaagacagacagttgcgattcaggcatcacgaaatccgacctaagacttgataacgtcggcgaggcgcggagtccccaggataggtcccccatcttggctgaggttaagcatagcttctatcccattccagagcagacactgcaggccactgtactggaggttaggcatgagctgaaggaggacattaaagctctcaatgctaaaatgacaaacatcgaaaaacagctaagcgaaatcctcagaatcctgacatctcgaaggagcagccagtctcctcaggaactgtttgagatctcccgcccacaatctccagaatccgaacgtgatatttttggggctagctag

SEQ ID NO: 126767 - DNA, 2889 bp, Artificial Sequence
  derived and/or modified sequence
atgaccatggccggcggcagaagaggcctggtggccccccagaacaccttcctggagaacatcgtgagaagaagcaatgacaccaactttgtgctgggcaatgcccagatcgtggactggcccatcgtgtacagcaatgatggcttctgcaagctgagcggctaccacagagctgaggtgatgcagaagagcagcacctgcagcttcatgtatggagagctgacagacaaggacaccatcgagaaggtgcggcagacctttgagaactatgagatgaacagctttgagatcctgatgtacaagaagaacagaacacctgtgtggttctttgtgaagatcgcccccatcagaaatgagcaggacaaggtggtgctcttcctgtgcaccttcagtgacatcacagccttcaagcagcccattgaagatgacagctgcaagggctggggcaagtttgcccggctgacccgggccctgaccagcagcagaggagtgctgcagcagctggcccccagcgtgcagaagggggagaatgtgcacaagcacagccggctggccgaggtgctgcagctgggcagtgacatcctgccccagtacaagcaggaggcccccaagaccccaccccacatcatcctgcactactgtgtgttcaagaccacctgggactggatcatcctgatcctgaccttctacacagccatcctggtgccctacaacgtgtccttcaagacccggcagaacaacgtggcctggctggtggtggacagcatcgtggatgtgatcttcctggtggacatcgtgctgaacttccacaccacctttgtgggccctgctggggaggtgatcagtgaccccaagctgatccgcatgaactacctgaagacctggtttgtgattgacctgctgagctgcctgccctatgatgtgatcaatgcctttgaaaatgtggatgagggcatcagcagcctcttcagcagcctgaaggtggtgcggctgctgcggctgggccgggtggccaggaagctggaccactacattgaatatggagctgctgtgctggtgctgctggtgtgtgtgtttggcctggccgcccactggatggcctgcatctggtacagcattggagactatgagatctttgatgaggacaccaagaccatccggaacaacagctggctgtaccagctggccatggacatcggcaccccctaccagttcaacggcagcggcagcggcaagtgggagggcggccccagcaagaacagcgtgtacatcagcagcctgtacttcaccatgaccagcctgacctctgtgggctttggaaacatcgcccccagcacagacatcgagaagatctttgctgtggccatcatgatgattggcagcctgctgtatgccaccatctttggaaatgtgaccaccatcttccagcagatgtatgccaacaccaaccgctaccacgagatgctgaacagcgtgcgggacttcctgaagctgtaccaggtgcccaagggcctgtctgagcgggtgatggactacatcgtgtccacctggagcatgagccggggcatcgacacagagaaggtgctgcagatctgccccaaggacatgagagctgacatctgtgtgcacctgaacaggaaggtgttcaaggagcacccagccttccggctggccagtgatggctgcctgcgggccctggccatggagttccagacagtgcactgtgcccctggggacctgatctaccacgccggggagagcgtggacagcctgtgctttgtggtgtctggcagcctggaggtgatccaggatgatgaggtggtggccatcctgggcaaaggagatgtgtttggagatgtgttctggaaggaggccaccctggcccagagctgtgccaacgtgcgggccctgacctactgtgacctgcacgtgatcaagagagatgccctgcagaaggtgctggagttctacacagccttcagccacagcttcagcaggaacctgatcctgacctacaacctgaggaagagaattgtgttcaggaagatcagtgatgtgaagcgggaggaggaggagaggatgaagaggaagaatgaggcccccctcatcctgcccccagaccaccctgtgagaagactcttccagcgcttccggcagcagaaggaggcccggctggccgctgagcggggcggccgggacctggatgacctggatgtggagaagggaaatgtgctgacagagcacgccagcgccaaccacagcctggtgaaggcctctgtggtgacagtgcgggagagccctgccacccctgtgtccttccaggccgccagcaccagcggcgtgcctgaccacgccaagctgcaggcccctggctctgaatgtctgggccccaagggcggcggcggggactgtgccaagaggaagtcctgggcccgcttcaaggatgcctgtgggaagtctgaggactggaacaaggtgtccaaggccgagagcatggagaccctgcctgagaggaccaaggccagcggggaggccaccctgaagaagacagacagctgtgacagcggcatcaccaagagtgacctgcggctggacaacgtgggggaggcccggagcccccaggacaggagccccatcctggccgaggtgaagcacagcttctaccccatccctgagcagaccctgcaggccaccgtgctggaggtgagacatgagctgaaggaggacatcaaggccctgaatgccaagatgaccaacatcgagaagcagctgtctgagatcctgcgcatcctgaccagccgccgcagcagccagagcccccaggagctgtttgagatcagccggccccagagccctgagagcgagcgggacatctttggagccagctag

SEQ ID NO: 126768 - DNA, 2889 bp, Artificial Sequence
  derived and/or modified sequence
atgaccatggccggcggccggcggggcctggtggccccccagaacacattccttgagaatattgtgagaagaagtaatgatacgaatttcgtccttgggaacgcccagattgttgactggccgattgtgtattccaatgacggcttttgtaaactgagcggatatcatagggcggaagtgatgcagaagtcaagcacctgttcctttatgtacggggagctcacagataaagatacgatcgaaaaagtgcgccagacgtttgaaaactacgagatgaattcttttgaaatcctgatgtataagaaaaataggaccccagtgtggttctttgttaagatcgccccaatccgcaatgagcaggataaagtcgtcctgttcttatgcactttcagcgatatcacagcatttaagcagcccattgaagacgacagctgcaagggctggggaaagtttgcgaggctgacgcgcgccctgacctcttcaagaggcgtgttgcaacaactggcaccgagcgtccagaaaggcgaaaatgtgcataaacactcaagactggcagaagtactccagctgggatctgacatcctgccacagtacaagcaggaagcacctaagactcccccccacataattcttcactattgtgtgtttaagacaacctgggactggataatcttgatcttgaccttttatacggctatcctggtgccttataacgtctctttcaaaaccaggcaaaataacgtggcttggttagtggtggatagcattgtagacgtcatctttcttgtcgacatcgtgctgaattttcacaccacttttgttggacctgccggggaggtaatctccgatcccaaactgatccgcatgaactacctgaaaacctggtttgttattgatctgttgtcctgcctgccctatgacgtgattaacgcattcgagaatgtggacgagggcatcagttctcttttctctagcttgaaggtggttagacttttgcggctgggccgcgtcgccagaaaacttgaccattacattgagtatggcgcagccgtccttgttctgctggtctgtgtgttcgggctggcagcacattggatggcatgcatatggtacagcataggagattacgagattttcgatgaagacaccaaaacgatccgaaataacagctggctgtaccagctggctatggatatagggaccccttatcagtttaacggtagcggaagcggcaaatgggaaggcgggccctcaaagaatagcgtgtacatttctagtttgtactttaccatgacttcattaacatctgttggatttggaaatatagctccgtcaaccgacattgaaaagatcttcgcagtggcaatcatgatgatcgggagcttgctctacgcaaccattttcggcaacgtgaccactatctttcagcaaatgtatgccaacacgaatcgatatcatgaaatgctgaattctgtgcgcgacttcctcaaactctaccaagtgcctaaaggcctttcagaacgggtgatggattacattgtcagtacctggtccatgtcccgcggcatcgatacggaaaaggttttacagatatgtccaaaagacatgagggctgatatttgcgtgcacctgaataggaaggtgtttaaagaacatccagctttccggctggctagcgacgggtgccttcgtgctcttgccatggaatttcagacagtccactgcgcgccaggggatcttatctaccacgctggagagtccgttgattctctgtgcttcgttgtgtcggggagcttagaagtcatccaggatgacgaagtggtggcaatccttggtaagggggacgtgttcggggacgtattctggaaggaggctacgctggctcaaagctgtgccaacgtaagggcactgacctactgcgatttacacgtgatcaagcgtgatgccctgcagaaggtcctagaattctatacagctttctctcacagcttctctcggaatctgatcctgacctataacctgcgcaagaggatcgtttttaggaagatttccgacgtgaagcgcgaggaggaagaacggatgaagcgaaagaatgaagctcctcttatcctgccccccgaccatcctgtgcgtaggctgtttcaacgctttcgccaacagaaggaagcacggctggcagctgaacgtggtggcagagatttagacgacctagacgtagagaaaggcaacgttctgactgaacacgcctcagcaaatcactctttggttaaggcctctgtagtgacggtgagagagtcacctgccacaccggttagcttccaggctgcatccacaagcggcgtgccagatcacgcaaaattgcaggctccgggttccgagtgcttagggcctaaaggcggaggtggtgattgcgccaaacggaagagttgggcccggttcaaagacgcctgcgggaagtcagaggactggaataaagtgtcaaaggcggagagcatggagaccctgcctgaaaggaccaaagcgtccggcgaggcaaccctaaagaagacagattcttgtgattctggcatcaccaagagcgacttgagactcgacaacgtcggggaggcaaggagtcctcaggatagatctccaatactggcagaagttaagcacagcttttatcctatcccagagcagacgcttcaggcaactgtgctggaggtgcgacatgagctgaaagaagacatcaaggcccttaacgccaagatgacaaatatcgagaagcaactgagcgaaatcctgaggattcttacctctcggcggtccagccagagtccgcaggagctattcgaaatttccaggccccagtctcctgaaagtgagcgtgacatttttggggcgtcctag

SEQ ID NO: 126769 - DNA, 3102 bp, Artificial Sequence
  derived and/or modified sequence
gaagagggcgcgagggtagcagccagagggagccgccagccctgcctgcggatccccgccgggcgcatggggcgcttcgagccgggactgcgtgcgggccccgaggccagtttcctgctgtcgtaagaagccgcgccaggacgcccgccggaccccgagctgctgggaggatgaccatggctgggggcaggaggggactagtggcccctcaaaacacgtttctggagaatattgttcggcggtccaatgatactaattttgtgttggggaatgctcagatagtggactggcctattgtgtacagcaatgatggattttgcaagctgtctggctatcacagggcagaagtgatgcaaaaaagcagcacctgcagttttatgtatggggagctgactgataaagacacgattgaaaaagtgcggcaaacatttgagaactatgagatgaattcctttgaaattctgatgtacaagaagaacaggacacctgtgtggttctttgtgaaaattgctccaattcgaaacgaacaggataaagtggttttatttctttgcactttcagtgacataacagctttcaaacagccaattgaggatgattcatgtaaaggctgggggaagtttgctcggctgacaagagcactgacaagcagcaggggtgtcctgcagcagctggctccaagcgtgcaaaaaggcgagaatgtccacaagcactcccgcctggcagaggtcctacagctgggctcagacatccttccccagtacaagcaagaggcaccaaagactccccctcacatcatcttacattattgtgtttttaagaccacgtgggattggatcatcttgatcttgaccttctatacagccatcttggtcccttataatgtctccttcaaaaccaggcagaataatgtggcctggctggttgttgatagcatcgtggatgttatctttttggtggacattgtgctcaattttcataccacctttgttggaccagcaggggaggtgatttctgaccccaaacttatccgcatgaactacctgaagacgtggtttgtgattgaccttctgtcctgtttgccatatgatgtcatcaacgcttttgagaacgtggatgagggcatcagcagcctgttcagctctctaaaagttgtccggctgctccgtcttgggcgagtggcccgtaagctggaccactacattgaatatggagctgctgtgctggtcctgctggtgtgtgtgtttgggctggctgcacactggatggcctgcatctggtacagcattggggactatgagatctttgacgaggacaccaagacaatccgcaacaacagctggctgtaccaactagcgatggacattggcaccccttaccagtttaatgggtctggctcagggaagtgggaaggtggtcccagcaagaattctgtctacatctcctcgttgtatttcacaatgaccagcctcaccagtgtgggctttgggaacatcgccccatccacagacattgagaagatctttgcagtggccatcatgatgattggctcacttctctatgccaccatcttcgggaatgtgacgactattttccaacagatgtatgccaacaccaacagataccatgagatgctcaacagtgttcgggacttcctgaagctctaccaggtgccaaaaggattgagtgagcgagtaatggattatattgtgtccacttggtccatgtccagaggcattgacacagagaaggtcctgcagatctgccccaaggacatgagagccgacatctgcgtgcacctgaaccgcaaggtgttcaaggagcacccggccttccggctggccagtgatggctgcctccgggcactggccatggagttccagacggtgcactgtgccccaggggacctcatctaccatgcaggagagagcgttgacagcctctgctttgtggtttctggctccctggaggtgatccaagatgatgaggtggtggccattctaggaaaaggagacgtgtttggagatgtgttctggaaggaagccacccttgcccagtcctgtgccaatgttagggccttgacctactgtgatctgcatgtgatcaagcgggatgccctgcagaaagtgctggaattctacacggccttctcccattccttctcccggaacctgattctgacgtacaacttgaggaagaggattgtgttccggaagatcagcgatgtgaaacgtgaagaggaagaacgcatgaaacgaaagaatgaggcccccctgatcttgcccccggaccaccctgtccggcgcctcttccagagattccgacagcagaaagaggccaggctggcagctgagagagggggccgggacctggatgacctagatgtggagaagggcaatgtccttacagagcatgcctccgccaaccacagcctcgtgaaggccagcgtggtcaccgtgcgtgagagtcctgccacgcccgtatccttccaggcagcctccacctccggggtgccagaccacgcaaagctacaggcgccagggtccgagtgcctgggccccaaggggggcgggggcgattgtgccaagcgcaaaagctgggcccgcttcaaagatgcttgcgggaagagtgaggactggaacaaggtgtccaaggctgagtcgatggagacacttcccgagaggacaaaagcgtcaggcgaggccacactgaagaagacagactcgtgtgacagtggcatcaccaagagcgacttgcgcctggacaacgtgggtgaggccaggagtccccaggatcggagtcccatcctggcagaggtcaagcattcgttctaccccatccctgagcagacgctgcaggccacagtcctggaggtgaggcacgagctgaaggaggacatcaaggccttaaacgccaaaatgaccaatattgagaaacagctctctgagatactcaggatattaacttccagaagatcctctcagtctcctcaggagttgtttgaaatatcgaggccacagtccccagaatcagagagagacatttttggagccagctgagaggtctatttaaaaaaaaagtcagagacagatacctccaacc

SEQ ID NO: 126770 - DNA, 2889 bp, Artificial Sequence
  derived and/or modified sequence
atgaccatggcaggaggcaggagggggctggtggcaccacaaaataccttcctggagaatattgtcagacgctcaaatgacactaacttcgtactgggaaatgcccaaattgttgattggcccatcgtctattccaatgacgggttttgcaaactctctggctaccatagagccgaggtgatgcagaagtctagcacatgcagcttcatgtacggggaactcactgacaaagatactatcgagaaagtacgccagacatttgagaactacgagatgaattctttcgagatacttatgtacaaaaaaaaccgtactccagtttggttctttgtgaaaatcgcacctattcggaacgaacaagacaaggttgtgcttttcctgtgcaccttttccgatataactgccttcaagcagcctatcgaagatgattcctgcaagggttggggaaagttcgcaagattaacgagagccttaacaagctctaggggcgtactgcagcagctggctcctagcgttcagaagggtgagaacgtgcacaagcattcaagactcgccgaggtccttcagctgggcagtgacattctgcctcagtacaaacaagaggctccaaagacaccccctcacattatcctacactactgcgtttttaaaacaacctgggactggattatcttaattttgaccttctatacagcaatcctggtgccgtacaacgtttccttcaaaacccgccagaacaacgttgcctggcttgttgttgattctatcgtggacgtgatctttttggtggacatcgtgctgaactttcatacgaccttcgttggtcctgccggagaagtgatcagcgatcctaagcttattagaatgaactacctcaaaacatggtttgtgattgacctactcagctgcctcccctacgacgtaatcaatgcttttgagaatgtggatgaaggcatttcctccctgttttcttctctgaaagtggtgaggttattgaggcttggcagagtagcacgcaagttggaccactatatcgagtacggcgctgcagtcctagttcttctcgtgtgtgtctttgggctagcggctcattggatggcatgcatctggtactccattggcgactacgaaatcttcgacgaagacacaaagaccattcgaaataattcatggctataccaactggcaatggacatagggaccccttatcagtttaatgggagtgggtcaggcaaatgggagggaggtcccagtaagaattccgtttatattagttccctgtacttcactatgacttcactgacctccgtcggtttcggcaatatcgccccttcaaccgatatcgagaaaatttttgccgtggctattatgatgattggatctctgttgtatgcaacaatcttcgggaatgtcacaaccatctttcagcaaatgtatgccaacacaaatcggtaccacgagatgctgaactccgtcagggattttctcaagctttatcaggtgcctaaagggttgtctgaaagagtaatggactacatcgtgtctacatggtccatgtctagagggatcgacaccgagaaagtgctgcagatctgcccgaaggacatgcgcgctgatatctgtgtacatctcaaccggaaggtattcaaagaacacccagcttttaggctagcatccgatggatgtctacgtgccctagctatggaattccagaccgtccattgtgctccaggcgacctcatatatcatgccggtgagagcgtggactcattgtgtttcgtggtctctggaagtctcgaggtgatacaagatgacgaagtagtggccatactcggcaaaggcgacgtatttggcgacgtcttttggaaagaagccacccttgctcagagctgcgctaacgtgagggctctgacttattgcgatttgcacgtgatcaaacgtgatgcattacagaaagttctagagttctacacagccttcagtcattcttttagtagaaacctaatcctcacctataacctcagaaagagaattgtttttaggaaaatcagcgacgtgaaacgagaggaggaagagcggatgaaacggaagaacgaggcccctcttatcctgccgcctgaccatccggtcaggcggctgttccagagattccggcaacagaaagaagcccgactagccgctgagaggggaggtcgcgatctggacgacctggatgtggaaaaaggaaatgtgctcactgaacacgcaagcgccaaccacagtttagtaaaagcctcggtggtcaccgttcgcgaatcccctgcgactcctgtttcattccaagctgctagcactagtggcgtcccagatcacgccaaactccaagcccctgggagcgaatgcctaggaccaaagggcggaggtggagattgcgcaaagagaaagagctgggcacgcttcaaggatgcttgtggtaagtccgaagactggaacaaggtgagcaaggccgagtcgatggaaacgctcccagagaggaccaaggcaagcggcgaagccactctgaagaagactgattcatgtgattccggaataactaagtccgatttgaggctggataatgttggggaagccaggagccctcaggaccgctcacctattcttgccgaggttaagcactcgttctacccaatacccgagcagactctgcaggctacagtcctagaggttcggcacgagctgaaggaggacatcaaggcacttaatgctaaaatgactaatattgaaaagcagctcagcgaaatattacgaattctgaccagccgtaggtcctcccagagcccccaggagctcttcgaaattagccgtccacagtcacccgagagcgaacgggacattttcggggcaagttag

SEQ ID NO: 126771 - DNA, 2889 bp, Artificial Sequence
  derived and/or modified sequence
atgaccatggccggcggcagaagaggcctggtggccccccagaacaccttcctggagaacatcgtgagaagaagcaacgacaccaacttcgtgctgggcaacgcccagatcgtggactggcccatcgtgtacagcaacgacggcttctgcaagctgagcggctaccacagagccgaggtgatgcagaagagcagcacctgcagcttcatgtacggcgagctgaccgacaaggacaccatcgagaaggtgagacagaccttcgagaactacgagatgaacagcttcgagatcctgatgtacaagaagaacagaacccccgtgtggttcttcgtgaagatcgcccccatcagaaacgagcaggacaaggtggtgctgttcctgtgcaccttcagcgacatcaccgccttcaagcagcccatcgaggacgacagctgcaagggctggggcaagttcgccagactgaccagagccctgaccagcagcagaggcgtgctgcagcagctggcccccagcgtgcagaagggcgagaacgtgcacaagcacagcagactggccgaggtgctgcagctgggcagcgacatcctgccccagtacaagcaggaggcccccaagacccccccccacatcatcctgcactactgcgtgttcaagaccacctgggactggatcatcctgatcctgaccttctacaccgccatcctggtgccctacaacgtgagcttcaagaccagacagaacaacgtggcctggctggtggtggacagcatcgtggacgtgatcttcctggtggacatcgtgctgaacttccacaccaccttcgtgggccccgccggcgaggtgatcagcgaccccaagctgatcagaatgaactacctgaagacctggttcgtgatcgacctgctgagctgcctgccctacgacgtgatcaacgccttcgagaacgtggacgagggcatcagcagcctgttcagcagcctgaaggtggtgagactgctgagactgggcagagtggccagaaagctggaccactacatcgagtacggcgccgccgtgctggtgctgctggtgtgcgtgttcggcctggccgcccactggatggcctgcatctggtacagcatcggcgactacgagatcttcgacgaggacaccaagaccatcagaaacaacagctggctgtaccagctggccatggacatcggcaccccctaccagttcaacggcagcggcagcggcaagtgggagggcggccccagcaagaacagcgtgtacatcagcagcctgtacttcaccatgaccagcctgaccagcgtgggcttcggcaacatcgcccccagcaccgacatcgagaagatcttcgccgtggccatcatgatgatcggcagcctgctgtacgccaccatcttcggcaacgtgaccaccatcttccagcagatgtacgccaacaccaacagataccacgagatgctgaacagcgtgagagacttcctgaagctgtaccaggtgcccaagggcctgagcgagagagtgatggactacatcgtgagcacctggagcatgagcagaggcatcgacaccgagaaggtgctgcagatctgccccaaggacatgagagccgacatctgcgtgcacctgaacagaaaggtgttcaaggagcaccccgccttcagactggccagcgacggctgcctgagagccctggccatggagttccagaccgtgcactgcgcccccggcgacctgatctaccacgccggcgagagcgtggacagcctgtgcttcgtggtgagcggcagcctggaggtgatccaggacgacgaggtggtggccatcctgggcaagggcgacgtgttcggcgacgtgttctggaaggaggccaccctggcccagagctgcgccaacgtgagagccctgacctactgcgacctgcacgtgatcaagagagacgccctgcagaaggtgctggagttctacaccgccttcagccacagcttcagcagaaacctgatcctgacctacaacctgagaaagagaatcgtgttcagaaagatcagcgacgtgaagagagaggaggaggagagaatgaagagaaagaacgaggcccccctgatcctgccccccgaccaccccgtgagaagactgttccagagattcagacagcagaaggaggccagactggccgccgagagaggcggcagagacctggacgacctggacgtggagaagggcaacgtgctgaccgagcacgccagcgccaaccacagcctggtgaaggccagcgtggtgaccgtgagagagagccccgccacccccgtgagcttccaggccgccagcaccagcggcgtgcccgaccacgccaagctgcaggcccccggcagcgagtgcctgggccccaagggcggcggcggcgactgcgccaagagaaagagctgggccagattcaaggacgcctgcggcaagagcgaggactggaacaaggtgagcaaggccgagagcatggagaccctgcccgagagaaccaaggccagcggcgaggccaccctgaagaagaccgacagctgcgacagcggcatcaccaagagcgacctgagactggacaacgtgggcgaggccagaagcccccaggacagaagccccatcctggccgaggtgaagcacagcttctaccccatccccgagcagaccctgcaggccaccgtgctggaggtgagacacgagctgaaggaggacatcaaggccctgaacgccaagatgaccaacatcgagaagcagctgagcgagatcctgagaatcctgaccagcagaagaagcagccagagcccccaggagctgttcgagatcagcagaccccagagccccgagagcgagagagacatcttcggcgccagctag

SEQ ID NO: 126772 - protein, 501 aa, Artificial Sequence
  derived and/or modified sequence
MSALRRKFGDDYQVVTTSSSGSGLQPQGPGQDPQQQLVPKKKRQRFVDKNGRCNVQHGNLGSETSRYLSDLFTTLVDLKWRWNLFIFILTYTVAWLFMASMWWVIAYTRGDLNKAHVGNYTPCVANVYNFPSAFLFFIETEATIGYGYRYITDKCPEGIILFLFQSILGSIVDAFLIGCMFIKMSQPKKRAETLMFSEHAVISMRDGKLTLMFRVGNLRNSHMVSAQIRCKLLKSRQTPEGEFLPLDQLELDVGFSTGADQLFLVSPLTICHVIDAKSPFYDLSQRSMQTEQFEIVVILEGIVETTGMTCQARTSYTEDEVLWGHRFFPVISLEEGFFKVDYSQFHATFEVPTPPYSVKEQEEMLLMSSPLIAPAITNSKERHNSVECLDGLDDITTKLPSKLQKITGREDFPKKLLRMSSTTSEKAYSLGDLPMKLQRISSVPGNSEEKLVSKTTKMLSDPMSQSVADLPPKLQKMAGGAARMEGNLPAKLRKMNSDRFT

SEQ ID NO: 126773 - protein, 235 aa, Artificial Sequence
  derived and/or modified sequence
MSALRRKFGDDYQVVTTSSSGSGLQPQGPGQDPQQQLVPKKKRQRFVDKNGRCNVQHGNLGSETSRYLSDLFTTLVDLKWRWNLFIFILTYTVAWLFMASMWWVIAYTRGDLNKAHVGNYTPCVANVYNFPSAFLFFIETEATIGYGYRYITDKCPEGIILFLFQSILGSIVDAFLIGCMFIKMSQPKKRAETLMFSEHAVISMRDGKLTLMFRVGNLRNSHMVSAQIRCKLLKG

SEQ ID NO: 126774 - DNA, 1506 bp, Artificial Sequence
  derived and/or modified sequence
atgagtgcccttagacgcaagttcggcgatgattatcaggtggtaactacttcaagctctggaagtgggcttcagcctcaaggtccgggccaggatcctcagcaacaattggttccgaagaaaaagagacagagattcgtggacaagaacggccgatgcaacgtgcagcatggaaatttgggcagcgagactagccgctatttgagtgacctgttcaccacgttagtagatctcaaatggcgctggaatctatttattttcatacttacttacactgtagcctggctatttatggcaagcatgtggtgggtcattgcgtatactcgaggagacttgaacaaagctcatgtaggaaattacaccccctgcgtcgccaacgtgtataacttcccttcagcctttctgttctttatcgagactgaagccacaatcggctacgggtatagatacatcactgacaagtgcccggaaggtattatcctgtttctgtttcagtcaatcttggggtccattgtggacgctttcctcatcgggtgcatgtttatcaaaatgtcacagcctaagaaaagggctgagacgctgatgttctcagaacacgccgtgatctcaatgagggacgggaagttaactttaatgtttcgagtcgggaacctgagaaactctcacatggtgtccgcccaaattcggtgcaagttgttgaagtcgcgccagacgcctgagggcgaattcctgccattagatcagttggaacttgacgtaggcttctctacgggagctgatcaattatttctcgtttcccctctgacaatctgccacgtgattgatgccaagtcgcctttctacgatctctctcagagatctatgcaaacggagcagtttgaaatcgtcgttatattggagggcattgtggagacaacgggaatgacatgccaagctaggacctcatacaccgaggatgaagtcctgtgggggcatagattcttcccagttatttcactggaggagggattctttaaagtggattattcccagttccacgcaaccttcgaagtcccaacaccaccttatagtgttaaagaacaggaggagatgttgcttatgagcagcccgctgatagctcctgccatcaccaacagcaaagagcggcacaattcagtggagtgcctggacgggctggacgatatcaccacaaagttacccagtaaactgcagaagattaccgggagggaggacttccctaagaaactgcttcgtatgtcatcaacaactagcgaaaaggcatacagtctcggtgacctgcccatgaagttacaacgtatttcgtctgtgcctggcaatagtgaggagaaactcgtgagtaaaacaactaaaatgctgtctgacccaatgtctcagtccgtagcggaccttcctcccaaacttcagaagatggccggaggcgcagctcgaatggagggaaacctgcccgctaagctcaggaaaatgaattcagaccgttttacctag

SEQ ID NO: 126775 - DNA, 1506 bp, Artificial Sequence
  derived and/or modified sequence
atgtctgccctgcggaggaagtttggagatgactaccaggtggtgaccaccagcagcagcggcagcggcctgcagccccagggccctggccaggacccccagcagcagctggtgcccaagaagaagaggcagagatttgtggacaagaatggccgctgcaatgtgcagcacggcaacctgggcagcgagaccagccgctacctgagtgacctcttcaccaccctggtggacctgaagtggcgctggaacctcttcatcttcatcctgacctacacagtggcctggctgttcatggcctccatgtggtgggtgattgcctacaccaggggggacctgaacaaggcccacgtgggcaactacaccccctgtgtggccaacgtgtacaacttccccagcgccttcctgttcttcatcgagacagaggccaccatcggctacggctaccgctacatcacagacaagtgcccagagggcatcatcctcttcctgttccagagcatcctgggcagcatcgtggatgccttcctgattggctgcatgttcatcaagatgagccagcccaagaagagagctgagaccctgatgttttctgaacatgctgtgatctccatgagagatggcaagctgaccctgatgttccgggtgggcaacctgaggaacagccacatggtgtctgcccagatccgctgcaagctgctgaagagccggcagaccccagagggggagttcctgcccctggaccagctggagctggatgtgggcttcagcactggagctgaccagctgttcctggtgagccccctgaccatctgccacgtgattgatgccaagagccccttctatgacctgagccagaggtccatgcagacagagcagtttgaaattgtggtgatcctggagggcatcgtggagaccaccggcatgacctgccaggcccggaccagctacacagaagatgaggtgctgtggggccaccgcttcttccctgtgatcagcctggaggagggcttcttcaaggtggactacagccagttccacgccacctttgaggtgcccaccccaccctacagcgtgaaggagcaggaggagatgctgctgatgagcagccccctcatcgccccagccatcaccaacagcaaggagcggcacaacagcgtggagtgcctggatggcctggatgacatcaccaccaagctgcccagcaagctgcagaagatcaccggccgggaggacttccccaagaagctgctgaggatgagcagcaccaccagcgagaaggcctacagcctgggggacctgcccatgaagctgcagaggatcagctctgtgcccggcaacagcgaggagaagctggtgtccaagaccaccaagatgctgagtgaccccatgagccagagcgtggccgacctgccccccaagctgcagaagatggccggcggggccgccaggatggagggcaacctgcctgccaagctgaggaagatgaacagcgaccgcttcacctag

SEQ ID NO: 126776 - DNA, 1506 bp, Artificial Sequence
  derived and/or modified sequence
atgagcgccctgcggcggaagttcggcgacgactaccaggtggtgacaacaagctcctcgggatccgggctgcaaccccagggtcccgggcaggatccacaacagcaactggtgcctaagaaaaagcgtcagcgattcgtggacaaaaatggcagatgtaatgttcaacatggtaaccttggaagtgagacctcaaggtatctgagcgatctattcactactctcgtcgacctgaaatggcggtggaacctgttcatctttatcctgacttataccgtagcatggctgtttatggcttccatgtggtgggtcatagcttacactcgcggcgatctgaataaggcccacgtaggcaattacacgccctgcgtggctaacgtgtacaattttccttctgcatttctgttctttattgagactgaagcaaccatcggctatgggtacagatatataacagacaagtgcccagaggggatcatactattcctctttcagagcatccttgggagtatagtcgatgccttcctcatcgggtgcatgtttataaaaatgtcccagcctaagaagcgcgcagaaaccctgatgtttagtgagcacgccgtaatttccatgcgtgacgggaagctgacactcatgttccgcgttgggaacctgcgtaacagtcacatggtgagcgctcagattcggtgtaaactgcttaaatctagacagacacccgaaggggaatttctgccactggatcagctggagctagacgtcggctttagcacaggtgcagatcaattgttcctcgtctctcccctcacgatctgtcacgttattgatgccaagagtcctttctatgatctctcgcagcggagcatgcaaacagaacaattcgagattgtggtgatacttgaaggtatcgttgagacaacaggcatgacctgtcaggctcggactagctatactgaagacgaggtgctgtggggccatcgcttctttccagtgatatctctggaggagggcttcttcaaagtggattattcacaattccacgccacctttgaggtcccaacccctccatattcagtaaaggagcaggaagaaatgctcctgatgagcagccccctcattgcccccgctatcaccaattcaaaagaacggcacaattctgtcgaatgcctggatggcctggatgacatcaccactaagctaccgtccaagctccaaaagattacaggacgtgaggactttccgaagaagctgttgagaatgagttccacaacttctgagaaggcctattctctcggtgaccttccgatgaagctgcagaggatctcttctgtccctggtaactcagaagaaaagctcgtgtccaagaccacaaaaatgctgagtgaccccatgtcacagagcgtggccgacctcccaccaaaactccaaaaaatggctggcggtgctgccagaatggaaggaaatctgcccgcaaaattgaggaaaatgaactctgatcgattcacgtag

SEQ ID NO: 126777 - DNA, 5021 bp, Artificial Sequence
  derived and/or modified sequence
caggcaggtaaaggcagcttcttaggcagccagcgagttggcaggtgggttgggactcgcttgtcaactcattaattttaagcagtcagtttgggggtactgcaggataatcaggagggccgtggggagtcaagaggtgacccgggatgccggtggtggggaaagaaaagaggagcctctggaagcttggaggcaaaattgcgcttgggttcctgttccttgcatccctcctggcttgagtgcgggagaacactttttaaagactcaccttggaaagaaggcctccgtcccaggggagaaggagaggcgtctgcagggggcagagaccgcagctacctgccgggtgcgccccccacccaggagcgctcgcttcgccccctttcctcccccgcccccacctccttattggtgctagtttgcagcgcccagctcctgcgccttcgcttcgcgtttgaatctggctcgccccttcgtattatgtctgcactccgaaggaaatttggggacgattatcaggtagtgaccacatcgtccagcggctcgggcttgcagccccaggggccaggccaggaccctcagcagcagcttgtgcccaagaagaagcggcagcggttcgtggacaagaacggccggtgcaatgtacagcacggcaacctgggcagcgagacaagccgctacctctcggacctcttcaccacgctggtggacctcaagtggcgctggaacctcttcatcttcattctcacctacaccgtggcctggcttttcatggcgtccatgtggtgggtgatcgcctacactcggggcgacctgaacaaagcccacgtcggtaactacacgccttgcgtggccaatgtctataacttcccttctgccttcctcttcttcatcgagacggaggccaccatcggctatggctaccgatacatcacagacaagtgccccgagggcatcatcctcttcctcttccagtccatcctgggctccatcgtggacgccttcctcatcggctgcatgttcatcaagatgtcccagcccaagaagcgcgccgagaccctcatgttcagcgagcacgcggtgatctccatgagggacggaaaactcacgcttatgttccgggtgggcaacctgcgcaacagccacatggtctccgcgcagattcgctgcaagctgctcaaatctcggcagacacctgagggtgagttccttccccttgaccaacttgaactggatgtaggttttagtacaggggcagatcaactttttcttgtgtcccccctcacaatttgccacgtgatcgatgccaaaagccccttttatgacctatcccagcgaagcatgcaaactgaacagttcgagattgtcgtcatcctagaaggcattgtggaaacaactgggatgacttgtcaagctcgaacatcatatactgaagatgaagttctttggggtcatcgtttttttcctgtaatttccttagaagagggattctttaaagttgattactcccagttccatgcaacatttgaagtccccaccccaccttacagtgtgaaagagcaggaggaaatgcttctcatgtcgtcccctttaatagcaccagccataactaacagcaaagaaagacataattctgtggaatgcttagatggactagatgatattactacaaaactaccatctaagctgcagaaaattactggaagagaagactttcccaaaaaactcttgaggatgagttctacaacttcagaaaaagcctacagcttgggagacttgcccatgaaacttcaacgaataagttcagttccgggcaactcagaagaaaaactggtatctaaaaccaccaagatgttatctgatcccatgagccagtctgtggctgatttgccaccaaagcttcaaaagatggctggaggagcagctaggatggaagggaaccttccagccaaattaagaaaaatgaactctgatcgcttcacataacaaagcactcccttaggcattatttaatgtttgatttagtaatagtccaatatttggcgatgaggtaattctccctaaggaatctgaaagtatattttcctcccagttctacaagcatatttgagaacccttcctttcccaagtattgcgaatgtgcagaaagcaacagttacggagggaggacatcataaggaagttattaacgggcatgtattatcacatcaagcatgcaataatgtgcaaattttgcatttagttttatggcatgatttatatatggcatatttatattgtatattctggaaaaaaaatatatatatatatttaaaggggagatactctccctgacatttctaacatatgtattaagccaaacatgagtgaatagctttcagggcgataaaactaaatatatgtctgtgtgtgtgtgtgtatgtatacacacatatacatatatatatacacatacatacacatacatacatacatacatatatatctgataaaattgtgatgttttgttcaaagttgtagttcttgtgcatgtttactttattagagtaggaaggctactggcattaattattaataccaaatattttagccttaaatttttgtcattttaaaatctgatttaatgttttctgctgtttaaggtcttgggaggctttcaattgtattttatatgagagaatcacacaagtttgtgctatctatggccctgcaaaaatataaccattacatgtttaaattgtaaattttagagcataccagtactcagtatagcattgaacatttcttatgatttttaaaagttgctagtactggggagaaataattgttgattaatttgagaattattcctttcctagactaattaaaatctggaaatctgttttgtatatgatctaatacaaagatgagctctgaacaaacactgaatcatgttaatagacagtagccaagttatattgaatatatcagaatctgtgtgaagttacacaattaattgtccctgtttcaaactgagtaaattggaaacattttctttctttttctggaaattttgtccattttaaaaaccaatcattttaagaagacatgacaatgcaatgaaacagatgataaatatttatgcttaaaatatgtatgtctaattgagtctcttttttattctgttttcttgtttatggcatttgttgtaacaggatagactttttcctcacctaggaaacctatcccatgcctgtcacttatagttcaggaggaagtttttgcacagaccagagagaaattaaaattagatgataaattgaagatatcttacacacagttttttggtgaacactgattttattggtgtcttagatccctagtctacccaaataattttaacagtactgttttttctaatcctgaagtctgatatttatgactcattagcaggaatcaaaactagtgatcagtagaacactttcaaaataaaaatttggaatgcagacttttatgaaaatttaaaagtgctccttaacagaatatcatgggttttcctataaaacttctttaagtattgtaattccagtctgccccaactttaaaaaaaattcttattaatatgtcagtcattaattgctagtttgggctctcattatttcctgttttttaacaattttgtgataattttattattggcaaattaatacatcaacacttaaatcattgactataataataccttctggctacctctgtatcaaccaaattctgtaggtgcaaacatataccagggaattcttactggcaaaatgatcaatctggagtgtgcatccactgtgaatggagcaaattgccctatacccattgataacctagctttcttagtttgtagatgtaggaaacaaaatagtgacagagagagaagggggtccacagggcatggtatatttatcagcagtggaaaaaaagtgcatagatcatttagtccaagaacttaaaactaaatagagccataatttactttggagagtcattttaatttgtctttggtaccaaggagaagacggaaccaaaaacaaactctccaagtatattcacacattcaacaaaatttttgcatgccttctatgtcgtaggcatttttagttcctggggatttggacatggctaagtcagagaaggccattgctcaccatgaacactgtataccagaaggagagtggggaggagacaaaaaacaaataagaccacttcagacaatcaaagtatcagttaagagaatgaaaacaggcctgactcagtggctcacgcctgtaatcccagtactttgggaggcggaggttgggggatcacctgaggtcaggagatcgagaccagcctggacaacatggtgaaaacccgtctctactaaaaatacaaaaattaactgggcatggtggcaggcacctgtaatcccagctactggggaagctgaggcaggagaatcgtttgaacctgggaggcggaggttgcagtgagccaagattctgccactgcactccagcctgggtgacagtgcgagactccatctcaacatcaaaaaaaaaaaaaaaaaaaaaaaaaaaaaaaaaaaaaaaaagaataaaaacagggtaacataatgcaaagtaactgtgtggaataaaaattgattattttagaaaatgtgactggcttaggacggggataatatgtgaacagaaatctatctcatgagaaagtgctactgttgtcaaaattaccttatctgagtgaatggtattttttttatcttttccacacatgcgtgggaaaggtatgatttctgcatgtaattgcagtttaacccttatttctaggttgatcataggtcccagtttacccaggaaaattccagtttatacctgttgtacctgtgtaattattggtagcactccctttcactcttacaatgtcttggtttggatgatatatggtgaagtttttgttgaaactaaattatgaagtctgatatatttggataaaaataaagaattgcttttctt

SEQ ID NO: 126778 - DNA, 1506 bp, Artificial Sequence
  derived and/or modified sequence
atgagcgccctcagaaggaagtttggtgatgactaccaggtcgtcacgacgagtagcagtggtagcggactgcagccccaggggcctggtcaggaccctcagcagcaattggttccaaaaaagaagcggcagagatttgtcgataaaaatggccgttgcaacgtgcaacatggcaacctgggttccgagacatcaaggtacttgtcggatttgtttaccaccctcgtggacctgaagtggcgctggaacttatttatattcatcctcacctatacagtcgcctggctgtttatggcttcgatgtggtgggtgattgcctacacccgcggagatttgaataaggcacacgtggggaattataccccctgcgtagcaaatgtgtataacttcccatccgcctttctctttttcatcgagaccgaagctactatcggctatggctatagatatatcactgacaagtgccccgaaggaatcattcttttcttgtttcagtcaatcctgggctctattgtggacgccttcctcataggatgtatgttcattaagatgagtcagcccaaaaagcgtgcggagacccttatgttctccgaacatgccgtgatttccatgcgtgatggcaaactcactctgatgttccgggtgggcaacctacggaactcccacatggtgtctgcgcagatcaggtgcaaactgcttaaatcaagacaaacacctgaaggagagttcttgcctttggaccaacttgaactggacgtgggcttttctaccggcgcagaccagctctttctggtgagcccacttaccatttgccacgtcatcgatgccaaaagcccattctacgacttgtcgcagagaagcatgcagacagagcagttcgaaatagtggtcatccttgagggaattgtggaaacgactggtatgacctgccaggccagaacctcatatacagaggacgaggtgctctggggccaccgattttttcccgtcattagccttgaagaagggttcttcaaagtagactacagtcagttccacgccacattcgaagtacccactcccccatatagcgtcaaggagcaggaggagatgctgctgatgagcagccctctaattgccccagcaatcacaaatagcaaggagcggcacaattcagttgagtgcctcgacggactggacgacattactacaaaactccccagcaagttacaaaaaatcacaggcagagaggattttcctaagaagctgctgcggatgagtagtaccacatctgaaaaggcctattcgctgggtgacctgccgatgaagttgcagcgcatctcttctgtgcccggaaacagcgaagagaagctcgtgagtaaaactactaagatgctcagcgatcccatgtcgcagtcggtggccgatcttcctccaaagttacaaaagatggcagggggagctgcgaggatggaaggtaatctgccggctaaattaaggaagatgaattccgaccggtttacctag

SEQ ID NO: 126779 - DNA, 1506 bp, Artificial Sequence
  derived and/or modified sequence
atgagcgccctgagaagaaagttcggcgacgactaccaggtggtgaccaccagcagcagcggcagcggcctgcagccccagggccccggccaggacccccagcagcagctggtgcccaagaagaagagacagagattcgtggacaagaacggcagatgcaacgtgcagcacggcaacctgggcagcgagaccagcagatacctgagcgacctgttcaccaccctggtggacctgaagtggagatggaacctgttcatcttcatcctgacctacaccgtggcctggctgttcatggccagcatgtggtgggtgatcgcctacaccagaggcgacctgaacaaggcccacgtgggcaactacaccccctgcgtggccaacgtgtacaacttccccagcgccttcctgttcttcatcgagaccgaggccaccatcggctacggctacagatacatcaccgacaagtgccccgagggcatcatcctgttcctgttccagagcatcctgggcagcatcgtggacgccttcctgatcggctgcatgttcatcaagatgagccagcccaagaagagagccgagaccctgatgttcagcgagcacgccgtgatcagcatgagagacggcaagctgaccctgatgttcagagtgggcaacctgagaaacagccacatggtgagcgcccagatcagatgcaagctgctgaagagcagacagacccccgagggcgagttcctgcccctggaccagctggagctggacgtgggcttcagcaccggcgccgaccagctgttcctggtgagccccctgaccatctgccacgtgatcgacgccaagagccccttctacgacctgagccagagaagcatgcagaccgagcagttcgagatcgtggtgatcctggagggcatcgtggagaccaccggcatgacctgccaggccagaaccagctacaccgaggacgaggtgctgtggggccacagattcttccccgtgatcagcctggaggagggcttcttcaaggtggactacagccagttccacgccaccttcgaggtgcccacccccccctacagcgtgaaggagcaggaggagatgctgctgatgagcagccccctgatcgcccccgccatcaccaacagcaaggagagacacaacagcgtggagtgcctggacggcctggacgacatcaccaccaagctgcccagcaagctgcagaagatcaccggcagagaggacttccccaagaagctgctgagaatgagcagcaccaccagcgagaaggcctacagcctgggcgacctgcccatgaagctgcagagaatcagcagcgtgcccggcaacagcgaggagaagctggtgagcaagaccaccaagatgctgagcgaccccatgagccagagcgtggccgacctgccccccaagctgcagaagatggccggcggcgccgccagaatggagggcaacctgcccgccaagctgagaaagatgaacagcgacagattcacctag

SEQ ID NO: 126780 - protein, 423 aa, Artificial Sequence
  derived and/or modified sequence
MAKLTESMTNVLEGDSMDQDVESPVAIHQPKLPKQARDDLPRHISRDRTKRKIQRYVRKDGKCNVHHGNVRETYRYLTDIFTTLVDLKWRFNLLIFVMVYTVTWLFFGMIWWLIAYIRGDMDHIEDPSWTPCVTNLNGFVSAFLFSIETETTIGYGYRVITDKCPEGIILLLIQSVLGSIVNAFMVGCMFVKISQPKKRAETLVFSTHAVISMRDGKLCLMFRVGDLRNSHIVEASIRAKLIKSKQTSEGEFIPLNQTDINVGYYTGDDRLFLVSPLIISHEINQQSPFWEISKAQLPKEELEIVVILEGMVEATGMTCQARSSYITSEILWGYRFTPVLTLEDGFYEVDYNSFHETYETSTPSLSAKELAELASRAELPLSWSVSSKLNQHAELETEEEEKNLEEQTERNGDVANLENESKV

SEQ ID NO: 126781 - DNA, 1272 bp, Artificial Sequence
  derived and/or modified sequence
atggccaaactgaccgaatccatgaccaatgtgctcgagggcgactcaatggaccaagacgtcgaatccccagtagcaatacatcagccaaaactgcccaagcaggcgagggacgatctgcccagacatatctcccgggaccgaacaaagaggaagattcagcgctatgtgcgtaaggatggcaaatgtaacgtccatcacggtaacgtccgcgaaacctataggtacctgaccgacattttcaccaccttggtcgatctcaaatggcgctttaatctgctgattttcgtgatggtgtatacagtgacctggctgttctttggcatgatttggtggctgatcgcctatatcaggggcgacatggaccatattgaggatcccagttggaccccatgtgtcaccaacctgaatggctttgtttctgcctttctgttttcaatagagacggaaacgaccattggatacggttaccgcgtgataaccgacaaatgcccagaagggataattttattgctcattcaaagcgtccttggctctatcgtaaatgcgttcatggttgggtgcatgttcgttaagatttcgcagcctaaaaaaagagcagaaacgctggtattttcaacacatgccgtaatttctatgcgcgatggcaaactgtgcctgatgtttagagtgggggatctcaggaacagccacatcgtggaagcgagcatcagagccaaactcattaagtcaaagcaaacttctgaaggagagtttattcccttgaatcagaccgatatcaatgtcggctactacaccggtgacgatcgcctgtttctcgtgtcaccattaattatttcccatgagatcaaccaacagtctccattctgggaaatttctaaagcccaactccccaaagaggaattggagatagttgttattcttgagggcatggttgaggctaccgggatgacctgtcaggcacggagttcctatatcacctctgagatcctgtgggggtataggtttactcctgtgttaaccctggaggatggtttctatgaagtcgattacaactcttttcatgaaacttatgagacctccaccccttcattgtcggccaaggagctggctgaacttgcctccagagctgaactgccactgtcttggtccgtttctagtaaactcaaccaacatgccgagttggagactgaggaagaggagaagaacctcgaggaacagaccgaaaggaatggtgacgtggccaatttagagaatgagtccaaggtgtag

SEQ ID NO: 126782 - DNA, 1272 bp, Artificial Sequence
  derived and/or modified sequence
atggcgaaattaaccgaatctatgacaaatgtgctcgaaggagatagtatggaccaggatgtagagtcccccgtggccattcatcaacctaagctgcccaagcaagctagggacgacttgccgcgtcatatttcccgggacaggacaaagaggaaaatccagaggtacgttagaaaagatgggaagtgcaatgtccatcacggcaatgtgcgcgagacgtaccggtatcttactgatatcttcacaactctcgtcgacctgaagtggcgctttaacttgctcatatttgttatggtgtataccgtgacttggctttttttcggtatgatctggtggttgatcgcatatatacgcggagatatggaccacattgaggatccctcttggacaccctgtgtcacaaatttaaacggcttcgtgagtgcgtttcttttttccatagaaacggagactaccatcggttacggctatcgtgttattaccgacaagtgcccagaaggaataatcctgcttttgatccagtccgtactcggaagcatcgtgaacgcctttatggtgggctgcatgtttgtaaagattagccagccgaagaagagggctgagacactggtgtttagcacccacgcagtgatatccatgagggacggcaaactgtgtctcatgtttcgggtgggagatctgcggaacagccatattgtggaagcctctattagagcaaagctgatcaagagcaaacagaccagcgagggggagttcatccccttaaaccagactgacatcaacgtgggctactataccggtgatgaccgactgtttctggttagcccattgatcattagccatgaaattaaccagcaatcaccattttgggaaatttcgaaggcccagctccccaaggaagagctagaaattgtggttatcttagaaggtatggttgaagccacaggcatgacatgtcaggcccgatctagttacatcacatcagagatcctgtggggttaccgctttactcccgtgctcacactggaagatggcttctatgaagtcgattataatagctttcatgagacatacgagacttctactcccagcctgtctgctaaggagctggccgagctcgcgtcacgtgccgagctgcctctgtcttggagtgtgtcatcgaaactcaatcagcacgctgaactggagacggaggaggaagaaaagaaccttgaggagcagacagagcgtaacggggatgttgcaaatctcgaaaatgagagcaaggtgtag

SEQ ID NO: 126783 - DNA, 1272 bp, Artificial Sequence
  derived and/or modified sequence
atggccaagctgacagagagcatgaccaacgtgctggagggggacagcatggaccaggatgtggagagccctgtggccatccaccagcccaagctgcccaagcaggccagagatgacctgcccaggcacatcagccgggacaggaccaagaggaagatccagcgctacgtgaggaaggatggcaagtgcaatgtgcaccacggcaatgtgcgggagacctaccgctacctgacagacatcttcaccaccctggtggacctgaagtggaggttcaacctgctgatctttgtgatggtgtacacagtgacctggctgttcttcggcatgatctggtggctgattgcctacatccggggggacatggaccacatcgaggaccccagctggaccccctgtgtgaccaacctgaatggatttgtgtctgccttcctgttcagcattgaaacagagaccaccatcggctacggctacagagtcatcacagacaagtgcccagagggcatcatcctgctgctgatccagagcgtgctgggcagcatcgtgaatgccttcatggtgggctgcatgtttgtgaagatcagccagcccaagaagagagctgagaccctggtgttcagcacccatgctgtgatctccatgagagatggcaagctgtgcctgatgttccgggtgggggacctgaggaacagccacatcgtggaggccagcatccgggccaagctgatcaagagcaagcagaccagcgagggggagttcatccccctgaaccagacagacatcaacgtgggctactacacaggagatgacaggctcttcctggtgagccccctcatcatcagccatgagatcaaccagcagagccccttctgggagatcagcaaggcccagctgcccaaggaggagctggagatcgtggtgatcctggagggcatggtggaggccaccggcatgacctgccaggcccggagcagctacatcaccagcgagatcctgtggggctaccgcttcacccctgtgctgaccctggaggatggcttctatgaggtggactacaacagcttccacgagacctatgagaccagcacccccagcctgagcgccaaggagctggccgagctggccagcagagctgagctgcccctgtcctggagcgtgagcagcaagctgaaccagcacgccgagctggagacagaggaggaggagaagaacctggaggagcagacagaaagaaatggagatgtggccaacctggagaatgaaagcaaggtgtag

SEQ ID NO: 126784 - DNA, 1272 bp, Artificial Sequence
  derived and/or modified sequence
atggccaagctgaccgagagcatgaccaacgtgctggagggcgactctatggatcaggacgtagagagtccagtggccatccatcagccaaagttaccaaagcaagcacgcgatgatctcccgaggcatatttctagggaccggacaaagaggaagatccagcgctatgtgagaaaggatgggaaatgcaatgtgcaccacggaaacgtgagggaaacatacagatacctgaccgacatctttaccaccctggtcgatctgaagtggcggtttaatctgcttatttttgtgatggtttatacagtcacatggttgttcttcggaatgatctggtggttgattgcgtacattaggggggatatggaccacattgaggatccctcatggacaccctgcgtgacaaacttgaatggtttcgtctccgcatttcttttcagtattgagaccgagaccaccattggctatggctacagggtcataaccgataagtgtcccgaaggaatcatcttgttgttgatccaaagtgtcttgggatcgattgtgaacgcatttatggtcgggtgtatgttcgtgaagatttcccagccaaagaaaagggccgagacactggtgttttcaacccacgcagtgattagtatgagagatgggaagctctgcttgatgttccgggttggggacctgaggaatagccacatcgtggaagcttccattcgggcgaaactcattaagtccaagcagacatccgaaggtgaattcatacctctcaatcagactgacatcaacgtgggctactatactggcgacgaccgtctgttcctggttagtcccctaatcatctcgcacgagattaatcagcagtcccccttctgggagatatctaaggcccagttgcctaaagaagaactggaaattgttgtcattctagaaggaatggtggaggccacaggtatgacttgtcaagctaggtcatcgtatatcacaagcgagattttatggggctaccgcttcacgcccgttctgacgctggaggacggattctatgaggtggattataattcattccacgagacctatgagaccagcacgcctagcctttctgctaaggagctggccgagctggcctcccgggccgaattgccactcagctggagcgtctcttctaagctgaaccaacatgctgaattggagactgaagaagaagagaagaacttggaggaacagacagagagaaatggcgatgtggccaacctggagaacgaatccaaagtgtag

SEQ ID NO: 126785 - DNA, 1272 bp, Artificial Sequence
  derived and/or modified sequence
atggccaagctgaccgagagcatgaccaacgtgctggagggcgacagcatggaccaggacgtcgagtctccagttgccatccaccaaccaaagctgcctaagcaggccagggacgacctcccacggcatatctctcgggatcgaactaaaaggaaaattcaaagatacgtgcgcaaagacggaaagtgcaatgttcaccacggcaacgtgagggagacctacaggtacctgaccgatatatttaccactttagtagacctgaaatggcggttcaatttgcttattttcgtgatggtctacacagtgacctggttgttcttcgggatgatctggtggttgattgcctacatcaggggagacatggatcacatagaggatccaagctggacgccttgtgtgactaatctgaatggtttcgtgtctgcgtttctattctccattgagaccgaaacaaccattgggtatggttatcgagttataacagataagtgccctgagggtataatcttgctgctgatacaatccgttttaggttctattgtgaacgccttcatggtcgggtgtatgttcgtcaaaatcagtcagcctaagaagcgggccgaaacactcgtgttcagcactcatgcagtcattagcatgagggacggcaaactctgcctcatgtttcgtgtgggcgacctgcggaattcacatattgtggaggcctccataagagccaagctgataaaatccaagcaaacatctgagggcgagtttattcctctgaaccaaacggacatcaacgtgggctattacacgggggacgacagactgttcctagtttccccacttattatttcccacgaaattaatcagcagtctccattctgggagatctccaaagcacaacttcctaaggaagagttggagattgtcgtcattttagaggggatggtggaagctacggggatgacttgccaagctcgcagcagttatatcacctcagaaatcctttggggctacaggtttactccggtgctcacccttgaagatggcttttatgaggtcgattataacagctttcacgaaacttatgagacatctactccttccctgtctgccaaggagctggcagagcttgcctcaagagctgagctccctctgtcttggagtgttagcagcaagttgaatcagcacgctgaactcgaaaccgaggaggaggaaaagaacctggaggaacaaactgagcgcaacggggatgttgccaatctggagaacgagagcaaggtttag

SEQ ID NO: 126786 - DNA, 1325 bp, Artificial Sequence
  derived and/or modified sequence
tttcaacattcatacagggaaaacaggaaaagcacaaagaagaaactgcaacaatggccaagctgacagaatccatgactaacgtcctggagggcgactccatggatcaggacgtcgaaagcccagtggccattcaccagccaaagttgcctaagcaggccagggatgacctgccaagacacatcagccgagatcggaccaaaaggaaaatccagaggtacgtgaggaaagacggaaagtgcaatgttcatcacggcaacgtgagggagacctatcgctacctgaccgatatcttcaccacattagtggacctgaagtggagattcaacctattgatttttgtcatggtttacacagtgacctggctcttttttggaatgatctggtggttgatcgcatacatacggggagacatggaccacatagaggacccctcctggactccttgtgttaccaacctcaacgggttcgtctctgcttttttattctcaatagagacagaaaccaccattggttatggctaccgggtcatcacagataaatgcccagagggaattattcttctcttaatccaatctgtgttggggtccattgtcaatgcattcatggtgggatgcatgtttgtaaaaatctctcaacccaagaagagggcagagaccctggtcttttccacccatgcagtgatctccatgcgggatgggaaactgtgcctgatgttccgggtaggggaccttaggaattcccacattgtggaggcttccatcagagccaagttgatcaaatccaaacagacctcggagggggagttcatcccgttgaaccagacggatatcaacgtagggtattacacgggggatgaccgtctgtttctggtgtcaccgctgatcattagccatgaaattaaccaacagagtcctttctgggagatctccaaagcccagctgcccaaagaggaactggaaattgtggtcatcctagaaggaatggtggaagccacagggatgacatgccaagctcgaagctcctacatcaccagtgagatcctgtggggttaccggttcacacctgtcctgaccctggaggacgggttctacgaagttgactacaacagcttccatgagacctatgagaccagcaccccatcccttagtgccaaagagctggccgagttagccagcagggcagagctgcccctgagttggtctgtatccagcaaactcaaccaacatgcagaactggagactgaagaggaagaaaagaacctcgaagagcaaacagaaagaaatggtgatgtggcaaacctggagaatgaatccaaagtttag

SEQ ID NO: 126787 - DNA, 2534 bp, Artificial Sequence
  derived and/or modified sequence
ggagccgcgtcgcttcgtgcgctgccagcggggctcagccagtcggctggaattgagtagcattcattgaatctgcggatttcatgacgtctctctgcgtggtccaccacttttctcctaaccggggattttttttttcttctgccactcttatctttccccacttcattccacccagtctccctcccccgtccctgcccaaacgcgcgcccctccgcccctcccttggccccagcgcccagccctgctctccgcgctcggccagagggagccagtccggagacggccgcacctggctggagaggctgggcgggcggaggggtggagacccgcggacgccgggaagccggacctggagccggagcagccgcgagcagaatggagtctcctaacagcctctcggtgctgatgtgaaatttgaccatctgattccagtttttttcttttccttttcttttttgcatttccttccctcgccatccgtcgtgtagtgaattgttcagtcttgctccgtttcaagagaggagatcatgattgagtgaagccaccccgtccgcagccaggaaaagcacaaagaagaaactgcaacaatggccaagctgacagaatccatgactaacgtcctggagggcgactccatggatcaggacgtcgaaagcccagtggccattcaccagccaaagttgcctaagcaggccagggatgacctgccaagacacatcagccgagatcggaccaaaaggaaaatccagaggtacgtgaggaaagacggaaagtgcaatgttcatcacggcaacgtgagggagacctatcgctacctgaccgatatcttcaccacattagtggacctgaagtggagattcaacctattgatttttgtcatggtttacacagtgacctggctcttttttggaatgatctggtggttgatcgcatacatacggggagacatggaccacatagaggacccctcctggactccttgtgttaccaacctcaacgggttcgtctctgcttttttattctcaatagagacagaaaccaccattggttatggctaccgggtcatcacagataaatgcccagagggaattattcttctcttaatccaatctgtgttggggtccattgtcaatgcattcatggtgggatgcatgtttgtaaaaatctctcaacccaagaagagggcagagaccctggtcttttccacccatgcagtgatctccatgcgggatgggaaactgtgcctgatgttccgggtaggggaccttaggaattcccacattgtggaggcttccatcagagccaagttgatcaaatccaaacagacctcggagggggagttcatcccgttgaaccagacggatatcaacgtagggtattacacgggggatgaccgtctgtttctggtgtcaccgctgatcattagccatgaaattaaccaacagagtcctttctgggagatctccaaagcccagctgcccaaagaggaactggaaattgtggtcatcctagaaggaatggtggaagccacagggatgacatgccaagctcgaagctcctacatcaccagtgagatcctgtggggttaccggttcacacctgtcctgaccctggaggacgggttctacgaagttgactacaacagcttccatgagacctatgagaccagcaccccatcccttagtgccaaagagctggccgagttagccagcagggcagagctgcccctgagttggtctgtatccagcaaactcaaccaacatgcagaactggagactgaagaggaagaaaagaacctcgaagagcaaacagaaagaaatggtgatgtggcaaacctggagaatgaatccaaagtttagtgccctagctgggcaaacccttctcttctccccccaacacaatctttccttgtctctcattctctttctttttctgtctctcttgctttgttctttatttgtttatatttaatttttacatgaccagaaaacaaatcttcaaggtgtaaaatatctacctgccctctctcagttattcagattgacaaggtagacatggatttgatgaaagtgcaaagtgccctcatttgtggcccaagcctggtctcctcccaaaatactacacatccaactcctggagatttcagttacttacctgcatgtgttgtacaataccagatcactcaaaaaggtgtgtcaaagattttacctgggatatgacaagcaaggtttctggtgcctatttattcattcagtgagacacagagtggagccctcagttttatggatcccaattcatttcatctactacagggtgaggtgcttgcccccatgtgggtgtggcagttacagggcccaggtgagctgaagacaaaccactgtacatatatatgccttatgtaattattttctttttgtaattagtaataaaacccagcatgtacaaaagtaccatagaacagaactgctaaatactgtacatagatgtatcattaatgtaggtttagatatataactttagaaataagaagc

SEQ ID NO: 126788 - DNA, 1272 bp, Artificial Sequence
  derived and/or modified sequence
atggccaagctgaccgagagcatgacaaacgtattagagggtgacagcatggatcaggatgtcgaatctcctgtggccattcatcagccgaaacttccaaagcaggccagggacgacttgcctcggcatatcagcagagacaggactaagcgaaaaattcaaaggtacgttagaaaagacggtaagtgtaacgtccatcacggaaacgtgagagagacatatagatatttgaccgacattttcaccaccctcgtagaccttaagtggaggttcaatcttcttatcttcgtaatggtgtataccgtgacatggctgttttttggaatgatctggtggctcattgcctatatcaggggggacatggatcatattgaggatccctcttggacaccatgcgttacgaatctgaacggctttgttagcgcatttctgtttagtattgagacagaaacaaccatcgggtatggataccgagttattaccgacaagtgccctgaagggattattctactgctgatacaatctgtcctgggcagtatcgtgaatgcgtttatggtgggatgtatgttcgtgaagatcagccaacccaaaaagcgagctgaaacacttgttttcagcacccacgctgtgatttctatgagagacgggaagctctgcctcatgtttcgggttggcgaccttagaaattctcacattgttgaagcctctatccgggcaaagctaattaaaagcaagcagaccagtgaaggagagtttattcctctcaatcagactgatatcaatgtgggatattatactggtgatgaccggctttttctggtttctcctttgattattagccacgagataaaccagcagtcaccattttgggagatctctaaagcccagctacccaaggaggaactggagatcgtcgtgatattggaaggtatggtggaggctacagggatgacatgccaggcacggagttcttacattacttccgaaatcttatgggggtataggttcacaccagtccttactcttgaggatggattctacgaggttgattacaactcgtttcatgagacctacgagacctcgactccctcgctgtcggcaaaagagctcgccgagttggctagccgtgctgaactgcccctgagttggtcagtgtcttctaagctcaaccaacacgccgaactcgaaactgaggaggaagagaaaaatttggaggagcaaactgagagaaacggcgacgtagcaaatcttgagaacgaatctaaggtatag

SEQ ID NO: 126789 - DNA, 1272 bp, Artificial Sequence
  derived and/or modified sequence
atggctaagctcacagaatcaatgaccaacgtgctggagggagattcaatggaccaagacgtggagagtccagtcgcgatccatcagcctaagttaccaaaacaggccagagacgatcttccaaggcatatctcccgagaccggaccaagcgcaagattcagaggtatgtgcgaaaagatggtaaatgtaacgtgcaccacgggaatgtaagggagacgtatcgatatctaacggacatctttacaactcttgttgacctgaaatggagatttaatctgttaattttcgtgatggtatacaccgtgacatggctgttttttggcatgatttggtggctgatcgcttatattaggggagatatggatcacatcgaggacccatcgtggacaccttgcgtgactaacctaaatgggttcgtctcagcctttctgttctcgattgaaaccgagacaaccataggctatggttacagagtgattaccgataagtgccctgaagggatcattttactactgatccagagcgttttgggctctatcgtcaatgctttcatggtggggtgcatgtttgtgaaaattagtcagccaaaaaagcgggctgagactttggtgttttctacgcatgccgtcatttcaatgagagacggtaagctatgcttgatgtttcgtgtcggggacctgcgcaattctcatattgtggaagcctccattagagcaaagctcatcaaatctaagcagacttcagaaggggagttcattccgctgaaccaaaccgacatcaacgtaggttactatactggagacgatagactctttttggtatcgcctttgattatatcccacgaaatcaatcagcagagtcctttctgggaaattagcaaagcgcagctgcccaaggaggagctggagatcgtggtgatactggagggaatggtagaagctacgggcatgacatgccaagctaggagctcatatattacttccgaaatcctgtggggctatagattcacccccgtgttgacgttggaggatggcttctatgaggtggactataatagcttccacgagacctacgaaaccagcactccatctctctctgctaaagagctggccgagttggcctcccgggctgagctgccccttagttggtcagtgtccagcaaactgaaccagcacgctgagctggagaccgaggaagaagagaaaaacctggaagagcagaccgagaggaatggggacgtggcaaacctcgagaacgagtcaaaggtctag

SEQ ID NO: 126790 - DNA, 1272 bp, Artificial Sequence
  derived and/or modified sequence
atggccaagctgaccgagagcatgaccaacgtgctggagggcgacagcatggaccaggacgtggagagccccgtggccatccaccagcccaagctgcccaagcaggccagagacgacctgcccagacacatcagcagagacagaaccaagagaaagatccagagatacgtgagaaaggacggcaagtgcaacgtgcaccacggcaacgtgagagagacctacagatacctgaccgacatcttcaccaccctggtggacctgaagtggagattcaacctgctgatcttcgtgatggtgtacaccgtgacctggctgttcttcggcatgatctggtggctgatcgcctacatcagaggcgacatggaccacatcgaggaccccagctggaccccctgcgtgaccaacctgaacggcttcgtgagcgccttcctgttcagcatcgagaccgagaccaccatcggctacggctacagagtgatcaccgacaagtgccccgagggcatcatcctgctgctgatccagagcgtgctgggcagcatcgtgaacgccttcatggtgggctgcatgttcgtgaagatcagccagcccaagaagagagccgagaccctggtgttcagcacccacgccgtgatcagcatgagagacggcaagctgtgcctgatgttcagagtgggcgacctgagaaacagccacatcgtggaggccagcatcagagccaagctgatcaagagcaagcagaccagcgagggcgagttcatccccctgaaccagaccgacatcaacgtgggctactacaccggcgacgacagactgttcctggtgagccccctgatcatcagccacgagatcaaccagcagagccccttctgggagatcagcaaggcccagctgcccaaggaggagctggagatcgtggtgatcctggagggcatggtggaggccaccggcatgacctgccaggccagaagcagctacatcaccagcgagatcctgtggggctacagattcacccccgtgctgaccctggaggacggcttctacgaggtggactacaacagcttccacgagacctacgagaccagcacccccagcctgagcgccaaggagctggccgagctggccagcagagccgagctgcccctgagctggagcgtgagcagcaagctgaaccagcacgccgagctggagaccgaggaggaggagaagaacctggaggagcagaccgagagaaacggcgacgtggccaacctggagaacgagagcaaggtgtag

SEQ ID NO: 126791 - protein, 379 aa, Artificial Sequence
  derived and/or modified sequence
MTSVAKVYYSQTTQTESRPLMGPGIRRRRVLTKDGRSNVRMEHIADKRFLYLKDLWTTFIDMQWRYKLLLFSATFAGTWFLFGVVWYLVAVAHGDLLELDPPANHTPCVVQVHTLTGAFLFSLESQTTIGYGFRYISEECPLAIVLLIAQLVLTTILEIFITGTFLAKIARPKKRAETIRFSQHAVVASHNGKPCLMIRVANMRKSLLIGCQVTGKLLQTHQTKEGENIRLNQVNVTFQVDTASDSPFLILPLTFYHVVDETSPLKDLPLRSGEGDFELVLILSGTVESTSATCQVRTSYLPEEILWGYEFTPAISLSASGKYIADFSLFDQVVKVASPSGLRDSTVRYGDPEKLKLEESLREQAEKEGSALSVRISNV

SEQ ID NO: 126792 - DNA, 1140 bp, Artificial Sequence
  derived and/or modified sequence
atgacctcagttgcaaaggtgtattattcacagactacccagaccgagtctcgtcccttaatgggcccagggatccgcagacgcagggtcttaactaaagatgggaggtccaatgtcaggatggaacacatcgctgacaagcggttcctttatctaaaagacctctggactacctttatcgatatgcaatggcgctacaaactccttctgttctcagcaacgtttgccggaacatggttcctcttcggcgtggtgtggtatctcgtcgcggtggcgcacggcgaccttctggagctggaccctcctgccaatcacacgccctgtgtggtgcaggtccacaccctcaccggagccttccttttctccttggagagtcagacgactataggctatggttttaggtacatcagcgaagagtgccccctggccattgtcttgttgatagcgcagttggtcctgacgaccattctcgagatattcattacaggaaccttccttgccaaaatcgcaaggcccaagaagcgggccgagaccattaggttttcccaacacgccgtcgtagcctcacacaatggcaagccatgtctcatgattagggtcgccaacatgcggaagtcactgttaattggctgccaggtgacagggaaactgcttcagacacatcagacaaaggagggggagaacatccgcctgaatcaggttaacgtaacatttcaggtggacactgcatctgactcacccttcctgattctcccactcacattctaccacgttgtcgatgagacctcaccactcaaagacctgcccttgcgctccggggagggtgattttgaacttgttctgattttgagtggcacagttgagtctacaagtgccacatgccaagtccggacatcgtatttgcctgaagagattctgtggggctacgagtttacacccgccatttccctgtccgcctcaggcaagtacatcgccgacttcagtttgttcgaccaggttgtgaaggtagcgagcccaagcgggttgcgggacagcactgtgcgttacggtgaccccgaaaagctgaagttggaagaaagtctgagagagcaggctgagaaagagggatcagccctcagcgtccgaatctctaacgtctag

SEQ ID NO: 126793 - DNA, 1140 bp, Artificial Sequence
  derived and/or modified sequence
atgacctctgtggccaaggtgtactacagccagaccacccagacagagagccggcccctgatgggccctggcatcagaagaagaagagtgctgaccaaggatggccgcagcaatgtgaggatggagcacatcgctgacaagcgcttcctgtacctgaaggacctgtggaccaccttcatcgacatgcagtggagatacaagctgctgctcttcagcgccacctttgctggcacctggttcctgtttggagtggtgtggtacctggtggccgtggcccatggagacctgctggagctggaccccccagccaaccacaccccctgtgtggtgcaggtgcacaccctgaccggggccttcctgttcagcctggagagccagaccaccatcggctacggcttccgctacatcagtgaagaatgtcccctggccatcgtgctgctgattgcccagctggtgctgaccaccatcctggagatcttcatcaccggcaccttcctggccaagatcgcccggcccaagaagagagctgagaccatccgcttcagccagcacgctgtggtggccagccacaacgggaagccctgcctgatgatccgggtggccaacatgaggaagagcctgctgattggctgccaggtgacaggcaagctgctgcagacccaccagaccaaggagggggagaacatccggctgaaccaggtgaatgtgaccttccaggtggacacagccagtgacagccccttcctgatcctgcccctgaccttctaccacgtggtggatgagaccagccccctgaaggacctgcccctgcggagcggggagggggactttgagctggtgctgatcctgagcggcaccgtggagagcaccagcgccacctgccaggtgaggaccagctacctgcctgaggagatcctgtggggctatgagttcaccccagccatcagcctgagcgccagcggcaagtacatcgctgacttcagcctgtttgaccaggtggtgaaggtggccagccccagcggcctgcgggacagcacagtgcgctatggagaccctgagaagctgaagctggaggagagcctgcgggagcaggccgagaaggagggcagcgccctgtctgtgcgcatcagcaatgtgtag

SEQ ID NO: 126794 - DNA, 1140 bp, Artificial Sequence
  derived and/or modified sequence
atgaccagcgtggccaaggtgtactacagccagaccacccagaccgaaagtagacctttgatgggaccaggcatccggcgcagacgggtcttaaccaaagacgggaggtcaaacgttaggatggagcacatagcagacaagcgcttcctgtacctgaaagacctgtggactacttttatcgacatgcagtggcggtataaactgcttctgttcagcgctaccttcgccgggacatggtttctgttcggggtggtttggtacctcgtggcagttgcacacggcgatttactggagctggaccctccagccaaccacactccgtgcgtcgttcaagtgcatacactcaccggagcctttctattctcccttgagtctcaaaccaccatcggctacgggttcaggtatatcagcgaggagtgcccgctggctattgtcctcctaatcgcccagcttgtcctcacgactatcctggagatattcatcacagggacgttcctggctaagatcgctagacccaaaaagcgagccgagactatccgcttttcccaacacgccgtcgtggctagccacaatggaaagccatgcctcatgattagggtcgccaacatgagaaagagcctgctgattggctgccaggtgacgggtaagcttctgcaaacgcatcagactaaggagggcgagaacataagactcaaccaggtgaatgtcacttttcaagtagatactgccagcgactctccttttctcattctgcccctcactttctatcatgtagtggacgaaacatcccctctcaaggatctgccactgcgcagcggggagggcgatttcgagctggtcctcattttgagcggcaccgtagagagtacatcagctacgtgtcaggtgagaactagctacttgcccgaagaaatcctttgggggtatgaatttactccagcaatttccctgtcagcaagtgggaaatatattgccgatttctctctcttcgatcaagttgttaaagtagcctctccctccggtttaagagattcaacagtccgttacggggatcccgagaaacttaagctggaggagagtttgcgggagcaggccgagaaggaaggcagcgccctcagcgttaggatctctaacgtttag

SEQ ID NO: 126795 - DNA, 5293 bp, Artificial Sequence
  derived and/or modified sequence
ggcgctgcggagggagggggcggcccggcccggcccagctctgcccccggccggcccgaccccggccccggcccccggacaagcccttatctgatcccagctccgggtttaagagtcctggcccggcccgtcgcacagctctgctcctaactcctgcccgccccgtccgtccatctgtcccgctgccccgcggcccatccaaggggccactccacctcggacccaagatgacgtcagttgccaaggtgtattacagtcagaccactcagacagaaagccggcccctaatgggcccagggatacgacggcggagagtcctgacaaaagatggtcgcagcaacgtgagaatggagcacattgccgacaagcgcttcctctacctcaaggacctgtggacaaccttcattgacatgcagtggcgctacaagcttctgctcttctctgcgacctttgcaggcacatggttcctctttggcgtggtgtggtatctggtagctgtggcacatggggacctgctggagctggaccccccggccaaccacaccccctgtgtggtacaggtgcacacactcactggagccttcctcttctcccttgaatcccaaaccaccattggctatggcttccgctacatcagtgaggaatgtccactggccattgtgcttcttattgcccagctggtgctcaccaccatcctggaaatcttcatcacaggtaccttcctggcgaagattgcccggcccaagaagcgggctgagaccattcgtttcagccagcatgcagttgtggcctcccacaatggcaagccctgcctcatgatccgagttgccaatatgcgcaaaagcctcctcattggctgccaggtgacaggaaaactgcttcagacccaccaaaccaaggaaggggagaacatccggctcaaccaggtcaatgtgactttccaagtagacacagcctctgacagccccttccttattctaccccttaccttctatcatgtggtagatgagaccagtcccttgaaagatctccctcttcgcagtggtgagggtgactttgagctggtgctgatcctaagtgggacagtggagtccaccagtgccacctgtcaggtgcgcacttcctacctgccagaggagatcctttggggctacgagttcacacctgccatctcactgtcagccagtggtaaatacatagctgactttagcctttttgaccaagttgtgaaagtggcctctcctagtggcctccgtgacagcactgtacgctacggagaccctgaaaagctcaagttggaggagtcattaagggagcaagctgagaaggagggcagtgcccttagtgtgcgcatcagcaatgtctgatgacctgttcccactcccccattcctctggtctcttttcctctcttccaatgccctggtaaggaatactacccgggtttactggagatcccccgaagcacccatcctccactccctcttctttaacccagtggcctgttggtagcttaggccaactggagtccaggttcgcctcccactgtcccctttccacttccccagcttctgccccaatacacatacctcccttaagccaggatgggggaaagagtgggattaggctgaagtggcttagaaggcctcagccatgcttggatactcacattaggaggaccatgtggttggaaggatagactgccccctacctcccaccaccaccatgaagtttggtgacttgaggctggagctccctctgttacctttccatctagcaagttcccaaaggcaagactctctctgatggtcactttgtggtctgtgctttcagaaatacaggaatctgatatcaacatatcctagggtttctaccaatctctgttgaaagaagccagggtttgccactgtgaagcttgatttctgctggtgacttctgaccataagctagaaccatggtcgccactgttttccctctgtagtttctcaagtgaacactctcaggatacccagttccctcatagcctctgttctcagagaattggagttggcccaagaaacataaacatataaccacccatatctatcctggattctgaactcttcaatttggagtgactaacacaagttgttatctaaacctttaaacctatcttccaggcagcccagagaagatctgtttccctgtgtcctgtgaatggaaggacccaagccaatatgttcctttgaaaagagtccagtacccaggccccatggaaaggtctgaaaataatattccagattacactgtacctggcttctcttcttcctttcctgctcagcctagatccttcttccttaaccccaactctttgggagaagggagggaaaatgcaagggccttcctctcttaacacggatgctcaagtaaaactagattcacagggcacagattccccagaaagttaacacaatcccaccatgagggatgggtaaattctcagatttccaaactgctgtacagagcctctgagaattggtgatgctttgttaaggtttgggcaggagcagaactctgtggctggcagccactattctcagttacacctcccagtgcccttctgaaaagtgccagctatttcattaggcaatgctggaaggaaatgaaattataccttctgatcaaataaccatggcttccctcagccattcctgagacttggtataaaatgaagaaatcagtgtcatctctactctcctctgccatgaggccattttcagacaagttaaaaagtagactttaagagatcaaactcagcctattccttgttccctggtggggtctgtggtaagggtcagggaagggcatataggcaccagagctttatccaaagccccaaatccctagagtgctttctggtctcactttggtaccaaggaagcctcacatagtggtactgcatagtcccactataagtcaagttgcagtttaaggtggtctcagccaattgttacaagctacagaatatatacatgcatctatgtacagagccttgcagagaaacacaaaattttgaggctagacccatgatcaccaccaactataattgcacaaggtcttgttatattgatctctcctcgaactcaactaactatatcttgaaaacaaagacccttcggtgtccatctacagtaaaccccaccattaccttctagttggcataaaaacaagaaccacaaaaacttgaaaaatctgaaacagagaacagaaggccaagagccagcttctgcgttctcaactttattcaacattagacttaccttatttctttcagtgtgtagggacaagatgtactgctgtgtgtgtgtgtgtgtgtgtgtgtgtgtgtgtgtgtgtgtgtgtgtgtgtctataccttcctatccattgccaagttaacctccatctggtttatttggccatgctatgctttcttcccattcccctgctgtctattctaagcccccagactcaagcctctagactcttggatgaaacagtgagaagaaaacattttctgacttacccttttggaatctcctccattattacccaggctttgctttaagttgcactttaaatcacactgtcctattaatgcgatctggcatcttctcccacaagccccctacagggaacaactaccccctaccttaactctaaatggttctttagactatagtctgtctcctctgacctgaaatcctcttttaggcaataggccgagctttagaagcagccaggtctggtgagaaatgggcccccataccaactgtggacttggaatatcagcagagtagtaggcacagttgtaaaaaggggagatttcggtaggcacaggtgtaaaaaggggagatttcagaagacgggcgaaacaactgatgggggaagatacctggggtgagaagatgagaaagaaatgatgctgagggacctagtgaaatcaatgaaactcttgagtcttgcttaggctcgcaaacaagaagtggggaggcttgggaaattaggatatgacatatatgaaaggtttatctaagaagaaagaaacagagataatatatatatagaaagatgtatatagatgtatatatgcccaaatatattgaatgtacagaaaggaaatattcagagactttagcattgggggcagatatcttggcctggttatggggtaggacacccagattttcagacttacaatcagtggtcctggtttcaacatggaagtgagatagctgatgaaggatttcaagtctggaaatgggaaagggaggggtagaagttccttttcagaaataaagaggcattcatgaaggcttttgttgaatcctatgctactgataggaccaggaagagaggaactcggaggacaatagggaggggaagtcttggaaaatctaccacttacactgtgtgtccccatccccagcagcgtcctgccactgtagcgcctttttaaaataaataaaataaaataaagcaccattttgtttccctttcatgaagtacactgtatttccgtcttccacaggggtgggagctgctattgctctagcccctgaaatcaaactcaggagctgaacactttggtgtatgggaggcactaatgggaagcctcaaccctggaatccaaatgccaggactaatagctgttaggctgaagatctcccaaggtcaaggcccagccttttgtgtggctgcaagcagcccaaagagaaagccatggattccagaagagttccaatcctggcatttgggcatggagggtgatgctttggttttgatgcttctgaatgaaaatgaggagtggggttaccagctgctctaggggatggtgaagttccatgagaggcttccgaaatctctgcaatgtgcttcaccccattattcccccaacccctgtcagcctaataaaatcatccagtagtttccctataaggtctgagcagagaaagaaagccagttatactattgctacaagtccaggacactgtgccctctccatggctgctgccctggtcctttattcttgctagctaacctagttcacttgtacagtaacacactacctttgctggaaagttagcatgggtctccaggctcagtaatggccaactctactgatgcagaagtatttagggatgttttttccattcattgcactaaagactaaaccaggtcaaatttatctaggaaaaaaaaggtgtgtaagatttgttttgtttttgtctgttaaaaataagctactaaataaaatggatgactctttggttgtca

SEQ ID NO: 126796 - DNA, 1140 bp, Artificial Sequence
  derived and/or modified sequence
atgacaagcgtcgcaaaagtatattattcccaaactacacaaacagagagccgtcctcttatgggacccggaatcagacgcagacgagtgctcaccaaagatggcaggagcaacgtgcggatggaacacatcgcagataagcgctttctgtaccttaaggatctgtggaccacttttattgatatgcagtggagatacaaattgctgttattcagtgctacattcgcaggcacctggttcctgtttggtgtggtgtggtatctcgtggcagtggcccacggggatcttctggagctggaccctcccgcaaaccatacaccttgtgtggtgcaggtgcacactctgacaggagctttcttgttcagcctggagagtcagactactatcggatatggctttcggtatatatccgaggagtgccctctggccattgttctcctgatcgctcagttggtgctgaccaccattctggaaattttcatcactgggactttcttggccaagatcgcccgaccaaaaaagagggccgagaccattcggttctctcaacatgctgttgtcgcttctcacaacggaaagccctgtctgatgatcagggtggccaacatgcgaaagtcactgctgatcggatgtcaggtgactggaaagctcttgcagacacatcagaccaaggaaggagagaacattcggctcaatcaggtgaacgtcactttccaggtcgatacagccagtgatagcccttttctgatcctgccactgactttctaccacgtcgtcgacgagacatcaccacttaaggatctacctctgagatcaggagaaggcgattttgagttggtcttgatactgtctggcaccgtggaatccacatccgcaacttgccaagtgcggacctcgtatctgcccgaagagatcctatggggctacgagttcacacccgcaattagcttgagcgcttccggcaaatatatagccgactttagtctcttcgaccaggtcgttaaggttgcctccccaagcggattgcgggactcgaccgtgcggtacggagatcccgaaaagttgaaactggaggagtctttaagggagcaggcagaaaaggagggaagcgccctgagcgtgaggatcagcaacgtatag

SEQ ID NO: 126797 - DNA, 1140 bp, Artificial Sequence
  derived and/or modified sequence
atgaccagcgtggccaaggtgtactacagccagaccacccagaccgagagcagacccctgatgggccccggcatcagaagaagaagagtgctgaccaaggacggcagaagcaacgtgagaatggagcacatcgccgacaagagattcctgtacctgaaggacctgtggaccaccttcatcgacatgcagtggagatacaagctgctgctgttcagcgccaccttcgccggcacctggttcctgttcggcgtggtgtggtacctggtggccgtggcccacggcgacctgctggagctggacccccccgccaaccacaccccctgcgtggtgcaggtgcacaccctgaccggcgccttcctgttcagcctggagagccagaccaccatcggctacggcttcagatacatcagcgaggagtgccccctggccatcgtgctgctgatcgcccagctggtgctgaccaccatcctggagatcttcatcaccggcaccttcctggccaagatcgccagacccaagaagagagccgagaccatcagattcagccagcacgccgtggtggccagccacaacggcaagccctgcctgatgatcagagtggccaacatgagaaagagcctgctgatcggctgccaggtgaccggcaagctgctgcagacccaccagaccaaggagggcgagaacatcagactgaaccaggtgaacgtgaccttccaggtggacaccgccagcgacagccccttcctgatcctgcccctgaccttctaccacgtggtggacgagaccagccccctgaaggacctgcccctgagaagcggcgagggcgacttcgagctggtgctgatcctgagcggcaccgtggagagcaccagcgccacctgccaggtgagaaccagctacctgcccgaggagatcctgtggggctacgagttcacccccgccatcagcctgagcgccagcggcaagtacatcgccgacttcagcctgttcgaccaggtggtgaaggtggccagccccagcggcctgagagacagcaccgtgagatacggcgaccccgagaagctgaagctggaggagagcctgagagagcaggccgagaaggagggcagcgccctgagcgtgagaatcagcaacgtgtag

SEQ ID NO: 126798 - protein, 360 aa, Artificial Sequence
  derived and/or modified sequence
MDSSNCKVIAPLLSQRYRRMVTKDGHSTLQMDGAQRGLAYLRDAWGILMDMRWRWMMLVFSASFVVHWLVFAVLWYVLAEMNGDLELDHDAPPENHTICVKYITSFTAAFSFSLETQLTIGYGTMFPSGDCPSAIALLAIQMLLGLMLEAFITGAFVAKIARPKNRAFSIRFTDTAVVAHMDGKPNLIFQVANTRPSPLTSVRVSAVLYQERENGKLYQTSVDFHLDGISSDECPFFIFPLTYYHSITPSSPLATLLQHENPSHFELVVFLSAMQEGTGEICQRRTSYLPSEIMLHHCFASLLTRGSKGEYQIKMENFDKTVPEFPTPLVSKSPNRTDLDIHINGQSIDNFQISETGLTE

SEQ ID NO: 126799 - DNA, 1083 bp, Artificial Sequence
  derived and/or modified sequence
atggatagctcaaactgtaaggtaatcgcgcctttgttgagccagagataccggcgaatggtaacaaaggatggccactccactcttcagatggacggcgcccagcgtggactggcctacctgcgggacgcatggggaatcctgatggatatgagatggaggtggatgatgctcgtattctctgcctcattcgtggttcattggctggttttcgctgtgctgtggtacgtcttagccgaaatgaacggtgatctggagctggaccacgacgccccgcccgagaaccacaccatctgcgtaaaatacatcactagtttcactgccgccttcagtttcagcctggaaacgcagttgaccataggatacgggacaatgttcccgagtggggattgcccttctgctatcgccctgttagccatccagatgctgctgggcctcatgttagaggcttttattacaggcgcatttgtcgctaagatcgccagacccaagaacagagcgtttagcattaggttcacagacactgcagtcgtcgctcacatggacgggaaaccaaatctgattttccaagtagctaatacacgtccatctccattgacctcagttagagtaagcgcggtgctttatcaagagagagagaacggtaaactctaccaaacttctgtggattttcaccttgatggcatctctagcgacgagtgtccattcttcatctttcctctgacctattaccactctataacaccaagctccccattggctaccctcctgcaacacgaaaacccgtcccactttgagctggtggtttttctgagcgctatgcaagaaggaactggcgagatttgccaacgcaggaccagctatttgccgagcgagatcatgctacatcactgctttgcatcgttgttgactcgcggttctaagggcgagtaccagatcaaaatggaaaactttgataaaaccgtgcctgagttccccacaccactcgttagtaaatccccaaatcgaactgatttggatatccacatcaatggtcagtctattgataactttcagatctcggagacagggttgaccgagtag

SEQ ID NO: 126800 - DNA, 1083 bp, Artificial Sequence
  derived and/or modified sequence
atggattctagtaattgcaaagttattgccccacttcttagtcagcggtatcggaggatggtgacaaaggatggtcactcaacgctgcagatggacggggcccaacgcggtcttgcgtatttgcgcgacgcctggggtatcttgatggacatgcgatggagatggatgatgctggtgttcagcgcttcatttgtcgtgcattggctggtgtttgcagtcttgtggtatgtgctggccgagatgaatggtgatctggaactggaccatgacgctccacctgagaaccatacaatctgtgtcaaatacattacttccttcaccgctgccttttccttttccctcgaaactcaactcacaatagggtacggtacaatgttcccaagtggggactgccccagcgcaatcgctttactcgccatccagatgctgcttggtctgatgttagaggcttttattacgggagccttcgtcgcgaaaatagctagacctaagaaccgggcattttccatccgattcaccgatacagccgtcgttgcacatatggacggcaagcctaacctcatcttccaggtcgcaaatacacgaccctcaccactgacatccgtgagggttagcgccgtgttataccaggagcgcgagaacgggaagctgtaccagacttccgtggattttcatctagatggaatttccagtgatgagtgccctttctttatttttcccttaacctattaccactcaataaccccatctagcccgctggctacgcttttgcagcatgagaatccctcccacttcgagctcgttgtattcctgtcagcgatgcaggaaggtactggagagatctgccaaaggagaacatcatacctgcctagcgagattatgcttcaccattgcttcgcctctcttctgaccaggggttctaagggcgagtaccagatcaaaatggagaattttgacaagactgttccggaatttccaacaccactggtgtcaaaatcccctaacagaacagatttagacatccatattaacggccagtctatcgataatttccagatatccgaaacagggcttacagagtag

SEQ ID NO: 126801 - DNA, 1083 bp, Artificial Sequence
  derived and/or modified sequence
atggacagcagcaactgcaaggtgattgcccccctgctgagccagcgctacagaaggatggtgaccaaggatggccacagcaccctgcagatggatggagcccagaggggcctggcctacctgagagatgcctggggcatcctgatggacatgcgctggcgctggatgatgctggtgttttctgccagctttgtggtgcactggctggtgtttgctgtgctgtggtacgtgctggccgagatgaatggagacctggagctggaccatgatgcccctcctgagaaccacaccatctgtgtgaagtacatcaccagcttcaccgctgccttctccttcagcctggagacccagctgaccatcggctacggcaccatgttccccagcggggactgccccagcgccatcgccctgctggccatccagatgctgctgggcctgatgctggaggccttcatcactggagcctttgtggccaagatcgcccggcccaagaacagagccttcagcatccgcttcacagacacagctgtggtggcccacatggatggcaagcccaacctgatcttccaggtggccaacacccggcccagccccctgacctctgtgcgggtgtctgctgtgctgtaccaggagagagaaaatggcaagctgtaccagacctctgtggacttccacctggatggcatcagcagtgatgaatgtcccttcttcatcttccccctgacctactaccacagcatcacccccagcagccccctggccaccctgctgcagcacgagaaccccagccactttgagctggtggtgttcctgagcgccatgcaggagggcaccggggagatctgccagaggaggaccagctacctgcccagcgagatcatgctgcaccactgctttgccagcctgctgacccggggcagcaagggggagtaccagatcaagatggagaactttgacaagacagtgcctgagttccccacccccctggtgtccaagagccccaacagaacagacctggacatccacatcaatggccagagcattgacaacttccagatcagcgagaccggcctgacagaatag

SEQ ID NO: 126802 - DNA, 1083 bp, Artificial Sequence
  derived and/or modified sequence
atggacagcagcaactgcaaggtgatcgcccccctgctgagccagaggtaccgccgaatggtgactaaagacgggcatagtacgctgcagatggacggcgcccagagggggcttgcttatttgagggacgcttggggtatccttatggatatgcgctggagatggatgatgcttgtctttagcgcttctttcgtggtccactggttggtgttcgctgtgctctggtacgtcctggccgaaatgaatggagatctcgagctggaccacgacgccccgcctgaaaaccatacgatttgcgtcaagtacatcactagtttcaccgcggctttctcattcagcctcgaaactcagttgaccattgggtacggaaccatgttcccatcgggcgattgtccctctgcaattgcactgctagctatccagatgctgctgggactgatgctcgaagctttcatcactggtgctttcgtggctaagattgcacgtcctaagaaccgcgcattcagcataaggttcacagacaccgccgttgtcgcacatatggacgggaagccaaatctgatattccaggtggcaaacacccgcccctcccctctgacatctgttcgggttagcgccgtgttgtaccaggagcgtgagaacgggaaactctaccaaacctccgttgatttccatctggatggcatcagcagcgacgaatgccctttttttattttcccactgacatactaccacagtatcacgcctagctctccgttggccaccctccttcagcatgagaatcctagccactttgagctggtggtttttctatccgctatgcaggagggaacgggcgagatttgccagaggcgcacctcctacttgccgtccgagatcatgctgcaccactgctttgcttcactgctcaccaggggctcaaaaggggaataccaaattaaaatggaaaatttcgacaagaccgtcccggaattcccaacacccctcgtttctaagtctccaaatcgcaccgacttagacattcacattaacggacagtcaatcgataacttccaaatatctgaaaccggcctaactgagtag

SEQ ID NO: 126803 - DNA, 1083 bp, Artificial Sequence
  derived and/or modified sequence
atggacagcagcaactgcaaggtgatcgcccccctgctgagccagcgctataggagaatggtgaccaaagatgggcattcaacactccagatggacggggctcaaaggggactggcctacctgcgggatgcctgggggatcctgatggatatgcggtggagatggatgatgctcgtgttcagcgccagctttgtcgtccactggctcgtcttcgcggtgttatggtacgtgttagccgagatgaacggcgacttagagctagaccacgacgcccctcccgaaaatcacaccatatgtgtcaagtacatcacatccttcacggccgcgttcagtttctccttggaaacccaattaacgatcggatatggcacaatgtttcctagcggagattgcccgagcgccatagccctgttagcaattcagatgctgctcggactgatgctggaagcatttattactggggctttcgtcgctaaaattgctcggcccaagaatagggccttcagcatcagattcacggataccgccgtcgtggctcacatggacggcaaacctaatctgatttttcaagtcgcaaatacacgcccaagccctctgacatccgttagagtttccgccgtgctataccaagagagagagaacgggaagttataccagacgtcagtcgactttcatctagatggaatttcatctgacgagtgtccctttttcatcttcccgcttacatactatcactccattacaccttccagccctctggctacgctcttacaacacgaaaatcctagccattttgaactggtggtgtttctaagcgccatgcaagaggggacaggcgagatctgtcagcggcggacctcatacctaccctccgagatcatgttacaccactgcttcgcatctctgcttacaagaggctccaaaggggaataccaaattaagatggagaatttcgacaagacagttcctgagttcccgactccacttgtgtccaagtcacccaatcgaaccgacttggatattcatatcaatggtcagtccatagacaatttccaaatttccgagacggggctgactgagtag

SEQ ID NO: 126804 - DNA, 1083 bp, Artificial Sequence
  derived and/or modified sequence
atggacagctccaattgcaaggtgatagcacccctgctatcccagaggtacagacgcatggttactaaggatgggcactctaccctgcaaatggatggggctcagcggggtttggcctacctgcgcgatgcctgggggatcctgatggatatgcgatggaggtggatgatgctggtgttctccgcctctttcgtcgtgcattggctggtttttgccgtactgtggtacgtactggccgagatgaatggagacctcgaactcgatcacgacgctcctcctgagaatcatactatctgcgtgaagtacatcacctcttttacagcagcctttagtttctctctggaaacacagctgacaattggctatgggaccatgtttccatctggagactgtccatccgcgattgcccttctggctatccagatgctgctcggcttaatgctggaggcttttatcacgggcgcttttgtcgccaagatcgccaggccaaagaacagggccttctcaatcagattcacggatactgccgtggtggcgcacatggacggaaaaccgaacctaatttttcaggtagctaacacacggccatccccacttaccagcgtccgcgtctctgcagtgctgtaccaggagcgagaaaatggaaaactataccagaccagcgtggactttcatctcgacggcattagttctgacgagtgtcccttctttatttttccgttgacatactatcattcaataactccgtcatccccattggcaacgctcctgcaacacgagaatccctcgcattttgagctcgttgtgtttttgtctgccatgcaggaagggactggtgagatttgtcagcgccgtaccagttacctgccgtccgaaatcatgctgcatcattgctttgcaagtttgttgactaggggtagcaagggcgagtatcagattaaaatggagaacttcgacaagacagtgcccgaatttcccacaccactggtgtccaaatctccaaatcgcacagatctcgatattcacatcaacggccagtctatcgataacttccagatctccgagaccggcctaacggagtag

SEQ ID NO: 126805 - DNA, 2950 bp, Artificial Sequence
  derived and/or modified sequence
accagtccaagaagagaacctacaaactagacttgtagattaaaattatctgatcaaaaaggcagactctgtaaatttccttaagacctaccttggcataaaggctgacccagcaaaagaactgagaaatacagcctgagatggacagcagtaattgcaaagttattgctcctctcctaagtcaaagataccggaggatggtcaccaaggatggccacagcacacttcaaatggatggcgctcaaagaggtcttgcatatcttcgagatgcttggggaatcctaatggacatgcgctggcgttggatgatgttggtcttttctgcttcttttgttgtccactggcttgtctttgcagtgctctggtatgttctggctgagatgaatggtgatctggaactagatcatgatgccccacctgaaaaccacactatctgtgtcaagtatatcaccagtttcacagctgcattctccttctccctggagacacaactcacaattggttatggtaccatgttccccagtggtgactgtccaagtgcaatcgccttacttgccatacaaatgctcctaggcctcatgctagaggcttttatcacaggtgcttttgtggcgaagattgcccggccaaaaaatcgagctttttcaattcgctttactgacacagcagtagtagctcacatggatggcaaacctaatcttatcttccaagtggccaacacccgacctagccctctaaccagtgtccgggtctcagctgtactctatcaggaaagagaaaatggcaaactctaccagaccagtgtggatttccaccttgatggcatcagttctgacgaatgtccattcttcatctttccactaacgtactatcactccattacaccatcaagtcctctggctactctgctccagcatgaaaatccttctcactttgaattagttgtattcctttcagcaatgcaggagggcactggagaaatatgccaaaggaggacatcctacctaccgtctgaaatcatgttacatcactgttttgcatctctgttgacccgaggttccaaaggtgaatatcaaatcaagatggagaattttgacaagactgtccctgaatttccaactcctctggtttctaaaagcccaaacaggactgacctggatatccacatcaatggacaaagcattgacaattttcagatctctgaaacaggactgacagaataagacttatccattttttaatgtattaaatacacccagccagttatgcagctactttttctttactgtatctcatgttttcttttttcaatgctaattatagctctctacatcacggtaatcatgcctatgcctacataagaatggctgagctaacaatacacattctggaaacataacactctacattacaaagtttgttacctgctgaaatcaatgtaactcaacttgacagacacttatacagaaatgttgctggtgaatttataagaatgtggtatgatactagtaatgaaggcaaaatggacagtgaagtttaacacaactgaactctaagaaaatcaaccattaatctctcattttcatctgcaaattgaagcaacagtttagtttcaaacctagctccctgggtggaatgacgacttcactatacttagtgaatatcctttaagagctgggatttttttcaagacaacaaagatcattcatttggttctttatactatgaaacttgagtaagtattacctccttaatttttaacaactaagaacaaaaattaacgagaaaaacaacaaagtacagatttatacataaacctaaaagcatttgaacatgacacccgaacacatacatatatgttcacttatttgtggcagaaggtgatcagataagctccagcccaaatggaacctgtggggtggtattttgcattgcaaggagacgcaaaattttattttaaaactgtcctccataataatcaaacggtgattcatctaaatgacttctagcaacctaagtaaaaacattcccctcctatgtatgattcatttgatcatataaaacatcatgatggctctaattcataaatacaaaaatatatttaagtctttatagatataaagctttacttagatataacttgagtgagtagggaaaaaaatctacagtagataaagcaaaagataattaggcaacaaagcattttcaaactcaaattcctgtttccaacttcaaatagttttttctataaacacaaaatcagtgtttattcaccagtaggaggttggactagatgaactctattatttctttctaaatctaatagtctataaaaattatgtttcctctgttttttattttatctatgctaaaatgagccctttcccttatgtccagtttaagatgatcatttgcatgattttcatttcaataaaaaaaagagaaactgtccttaaaacaaaacaaaaaccaaaaaagtcaccctatcaggtttcaaacagatttgtggctgttcttttctgaaatttcccttattcaggtttctgtgggaaaaatgaaagattaaccttccccactggtgatgacctaggcaggaatcatctcttgaaataaatactagctgagtaaaggcaagcaggtgtgaagagcagggctcagcagcaagtcacatttttctactatttgaccaaaaggaaaagaaaataaagaagaactctggagtggtctaagactgataatagcagaagaatatcaagaacacagaaacttaattattgtgaacttttgctgtttgaaaatcttagacattcattcttaagtagaaatcagaccaacagattttcccaacccaagactattgtaacacataaagacagcaagaattcttatttctataataaattaacaagattcacctaacctttgaaaataaagtagtattgaagactta

SEQ ID NO: 126806 - DNA, 1177 bp, Artificial Sequence
  derived and/or modified sequence
agcttactaatttactcttgattttagagaaatacagcctgagatggacagcagtaattgcaaagttattgctcctctcctaagtcaaagataccggaggatggtcaccaaggatggccacagcacacttcaaatggatggcgctcaaagaggtcttgcatatcttcgagatgcttggggaatcctaatggacatgcgctggcgttggatgatgttggtcttttctgcttcttttgttgtccactggcttgtctttgcagtgctctggtatgttctggctgagatgaatggtgatctggaactagatcatgatgccccacctgaaaaccacactatctgtgtcaagtatatcaccagtttcacagctgcattctccttctccctggagacacaactcacaattggttatggtaccatgttccccagtggtgactgtccaagtgcaatcgccttacttgccatacaaatgctcctaggcctcatgctagaggcttttatcacaggtgcttttgtggcgaagattgcccggccaaaaaatcgagctttttcaattcgctttactgacacagcagtagtagctcacatggatggcaaacctaatcttatcttccaagtggccaacacccgacctagccctctaaccagtgtccgggtctcagctgtactctatcaggaaagagaaaatggcaaactctaccagaccagtgtggatttccaccttgatggcatcagttctgacgaatgtccattcttcatctttccactaacgtactatcactccattacaccatcaagtcctctggctactctgctccagcatgaaaatccttctcactttgaattagttgtattcctttcagcaatgcaggagggcactggagaaatatgccaaaggaggacatcctacctaccgtctgaaatcatgttacatcactgttttgcatctctgttgacccgaggttccaaaggtgaatatcaaatcaagatggagaattttgacaagactgtccctgaatttccaactcctctggtttctaaaagcccaaacaggactgacctggatatccacatcaatggacaaagcattgacaattttcagatctctgaaacaggactgacagaataagacttatccattttttaatgtattaaatacacccagccagttatgcagcta

SEQ ID NO: 126807 - DNA, 1083 bp, Artificial Sequence
  derived and/or modified sequence
atggacagctccaattgcaaagtgatcgccccactgctgtcccagcgctatcgccgaatggttacaaaagacgggcatagtactttacaaatggacggggcacagaggggcttggcttaccttcgcgacgcttggggcattctgatggatatgcggtggagatggatgatgctagttttctcagctagttttgtcgtgcactggttagtgtttgctgttctttggtacgtcctggctgagatgaacggagatctcgaattggatcatgacgccccacccgaaaatcacaccatttgcgtcaagtacatcacctcctttaccgccgcattctcttttagtcttgagacccaactcacaatcggctacgggaccatgtttccctctggagactgtccgtcagccatagccctgctcgctatccagatgctgctgggtctgatgctcgaggcatttatcacaggagcctttgttgcaaaaattgcacgcccaaagaatcgcgcattttctattagatttaccgatactgccgtcgtagctcacatggacgggaaacccaacctgatcttccaagtggccaataccagaccttctccattgacctctgtgagggtgtcggcagtgctctatcaggagcgggaaaatggaaagctgtaccaaacaagcgtggacttccacctggacggcatctcctccgatgaatgcccctttttcatatttccactcacatactaccacagcatcactccctcctcaccactggctacccttcttcagcacgagaaccctagccacttcgagcttgtcgtgtttttatcggcaatgcaggaggggactggagagatctgccagcggcgaacgtcttatctcccctctgaaattatgctgcatcactgttttgcctctctgctcacccgcggatctaaaggcgagtaccagatcaagatggagaattttgataagaccgtacccgaattccctactcctctcgttagcaagtcaccaaatagaacagacctcgatatccatatcaacggtcagtcaatcgacaactttcagatatcagagactggactcactgaatag

SEQ ID NO: 126808 - DNA, 1083 bp, Artificial Sequence
  derived and/or modified sequence
atggacagcagcaactgcaaggtgatcgcccccctgctgagccagagatacagaagaatggtgaccaaggacggccacagcaccctgcagatggacggcgcccagagaggcctggcctacctgagagacgcctggggcatcctgatggacatgagatggagatggatgatgctggtgttcagcgccagcttcgtggtgcactggctggtgttcgccgtgctgtggtacgtgctggccgagatgaacggcgacctggagctggaccacgacgccccccccgagaaccacaccatctgcgtgaagtacatcaccagcttcaccgccgccttcagcttcagcctggagacccagctgaccatcggctacggcaccatgttccccagcggcgactgccccagcgccatcgccctgctggccatccagatgctgctgggcctgatgctggaggccttcatcaccggcgccttcgtggccaagatcgccagacccaagaacagagccttcagcatcagattcaccgacaccgccgtggtggcccacatggacggcaagcccaacctgatcttccaggtggccaacaccagacccagccccctgaccagcgtgagagtgagcgccgtgctgtaccaggagagagagaacggcaagctgtaccagaccagcgtggacttccacctggacggcatcagcagcgacgagtgccccttcttcatcttccccctgacctactaccacagcatcacccccagcagccccctggccaccctgctgcagcacgagaaccccagccacttcgagctggtggtgttcctgagcgccatgcaggagggcaccggcgagatctgccagagaagaaccagctacctgcccagcgagatcatgctgcaccactgcttcgccagcctgctgaccagaggcagcaagggcgagtaccagatcaagatggagaacttcgacaagaccgtgcccgagttccccacccccctggtgagcaagagccccaacagaaccgacctggacatccacatcaacggccagagcatcgacaacttccagatcagcgagaccggcctgaccgagtag

SEQ ID NO: 126809 - protein, 220 aa, Artificial Sequence
  derived and/or modified sequence
MKGYGHTVPLSDGGKAFCIIYSVIGIPFTLLFLTAVVQRITVHVTRRPVLYFHIRWGFSKQVVAIVHAVLLGFVTVSCFFFIPAAVFSVLEDDWNFLESFYFCFISLSTIGLGDYVPGEGYNQKFRELYKIGITCYLLLGLIAMLVVLETFCELHELKKFRKMFYVKKDKDEDQVHIIEHDQLSFSSITDQAAGMKEDQKQNEPFVATQSSACVDGPANH

SEQ ID NO: 126810 - protein, 336 aa, Artificial Sequence
  derived and/or modified sequence
MLQSLAGSSCVRLVERHRSAWCFGFLVLGYLLYLVFGAVVFSSVELPYEDLLRQELRKLKRRFLEEHECLSEQQLEQFLGRVLEASNYGVSVLSNASGNWNWDFTSALFFASTVLSTTGYGHTVPLSDGGKAFCIIYSVIGIPFTLLFLTAVVQRITVHVTRRPVLYFHIRWGFSKQVVAIVHAVLLGFVTVSCFFFIPAAVFSVLEDDWNFLESFYFCFISLSTIGLGDYVPGEGYNQKFRELYKIGITCYLLLGLIAMLVVLETFCELHELKKFRKMFYVKKDKDEDQVHIIEHDQLSFSSITDQAAGMKEDQKQNEPFVATQSSACVDGPANH

SEQ ID NO: 126811 - protein, 242 aa, Artificial Sequence
  derived and/or modified sequence
VLRVLSPDLVRRLLNLAVRAFQVPKGESLNFPESTPGYGHTVPLSDGGKAFCIIYSVIGIPFTLLFLTAVVQRITVHVTRRPVLYFHIRWGFSKQVVAIVHAVLLGFVTVSCFFFIPAAVFSVLEDDWNFLESFYFCFISLSTIGLGDYVPGEGYNQKFRELYKIGITCYLLLGLIAMLVVLETFCELHELKKFRKMFYVKKDKDEDQVHIIEHDQLSFSSITDQAAGMKEDQKQNEPFVAT

SEQ ID NO: 126812 - DNA, 1011 bp, Artificial Sequence
  derived and/or modified sequence
atgctccaatcactggctggctcctcttgcgtcaggctggttgagcggcatagaagcgcgtggtgttttggtttcttggtgcttgggtacctgctatacctcgtgttcggcgcagtggtgttctccagtgtggaactcccctatgaagacctgttgcgtcaagagttacgcaaacttaagaggcggtttctcgaagagcacgagtgtctttccgaacagcagctcgagcagtttctggggagggtgcttgaagcatctaactacggagtctccgtcctgagcaatgcctccggaaactggaattgggatttcacatctgccttgttcttcgccagcaccgtgctgtcaactaccggatatggacatacagtccccctaagcgatgggggtaaggctttttgcattatttactcggtgatcggcatcccgttcaccctgctgttcttgacagccgtcgttcaaaggataaccgtgcacgtcactaggagacccgtcttgtacttccacatcaggtggggatttagcaagcaggtagtcgcgatcgttcacgctgtactcttgggctttgtcactgtgagctgcttttttttcatccccgccgccgtgttcagtgtcttggaagatgattggaactttctggaaagcttttatttctgcttcatcagcctttcaaccatcggtttgggtgattatgtacccggcgaggggtacaatcagaaattccgcgaactatacaagatagggataacctgctaccttctgctcggcctgatagctatgctcgtagtattggagacgttctgcgagctgcacgaattgaaaaaattcagaaagatgttttatgtcaagaaggacaaggacgaggaccaggtgcatataattgaacatgaccaactcagcttctctagcataacagaccaagcggctggaatgaaggaagaccagaagcagaatgagccgttcgtggccacccagtctagtgcctgcgtggacggtccagcaaaccactag

SEQ ID NO: 126813 - DNA, 729 bp, Artificial Sequence
  derived and/or modified sequence
gtgctgagagtgttaagtcctgacctggtgagacgccttctcaaccttgcggtcagagccttccaagtccccaagggcgagagtcttaattttcctgaaagcactccaggctacggccacactgtgcctttgagtgacggaggaaaggctttttgtatcatctactccgtgattggaattccttttacactgttatttctcacagctgtcgtccaaagaatcaccgtccatgtcaccagaaggcctgtgttatactttcatatcagatggggcttcagtaagcaggttgtggcaatcgtccacgcagtcctgctaggatttgtgaccgtttcatgtttcttttttattccagccgcagtattctccgtgctcgaagatgactggaacttcctggagtccttctacttctgcttcattagtctttctacaatcgggctgggcgactatgttcctggtgaagggtataaccagaaatttagggaattgtataaaattgggattacttgttacctgcttctaggattgatagccatgctggtggttctcgagacgttctgcgagctgcacgaactgaaaaagtttcggaagatgttctacgtcaaaaaagacaaagacgaggatcaagtgcacataatcgagcacgatcagctgtctttctcgtcaatcacggaccaagccgccggaatgaaggaggaccagaagcagaatgagccttttgttgcaacgtag

SEQ ID NO: 126814 - DNA, 1011 bp, Artificial Sequence
  derived and/or modified sequence
atgctgcagagcctggccggcagcagctgtgtgcggctggtggagcggcacaggtctgcctggtgcttcggcttcctggtgctgggctacctgctgtacctggtgtttggagctgtggtgttcagctctgtggagctgccctatgaggacctgctgcggcaggagctgaggaagctgaagaggcgcttcctggaggagcacgagtgcctgtctgagcagcagctggagcagttcctgggccgggtgctggaggccagcaactacggcgtgtctgtgctgagcaatgccagcggcaactggaactgggacttcaccagcgccctcttctttgccagcacagtgctgagcaccaccggctacggccacacagtgcccctgagtgatggcggcaaggccttctgcatcatctacagcgtcatcggcatccccttcaccctgctcttcctgacagctgtggtgcagaggatcaccgtgcacgtgacccggcggcctgtgctgtacttccacatccgctggggcttcagcaagcaggtggtggccatcgtgcatgctgtgctgctgggctttgtgacagtgtcctgcttcttcttcatcccagctgctgtgttttctgtgctggaggatgactggaacttcctggagagcttctacttctgcttcatcagcctgagcaccatcggcctgggggactatgtgcctggagagggctacaaccagaagttccgggagctgtacaagattggcatcacctgctacctgctgctgggcctcatcgccatgctggtggtgctggagaccttctgtgagctgcacgagctgaagaagttcaggaagatgttttatgtgaagaaggacaaggatgaggaccaggtgcacatcatcgagcatgaccagctgtccttcagcagcatcacagaccaggccgccggcatgaaggaggaccagaagcagaatgagccctttgtggccacccagagcagcgcctgtgtggatggccctgccaaccactag

SEQ ID NO: 126815 - DNA, 729 bp, Artificial Sequence
  derived and/or modified sequence
gtgctgcgggtgctgagcccagacctggtgcggcggctgctgaacctggccgtgcgggccttccaggtgcccaagggggagagcctgaacttccctgagagcaccccaggctacggccacacagtgcccctgagtgatggcggcaaggccttctgcatcatctacagcgtcatcggcatccccttcaccctgctcttcctgacagctgtggtgcagaggatcaccgtgcacgtgacccggcggcctgtgctgtacttccacatccgctggggcttcagcaagcaggtggtggccatcgtgcatgctgtgctgctgggctttgtgacagtgtcctgcttcttcttcatcccagctgctgtgttttctgtgctggaggatgactggaacttcctggagagcttctacttctgcttcatcagcctgagcaccatcggcctgggggactatgtgcctggagagggctacaaccagaagttccgggagctgtacaagattggcatcacctgctacctgctgctgggcctcatcgccatgctggtggtgctggagaccttctgtgagctgcacgagctgaagaagttcaggaagatgttttatgtgaagaaggacaaggatgaggaccaggtgcacatcatcgagcatgaccagctgtccttcagcagcatcacagaccaggccgccggcatgaaggaggaccagaagcagaatgagccctttgtggccacctag

SEQ ID NO: 126816 - DNA, 1011 bp, Artificial Sequence
  derived and/or modified sequence
atgctgcagagcctggccggcagcagctgcgtgcggctggtggagcggcacaggagtgcatggtgttttggcttcctggttctgggctacttactgtatctagtttttggcgcagtggtatttagctcagtggaactcccctacgaagacctgttacgacaagaactgagaaagctgaagaggagatttctggaggagcacgaatgcctcagcgaacagcagctcgaacaatttcttggccgcgtgttggaagccagcaactatggcgtatccgttctgtcaaatgcgtctgggaattggaattgggatttcaccagtgcactgttcttcgcatcaacagtactgagtacaacaggctacggccacaccgttcctctgtctgacggcggaaaggctttctgtatcatttattccgttattggtattccctttaccctgctatttctcaccgccgtcgtgcagcgcattactgtgcatgtcacccgccgtccagtgctctatttccatatcaggtgggggttcagtaagcaagtggtcgccatcgtccatgcagtgctgctggggtttgtcaccgtgtcctgttttttctttatacccgccgcagtcttttcagtgctggaagacgattggaattttttggagagtttttatttttgtttcatctcacttagcactataggcttaggcgactacgtaccgggtgagggctataaccaaaagttccgcgaactgtataaaatagggatcacttgctatttgttgctcggactgattgctatgctcgtggtgctggaaaccttttgtgagctgcacgaactgaaaaagttccggaagatgttctacgtgaaaaaggacaaggatgaggatcaagtgcacattattgagcatgaccaactgagcttttcctccatcactgaccaggctgccggcatgaaagaggatcaaaagcagaacgaacccttcgtcgctacacagagtagcgcctgtgtagacggcccggcaaaccattag

SEQ ID NO: 126817 - DNA, 729 bp, Artificial Sequence
  derived and/or modified sequence
gtgctgcgggtgctgagccccgacctggtgcggcggctgctgaaccttgcagtcagggcctttcaggttcccaagggggagagcttgaattttcccgaaagtactcccggctatggacacaccgtgcccctgagcgacggagggaaggccttttgcattatatattccgtaattgggatccctttcacacttttgttccttaccgcagtcgtccagcggatcacagtccatgtgaccaggaggccggtgctctactttcacatcagatggggcttcagtaaacaagtggtggccatcgtgcatgccgtgctgttgggtttcgtcaccgtgagctgctttttctttattcctgcagcagtgtttagtgtgcttgaagacgattggaactttctggagtctttctacttttgctttattagtctttccaccattggtctcggtgattacgtccccggagagggatataatcagaagtttcgagaactttacaagatcgggataacttgttaccttttactcggactaatcgcaatgctggttgtgctcgagactttctgtgaactgcacgaattaaaaaaatttaggaaaatgttctacgtgaagaaagataaggacgaagaccaggtgcacattatcgagcacgatcaactgtccttttctagcattaccgaccaggctgcgggcatgaaagaagaccagaagcagaacgagccattcgtcgccacctag

SEQ ID NO: 126818 - DNA, 2161 bp, Artificial Sequence
  derived and/or modified sequence
gcaggaagacggcgctgcccggaggagcggggcgggcgggcgcgcgggggagcgggcggcgggcgggagccaggcccgggcgggggcgggggcggcggggccagaagaggcggcgggccgcgctccggccggtctgcggcgttggccttggcggcggcggtggagaagatgctgcagtccctggccggcagctcgtgcgtgcgcctggtggagcggcaccgctcggcctggtgcttcggcttcctggtgctgggctacttgctctacctggtcttcggcgcagtggtcttctcctcggtggagctgccctatgaggacctgctgcgccaggagctgcgcaagctgaagcgacgcttcttggaggagcacgagtgcctgtctgagcagcagctggagcagttcctgggccgggtgctggaggccagcaactacggcgtgtcggtgctcagcaacgcctcgggcaactggaactgggacttcacctccgcgctcttcttcgccagcaccgtgctctccaccacaggttatggccacaccgtgcccttgtcagatggaggtaaggccttctgcatcatctactccgtcattggcattcccttcaccctcctgttcctgacggctgtggtccagcgcatcaccgtgcacgtcacccgcaggccggtcctctacttccacatccgctggggcttctccaagcaggtggtggccatcgtccatgccgtgctccttgggtttgtcactgtgtcctgcttcttcttcatcccggccgctgtcttctcagtcctggaggatgactggaacttcctggaatccttttatttttgttttatttccctgagcaccattggcctgggggattatgtgcctggggaaggctacaatcaaaaattcagagagctctataagattgggatcacgtgttacctgctacttggccttattgccatgttggtagttctggaaaccttctgtgaactccatgagctgaaaaaattcagaaaaatgttctatgtgaagaaggacaaggacgaggatcaggtgcacatcatagagcatgaccaactgtccttctcctcgatcacagaccaggcagctggcatgaaagaggaccagaagcaaaatgagccttttgtggccacccagtcatctgcctgcgtggatggccctgcaaaccattgagcgtaggatttgttgcattatgctagagcaccagggtcagggtgcaaggaagaggcttaagtatgttcatttttatcagaatgcaaaagcgaaaattatgtcactttaagaaatagctactgtttgcaatgtcttattaaaaaacaacaaaaaaagacaaatggaacaaagaagctgtgaccccagcaggatgtctaatatgtgaggaaatgagatgtccacctaaaattcatatgtgacaaaattatctcgaccttacataggaggagaatacttgaagcagtatgctgctgtggttagaagcagattttatacttttaactggaaactttggggtttgcatttagatcatttagctgatggctaaatagcaaaatttatatttagaagcaaaaaaaaaaagcatagagatgtgttttataaataggtttatgtgtactggtttgcatgtacccacccaaaatgattatttttgtagaatctaagttaaacttactatttataatgcataggtaaccattaactatgtacatataaagtataaatatgtttatattctgtacatatggtttaggtcaccagatcctagtgtagttctgaaactaagactatagatattttgtttcttttgatttctctttatactaaagaatccagagttgctacaataaaataaggggaataataaacttgagagtgaataaccatagtattctgctgcaataaatgtttctaccctcttgcgatagaatggtgtcagatgtctaacatgtttataaacatttttttgaattgaacaggttatgaaaaggatttattaaaaggttaagatactttgttttgaaagtacattgtgatttgcagccacctagcactaaagcatagaacttaaacacgaatccctaaatgaacagattatgttacattaatctgagaattttaaatttagaagctaaaataaataaaaatcacagctggttgt

SEQ ID NO: 126819 - DNA, 726 bp, Artificial Sequence
  derived and/or modified sequence
gtcctgagggttttatctcctgatttggttagaagattgttgaatctggctgtgagagcctttcaagtgcctaaaggagagagcttgaacttccctgagagtacaccaggttatggccacaccgtgcccttgtcagatggaggtaaggccttctgcatcatctactccgtcattggcattcccttcaccctcctgttcctgacggctgtggtccagcgcatcaccgtgcacgtcacccgcaggccggtcctctacttccacatccgctggggcttctccaagcaggtggtggccatcgtccatgccgtgctccttgggtttgtcactgtgtcctgcttcttcttcatcccggccgctgtcttctcagtcctggaggatgactggaacttcctggaatccttttatttttgttttatttccctgagcaccattggcctgggggattatgtgcctggggaaggctacaatcaaaaattcagagagctctataagattgggatcacgtgttacctgctacttggccttattgccatgttggtagttctggaaaccttctgtgaactccatgagctgaaaaaattcagaaaaatgttctatgtgaagaaggacaaggacgaggatcaggtgcacatcatagagcatgaccaactgtccttctcctcgatcacagaccaggcagctggcatgaaagaggaccagaagcaaaatgagccttttgtggccacc

SEQ ID NO: 126820 - DNA, 1011 bp, Artificial Sequence
  derived and/or modified sequence
atgctacagagcttggccggttcatcctgcgtgagattggtggaacgacatcggtctgcctggtgcttcggctttcttgtgctaggctacttactctacctggttttcggggcagtagtgtttagctctgtagaactgccatacgaggacctcctccgccaggagctccgcaagctgaaaagacggtttcttgaggaacacgaatgtctcagcgagcagcagttggagcagtttctgggtcgcgtgttggaagcttctaactacggagttagcgttctcagcaacgccagtggaaactggaactgggatttcacatccgctctattcttcgcctcaactgttctttccaccactggttacggccacaccgtgcccctcagtgatgggggaaaagctttttgcattatctattccgttataggaatccccttcacgctgctattcctgactgctgttgtgcagagaatcaccgtccatgttacgcgaagaccagtcttatacttccacattcgatggggttttagtaaacaggtggtggctatcgtccatgcggttcttctcggttttgtgactgtctcgtgttttttctttattcccgcagccgtttttagcgtcttggaggatgattggaacttcctggaatccttttacttctgcttcattagcctctcaaccatcggtctgggcgactacgtccctggggaaggatacaaccagaagtttcgtgagctgtacaaaattggaataacctgctacctccttctgggactcatagcgatgctggtcgtcctggaaacgttctgtgaactgcatgagctcaagaagtttcgtaaaatgttctatgtaaaaaaggacaaagatgaggaccaggtccatatcatcgaacatgaccagctcagcttctctagcattacagaccaagcggctgggatgaaggaggaccaaaaacagaacgagccgtttgttgcaacccagtcatccgcttgcgtggacggccctgccaatcactag

SEQ ID NO: 126821 - DNA, 729 bp, Artificial Sequence
  derived and/or modified sequence
gttctccgggtcctcagcccagacctcgtccgcagactcctaaatctggcagtccgcgcatttcaggtcccgaaaggcgagtcccttaatttcccagagagtactccaggatatggtcataccgtccccctttcggatggaggaaaggctttttgtattatctactcggtgattggaattccttttacattgttgttcctgacagccgtggttcagcggattacggttcatgtaacccgccgacccgtcctctattttcatataagatggggtttctctaaacaagtggtggccattgttcacgctgtgctcttgggctttgtaacggtgagttgttttttttttattccagctgccgtgttctcagtactggaggacgactggaatttcttagaaagtttctacttttgtttcatttccctgagtaccattgggctgggggattacgtccccggtgagggctataaccagaaatttagagaactttacaaaatcggaatcacttgctacctgcttcttggtctcatcgctatgctcgtcgtcttggaaactttctgcgagctacacgaactcaagaaatttagaaaaatgttttacgtaaaaaaggataaggatgaagatcaggtccatatcatcgaacacgatcagcttagtttttcctccattacagatcaggctgcaggcatgaaggaggatcagaagcagaatgagccattcgtggcgacttag

SEQ ID NO: 126822 - DNA, 1011 bp, Artificial Sequence
  derived and/or modified sequence
atgctgcagagcctggccggcagcagctgcgtgagactggtggagagacacagaagcgcctggtgcttcggcttcctggtgctgggctacctgctgtacctggtgttcggcgccgtggtgttcagcagcgtggagctgccctacgaggacctgctgagacaggagctgagaaagctgaagagaagattcctggaggagcacgagtgcctgagcgagcagcagctggagcagttcctgggcagagtgctggaggccagcaactacggcgtgagcgtgctgagcaacgccagcggcaactggaactgggacttcaccagcgccctgttcttcgccagcaccgtgctgagcaccaccggctacggccacaccgtgcccctgagcgacggcggcaaggccttctgcatcatctacagcgtgatcggcatccccttcaccctgctgttcctgaccgccgtggtgcagagaatcaccgtgcacgtgaccagaagacccgtgctgtacttccacatcagatggggcttcagcaagcaggtggtggccatcgtgcacgccgtgctgctgggcttcgtgaccgtgagctgcttcttcttcatccccgccgccgtgttcagcgtgctggaggacgactggaacttcctggagagcttctacttctgcttcatcagcctgagcaccatcggcctgggcgactacgtgcccggcgagggctacaaccagaagttcagagagctgtacaagatcggcatcacctgctacctgctgctgggcctgatcgccatgctggtggtgctggagaccttctgcgagctgcacgagctgaagaagttcagaaagatgttctacgtgaagaaggacaaggacgaggaccaggtgcacatcatcgagcacgaccagctgagcttcagcagcatcaccgaccaggccgccggcatgaaggaggaccagaagcagaacgagcccttcgtggccacccagagcagcgcctgcgtggacggccccgccaaccactag

SEQ ID NO: 126823 - DNA, 729 bp, Artificial Sequence
  derived and/or modified sequence
gtgctgagagtgctgagccccgacctggtgagaagactgctgaacctggccgtgagagccttccaggtgcccaagggcgagagcctgaacttccccgagagcacccccggctacggccacaccgtgcccctgagcgacggcggcaaggccttctgcatcatctacagcgtgatcggcatccccttcaccctgctgttcctgaccgccgtggtgcagagaatcaccgtgcacgtgaccagaagacccgtgctgtacttccacatcagatggggcttcagcaagcaggtggtggccatcgtgcacgccgtgctgctgggcttcgtgaccgtgagctgcttcttcttcatccccgccgccgtgttcagcgtgctggaggacgactggaacttcctggagagcttctacttctgcttcatcagcctgagcaccatcggcctgggcgactacgtgcccggcgagggctacaaccagaagttcagagagctgtacaagatcggcatcacctgctacctgctgctgggcctgatcgccatgctggtggtgctggagaccttctgcgagctgcacgagctgaagaagttcagaaagatgttctacgtgaagaaggacaaggacgaggaccaggtgcacatcatcgagcacgaccagctgagcttcagcagcatcaccgaccaggccgccggcatgaaggaggaccagaagcagaacgagcccttcgtggccacctag

SEQ ID NO: 126824 - protein, 394 aa, Artificial Sequence
  derived and/or modified sequence
MKRQNVRTLALIVCTFTYLLVGAAVFDALESEPELIERQRLELRQQELRARYNLSQGGYEELERVVLRLKPHKAGVQWRFAGSFYFAITVITTIGYGHAAPSTDGGKVFCMFYALLGIPLTLVMFQSLGERINTLVRYLLHRAKKGLGMRRADVSMANMVLIGFFSCISTLCIGAAAFSHYEHWTFFQAYYYCFITLTTIGFGDYVALQKDQALQTQPQYVAFSFVYILTGLTVIGAFLNLVVLRFMTMNAEDEKRDAEHRALLTRNGQAGGGGGGGSAHTTDTASSTAAAGGGGFRNVYAEVLHFQSMCSCLWYKSREKLQYSIPMIIPRDLSTSDTCVEQSHSSPGGGGRYSDTPSRRCLCSGAPRSAISSVSTGLHSLSTFRGLMKRRSSV

SEQ ID NO: 126825 - protein, 271 aa, Artificial Sequence
  derived and/or modified sequence
MFQSLGERINTLVRYLLHRAKKGLGMRRADVSMANMVLIGFFSCISTLCIGAAAFSHYEHWTFFQAYYYCFITLTTIGFGDYVALQKDQALQTQPQYVAFSFVYILTGLTVIGAFLNLVVLRFMTMNAEDEKRDAEHRALLTRNGQAGGGGGGGSAHTTDTASSTAAAGGGGFRNVYAEVLHFQSMCSCLWYKSREKLQYSIPMIIPRDLSTSDTCVEQSHSSPGGGGRYSDTPSRRCLCSGAPRSAISSVSTGLHSLSTFRGLMKRRSSV

SEQ ID NO: 126826 - DNA, 1185 bp, Artificial Sequence
  derived and/or modified sequence
atgaaaagacagaacgttaggaccctggctctcatcgtgtgcacctttacctatctgttggtcggggctgcagtgttcgatgctctggagtcagagcctgagctgatcgaaaggcagcggctggagctcaggcagcaagagttgagggctcggtataatctgagtcagggcgggtacgaagagttggagagagtggtcctccgattgaagccccataaagccggcgttcagtggcgattcgccgggtccttctacttcgccatcactgtcatcactactatcgggtatggacacgcagctccctcaaccgacggaggtaaggtgttttgcatgttttatgccttgctggggatccccctcacccttgtcatgttccagtcccttggtgagcgcatcaacaccctcgttaggtatctgcttcatagggctaagaagggtcttgggatgcgaagggcagatgttagtatggctaacatggttctgattggcttcttttcatgcattagtaccctgtgcatcggcgccgccgctttttcacactacgaacactggacattcttccaagcgtactactattgctttattactctgacgaccattggatttggtgattacgtggccttgcagaaggatcaggccctccagacacagcctcagtacgtggcgttttcatttgtctacattctgacaggccttaccgtcattggagcgttccttaacctagttgtgcttcgctttatgacaatgaacgcagaggatgagaaaagagacgccgagcatagagcgctcctgaccagaaatggccaggctggcggcggtggcggagggggcagtgcccatactacagacaccgccagcagtactgctgccgcaggtggcgggggattcagaaacgtctacgccgaggtattgcattttcagtcgatgtgttcctgcctgtggtataagtcaagggaaaagctacagtattccatcccaatgataatcccaagagacctttccacttctgatacttgcgtggagcagagccactctagcccaggcggcggaggccggtacagcgatacaccctccaggaggtgtctgtgctcgggcgccccaagaagcgcgattagttcggtgagtactggactccacagcctttcaacctttcggggactgatgaaacggaggtcttcagtctag

SEQ ID NO: 126827 - DNA, 1185 bp, Artificial Sequence
  derived and/or modified sequence
atgaagaggcagaatgtgaggaccctggccctgattgtgtgcaccttcacctacctgctggtgggcgctgctgtgtttgatgccctggagagcgagcctgagctgattgaaaggcagaggctggagctgcggcagcaggagctgcgggcccgctacaacctgagccagggcggctatgaggagctggagcgggtggtgctgcggctgaagccccacaaggccggcgtgcagtggaggtttgctggcagcttctactttgccatcaccgtcatcaccaccatcggctacggccatgctgcccccagcacagatggcggcaaggtgttctgcatgttttatgccctgctgggcatccccctgaccctggtgatgttccagagcctgggggagcgcatcaacaccctggtgcgctacctgctgcaccgggccaagaagggcctgggcatgagaagagcagatgtgtccatggccaacatggtgctgattggcttcttcagctgcatcagcaccctgtgcattggagctgctgccttcagccactatgagcactggaccttcttccaggcctactactactgcttcatcaccctgaccaccatcggctttggagactatgtggccctgcagaaggaccaggccctgcagacccagccccagtatgtggccttctcctttgtgtacatcctgaccggcctgactgtgattggagccttcctgaacctggtggtgctgcgcttcatgaccatgaatgcagaagatgagaagagagatgctgagcaccgggccctgctgaccagaaatggccaggccggcggcggcggcggcggcggcagcgcccacaccacagacacagccagcagcacagctgctgctgggggcggcggcttcagaaatgtgtatgcagaggtgctgcacttccagagcatgtgcagctgcctgtggtacaagagccgggagaagctgcagtacagcatccccatgatcatcccccgggacctgagcaccagtgacacctgtgtggagcagagccacagcagccctgggggcggcggccgctacagcgacacccccagccgccgctgcctgtgcagcggggcccccaggtctgccatcagctctgtgtccacaggcctgcacagcctgagcaccttccggggcctgatgaagaggaggagctctgtgtag

SEQ ID NO: 126828 - DNA, 1185 bp, Artificial Sequence
  derived and/or modified sequence
atgaagcggcagaacgtgcggaccctggccctgatcgtgtgcaccttcacctacctgctcgtcggtgccgccgtgtttgatgccctcgagtccgagccagagctgattgaaagacagcgactcgaactacgtcagcaggagctccgggcgcgatataacctgtctcagggcggctacgaagagctggagcgggttgttctgcggctcaaaccccacaaggccggagtacagtggaggttcgccgggagcttttactttgccatcacagtgattacaactataggctatggccatgcggccccctccaccgatggcggtaaggtcttttgtatgttctatgcgctactggggataccactgactttagtgatgttccagtctctcggcgaaagaattaacaccctagtgagatatctgttgcatcgtgccaagaagggcctcgggatgaggcgtgcagacgtgtctatggccaacatggtcctcatcggattctttagctgtattagcaccttatgcattggcgccgcagcgtttagccactacgaacattggacctttttccaagcatattactactgcttcattactttgactacaatcggattcggagattacgtggctctgcagaaggatcaggctcttcagacccagcctcagtatgtggcgttttcttttgtgtatattttaacgggccttacagtgattggtgcctttctcaatctggtcgtgctgaggttcatgactatgaatgcagaggatgagaagcgagacgccgaacatcgcgccttgctgacccgcaacggccaggcaggtggcggtggcggaggtggctcagctcacactacagatactgcttcttccacggccgctgctggcggcggcggtttcaggaatgtgtatgctgaggttctgcattttcagtctatgtgctcctgtttgtggtacaagtcccgcgaaaagttgcagtattccatccctatgattatcccacgcgatctatccacatctgacacatgtgtggaacagagccactcctcacctgggggaggcggtaggtattctgatacccccagtagacggtgcctatgctccggcgcacctagatccgccatcagtagtgtaagcacggggttgcattctttatccaccttccggggactgatgaagcgacgatcgtctgtgtag

SEQ ID NO: 126829 - DNA, 6162 bp, Artificial Sequence
  derived and/or modified sequence
tgcccggcgcggagagcggcgagcgcagccatgccccaggccgcctccggggcagcagcagcggcggccggggccgaggcgcgggccgggggcgccggggggccggcggcggcccgggcgggacgatgaagcggcagaacgtgcgcacgctggcgctcatcgtgtgcaccttcacctacctgctggtgggcgccgcggtcttcgacgcgctggagtcggagcccgagctgatcgagcggcagcggctggagctgcggcagcaggagctgcgggcgcgctacaacctcagccagggcggctacgaggagctggagcgcgtcgtgctgcgcctcaagccgcacaaggccggcgtgcagtggcgcttcgccggctccttctacttcgccatcaccgtcatcaccaccatcggctacgggcacgcggcacccagcacggatggcggcaaggtgttctgcatgttctacgcgctgctgggcatcccgctcacgctcgtcatgttccagagcctgggcgagcgcatcaacaccttggtgaggtacctgctgcaccgcgccaagaaggggctgggcatgcggcgcgccgacgtgtccatggccaacatggtgctcatcggcttcttctcgtgcatcagcacgctgtgcatcggcgccgccgccttctcccactacgagcactggaccttcttccaggcctactactactgcttcatcaccctcaccaccatcggcttcggcgactacgtggcgctgcagaaggaccaggccctgcagacgcagccgcagtacgtggccttcagcttcgtctacatccttacgggcctcacggtcatcggcgccttcctcaacctcgtggtgctgcgcttcatgaccatgaacgccgaggacgagaagcgcgacgccgagcaccgcgcgctgctcacgcgcaacgggcaggcgggcggcggcggagggggtggcagcgcgcacactacggacaccgcctcatccacggcggcagcgggcggcggcggcttccgcaacgtctacgcggaggtgctgcacttccagtccatgtgctcgtgcctgtggtacaagagccgcgagaagctgcagtactccatccccatgatcatcccgcgggacctctccacgtccgacacgtgcgtggagcagagccactcgtcgccgggagggggcggccgctacagcgacacgccctcgcgacgctgcctgtgcagcggggcgccacgctccgccatcagctcggtgtccacgggtctgcacagcctgtccaccttccgcggcctcatgaagcgcaggagctccgtgtgactgccccgaggggcctggagcacctgggggcgcgggcgggggacccctgctgggaggccaggagactgcccctgctgccttctgcccagtgggaccccgcacaacatccctcaccactctcccccagcacccccatctccgactgtgcctgcttgcaccagccggcaggaggccgggctctgaggacccctggggcccccatcggagccctgcaaattccgagaaatgtgaaacttggtggggtcagggaggaaaggcagaagctgggagcctcccttccctttgaaaatctaagaagctcccagtcctcagagaccctgctggtacccagacccccaccttcggaggggacttcatgttccgtgtacgtttgcatctctatttatacctctgtcctgctaggtctcccaccttcccttggttccaaaagccagggtgtctatgtccaagtcacccctactcagccccactccccttcctcatccccagctgtgtctcccaacctcccttcgtgttgttttgcatggctttgcagttatggagaaagtggaaacccagcagtccctaaagctggtccccagaaagcaggacagaaagaaggagggacaggcaggcagcaggaggggcgagctgggaggcaggaggcagcggcctgtcagtctgcagaatggtcgcactggaggttcaagctaactggcctccagccacattctcatagcaggtaggacttcagccttccagacactgcccttagaatctggaacagaagacttcagactcaccataattgctgataattacccactcttaaatttgtcgagtgatttttagcctctgaaaactctatgctggccactgattcctttgagtctcacaaaaccctacttaggtcatcagggcaggagttctcactcccattttacagatgagaatactgaggcctggacaggtgaagtgaccagagagcaaaaggcaaaggggtgggggctgggtgcagtggctcacacctgtattcccaacacttttggaggctgaggttggaggattgcttgagcccaggaatttgagaccagcctaggtgacatagtgagaccccatctctacaaaaaataaaaaattaaccaggtgtggtggcacgtgcctgggagtcccagcgacttgggaggctgaggtgggaggattgtttgagcctgggaggtcgaggctgtagtgagccctgattgcaccactgtactccagcctgggtgacagggcaagaccctgtctcaaaaaaaaaaaaaaaaatggcaaagggagacaagagcccagcctgcttgttgctagccaaagtgttctttccttccagcttggcctgctcttaaaagcaaagctcctgcagtgtacatcctggcattgtgtggctacctgggttttaaaccagaatcagaagtcccggatcagagggcactgctgaggttcagcctcttctcttcttggccaggaggcagcagctctgaatgggcccctgaggctgcacaggggcctttgtcactggggcgcatgcttacaaacagtgcagttcttgggaccgaggtaagcagggctgggtctcatggcagaaaggccaggatctggggctctaggaatttgggaattgggcagagtggccaagaaagctggcaggcatatcctatgggacatcacacctggcaccattgtcattgttggtgcctgtgtcccaagtagctagtgataagctgaggctgcagcaagaaacacccttcccaggtgggggagtttggaccagaggtgccctctgcccaccacacctgcaacccagaagcccagatggaacgcagctgacgaaggtgatgcttgaggctcacttttggggccccacagctggagccggtataatgactgggacaacatcaaggggtggatgaggggcctctcctcccgcaacactgccttcccatgctgttcccctgccagctccttaacactgccgaccaaggccagccctggcattcagggaaattggagggcagcacccgtagggtggccagcctcaggccccaccccagctgtgtcctctagtctctggggacccctggggggaagaagtctaccctgcttgtgagtcccgtctcagtgtggaggaactggctgcacgtgggacctgaaggtgccctctgtgtttatgttgggggtgggggggcagtgctggctgcctctgtcctgtgtgtgaccctgccctcgaagggtcctgtcctgtcagtcccgagggagccacaaccaaagctgcggagagaaggtggggaagggtgcagaatggccgtggggcacagcgtggcagactgttcagtctctgctgggtctttcctagggacctggaaggccagtgttgcttccccctcactccctttcactgcaggcagcctctctgcttccccaatgccttatgcctgggcacactgccacagaatatgcaatatgtgtgggtgaccatgccctcacgaccacacccccaccccgggcagcccccggactccaaaggtcgtggctgccacagcctccctcagctcttcctgcctatctgtcttcacactgagaatggcgcccaataaatgctatccacggagaccaggctcaggctccagctgcctctgtcatcgtatgcccttgctgctgccagggaggggccatctcccaccccctcccctgccggggtctacaaacatatctagctgctgggtgccgtggctcacacctatagtcacagcactaggcgggcagatcacctgaggtcagaagttcaagaccagcctggccaacatggtaaaaccccgtctctactaaaaatacaaaaattagctgagcgtggtggcgcatgtctgtagtcccagctactcggctactcaggaggctgacgcacgagaatcgcttgaacccgggaggcggaggttgcagtgagctgagatcgtgccactgcactccagcctgagcgacagagtgagaccctgtctaaaaaaaaacaataataataaaataaaataacatacctagctgactcgccatgggctcgctggcctgtgggcgacactggcttcccttttgggatttcccagaagatccagattttcttaagtccccttggaacagactaagaaaggatcaccttagaaatcacctggtcctattgtcccccccgtacatgagtaactgaggcccacagagagcaaatcgcctgcctgagtcacacagcagtgagtggcagacctaggctaggaactaggactggggattgctattccagtgctccccatcctcacacagactgcacagtccgcctggacacaccccagctgacagtggtacctcccagtcagccaggagaatggattccttctcctgcagtaggggccccctggctgagtggcctgattgactaaaacatatgtctttgaaggagagtgcatcacaagcacctttctttggggtagatttttctctgggtctagagggacagctcaggcttgggactgggcctcagaacctacgacagaccgtgagagcagacccaccttatccatctggtgccagctccccaggtcagctacagcgacccccggacttcatagagtacaatccacagtaatagcacacagctctgtacctatctagctccatgcctatctatctgcctacctttcacaaaataattcttagcaaccctgctacagccaatgattctaatacgttctgttctattgcatgttataaaatgctggtcacgatccactaaattgatgtctctacctgctaatggtttaatacctgcagattgaaatatactggagaaataaagagagtgggagtagggacactttctcccagtgcccacaccgcccctcgttacccgcataggtcaactgaaagatacagagagggaagctttgatggggggttcagagttcaaaggaagaaatgatggcacctgcactccctgcccccagaggcaggacacagccagccctcctgtgacagcactcctggcagctccttgttggcctgcagccctcagggggcttagttgccattgactcacccactcctaaggccaccacatcaaaatctgaggcttactgccctgtcccacctgcctctgtctttcttaaaacagctaaatgcaacaatagcagaaattagcttgtttttgaggttggcaatgaccagttcaaggtgactcttattttcttaagcagtgcttgcaggacataaatgtgatgacacttgccctcctttctttatcgcctgggacagactttacaaacagacctgggagaagtcccctaaggggctgcatttatccccatctccctaggggtgatcagcattgtgacagctgggcagagcagtggtgaactgcacccatgtccctgctcacatctcctaagatctcagaattgcctgaggttctagcgtgggctccttctctccagatgatgccatccccacccccctcatttccacacagcatctgaggcatcctgcactaaaagatatatgtacagcaaaacaaaaatagaaaaccagcacagcagagtggaggtggggtataaatatacccagatccccgctgatttggttactcggggtgagcatcagatggaaatagaagtttccgggggccaagagagaaagagggatgtaacgacaattcttttcaaaacgtgtcccatggtatgcctcgtggaaaaaatggttcgttggtcaaatgaatttgggaaaatgctgtcaatatcaccgactcatggagcttcgcaaggcatcttagcttaataaaggttatgaaaagtcttgcagcaaa

SEQ ID NO: 126830 - DNA, 1956 bp, Artificial Sequence
  derived and/or modified sequence
tggtgctgaagggacagctccgcggcggcggcggcggcggcggccccgggcgctgagcgggtgcccggcgcggagagcgggacgatgaagcggcagaacgtgcgcacgctggcgctcatcgtgtgcaccttcacctacctgctggtgggcgccgcggtcttcgacgcgctggagtcggagcccgagctgatcgagcggcagcggctggagctgcggcagcaggagctgcgggcgcgctacaacctcagccagggcggctacgaggagctggagcgcgtcgtgctgcgcctcaagccgcacaaggccggcgtgcagtggcgcttcgccggctccttctacttcgccatcaccgtcatcaccaccatcggctacgggcacgcggcacccagcacggatggcggcaaggtgttctgcatgttctacgcgctgctgggcatcccgctcacgctcgtcatgttccagagcctgggcgagcgcatcaacaccttggtgaggtacctgctgcaccgcgccaagaaggggctgggcatgcggcgcgccgacgtgtccatggccaacatggtgctcatcggcttcttctcgtgcatcagcacgctgtgcatcggcgccgccgccttctcccactacgagcactggaccttcttccaggcctactactactgcttcatcaccctcaccaccatcggcttcggcgactacgtggcgctgcagaaggaccaggccctgcagacgcagccgcagtacgtggccttcagcttcgtctacatccttacgggcctcacggtcatcggcgccttcctcaacctcgtggtgctgcgcttcatgaccatgaacgccgaggacgagaagcgcgacgccgagcaccgcgcgctgctcacgcgcaacgggcaggcgggcggcggcggagggggtggcagcgcgcacactacggacaccgcctcatccacggcggcagcgggcggcggcggcttccgcaacgtctacgcggaggtgctgcacttccagtccatgtgctcgtgcctgtggtacaagagccgcgagaagctgcagtactccatccccatgatcatcccgcgggacctctccacgtccgacacgtgcgtggagcagagccactcgtcgccgggagggggcggccgctacagcgacacgccctcgcgacgctgcctgtgcagcggggcgccacgctccgccatcagctcggtgtccacgggtctgcacagcctgtccaccttccgcggcctcatgaagcgcaggagctccgtgtgactgccccgaggggcctggagcacctgggggcgcgggcgggggacccctgctgggaggccaggagactgcccctgctgccttctgcccagtgggaccccgcacaacatccctcaccactctcccccagcacccccatctccgactgtgcctgcttgcaccagccggcaggaggccgggctctgaggacccctggggcccccatcggagccctgcaaattccgagaaatgtgaaacttggtggggtcagggaggaaaggcagaagctgggagcctcccttccctttgaaaatctaagaagctcccagtcctcagagaccctgctggtacccagacccccaccttcggaggggacttcatgttccgtgtacgtttgcatctctatttatacctctgtcctgctaggtctcccaccttcccttggttccaaaagccagggtgtctatgtccaagtcacccctactcagccccactccccttcctcatccccagctgtgtctcccaacctcccttcgtgttgttttgcatggctttgcagttatggagaaagtggaaacccagcagtccctaaagctggtccccagaaagcaggacagaaagaaggagggacaggcaggcagcaggaggggcgagctgggaggcaggaggcagcggcctgtcagtctgcagaatggtcgcactggaggttca

SEQ ID NO: 126831 - DNA, 1185 bp, Artificial Sequence
  derived and/or modified sequence
atgaagagacagaacgttcgaaccttggccctaatcgtgtgcacgtttacttatctgctcgtcggggctgctgtttttgacgctctcgagagtgagccagaactcatcgagcggcagcggctagagctccgacaacaggagctgagagcacgatacaacctatctcagggcggatatgaagagctggaaagggtcgtgctgcggctgaagccgcataaagccggtgtccagtggcggtttgcaggctcattttattttgctatcacggtgatcaccaccattgggtacgggcatgcggctccctcgaccgacgggggaaaagttttttgtatgttctacgctctgctgggaatccctctcaccctggtcatgtttcagtccctgggggagcggattaataccctagtgcggtaccttctacacagagccaaaaaggggctcggcatgagacgcgctgacgtgagcatggctaatatggtgcttatcggtttcttctcttgtatctcaacattatgtatcggcgcagcagccttcagtcactatgaacattggaccttcttccaggcttattattattgcttcattacactgactacaatcgggtttggagactacgttgcacttcagaaggaccaggctctgcagacacagccgcagtatgtcgccttttccttcgtgtatattctgaccggtctaacagtgataggggcatttctcaaccttgtggtgctgcgatttatgaccatgaatgctgaggacgaaaagagggacgctgaacacagggcactgctcactcgtaacgggcaggcaggcggtggaggaggcggtgggagcgctcacaccactgatacagcttcgtccaccgccgctgctggtggtggtggatttcgcaacgtgtatgctgaagttcttcactttcagtccatgtgcagctgcctttggtataagagtagggaaaaactgcagtattccatccctatgatcattcctcgagatttatctaccagcgacacttgcgtggaacagagccattctagtcccggaggcggaggaaggtactctgacactccaagtaggagatgtctttgctctggggctccacgatcagcgatatcctctgtctccacgggtctgcattcactttccactttccggggactgatgaaaaggcggtcctcggtttag

SEQ ID NO: 126832 - DNA, 1185 bp, Artificial Sequence
  derived and/or modified sequence
atgaagagacagaacgtgagaaccctggccctgatcgtgtgcaccttcacctacctgctggtgggcgccgccgtgttcgacgccctggagagcgagcccgagctgatcgagagacagagactggagctgagacagcaggagctgagagccagatacaacctgagccagggcggctacgaggagctggagagagtggtgctgagactgaagccccacaaggccggcgtgcagtggagattcgccggcagcttctacttcgccatcaccgtgatcaccaccatcggctacggccacgccgcccccagcaccgacggcggcaaggtgttctgcatgttctacgccctgctgggcatccccctgaccctggtgatgttccagagcctgggcgagagaatcaacaccctggtgagatacctgctgcacagagccaagaagggcctgggcatgagaagagccgacgtgagcatggccaacatggtgctgatcggcttcttcagctgcatcagcaccctgtgcatcggcgccgccgccttcagccactacgagcactggaccttcttccaggcctactactactgcttcatcaccctgaccaccatcggcttcggcgactacgtggccctgcagaaggaccaggccctgcagacccagccccagtacgtggccttcagcttcgtgtacatcctgaccggcctgaccgtgatcggcgccttcctgaacctggtggtgctgagattcatgaccatgaacgccgaggacgagaagagagacgccgagcacagagccctgctgaccagaaacggccaggccggcggcggcggcggcggcggcagcgcccacaccaccgacaccgccagcagcaccgccgccgccggcggcggcggcttcagaaacgtgtacgccgaggtgctgcacttccagagcatgtgcagctgcctgtggtacaagagcagagagaagctgcagtacagcatccccatgatcatccccagagacctgagcaccagcgacacctgcgtggagcagagccacagcagccccggcggcggcggcagatacagcgacacccccagcagaagatgcctgtgcagcggcgcccccagaagcgccatcagcagcgtgagcaccggcctgcacagcctgagcaccttcagaggcctgatgaagagaagaagcagcgtgtag

SEQ ID NO: 126833 - protein, 1178 aa, Artificial Sequence
  derived and/or modified sequence
MANGGGGGGGSSGGGGGGGGSSLRMSSNIHANHLSLDASSSSSSSSSSSSSSSSSSSSSSVHEPKMDALIIPVTMEVPCDSRGQRMWWAFLASSMVTFFGGLFIILLWRTLKYLWTVCCHCGGKTKEAQKINNGSSQADGTLKPVDEKEEAVAAEVGWMTSVKDWAGVMISAQTLTGRVLVVLVFALSIGALVIYFIDSSNPIESCQNFYKDFTLQIDMAFNVFFLLYFGLRFIAANDKLWFWLEVNSVVDFFTVPPVFVSVYLNRSWLGLRFLRALRLIQFSEILQFLNILKTSNSIKLVNLLSIFISTWLTAAGFIHLVENSGDPWENFQNNQALTYWECVYLLMVTMSTVGYGDVYAKTTLGRLFMVFFILGGLAMFASYVPEIIELIGNRKKYGGSYSAVSGRKHIVVCGHITLESVSNFLKDFLHKDRDDVNVEIVFLHNISPNLELEALFKRHFTQVEFYQGSVLNPHDLARVKIESADACLILANKYCADPDAEDASNIMRVISIKNYHPKIRIITQMLQYHNKAHLLNIPSWNWKEGDDAICLAELKLGFIAQSCLAQGLSTMLANLFSMRSFIKIEEDTWQKYYLEGVSNEMYTEYLSSAFVGLSFPTVCELCFVKLKLLMIAIEYKSANRESRILINPGNHLKIQEGTLGFFIASDAKEVKRAFFYCKACHDDITDPKRIKKCGCKRLEDEQPSTLSPKKKQRNGGMRNSPNTSPKLMRHDPLLIPGNDQIDNMDSNVKKYDSTGMFHWCAPKEIEKVILTRSEAAMTVLSGHVVVCIFGDVSSALIGLRNLVMPLRASNFHYHELKHIVFVGSIEYLKREWETLHNFPKVSILPGTPLSRADLRAVNINLCDMCVILSANQNNIDDTSLQDKECILASLNIKSMQFDDSIGVLQANSQGFTPPGMDRSSPDNSPVHGMLRQPSITTGVNIPIITELVNDTNVQFLDQDDDDDPDTELYLTQPFACGTAFAVSVLDSLMSATYFNDNILTLIRTLVTGGATPELEALIAEENALRGGYSTPQTLANRDRCRVAQLALLDGPFADLGDGGCYGDLFCKALKTYNMLCFGIYRLRDAHLSTPSQCTKRYVITNPPYEFELVPTDLIFCLMQFDHNAGQSRASLSHSSHSSQSSSKKSSSVHSIPSTANRQNRPKSRESRDKQKYVQEERL

SEQ ID NO: 126834 - DNA, 3537 bp, Artificial Sequence
  derived and/or modified sequence
atggccaatggtggaggcgggggaggagggtcttctgggggcggtggcggtggcggggggtcatcactgcgaatgagtagcaatattcacgccaaccatctgagcctggatgctagtagttcttcgagcagtagcagctcttcatcttctagtagctcatcttctagctcctcttcctccgtccacgaaccaaagatggacgcccttatcattccagtgacaatggaggtaccttgtgactcgaggggccaacgcatgtggtgggccttcctcgccagttctatggtcaccttcttcggaggtttattcatcatccttttatggaggaccctcaaatacctgtggactgtgtgttgccattgcggcgggaagacaaaggaggcacagaagatcaacaatggctcttcccaagcagacgggaccctcaagccagtcgacgagaaggaggaagctgtagctgctgaagttggctggatgactagcgtgaaagactgggctggggtgatgatttccgctcagactcttacaggtcgcgttctggtcgttctggtatttgcactatccatcggtgctctcgtgatttacttcatcgatagttctaatcctatcgaatcatgccagaatttctataaggatttcaccttgcagatcgatatggcctttaacgtttttttcctgctttattttggcctgaggtttatagccgccaatgataagctgtggttctggttggaggtaaattctgtcgtcgacttcttcacggttccccccgtgtttgtcagtgtctatcttaacagaagctggctgggtctcagattcctgcgggccttgcgcctcatacagtttagcgaaatactccagtttctgaacatcctgaagacttctaacagcataaagctggtgaatttgttgtctatatttatctccacatggctgacggcagcgggattcatacatctggtcgagaattccggcgacccatgggaaaactttcagaataaccaagccctaacctattgggaatgcgtgtacttgttaatggtaaccatgtctaccgtcgggtacggtgacgtctatgctaaaacaacccttgggcggctgtttatggtcttcttcatactcggaggtctcgcgatgtttgccagttatgtccccgaaatcatagagctgataggaaaccgaaagaagtacggtggttcatattcagccgtgtccgggagaaagcatattgtggtgtgcggtcacatcactctggagagcgtcagcaatttcctcaaagatttcctacacaaggaccgtgacgacgtgaacgtcgaaatagtgtttctgcataacattagccccaacctggagcttgaggccttgtttaaacggcattttacccaggtggaattttaccagggatctgtccttaacccccacgatttagccagggtcaaaatagagtcagccgacgcgtgtttgatattggctaataagtactgcgccgaccccgatgccgaagatgcctctaacattatgagggtgatatcaatcaagaactaccatcctaaaatacgcattattacccaaatgctacagtaccataacaaggctcacctgctgaacataccatcatggaactggaaagagggagacgacgcgatctgcctggcagagctgaaactgggatttatcgcccaaagttgtctagcccagggtctctccactatgttagccaatctcttcagtatgagatcctttatcaagattgaggaggatacctggcagaaatactacttagagggggtgtctaatgagatgtatacggagtatctttcttcagcatttgtcggtctaagcttcccgactgtctgcgaactttgtttcgtgaagctgaaattgcttatgatcgccattgagtacaagagtgctaatcgggaatcacgaatactcatcaacccaggaaaccatctgaagattcaggaaggcactttagggttctttattgctagtgacgcaaaggaggtaaagagagcttttttttattgcaaagcatgtcatgatgatataactgaccccaagaggattaagaagtgcggctgtaagaggctcgaagatgagcaaccctctacactgtcccccaagaaaaagcaaagaaatggaggcatgcgtaatagtccaaacactagtcccaagcttatgaggcacgacccccttctaattcctggaaatgaccagatcgataatatggactcgaacgtgaagaagtatgattctaccggaatgtttcattggtgtgcccccaaagagatcgaaaaagtgatcctcacaaggtctgaggcggctatgacggtgttgagtggtcacgtcgttgtttgcattttcggagacgtatcctctgctctaatcggtttgaggaatttagttatgcctctgagagcctctaattttcactatcacgaattgaaacacattgtgttcgtcggaagtatcgagtacttgaagagagaatgggaaacactccataatttccctaaggtctccatcctacctggcacaccactgtcacgagcagatctacgagctgtgaatattaatctttgtgacatgtgcgtcatccttagcgccaaccaaaacaatatagatgacacgagtctacaggacaaagaatgcatcttagcctcccttaacataaagagcatgcagttcgacgatagtatcggcgttttacaagctaactcgcaggggtttacccctcccggaatggatcgaagcagccccgacaacagtcccgtccacggcatgctgcgccagcccagcatcaccactggggtgaacatcccaatcattacggagttggtaaatgacacaaatgtccagttccttgaccaggatgatgatgacgatcccgatacggaactataccttacccagccatttgcatgtggaacggcatttgccgtctccgtgctggactccttaatgtctgctacctacttcaacgataacatcctgaccctcatccgtactctcgtcaccggtggtgccacacctgaattggaagcgcttatcgctgaggagaacgcattaaggggagggtactctactccccagacactggcaaatagagacaggtgtagagtagctcaactggctttactggatggacctttcgcggatctgggggatggcgggtgctacggcgacctcttctgcaaggccctcaaaacatataacatgctgtgtttcgggatctaccggctccgagacgcacacctgtcaacaccttctcagtgcaccaagagatatgttatcaccaacccaccctatgaattcgaattggtgcctaccgatcttatcttctgtctcatgcagtttgaccacaacgctgggcagtctcgggccagcctctcacactccagtcactctagccaaagttcaagcaaaaaatcttccagtgttcacagcattcctagtactgctaaccgccaaaatcggccgaagtctcgggagagcagagacaagcagaagtatgtgcaggaagaacgtctgtag

SEQ ID NO: 126835 - DNA, 3537 bp, Artificial Sequence
  derived and/or modified sequence
atggccaatggaggcggcggcggcggcggcagcagcggcggcggcggcggcggcggcggcagcagcctgaggatgagcagcaacatccacgccaaccacctgagcctggatgccagcagcagcagcagcagcagcagcagcagcagcagcagcagcagcagcagcagcagcagcagctctgtgcatgagcccaagatggatgccctgatcatccctgtgaccatggaggtgccctgtgacagccggggccagaggatgtggtgggccttcctggccagctccatggtgaccttctttggaggcctcttcatcatcctgctgtggaggaccctgaagtacctgtggacagtgtgctgccactgcggcggcaagaccaaggaggcccagaagatcaacaacggcagcagccaggctgatggcaccctgaagcctgtggatgagaaggaggaggccgtggccgctgaggtgggctggatgacctctgtgaaggactgggccggcgtgatgatcagcgcccagaccctgaccggccgggtgctggtggtgctggtgtttgccctgagcattggagccctggtgatctacttcatcgacagcagcaaccccatcgagagctgccagaacttctacaaggacttcaccctgcagattgacatggccttcaacgtgttcttcctgctgtacttcggcctgcgcttcatcgccgccaatgacaagctgtggttctggctggaggtgaacagcgtggtggacttcttcaccgtgccccctgtgtttgtgtctgtgtacctgaacagatcctggctgggcctgcgcttcctgcgggccctgcggctcatccagttcagcgagatcctgcagttcctgaacatcctgaagaccagcaacagcatcaagctggtgaacctgctgagcatcttcatcagcacctggctgacagctgctggcttcatccacctggtggagaacagcggggacccctgggagaacttccagaacaaccaggccctgacctactgggagtgtgtgtacctgctgatggtgaccatgagcacagtgggctatggagatgtgtatgccaagaccaccctgggccgcctcttcatggtgttcttcatcctgggcggcctggccatgtttgccagctatgtgcctgagatcatcgagctgattggcaacaggaagaagtatggaggcagctacagcgctgtgtctggcaggaagcacatcgtggtgtgtggccacatcaccctggagagcgtgagcaacttcctgaaggacttcctgcacaaggacagagatgatgtgaatgtggagatcgtgttcctgcacaacatcagccccaacctggagctggaggccctcttcaagaggcacttcacccaggtggagttctaccagggctctgtgctgaacccccatgacctggcccgggtgaagattgaatctgcagatgcctgcctgatcctggccaacaagtactgtgccgaccctgatgctgaagatgccagcaacatcatgagggtcatcagcatcaagaactaccaccccaagatccgcatcatcacccagatgctgcagtaccacaacaaggcccacctgctgaacatccccagctggaactggaaggagggagatgatgccatctgcctggccgagctgaagctgggcttcatcgcccagagctgcctggcccagggcctgagcaccatgctggccaacctcttctccatgaggagcttcatcaagattgaggaggacacctggcagaagtactacctggagggcgtgtccaatgagatgtacacagagtacctgagcagcgcctttgtgggcctgtccttccccaccgtgtgtgagctgtgctttgtgaagctgaagctgctgatgattgccatcgagtacaagagcgccaaccgggagagccgcatcctgatcaaccctggcaaccacctgaagatccaggagggcaccctgggcttcttcatcgccagtgatgccaaggaggtgaagagggccttcttctactgcaaggcctgccatgatgacatcacagaccccaagaggatcaagaagtgtggctgcaagaggctggaggatgagcagcccagcaccctgagccccaagaagaagcagagaaatggaggcatgaggaacagccccaacaccagccccaagctgatgagacatgaccccctgctgatccctggaaatgaccagattgacaacatggacagcaatgtgaagaagtatgacagcacaggcatgttccactggtgtgcccccaaggagattgagaaggtgatcctgaccaggtctgaggccgccatgacagtgctgagcggccacgtggtggtgtgcatctttggagatgtgagcagcgccctgattggcctgaggaacctggtgatgcccctgcgggccagcaacttccactaccacgagctgaagcacatcgtgtttgtgggcagcattgagtacctgaagcgggagtgggagaccctgcacaacttccccaaggtgtccatcctgcccggcacccccctgagcagagctgacctgcgggctgtgaacatcaacctgtgtgacatgtgtgtgatcctgagcgccaaccagaacaacattgatgacaccagcctgcaggacaaggagtgcatcctggccagcctgaacatcaagtccatgcagtttgatgacagcattggagtgctgcaggccaacagccagggcttcaccccacctggcatggacaggagcagcccagacaacagccctgtgcacggcatgctgcggcagcccagcatcaccactggagtgaacatccccatcatcacagagctggtgaatgacaccaacgtgcagttcctggaccaggatgatgatgatgatcctgacacagagctgtacctgacccagccctttgcctgtggcacagcctttgctgtgtctgtgctggacagcctgatgtctgccacctacttcaatgacaacatcctgaccctcatccgcaccctggtgactggaggagccaccccagagctggaggccctgattgctgaagaaaatgccctgcggggcggctacagcaccccccagaccctggccaacagagaccgctgccgggtggcccagctggccctgctggatggcccctttgctgacctgggagatggcggctgctatggagacctcttctgcaaggccctgaagacctacaacatgctgtgcttcggcatctaccgcctgagagatgcccacctgagcacccccagccagtgcaccaagagatatgtgatcaccaaccccccctatgaatttgagctggtgcccacagacctgatcttctgcctgatgcagtttgaccacaatgccggccagagccgggccagcctgagccacagcagccacagcagccagagcagcagcaagaagagcagctctgtgcacagcatccccagcacagccaaccggcagaaccggcccaagagccgggagagccgggacaagcagaagtatgtgcaggaggagcggctgtag

SEQ ID NO: 126836 - DNA, 3537 bp, Artificial Sequence
  derived and/or modified sequence
atggccaacggcggcggcggcggcggcggcagcagcggcggcggcggaggtggtggagggtcctccctgcgcatgtcatctaatattcatgctaatcacctatctcttgatgctagtagttccagttcatcgtcatcttcttcctcaagcagcagttcgtcaagttcttcctcttcatcagtccacgaacctaaaatggatgccctgatcatccccgtcacaatggaggttccatgcgactctaggggtcagagaatgtggtgggcattcctcgcgagttccatggtcacattcttcggtggtctcttcatcattttgctttggagaaccttgaagtacctctggacagtatgctgtcattgtggaggtaaaaccaaagaagctcaaaagataaataatgggagctcgcaagctgatgggacacttaagcctgtggacgagaaagaggaagcagtggccgccgaggttggttggatgacgagcgtgaaggattgggccggcgtgatgatcagcgcccagacactcactgggagggtgttggttgtacttgtatttgccctgtctatcggagcactggtaatctacttcattgattcctccaatcctattgagagttgtcagaatttctacaaggacttcactctccagatcgacatggcttttaatgtctttttcttactgtactttggtctgaggttcatcgccgccaatgataagctatggttctggctggaagtgaattccgtggtcgacttcttcacagtgccaccagtgtttgtgtcagtctacctgaaccggtcgtggctcgggctgcgctttttgcgggctctgcgcttaatccaattttctgaaattctgcagttcctgaacatactgaagacctcaaattccataaagctggtgaacctcctgagcattttcatttcaacttggttgaccgcagccggcttcatccacctggttgaaaactccggggatccgtgggaaaattttcaaaacaatcaggcactgacatactgggaatgcgtgtatctgctcatggttacaatgagcactgtgggatacggcgacgtttatgccaagacgaccctgggacgtttgtttatggtgtttttcatactaggtggtctggcaatgtttgccagctatgtgcccgaaattatagagttaattgggaacagaaagaagtacggaggatcgtacagcgctgtctctggcagaaaacatatcgtcgtgtgtggtcatataaccctggaatccgtaagtaacttcttaaaagatttcctgcacaaggatcgggacgacgtgaacgtggaaatcgtattcctgcacaatatcagtccaaacctagagcttgaggcactcttcaagcgccatttcacccaggttgaattttatcaaggcagcgtgctcaatccccacgacctggcacgcgtgaagattgagtctgctgatgcgtgtcttatcctggcaaacaagtattgcgcagacccagacgccgaggatgccagtaacataatgcgggtgatttctatcaagaactatcatcccaaaattcgcattatcacgcagatgctgcagtatcataataaagcgcatctgctcaacatcccctcctggaactggaaggagggcgacgacgccatctgtttagctgagctgaaattggggtttattgctcagtcttgtctggcccagggcctatctacaatgctcgccaacctgttctcaatgagatctttcattaagattgaggaagatacatggcagaaatactaccttgagggagtttcaaatgagatgtatacggagtacctgtcctctgcatttgtggggttgtcttttcctacagtgtgtgagctctgcttcgtgaaactgaagctgctcatgatagccatagagtacaagtcggctaacagagagtctcggattctgattaaccctgggaatcacctgaaaatccaggagggcactctggggttcttcattgcgagcgacgcaaaagaagttaagcgcgccttcttttactgtaaggcgtgccatgacgatattactgaccccaaacggattaaaaagtgcggttgcaaaagattagaagatgaacagcctagcacccttagcccaaagaagaagcaaagaaatggcggcatgaggaacagccccaatacaagtcctaagctgatgcggcacgatcctttgctaattccaggcaatgatcaaattgataatatggactccaatgtcaagaagtatgacagcacgggaatgttccactggtgcgctccaaaagaaatcgaaaaggtcatactcactcgctccgaggccgccatgacggtcctttctggacatgttgtggtctgcattttcggggatgtgagttcagccctaattgggctccgtaacctagttatgccattgagggcaagcaacttccattaccatgaactgaagcacatcgtcttcgtggggagcatcgagtaccttaagagggaatgggagacactacacaacttccccaaggttagcatcctgccaggcacgcccctttccagggccgatcttcgggccgtcaacatcaacctgtgcgatatgtgtgtgatactgtcagccaatcagaataatatcgatgacacaagccttcaggataaggagtgcatcctagctagcctcaacatcaaatcgatgcagtttgacgactcgattggggtattgcaggccaactcacagggttttacacctccagggatggacaggtcaagtcccgataacagcccggttcatggcatgctgcgccagcccagcataacaactggggtgaacatacctattattaccgaattagtgaatgacactaatgttcagttcttggaccaggacgacgatgacgatccagatacagaactttatctcactcaaccatttgcctgcgggaccgctttcgcggtatccgtgctggactccctgatgtctgcgacgtatttcaacgataatatattaacactaatccgtacactcgtcacaggaggagcaacccccgaactggaggcgctgatcgctgaagaaaatgctctaagagggggatactctaccccccagactctggcgaatagggaccgctgtcgggtggcccaactggctctgcttgatggacccttcgcagatttgggggacggagggtgttacggcgatctcttctgtaaggccctcaaaacgtacaacatgctgtgctttggcatctatagactgagggatgctcatttgtcaacccctagccagtgtactaagcggtacgtcattacaaaccccccctatgagttcgagttggtgcctactgacctcatcttctgtctgatgcaatttgaccataatgccgggcagtcacgggcttcactgagccattcaagccacagttcccagtcatcgagcaagaagtcgagtagcgttcacagcatccctagcacagctaacagacaaaatcgacctaaatcaagggagtcaagggacaaacagaaatatgttcaggaggagcggctgtag

SEQ ID NO: 126837 - DNA, 6875 bp, Artificial Sequence
  derived and/or modified sequence
ccgggccgctgccgaggggccctgcccacccctgcccagcccggagcccaggcgagccagcgcggcgagcctcctcccctcccgcctgggtcgtcctgagtccgcgcccgctccagttgctgcagctgctgctgctggcggctgcggggagcgcggggcgcgcgccgaagaggcttgggcggcgaggacggggacgaggaggagtcggaggcggcaaggaggaagagcgagcggaggccgaggggctcagcggcgtggcgacaggactagggggtcccgagaacatgggctagcaggcggccacgggccggcggccggacgcggtgaacctgccgcggccgggcgcgcactggcgcggcgagccggagccgagcgcagccgggggaggagggctggcgcaggggcgcccgggcggagggggccgattatccattattaacgagttaccacctaataagcggagagcggctcgttagccgcgcgggaggcgctcggggaagggggtcaccggccgagcgcagcgcacacccgtggcgcacggcgggcggcgcggcgccgaggacacccgggaccgcgcgcggagccggggcgggcccgggggcggcgcagaccccgggcgcgggcggcccgcggcgccccctggctctcggcgctcggggccagcgcagcccggggcgagcggggcgcgggccggggagggggagctgcccgcgcactccatccccctcccccccgggcgggcggcggcggctcgctgtatatatctcggcgcaccccgccaggtcgcgcacagcgccccgagcccaggcgcctccccgcccccctcccgcgctccgcggcggcggcggcggcggcagcagtagcagcaatatggctgttgatgggtgtttggggtggcgctggcggcgggaggagctcccccgagcccctgcgccggctgcccgttgctagctatggcaaatggtggcggcggcggcggcggcagcagcggcggcggcggcggcggcggaggcagcagtcttagaatgagtagcaatatccacgcgaaccatctcagcctagacgcgtcctcctcctcctcctcctcctcttcctcttcttcttcttcctcctcctcttcctcctcgtcctcggtccacgagcccaagatggatgcgctcatcatcccggtgaccatggaggtgccgtgcgacagccggggccaacgcatgtggtgggctttcctggcctcctccatggtgactttcttcgggggcctcttcatcatcttgctctggcggacgctcaagtacctgtggaccgtgtgctgccactgcgggggcaagacgaaggaggcccagaagattaacaatggctcaagccaggcggatggcactctcaaaccagtggatgaaaaagaggaggcagtggccgccgaggtcggctggatgacctccgtgaaggactgggcgggggtgatgatatccgcccagacactgactggcagagtcctggttgtcttagtctttgctctcagcatcggtgcacttgtaatatacttcatagattcatcaaacccaatagaatcctgccagaatttctacaaagatttcacattacagatcgacatggctttcaacgtgttcttccttctctacttcggcttgcggtttattgcagccaacgataaattgtggttctggctggaagtgaactctgtagtggatttcttcacggtgccccccgtgtttgtgtctgtgtacttaaacagaagttggcttggtttgagatttttaagagctctgagactgatacagttttcagaaattttgcagtttctgaatattcttaaaacaagtaattccatcaagctggtgaatctgctctccatatttatcagcacgtggctgactgcagccgggttcatccatttggtggagaattcaggggacccatgggaaaatttccaaaacaaccaggctctcacctactgggaatgtgtctatttactcatggtcacaatgtccaccgttggttatggggatgtttatgcaaaaaccacacttgggcgcctcttcatggtcttcttcatcctcgggggactggccatgtttgccagctacgtccctgaaatcatagagttaataggaaaccgcaagaaatacgggggctcctatagtgcggttagtggaagaaagcacattgtggtctgcggacacatcactctggagagtgtttccaacttcctgaaggactttctgcacaaggaccgggatgacgtcaatgtggagatcgtttttcttcacaacatctcccccaacctggagcttgaagctctgttcaaacgacattttactcaggtggaattttatcagggttccgtcctcaatccacatgatcttgcaagagtcaagatagagtcagcagatgcatgcctgatccttgccaacaagtactgcgctgacccggatgcggaggatgcctcgaatatcatgagagtaatctccataaagaactaccatccgaagataagaatcatcactcaaatgctgcagtatcacaacaaggcccatctgctaaacatcccgagctggaattggaaagaaggtgatgacgcaatctgcctcgcagagttgaagttgggcttcatagcccagagctgcctggctcaaggcctctccaccatgcttgccaacctcttctccatgaggtcattcataaagattgaggaagacacatggcagaaatactacttggaaggagtctcaaatgaaatgtacacagaatatctctccagtgccttcgtgggtctgtccttccctactgtttgtgagctgtgttttgtgaagctcaagctcctaatgatagccattgagtacaagtctgccaaccgagagagccgtatattaattaatcctggaaaccatcttaagatccaagaaggtactttaggatttttcatcgcaagtgatgccaaagaagttaaaagggcatttttttactgcaaggcctgtcatgatgacatcacagatcccaaaagaataaaaaaatgtggctgcaaacggcttgaagatgagcagccgtcaacactatcaccaaaaaaaaagcaacggaatggaggcatgcggaactcacccaacacctcgcctaagctgatgaggcatgaccccttgttaattcctggcaatgatcagattgacaacatggactccaatgtgaagaagtacgactctactgggatgtttcactggtgtgcacccaaggagatagagaaagtcatcctgactcgaagtgaagctgccatgaccgtcctgagtggccatgtcgtggtctgcatctttggcgacgtcagctcagccctgatcggcctccggaacctggtgatgccgctccgtgccagcaactttcattaccatgagctcaagcacattgtgtttgtgggctctattgagtacctcaagcgggaatgggagacgcttcataacttccccaaagtgtccatattgcctggtacgccattaagtcgggctgatttaagggctgtcaacatcaacctctgtgacatgtgcgttatcctgtcagccaatcagaataatattgatgatacttcgctgcaggacaaggaatgcatcttggcgtcactcaacatcaaatctatgcagtttgatgacagcatcggagtcttgcaggctaattcccaagggttcacacctccaggaatggatagatcctctccagataacagcccagtgcacgggatgttacgtcaaccatccatcacaactggggtcaacatccccatcatcactgaactagtgaacgatactaatgttcagtttttggaccaagacgatgatgatgaccctgatacagaactgtacctcacgcagccctttgcctgtgggacagcatttgccgtcagtgtcctggactcactcatgagcgcgacgtacttcaatgacaatatcctcaccctgatacggaccctggtgaccggaggagccacgccggagctggaggctctgattgctgaggaaaacgcccttagaggtggctacagcaccccgcagacactggccaatagggaccgctgccgcgtggcccagttagctctgctcgatgggccatttgcggacttaggggatggtggttgttatggtgatctgttctgcaaagctctgaaaacatataatatgctttgttttggaatttaccggctgagagatgctcacctcagcacccccagtcagtgcacaaagaggtatgtcatcaccaacccgccctatgagtttgagctcgtgccgacggacctgatcttctgcttaatgcagtttgaccacaatgccggccagtcccgggccagcctgtcccattcctcccactcgtcgcagtcctccagcaagaagagctcctctgttcactccatcccatccacagcaaaccgacagaaccggcccaagtccagggagtcccgggacaaacagaagtacgtgcaggaagagcggctttgatatgtgtatccaccgccactgtgtgaaactgtatctgccactcatttccccagttggtgtttccaacaaagtaactttccctgttttcccctgtagtccccccctttttttttacacatatttgcatatgtatgatagtgtgcatgtggttgtcatttttatttcaccaccataaaacccttgagcacaacagcaaataagcagacggaccaaaagttatttatgattctgggggaaaaataacccaaaggcatgctccagacataaatagctcactgcaggaacgagttcacagattagaagggagcacttgtgatcaacgtcagttaggcagagcaagtttatttaatgtaaaagaaaagttgattctgatttatcaggattatcagggtgctttgggttttgattttgttgttgttgttgttttcctttctttctttttttatacacacaataagttagcacatgtttatttgaaacaagcaaccaaacagcaatgaaaacatattgattgtttccagtctctgggccgaagtattgcgaagcatttgaaaagctttcacgatttgtgtagatgattatgaaggacctgcttgttgcaagagaacatcagtgatttttttagttactcaccaaggccttttgtcccagagccagttccctctgggagttcttatgaacatttctcaccttaatatggaggagagaatagtattccaatcatggatgtatcaaattctagtcatttagtttaagtgaaaagaggtttgattgcatattaaattgttattctgtctccttatgttgccatatgaatagctattttttttctttcacttttgacatttgggatgaaaagccatatgtatcataaatatcagatgtaagtcattaaaaactgccttcctgggacttttacatcttttaaaaggtgaattacttaccttatgtacagaataaataatgctcaggaaagagcaagtatttttccatgcattctcaggggatctttttactcccctttgtttgattagttagggccccaatgccaggtaggaggaagggctggggcaatggtagagtgagaggaagacaaacccagctgcagatcatgcttttctaggagccgacatgctaaataaattagaatgtaggaggatcagccacagttgactcaacaaagacaaaagccagccaccaccttcaactgttggcacagctgtgcggtgctggctgtcccaatgcagaaagctggtgggaaggaattcctcatcatcactttctttaatgtagccaatttaggcagggtaatgacggcaatagagagctgctccttgtcattatgagacgtgggataagaagagtgcaacagtgagccaaacacattttggtatagttatttttttcttcttttgttttctttcttttttaacacttagtaagcatgagaggagaggtagaaaaatacccttttttcaacatatagttgtcagatgctttgtgcatgcaaatcatgctttaggcagtgcggtatttcttaaaaactggccaattcaccataaccaatttcccttatggatggactaggctggtatatacatatttgaaaagttttacttcaaagaattccatcgaatagaataggggtaaaagggaggaggaaaacatgtcacagctgtaccatctctaaaaaggtgtttttatggtgaatgttttggatttagattttggatcccccgtcccctcaagcatgatagttttggatatttgcttgctgtgtgaattgacaagcacttttactgacaaatggtgaggctcagtcagaacctccaccctcccccacaccaaagacaggggcagcgtagtattcaaaccagtattgtggtggggaataattgtatacatgtaaattatcaagccctatgagtggaagaattttttcaaattatttttgtccctctatatattgatttatattatgtataactatctctttatataaactatatataattatatatatataactatataattatatatatataactatatatataactatatatatgtatcccctagtattggatcatgaagagctcttcatgcattctttgcaaaggaggttataaagttacgccctcagaacatttataactataagaatgtgccagttaaagtgctcaacaggaaatatgacagtttaaaagcattgtaaaactcacatagcttacttctctctctaaagtgcaacaaggatgaatagaatgggccaaggtatgacaattaatggttctgcatgacctagccactgctgggggttttcttctataacgttgtccttgtgaaaacttttgtgaaattaaaaaaaaaggagttacaaat

SEQ ID NO: 126838 - DNA, 3537 bp, Artificial Sequence
  derived and/or modified sequence
atggcgaatggaggcggtggaggaggcggaagcagcggcggagggggaggtggcggaggtagctcccttaggatgagcagcaacattcatgccaatcacctgtctttggatgcttcctcctcttcttcttcttccagctcctcatcttcgtccagctcaagctccagctcctcttcaagcgtgcacgaacccaagatggatgccctgattattccagtgactatggaggtgccctgtgactcccggggacagcgcatgtggtgggctttcctggccagtagcatggtcaccttcttcggtgggctcttcatcatccttttgtggcgtaccctgaagtatctgtggacggtctgctgccactgcgggggaaagactaaagaggcgcagaagatcaacaacggtagtagtcaggcagacggaaccctcaaaccagtggacgaaaaagaggaggcagtggccgcagaagtaggatggatgacgagcgtgaaagactgggctggggtgatgatttcggcccagaccttgaccggacgcgtgctggttgtactggtatttgcactctccattggagcattagtaatctattttatagattcaagtaaccctattgagtcatgtcagaatttctacaaggacttcaccctccagattgatatggccttcaatgtcttctttctgctatacttcggcctgcgtttcatcgccgctaatgataagctttggttttggctcgaggtaaacagcgtcgttgactttttcacagtgcctcctgttttcgtttcagtatatcttaatagatcatggctcgggttgaggttcctgagggccctgaggctgattcagtttagtgaaattctccaattcctgaacatactcaaaacatctaactctatcaagctcgtcaatctactcagcatatttatctctacctggctgaccgcggcaggctttatacatctcgtcgagaattccggagatccctgggaaaacttccaaaacaaccaggccctgacatattgggaatgtgtatacttgctcatggttacaatgtcgactgtgggctacggagatgtgtacgcaaagacaacactgggcaggctattcatggtctttttcattttgggcggactggctatgtttgcgagctatgtgcccgaaataattgaactcatcggaaaccggaagaaatacggtggctcgtattcagcagtgtccggcaggaaacacatcgtggtgtgcggacacattaccctcgaaagcgtctccaattttctcaaagacttccttcacaaagacagagacgatgttaatgtggagatcgtgtttctgcataatataagtccaaatcttgaactggaggccctgttcaaaaggcactttactcaggtcgaattctatcagggatccgtgctaaatcctcatgatcttgccagagtcaagatcgaatcagccgacgcctgcctaattctggcgaacaagtactgtgcagaccccgacgctgaagacgcgtccaatatcatgcgggtcattagtataaagaactatcaccccaagatacggatcatcacccagatgctccaataccacaataaggcgcatctgctcaatatcccgtcttggaattggaaagagggcgatgatgctatatgcctggcagagctgaagcttggctttatcgcccagagctgcctggcccaagggttaagcaccatgttggccaaccttttttcaatgcggtcgttcataaagattgaagaggatacatggcagaagtattacttagagggagtctccaatgagatgtatacagagtacctcagctcagcctttgtgggcttgagctttcccaccgtgtgcgagctatgtttcgttaagttaaagctgttaatgatagcgatagagtacaagtccgctaacagagaaagtagaattttgatcaaccccggaaatcatctgaagatccaagagggaaccctgggattttttatagcatctgatgctaaggaggtaaaacgtgctttcttctattgcaaagcatgtcacgacgacattacagatccgaaacgcatcaaaaagtgcgggtgcaagcgtctggaagatgagcagcctagtacgctgagccctaagaaaaaacagcgcaatggtgggatgcgcaactctcccaatactagcccgaagctgatgcgccacgatcccctccttatccctgggaatgaccaaattgacaacatggactccaatgtcaaaaaatacgattccaccggtatgttccactggtgcgcccctaaggaaatcgaaaaggtaatcctaactagaagcgaagctgctatgacagtgctgtcgggtcatgttgttgtgtgcattttcggcgacgtaagttctgctctaatcggtctgaggaatctcgttatgccactacgggcttctaattttcattatcacgaactgaagcacatcgtgttcgtcgggtcaatcgagtatcttaagcgcgagtgggagacgttacacaacttccctaaggtgtccattctcccagggacacccctctcccgcgctgatctaagggcggtgaatattaacctgtgcgacatgtgcgtcatcctgtctgctaatcagaataacatcgacgacacctctctccaagataaagaatgcatactcgcctcattaaacatcaagtccatgcagttcgatgacagcataggggttctacaggccaattcccagggcttcactcccccaggcatggataggtcttctcccgacaattctcccgtacatgggatgctcaggcagccgagtattaccacgggggtgaatataccaatcatcacagagttggttaacgacactaatgtgcagtttttggaccaagacgatgatgatgacccggatactgagctgtacctaactcagccattcgcgtgcggaactgcatttgctgtgtccgtgctcgatagcctgatgagcgccacatacttcaacgataacatcctgactttgatcaggaccctagttaccggtggcgcaactcctgagctagaagcactgatcgcagaagagaatgcccttagaggaggatatagtactccccagactctggcgaatcgcgataggtgccgcgtagcacagctggctctcttggatggaccttttgcagacctgggggatggcggatgttacggtgacctgttttgtaaggctcttaagacctacaacatgctgtgcttcggaatctacaggcttagggacgcccacctctcgactccttcccagtgcactaaaagatatgtcataacaaaccctccatatgagtttgagctggttcctaccgaccttatcttttgcctaatgcaatttgaccacaacgctgggcagagccgcgcaagtctgtctcattcttcacactcttcgcagagcagttctaaaaagagctcctctgttcattcaattccttcaaccgccaaccgtcagaaccggcctaagtctcgagaatcacgggataagcaaaaatatgtgcaggaagagcgtctgtag

SEQ ID NO: 126839 - DNA, 3537 bp, Artificial Sequence
  derived and/or modified sequence
atggccaacggcggcggcggcggcggcggcagcagcggcggcggcggcggcggcggcggcagcagcctgagaatgagcagcaacatccacgccaaccacctgagcctggacgccagcagcagcagcagcagcagcagcagcagcagcagcagcagcagcagcagcagcagcagcagcagcgtgcacgagcccaagatggacgccctgatcatccccgtgaccatggaggtgccctgcgacagcagaggccagagaatgtggtgggccttcctggccagcagcatggtgaccttcttcggcggcctgttcatcatcctgctgtggagaaccctgaagtacctgtggaccgtgtgctgccactgcggcggcaagaccaaggaggcccagaagatcaacaacggcagcagccaggccgacggcaccctgaagcccgtggacgagaaggaggaggccgtggccgccgaggtgggctggatgaccagcgtgaaggactgggccggcgtgatgatcagcgcccagaccctgaccggcagagtgctggtggtgctggtgttcgccctgagcatcggcgccctggtgatctacttcatcgacagcagcaaccccatcgagagctgccagaacttctacaaggacttcaccctgcagatcgacatggccttcaacgtgttcttcctgctgtacttcggcctgagattcatcgccgccaacgacaagctgtggttctggctggaggtgaacagcgtggtggacttcttcaccgtgccccccgtgttcgtgagcgtgtacctgaacagaagctggctgggcctgagattcctgagagccctgagactgatccagttcagcgagatcctgcagttcctgaacatcctgaagaccagcaacagcatcaagctggtgaacctgctgagcatcttcatcagcacctggctgaccgccgccggcttcatccacctggtggagaacagcggcgacccctgggagaacttccagaacaaccaggccctgacctactgggagtgcgtgtacctgctgatggtgaccatgagcaccgtgggctacggcgacgtgtacgccaagaccaccctgggcagactgttcatggtgttcttcatcctgggcggcctggccatgttcgccagctacgtgcccgagatcatcgagctgatcggcaacagaaagaagtacggcggcagctacagcgccgtgagcggcagaaagcacatcgtggtgtgcggccacatcaccctggagagcgtgagcaacttcctgaaggacttcctgcacaaggacagagacgacgtgaacgtggagatcgtgttcctgcacaacatcagccccaacctggagctggaggccctgttcaagagacacttcacccaggtggagttctaccagggcagcgtgctgaacccccacgacctggccagagtgaagatcgagagcgccgacgcctgcctgatcctggccaacaagtactgcgccgaccccgacgccgaggacgccagcaacatcatgagagtgatcagcatcaagaactaccaccccaagatcagaatcatcacccagatgctgcagtaccacaacaaggcccacctgctgaacatccccagctggaactggaaggagggcgacgacgccatctgcctggccgagctgaagctgggcttcatcgcccagagctgcctggcccagggcctgagcaccatgctggccaacctgttcagcatgagaagcttcatcaagatcgaggaggacacctggcagaagtactacctggagggcgtgagcaacgagatgtacaccgagtacctgagcagcgccttcgtgggcctgagcttccccaccgtgtgcgagctgtgcttcgtgaagctgaagctgctgatgatcgccatcgagtacaagagcgccaacagagagagcagaatcctgatcaaccccggcaaccacctgaagatccaggagggcaccctgggcttcttcatcgccagcgacgccaaggaggtgaagagagccttcttctactgcaaggcctgccacgacgacatcaccgaccccaagagaatcaagaagtgcggctgcaagagactggaggacgagcagcccagcaccctgagccccaagaagaagcagagaaacggcggcatgagaaacagccccaacaccagccccaagctgatgagacacgaccccctgctgatccccggcaacgaccagatcgacaacatggacagcaacgtgaagaagtacgacagcaccggcatgttccactggtgcgcccccaaggagatcgagaaggtgatcctgaccagaagcgaggccgccatgaccgtgctgagcggccacgtggtggtgtgcatcttcggcgacgtgagcagcgccctgatcggcctgagaaacctggtgatgcccctgagagccagcaacttccactaccacgagctgaagcacatcgtgttcgtgggcagcatcgagtacctgaagagagagtgggagaccctgcacaacttccccaaggtgagcatcctgcccggcacccccctgagcagagccgacctgagagccgtgaacatcaacctgtgcgacatgtgcgtgatcctgagcgccaaccagaacaacatcgacgacaccagcctgcaggacaaggagtgcatcctggccagcctgaacatcaagagcatgcagttcgacgacagcatcggcgtgctgcaggccaacagccagggcttcaccccccccggcatggacagaagcagccccgacaacagccccgtgcacggcatgctgagacagcccagcatcaccaccggcgtgaacatccccatcatcaccgagctggtgaacgacaccaacgtgcagttcctggaccaggacgacgacgacgaccccgacaccgagctgtacctgacccagcccttcgcctgcggcaccgccttcgccgtgagcgtgctggacagcctgatgagcgccacctacttcaacgacaacatcctgaccctgatcagaaccctggtgaccggcggcgccacccccgagctggaggccctgatcgccgaggagaacgccctgagaggcggctacagcaccccccagaccctggccaacagagacagatgcagagtggcccagctggccctgctggacggccccttcgccgacctgggcgacggcggctgctacggcgacctgttctgcaaggccctgaagacctacaacatgctgtgcttcggcatctacagactgagagacgcccacctgagcacccccagccagtgcaccaagagatacgtgatcaccaaccccccctacgagttcgagctggtgcccaccgacctgatcttctgcctgatgcagttcgaccacaacgccggccagagcagagccagcctgagccacagcagccacagcagccagagcagcagcaagaagagcagcagcgtgcacagcatccccagcaccgccaacagacagaacagacccaagagcagagagagcagagacaagcagaagtacgtgcaggaggagagactgtag

SEQ ID NO: 126840 - DNA, 1230 bp, Artificial Sequence
  derived and/or modified sequence
atgaacagccacagctacaacggcagcgtgggcagacccctgggcagcggccccggcgccctgggcagagacccccccgaccccgaggccggccaccccccccagcccccccacagccccggcctgcaggtggtggtggccaagagcgagcccgccagacccagccccggcagccccagaggccagccccaggaccaggacgacgacgaggacgacgaggaggacgaggccggcagacagagagccagcggcaagcccagcaacgtgggccacagactgggccacagaagagccctgttcgagaagagaaagagactgagcgactacgccctgatcttcggcatgttcggcatcgtggtgatggtgaccgagaccgagctgagctggggcgtgtacaccaaggagagcctgtacagcttcgccctgaagtgcctgatcagcctgagcaccgccatcctgctgggcctggtggtgctgtaccacgccagagagatccagctgttcatggtggacaacggcgccgacgactggagaatcgccatgacctgcgagagagtgttcctgatcagcctggagctggccgtgtgcgccatccaccccgtgcccggccactacagattcacctggaccgccagactggccttcacctacgcccccagcgtggccgaggccgacgtggacgtgctgctgagcatccccatgttcctgagactgtacctgctgggcagagtgatgctgctgcacagcaagatcttcaccgacgccagcagcagaagcatcggcgccctgaacaagatcaccttcaacaccagattcgtgatgaagaccctgatgaccatctgccccggcaccgtgctgctggtgttcagcatcagcagctggatcatcgccgcctggaccgtgagagtgtgcgagagataccacgacaagcaggaggtgaccagcaacttcctgggcgccatgtggctgatcagcatcaccttcctgagcatcggctacggcgacatggtgccccacacctactgcggcaagggcgtgtgcctgctgaccggcatcatgggcgccggctgcaccgccctggtggtggccgtggtggccagaaagctggagctgaccaaggccgagaagcacgtgcacaacttcatgatggacacccagctgaccaagagagtgaagaacgccgccgccaacgtgctgagagagacctggctgatctgcaagatgggctag

SEQ ID NO: 126841 - DNA, 1230 bp, Artificial Sequence
  derived and/or modified sequence
atgaactcccactcttacaatggctccgtgggaagacccctgggtagcggtcctggtgctctcggcagggacccccctgacccggaggccggacacccccctcagccaccacatagcccgggactccaggtggtggtggctaaatccgaacccgctagacctagtcccggctcaccccggggacagccgcaggatcaagatgatgacgaggatgacgaagaagacgaggcggggaggcagcgcgcgtccggtaaaccttctaacgttggccaccgtctgggccaccgcagggcccttttcgaaaaaagaaaacggctctccgattacgctttgatctttggcatgtttggtatcgttgtcatggttactgaaactgagctttcatggggcgtgtataccaaagagtccttgtatagcttcgccctcaagtgcctcatatcactaagtaccgccattctccttggactagtggtgctctatcacgccagggagattcagctctttatggttgacaacggtgcagacgattggaggatcgccatgacatgtgagcgggtgtttctgatttcccttgagctcgctgtgtgcgccatccacccagtgcctggccactaccgatttacatggaccgcccggctggcgttcacgtacgctccatcggtggctgaagctgacgtggatgtactgctctcaatacccatgttccttcgactctacctacttggacgggtcatgcttctgcactcgaaaatttttaccgatgcttcctcccgaagcattggcgctttaaacaaaattactttcaatacaaggtttgtcatgaaaactctaatgacaatatgtcctggcacagtccttctcgttttttcaatttcctcttggatcatcgccgcatggaccgtccgtgtctgtgagagataccacgataaacaagaagtgacatctaactttctgggtgctatgtggttgatttcaataaccttccttagcataggctatggggacatggttcctcatacttactgtggcaaaggtgtgtgtctcttgaccggcattatgggagccggttgcactgcgctggtggtcgccgttgtggctcgcaagctggagctgaccaaagcagagaagcacgtgcacaactttatgatggacacacagctgacaaagcgcgtgaaaaacgcggctgcgaatgtgctgagagaaacctggctgatatgtaagatgggctag

SEQ ID NO: 126842 - DNA, 1230 bp, Artificial Sequence
  derived and/or modified sequence
atgaacagccacagctacaatggatctgtgggccggcccctgggcagcggccctggggccctgggccgggaccccccagaccctgaggccggccaccccccccagcccccccacagccctggcctgcaggtggtggtggccaagtctgagcccgcccggcccagccctggcagcccccggggccagccccaggaccaggatgatgatgaagatgatgaggaggatgaagctggccggcagagggccagcggcaagcccagcaatgtgggccaccggctgggccaccggcgggccctgtttgagaagaggaagaggctgagtgactatgccctgatcttcggcatgtttggcatcgtggtgatggtgacagaaacagagctgtcctggggcgtgtacaccaaggagagcctgtacagctttgccctgaagtgcctgatcagcctgagcacagccatcctgctgggcctggtggtgctgtaccacgcccgggagatccagctgttcatggtggacaacggggctgatgactggagaattgccatgacctgtgagagggtcttcctgatcagcctggagctggccgtgtgtgccatccaccctgtgcccggccactaccgcttcacctggacagcccggctggccttcacctacgcccccagcgtggccgaggctgatgtggatgtgctgctgagcatccccatgttcctgcggctgtacctgctgggccgggtgatgctgctgcacagcaagatcttcacagatgccagcagccgcagcatcggggccctgaacaagatcaccttcaacaccaggtttgtgatgaagaccctgatgaccatctgccccggcaccgtgctgctggtgttcagcatcagctcctggatcatcgccgcctggacagtgcgggtgtgtgagcgctaccatgacaagcaggaggtgaccagcaacttcctgggcgccatgtggctgatcagcatcaccttcctgagcatcggctatggagacatggtgccccacacctactgtgggaagggcgtgtgcctgctgaccggcatcatgggcgccggctgcacagccctggtggtggccgtggtggccaggaagctggagctgaccaaggccgagaagcacgtgcacaacttcatgatggacacccagctgaccaagagggtgaagaatgctgctgccaacgtgctgcgggagacctggctgatctgcaagatgggctag

SEQ ID NO: 126843 - DNA, 1230 bp, Artificial Sequence
  derived and/or modified sequence
atgaacagccacagctacaacggcagcgtgggccggcccctgggctctggacccggcgcacttggtcgagacccgcccgacccagaagctggtcaccctcctcagccccctcactccccagggctgcaggtcgtcgtggccaaatccgagcccgcccgtccaagcccagggagtcccagaggtcaacctcaggatcaggacgacgatgaggacgatgaagaggacgaggctgggaggcagcgggccagtgggaagccttctaatgtggggcatcggttaggccaccgccgtgcactgttcgaaaagaggaaaagactttctgactacgccctgatatttggtatgtttgggattgtggtgatggtaaccgaaaccgagctttcttggggcgtgtacaccaaggagagtctgtacagtttcgcactgaagtgcctgatttccctcagtacagcaattctgttgggcctggtcgtgctgtatcatgcgagggagatacagctatttatggtagacaacggtgctgacgactggaggattgcaatgacctgtgagcgagtctttttaatctctctcgagttggccgtgtgcgctatacaccccgtcccaggtcactacaggtttacttggactgctcggctggcctttacctacgctcccagcgtggccgaagcagacgttgatgtattgctgtcaatcccgatgttcctcaggctgtatttgctggggcgggtgatgctgcttcactcaaaaattttcactgatgccagttcccggagtattggcgcactgaataagattacctttaatacccgatttgtgatgaaaacactgatgaccatatgtcccggtaccgtgttgttggtcttcagcatatcaagttggatcatagccgcttggactgtgcgagtctgcgagagatatcacgataagcaggaggtgactagcaacttcctgggcgccatgtggctaatctccatcacatttctgtcgattgggtacggagacatggtccctcacacttattgcggaaaaggcgtttgcctgttaaccggcattatgggggccggctgcactgcgctggtcgtcgccgtggtggctcgaaagctggaactgaccaaggcagagaaacatgtgcacaattttatgatggatactcagctcaccaaaagagtcaaaaacgccgcagccaacgttctgcgcgaaacttggctgatctgtaagatgggctag

SEQ ID NO: 126844 - DNA, 1230 bp, Artificial Sequence
  derived and/or modified sequence
atgaactcccactcctacaacgggagcgtcgggaggcctctggggtctgggcctggcgctctgggtcgagacccaccagatcctgaagccggtcacccaccccagccgcctcactctcccggtttacaggtggtggttgctaagagcgaacctgcaaggccttcacccggttctcctcggggacagccccaagatcaagatgacgacgaagatgatgaggaagacgaagctgggcgtcagcgggcttcaggcaagcccagcaacgtgggccaccggttaggacatcgcagggcccttttcgagaagaggaaacgactcagcgactacgccctgatatttggcatgtttggaatagtggttatggttacggagactgagcttagctggggcgtctacacaaaggagagcctgtattcatttgctctgaagtgtttgattagtctttctaccgcaatactgctgggcttagtggtgctgtatcatgcacgagagattcagctgtttatggtggacaacggggcagatgattggaggatcgcgatgacctgtgagcgtgtattcctcatatctctcgaattggcagtctgtgctatccacccggtacccggtcattaccgcttcacctggaccgccagactcgccttcacttacgccccatccgtcgccgaagctgatgtggacgtcctgctttcaattcctatgtttcttagactctacctcttgggcagggtgatgttgctgcattccaaaatcttcacagacgctagttccaggtcgataggggcactgaataaaatcacttttaatacacggttcgttatgaaaactctgatgactatctgtccaggcacggtgttgctggtgttttcaattagctcatggattatcgctgcctggacggtgagggtatgtgaacgctatcacgacaaacaagaggtgacatcgaattttctgggagcaatgtggctcatctctattacattcttaagcatcggctatggcgatatggtgcctcatacatactgcggcaagggggtatgtctgttgactggaatcatgggcgcaggatgcactgcactggtagttgccgtggtggccaggaaacttgagctcactaaagcggaaaagcacgtacataactttatgatggatacccagcttaccaagcgagtgaaaaacgctgccgcaaacgttctccgcgaaacgtggcttatttgcaagatgggttag

SEQ ID NO: 126845 - protein, 731 aa, Artificial Sequence
  derived and/or modified sequence
MDTSGHFHDSGVGDLDEDPKCPCPSSGDEQQQQQQQQQQQQPPPPAPPAAPQQPLGPSLQPQPPQLQQQQQQQQQQQQQQPPHPLSQLAQLQSQPVHPGLLHSSPTAFRAPPSSNSTAILHPSSRQGSQLNLNDHLLGHSPSSTATSGPGGGSRHRQASPLVHRRDSNPFTEIAMSSCKYSGGVMKPLSRLSASRRNLIEAETEGQPLQLFSPSNPPEIVISSREDNHAHQTLLHHPNATHNHQHAGTTASSTTFPKANKRKNQNIGYKLGHRRALFEKRKRLSDYALIFGMFGIVVMVIETELSWGLYSKDSMFSLALKCLISLSTIILLGLIIAYHTREVQLFVIDNGADDWRIAMTYERILYISLEMLVCAIHPIPGEYKFFWTARLAFSYTPSRAEADVDIILSIPMFLRLYLIARVMLLHSKLFTDASSRSIGALNKINFNTRFVMKTLMTICPGTVLLVFSISLWIIAAWTVRVCERYHDQQDVTSNFLGAMWLISITFLSIGYGDMVPHTYCGKGVCLLTGIMGAGCTALVVAVVARKLELTKAEKHVHNFMMDTQLTKRIKNAAANVLRETWLIYKHTKLLKKIDHAKVRKHQRKFLQAIHQLRSVKMEQRKLSDQANTLVDLSKMQNVMYDLITELNDRSEDLEKQIGSLESKLEHLTASFNSLPLLIADTLRQQQQQLLSAIIEARGVSVAVGTTHTPISDSPIGVSSTSFPTPYTSSSSC

SEQ ID NO: 126846 - protein, 418 aa, Artificial Sequence
  derived and/or modified sequence
MFSLALKCLISLSTIILLGLIIAYHTREVQLFVIDNGADDWRIAMTYERILYISLEMLVCAIHPIPGEYKFFWTARLAFSYTPSRAEADVDIILSIPMFLRLYLIARVMLLHSKLFTDASSRSIGALNKINFNTRFVMKTLMTICPGTVLLVFSISLWIIAAWTVRVCERYHDQQDVTSNFLGAMWLISITFLSIGYGDMVPHTYCGKGVCLLTGIMGAGCTALVVAVVARKLELTKAEKHVHNFMMDTQLTKRIKNAAANVLRETWLIYKHTKLLKKIDHAKVRKHQRKFLQAIHQLRSVKMEQRKLSDQANTLVDLSKMQNVMYDLITELNDRSEDLEKQIGSLESKLEHLTASFNSLPLLIADTLRQQQQQLLSAIIEARGVSVAVGTTHTPISDSPIGVSSTSFPTPYTSSSSC

SEQ ID NO: 126847 - protein, 227 aa, Artificial Sequence
  derived and/or modified sequence
PHTLLEDHLLREFFHPLFFLQAPLLLSLPAQYNAFLSGSVWTPGSPREPKQAKERTGAKILVGEIGCLAFFEDIFGARVALGWGLVLQGIQPGPKMDTSGHFHDSGVGDLDEDPKCPCPSSGDEQQQQQQQQQQQQPPPPAPPAAPQQPLGPSLQPQPPQLQQQQQQQQQQQQQQPPHPLSQLAQLQSQPVHPGLLHSSPTAFRPPFVQLHRHPPPFLQARQPAQSQ

SEQ ID NO: 126848 - DNA, 2196 bp, Artificial Sequence
  derived and/or modified sequence
atggacacatccggccattttcacgactccggcgtgggtgatcttgacgaggatcccaagtgcccatgccccagctccggagatgaacaacagcagcagcagcagcagcaacaacaacagcagcccccaccgccggcaccaccagccgcgcctcagcaacctctgggccctagtctgcaacctcagcctccgcaacttcagcagcaacaacagcagcagcagcagcagcagcaacaacagccaccacatccactgagccagttagcccagctgcaatcacagccagtccaccccgggctgctgcatagcagtcctaccgcattcagggctcctccctcgagcaatagcacagcgatactgcacccgtcctcaaggcaggggtcacagctgaatctcaacgatcatctcctgggtcactctccaagctcaaccgccacctctggaccaggaggggggtcaagacacaggcaagcatcccctctcgtgcatcgcagagacagcaacccattcaccgagattgccatgagtagctgcaagtactcaggcggcgtgatgaagccactttctcgattgtcagctagccgtaggaaccttatcgaagccgagaccgaaggccagcccttgcagctcttttccccgtctaacccaccagaaatcgttataagttccagggaagataaccatgcccatcagactctcctccaccatcccaatgccacacacaatcaccagcatgccggcaccaccgcatcctcaacgacattcccaaaggcaaataaacgcaagaaccagaacattggatacaagctcggccatcgccgcgcgctgttcgaaaaacgtaagcgccttagtgactatgccctgatctttgggatgttcggcatagtcgtgatggttatcgagacagaattatcatggggcctatattccaaggattctatgttctcactcgctctgaaatgcctgatctcattaagtacaataatcctcctgggtctcatcattgcctatcacacgcgagaggttcaacttttcgtcatcgataacggggccgatgactggcgcatagctatgacatacgagcgcatcctttacatctccctagagatgctggtgtgcgcgattcaccccatcccaggggaatacaagttcttttggacagcacgtctagcgttttcctacactccaagccgggctgaagctgacgtagatatcatcctgagtatcccgatgtttctgaggctgtatcttatcgcccgagtcatgctactgcacagcaaattatttactgacgcatccagccgcagcatcggcgctctgaataagatcaattttaacactcgatttgtgatgaagacactcatgactatctgccccggcacagtgctcctggtattctcgatctccctgtggatcattgcagcctggaccgtcagggtctgcgagcgctaccacgaccagcaggatgtgaccagtaactttctgggcgcgatgtggctgatttccataacctttctgagtatcgggtacggggacatggttccccatacatactgcgggaaaggagtgtgcctcttgacaggaatcatgggggctggatgcaccgcgctcgtggtcgccgtggtagcccgcaaacttgagttgaccaaagccgagaagcacgttcacaatttcatgatggacacacagttgacaaaacggataaagaacgccgcagccaatgttctcagagagacctggttgatttataagcacactaagttactcaaaaagattgatcacgccaaggtcaggaaacaccaacgcaagttcctacaagctatccaccagcttcggtctgtgaaaatggaacagagaaagcttagcgatcaggctaacacactcgttgacctgagcaaaatgcagaatgtcatgtacgacttgatcaccgaattaaatgacagatctgaggatctggaaaaacagatcggctcactggagtccaaactggaacatctcaccgcttcattcaatagcctccctctccttattgccgataccttaaggcagcagcagcagcagctgttgtctgctatcattgaggccagaggcgtgagcgtagcagttggaaccacccacactcctattagcgacagccccataggggtgtcctctaccagcttccctacaccctacacaagctcaagctcgtgctag

SEQ ID NO: 126849 - DNA, 684 bp, Artificial Sequence
  derived and/or modified sequence
ccgcacaccctgcttgaggatcatctcctccgggaattcttccaccccctgtttttcctacaagctcccctcctcctgtcattgcccgcgcaatacaacgcttttttatccggttccgtctggacccctggtagccccagagaaccaaagcaggcgaaagaaagaaccggagcgaaaattctagtcggagagattgggtgcctcgcattttttgaggacatcttcggcgcacgagttgctttgggatggggacttgtgctgcagggcatccagcccggacctaaaatggacacgtcaggacatttccatgattccggggtgggggatctggatgaggatcctaaatgtccgtgtccctcgagtggagacgaacagcagcagcagcagcagcagcaacagcagcagcagcctcctcctcccgccccaccagccgccccccagcagccactcgggccaagcctgcaaccacagcccccgcagctccagcagcagcaacagcagcagcagcagcaacaacaacagcaaccgccacaccccctgtcacaactggcccagcttcagagtcagcctgtgcaccccggacttctccacagttcccccacagccttcagaccaccattcgttcaattacatcgtcaccctcctcccttcttacaggcccggcaaccggcacagtcacagtag

SEQ ID NO: 126850 - DNA, 2196 bp, Artificial Sequence
  derived and/or modified sequence
atggacaccagcggccacttccatgacagcggcgtgggggacctggatgaggaccccaagtgcccctgccccagcagtggagatgagcagcagcagcagcagcagcagcagcagcagcagcagcccccacctccagcccctcctgctgccccccagcagcccctgggccccagcctgcagccccagcccccccagctgcagcagcagcagcagcagcagcagcagcagcagcagcagcagcccccccaccccctgagccagctggcccagctgcagagccagcctgtgcaccctggcctgctgcacagcagccccacagccttccgggccccacccagcagcaacagcacagccatcctgcaccccagcagccggcagggcagccagctgaacctgaatgaccacctgctgggccacagccccagcagcacagccaccagcggccctgggggcggcagccgccaccggcaggccagccccctggtgcaccggcgggacagcaaccccttcacagaaattgccatgagcagctgcaagtacagcggaggagtgatgaagcccctgagccggctgagcgccagcagaagaaacctgattgaagctgagacagagggccagcccctgcagctgttcagccccagcaaccccccagaaattgtcatcagcagccgggaggacaaccacgcccaccagaccctgctgcaccaccccaatgccacccacaaccaccagcacgccggcaccacagccagcagcaccaccttccccaaggccaacaagaggaagaaccagaacatcggctacaagctgggccacagaagagccctgtttgagaagaggaagaggctgagtgactatgccctgatcttcggcatgtttggaattgtggtgatggtgattgaaacagagctgtcctggggcctgtacagcaaggacagcatgttcagcctggccctgaagtgcctgatcagcctgagcaccatcatcctgctgggcctcatcatcgcctaccacacccgggaggtgcagctgtttgtgattgacaatggagcagatgactggagaattgccatgacctatgaaagaatcctgtacatcagcctggagatgctggtgtgtgccatccaccccatccctggagagtacaagttcttctggacagcccggctggccttctcctacacccccagcagagctgaggctgatgtggacatcatcctgagcatccccatgttcctgcggctgtacctgattgcccgggtgatgctgctgcacagcaagctgttcacagatgccagcagccgcagcattggagccctgaacaagatcaacttcaacaccaggtttgtgatgaagaccctgatgaccatctgccccggcaccgtgctgctggtgttcagcatcagcctgtggatcatcgccgcctggacagtgcgggtgtgtgagcgctaccatgaccagcaggatgtgaccagcaacttcctgggcgccatgtggctgatcagcatcaccttcctgagcatcggctacggggacatggtgccccacacctactgtgggaaaggagtgtgcctgctgaccggcatcatgggcgccggctgcacagccctggtggtggccgtggtggccaggaagctggagctgaccaaggccgagaagcacgtgcacaacttcatgatggacacccagctgaccaagaggatcaagaatgctgctgccaacgtgctgcgggagacctggctgatctacaagcacaccaagctgctgaagaagattgaccacgccaaggtgaggaagcaccagaggaagttcctgcaggccatccaccagctgcggtctgtgaagatggagcagaggaagctgagtgaccaggccaacaccctggtggacctgagcaagatgcagaatgtgatgtatgacctgatcacagagctgaatgacagaagtgaggacctggagaagcagatcggcagcctggagagcaagctggagcacctgacagccagcttcaacagcctgcccctgctgattgctgacaccctgcggcagcagcagcagcagctgctgagcgccatcatcgaggcccggggcgtgtctgtggccgtgggcaccacccacacccccatcagtgacagccccatcggcgtgagcagcaccagcttccccaccccctacaccagcagcagcagctgctag

SEQ ID NO: 126851 - DNA, 684 bp, Artificial Sequence
  derived and/or modified sequence
ccccacaccctgctggaggaccacctgctgcgggagttcttccaccccctcttcttcctgcaggcccccctgctgctgagcctgcctgcccagtacaatgccttcctgagcggctctgtgtggaccccaggcagcccccgggagcccaagcaggccaaggagaggactggagccaagatcctggtgggggagatcggctgcctggccttctttgaggacatctttggagcccgggtggccctgggctggggcctggtgctgcagggcatccagcccggccccaagatggacaccagcggccacttccatgattctggagtgggggacctggatgaggaccccaagtgcccctgccccagcagtggagatgagcagcagcagcagcagcagcagcagcagcagcagcagcccccacctccagcccccccagctgccccccagcagcccctgggccccagcctgcagccccagcccccccagctgcagcagcagcagcagcagcagcagcagcagcagcagcagcagcccccccaccccctgagccagctggcccagctgcagagccagcctgtgcaccctggcctgctgcacagcagccccacagccttccggcccccatttgtgcagctgcaccgccaccccccacccttcctgcaggcccggcagcctgcccagagccagtag

SEQ ID NO: 126852 - DNA, 2196 bp, Artificial Sequence
  derived and/or modified sequence
atggacaccagcggccacttccacgacagcggcgtgggcgacctggatgaagatcctaaatgtccatgtccttctagtggcgatgagcagcaacaacagcagcagcagcagcagcagcaacagcctccgccccccgccccccccgctgcccctcaacaacccttggggccctcgcttcagccacagccacctcagctgcaacagcaacagcaacagcagcagcagcagcaacaacaacagcctccccaccctctgtcacaactagcccaacttcagtctcagccagttcatccgggcttgcttcactcctctcccaccgcctttcgagcaccgccgtctagtaatagtacagccattctacacccgtcctccaggcagggaagccagctgaacctgaatgatcatttgttagggcactctcctagctctaccgccacctccggacctggtggtggaagtaggcataggcaagctagtcccctcgtccatcggagagactccaacccttttactgagattgccatgagcagctgtaagtatagtggcggggtgatgaaacccctctccagactctccgcttcgcgtagaaatctgatcgaggcggagacagagggccagccgctgcagctattctcgccttcgaacccgcctgaaattgttatttcttctcgcgaagacaatcacgcccaccagacactgttgcatcatcctaatgctacacacaaccatcagcacgctggcaccacagccagctctaccacctttccaaaagccaacaagcggaaaaatcagaacatcggctataaactcggccatcggcgcgctctgttcgagaagcgaaaacggctcagcgattacgctctcatttttgggatgttcggaatagttgtgatggttatagaaaccgaattgtcctggggactgtattccaaggattccatgttcagtctggccctgaagtgccttatttccttgtcgactattatcctcttagggctgatcattgcttatcacacccgcgaagtccagctgttcgttatcgacaatggcgccgacgattggagaatcgctatgacatacgaacggatattgtatatttccctggaaatgctggtgtgcgccattcacccaatcccaggagaatataaattcttttggactgcaaggctcgcgttctcatacacaccatcaagagctgaagctgacgtggacatcatcctatccataccaatgtttctgagactgtacctgatcgccagggttatgctgttgcactccaagctctttacggacgcttcatctagatcaattggcgccttgaataaaattaatttcaacactcgcttcgtcatgaagacacttatgaccatatgccccggtacagtcctgcttgttttttccatttccctgtggattatagcagcgtggaccgtaagagtatgtgaacgctaccatgaccagcaggatgtcactagcaattttctcggcgccatgtggcttatatctatcacatttttgagtatcggatatggagacatggttccacatacttactgcggtaagggggtgtgtctcctcacgggcataatgggggccggatgtacagcgcttgtggtagccgtggtggctcggaagctggagctaacaaaggctgaaaaacacgttcataacttcatgatggacacgcagctcacgaagcggattaagaacgccgccgccaacgtcctgagggaaacctggctgatttataaacataccaagctcctaaaaaaaatcgatcacgccaaggtccgtaaacatcagcgcaaattccttcaggccattcaccagctccgtagtgtgaagatggagcagcgcaaactgtctgaccaagcaaatacacttgtcgacttgtctaagatgcagaacgtcatgtatgacctaattacagaactcaacgacaggtctgaggacctggaaaaacaaatcggttcactcgaatccaagctcgaacatcttacagcgtccttcaacagcctgccactgctgatcgccgacacactacgccagcagcagcagcagctcttaagtgctattatagaggccaggggcgtcagtgtcgccgtggggacgactcacacgccgatatccgattcaccaatcggagtgtctagcacgagcttccctaccccctacactagtagctccagttgttag

SEQ ID NO: 126853 - DNA, 684 bp, Artificial Sequence
  derived and/or modified sequence
ccccacaccctgctggaggaccacctgctgcgggagttcttccaccctctgtttttcctgcaggccccgctcctgttgagtctgccagcccaatacaacgcgttcctgtccggtagcgtctggaccccaggaagtcctcgggagcccaaacaggcgaaggaacgaaccggagccaagatcctcgtgggtgaaataggctgcctggccttcttcgaggacatcttcggcgcgcgcgtcgctctgggatggggcctggtacttcagggcatacagcctggccccaaaatggatacctctggtcattttcatgacagtggcgttggcgacctagatgaggatccaaaatgcccatgcccctcttccggtgatgaacagcagcaacagcagcagcagcagcagcaacagcaaccgccgccacctgctcccccggccgctccccagcagccgttgggcccatctctacagccacagcccccccagctgcaacagcaacagcagcagcagcagcaacagcagcagcaacagccccctcatcccctctcgcaactggctcaactacaatcccagccagttcaccctgggttgcttcactcaagccccaccgcattccggcccccttttgtccagctgcacaggcatcctccacctttccttcaggcacggcagcccgcgcagtctcagtag

SEQ ID NO: 126854 - DNA, 2962 bp, Artificial Sequence
  derived and/or modified sequence
ttgagccagcgaggagtgaagctgagcctggcctcacacgctcctagaggaccacctcctgagagagttctttcaccccctcttctttctccaagctcccctcctgctctccctccctgcccaatacaatgcattcttgagtggcagcgtctggactccaggcagccccagagaaccgaagcaagccaaagagaggactggagccaagatactggtgggggagattggatgcctggctttctttgaggacatctttggagcgagggtggctttggggtgggggcttgtgctgcagggaatacagccaggccccaagatggacacttctgggcacttccatgactcgggggtgggggacttggatgaagaccccaagtgcccctgtccatcctctggggatgagcagcagcagcagcagcagcagcaacagcagcagcagccaccaccgccagcgccaccagcagccccccagcagcccctgggaccctcgctgcagcctcagcctccgcagcttcagcagcagcagcagcagcagcagcagcagcagcagcagcagccaccgcatcccctgtctcagctcgcccaactccagagccagcccgtccaccctggcctgctgcactcctctcccaccgctttcagggcccccccttcgtccaactccaccgccatcctccacccttcctccaggcaaggcagccagctcaatctcaatgaccacttgcttggccactctccaagttccacagctacaagtgggcctggcggaggcagccggcaccgacaggccagccccctggtgcaccggcgggacagcaaccccttcacggagatcgccatgagctcctgcaagtatagcggtggggtcatgaagcccctcagccgcctcagcgcctcccggaggaacctcatcgaggccgagactgagggccaacccctccagcttttcagccctagcaaccccccggagatcgtcatctcctcccgggaggacaaccatgcccaccagaccctgctccatcaccctaatgccacccacaaccaccagcatgccggcaccaccgccagcagcaccaccttccccaaagccaacaagcggaaaaaccaaaacattggctataagctgggacacaggagggccctgtttgaaaagagaaagcgactgagtgactatgctctgatttttgggatgtttggaattgttgttatggtgatagagaccgagctctcttggggtttgtactcaaaggactccatgttttcgttggccctgaaatgccttatcagtctgtccaccatcatccttttgggcttgatcatcgcctaccacacacgtgaagtccagctcttcgtgatcgacaatggcgcggatgactggcggatagccatgacctacgagcgcatcctgtacatcagcctggagatgctggtgtgcgccatccaccccattcctggcgagtacaagttcttctggacggcacgcctggccttctcctacacaccctcccgggcggaggccgatgtggacatcatcctgtctatccccatgttcctgcgcctgtacctgatcgcccgagtcatgctgctgcacagcaagctcttcaccgatgcctcgtcccgcagcatcggggccctcaacaagatcaacttcaacacccgctttgtcatgaagacgctcatgaccatctgccctggcactgtgctgctcgtgttcagcatctctctgtggatcattgctgcctggaccgtccgtgtctgtgaaaggtaccatgaccagcaggacgtaactagtaactttctgggtgccatgtggctcatctccatcacattcctttccattggttatggggacatggtgccccacacatactgtgggaaaggtgtctgtctcctcactggcatcatgggtgcaggctgcactgcccttgtggtggccgtggtggcccgaaagctggaactcaccaaagcggagaagcacgttcataacttcatgatggacactcagctcaccaagcggatcaagaatgctgcagccaatgtccttcgggaaacatggttaatctataaacacacaaagctgctaaagaagattgaccatgccaaagtgaggaaacaccagaggaagttcctccaagctatccaccagttgaggagcgtcaagatggaacagaggaagctgagtgaccaagccaacactctggtggacctttccaagatgcagaatgtcatgtatgacttaatcacagaactcaatgaccggagcgaagacctggagaagcagattggcagcctggagtcgaagctggagcatctcaccgccagcttcaactccctgccgctgctcatcgccgacaccctgcgccagcagcagcagcagctcctgtctgccatcatcgaggcccggggtgtcagcgtggcagtgggcaccacccacaccccaatctccgatagccccattggggtcagctccacctccttcccgaccccgtacacaagttcaagcagttgctaaataaatctccccactccagaagcattacccataggtcttaagatgcaaatcaactctctcctggtcgctttgccatcaagaaacattcagaccagggaacggaaagaagagagaccgagctaattaactaactcatgttcattcagcgtgcttggtccgacatgccttgaaaccagaaatctaatctctgtttaggtgcctctacttgggagcgggaagaggagatgacaggaagcgacgcctctggcagggcccttgctgcagagttggtggagaacagaaatccacgctcaatctcaggtcttcacgcggggggtgggggtcagatgcactgaagtagccaacagcgaagccagtccagaagaggggtccgctgggagggagggttgtgtcaggcttgggggatgggctcttcgccatgggggtctttgaacacacctctctcctttc

SEQ ID NO: 126855 - DNA, 684 bp, Artificial Sequence
  derived and/or modified sequence
cctcacacgctcctagaggaccacctcctgagagagttctttcaccccctcttctttctccaagctcccctcctgctctccctccctgcccaatacaatgcattcttgagtggcagcgtctggactccaggcagccccagagaaccgaagcaagccaaagagaggactggagccaagatactggtgggggagattggatgcctggctttctttgaggacatctttggagcgagggtggctttggggtgggggcttgtgctgcagggaatacagccaggccccaagatggacacttctgggcacttccatgactcgggggtgggggacttggatgaagaccccaagtgcccctgtccatcctctggggatgagcagcagcagcagcagcagcagcaacagcagcagcagccaccaccgccagcgccaccagcagccccccagcagcccctgggaccctcgctgcagcctcagcctccgcagcttcagcagcagcagcagcagcagcagcagcagcagcagcagcagccaccgcatcccctgtctcagctcgcccaactccagagccagcccgtccaccctggcctgctgcactcctctcccaccgctttcaggccccccttcgtccaactccaccgccatcctccacccttcctccaggcaaggcagccagctcaatctcaatga

SEQ ID NO: 126856 - DNA, 2196 bp, Artificial Sequence
  derived and/or modified sequence
atggacacaagtggccactttcacgactctggtgtcggcgacttggatgaggatcctaaatgcccctgccccagcagcggcgatgaacagcagcagcaacaacagcagcagcaacaacagcaaccgccacccccagccccacccgctgccccacagcaacctctcgggcctagcctccagccacagcctccccagctgcaacaacagcagcagcagcagcaacagcaacagcagcagcaaccacctcacccgctgtcacagttagcgcagcttcagtcccagcctgtgcatccaggtctactgcactcgtcccctaccgcattccgcgcaccgccttctagcaatagtacagcaattctccacccctcgtcacgacaggggtctcagcttaatctgaacgaccacctgctggggcattctccatcttctacagcgacttccggtcctggaggaggcagtagacatagacaggccagtcctttagtgcaccgccgtgattctaatccgttcaccgagatcgctatgagctcttgcaagtattctggcggagtgatgaaacctctatctaggctgtctgcatctagacgaaatctgatcgaagcggaaacggagggacagcctctgcaactgttcagcccttcaaacccacccgaaattgtgatcagcagcagggaagataaccatgcccaccagactctgctgcatcaccctaatgcaacccacaaccatcaacacgcaggcacgactgcctctagcacaacttttccgaaggcaaacaaaaggaaaaatcaaaatatcggctataaactagggcaccgcagggccctgtttgagaaaagaaaaaggttgtctgactacgctctgatctttgggatgttcgggatcgtggtgatggtgatagagaccgagctgagctggggtctatattctaaggattcaatgttcagtctggcccttaaatgcctcatctctctgagcacaataattctgttaggtctcattatcgcctaccatacacgggaagtccagctctttgtgatagataatggagcagacgactggagaatcgccatgacttacgaaagaatcctctacatttccttggagatgctggtctgtgccatccacccgattcccggagagtataagttcttttggaccgcgcgactcgcattctcttataccccctcaagggcagaagccgatgtggatatcatattgtcaatccccatgtttctgaggctctaccttatagctagagtaatgctgcttcactctaaacttttcactgatgcatctagtagatccattggggctctaaataagatcaactttaacaccaggttcgttatgaaaaccttaatgaccatatgtcctggtactgtcctgctggtcttcagcatttccttatggatcatcgccgcttggactgtccgtgtatgcgagcggtatcatgaccagcaggatgtcacttccaattttttgggggctatgtggctcatctcaatcacatttctgagtatcggctatggcgacatggtgccacacacatactgtggaaagggggtttgcctgctgacgggcatcatgggcgctggctgcactgccttggtggtagcagtcgtggcaagaaagctggagcttacaaaggctgaaaaacatgtccacaattttatgatggatacccagctgactaaaaggatcaaaaatgctgcagctaacgtcttgagagaaacctggctgatctataaacacacaaagcttttgaagaaaattgatcacgccaaagtgcgcaaacaccaacgtaagttcctgcaggccattcatcagctgcgttccgtcaaaatggaacagagaaaactgtcagatcaggctaacactctggtagacctgtcaaaaatgcaaaacgtgatgtatgatctgataaccgagctgaacgaccggtctgaggaccttgagaagcagatcggatcacttgagagcaagctggagcatcttactgccagctttaatagcctcccattgctcatcgctgacacactgagacaacagcaacagcagctcctgtcagcaatcattgaagcaaggggcgtttcagtggcggtgggcactacacacacacccatctctgattctcctatcggagtgtcctctacttcatttcccactccatacaccagctcctcttcttgttag

SEQ ID NO: 126857 - DNA, 684 bp, Artificial Sequence
  derived and/or modified sequence
ccacacacattgctcgaggaccatctgcttcgtgagttctttcatccactgttttttcttcaggcccctctcctgctttctctgccagctcaatacaacgcatttctgtctggatcagtatggaccccagggagtcctagagaacccaaacaagcaaaagaacggaccggggcaaaaatcctggtgggcgaaatcggctgcttagctttcttcgaggatatcttcggcgctagagtcgctctcgggtggggtcttgtgctgcaaggcatccagcctgggcctaaaatggacacctctggacatttccacgactctggagtcggcgacctcgacgaggatcctaaatgcccctgcccatcaagtggggatgagcaacagcagcagcagcaacagcagcagcagcagcaaccgcctccccctgctccgcctgccgctccccagcaaccattgggcccatccttgcagcctcagccaccacaactgcagcagcaacagcagcagcagcagcagcagcaacagcagcagccacctcatccactgtcccagctcgcgcaattgcagtctcagcctgtgcaccccggactgctgcattcatccccaacagctttccgacccccttttgtacagctccaccgccaccctcctccctttctgcaggccagacagccagcacaaagccagtag

SEQ ID NO: 126858 - DNA, 2196 bp, Artificial Sequence
  derived and/or modified sequence
atggacaccagcggccacttccacgacagcggcgtgggcgacctggacgaggaccccaagtgcccctgccccagcagcggcgacgagcagcagcagcagcagcagcagcagcagcagcagcagccccccccccccgccccccccgccgccccccagcagcccctgggccccagcctgcagccccagcccccccagctgcagcagcagcagcagcagcagcagcagcagcagcagcagcagcccccccaccccctgagccagctggcccagctgcagagccagcccgtgcaccccggcctgctgcacagcagccccaccgccttcagagccccccccagcagcaacagcaccgccatcctgcaccccagcagcagacagggcagccagctgaacctgaacgaccacctgctgggccacagccccagcagcaccgccaccagcggccccggcggcggcagcagacacagacaggccagccccctggtgcacagaagagacagcaaccccttcaccgagatcgccatgagcagctgcaagtacagcggcggcgtgatgaagcccctgagcagactgagcgccagcagaagaaacctgatcgaggccgagaccgagggccagcccctgcagctgttcagccccagcaacccccccgagatcgtgatcagcagcagagaggacaaccacgcccaccagaccctgctgcaccaccccaacgccacccacaaccaccagcacgccggcaccaccgccagcagcaccaccttccccaaggccaacaagagaaagaaccagaacatcggctacaagctgggccacagaagagccctgttcgagaagagaaagagactgagcgactacgccctgatcttcggcatgttcggcatcgtggtgatggtgatcgagaccgagctgagctggggcctgtacagcaaggacagcatgttcagcctggccctgaagtgcctgatcagcctgagcaccatcatcctgctgggcctgatcatcgcctaccacaccagagaggtgcagctgttcgtgatcgacaacggcgccgacgactggagaatcgccatgacctacgagagaatcctgtacatcagcctggagatgctggtgtgcgccatccaccccatccccggcgagtacaagttcttctggaccgccagactggccttcagctacacccccagcagagccgaggccgacgtggacatcatcctgagcatccccatgttcctgagactgtacctgatcgccagagtgatgctgctgcacagcaagctgttcaccgacgccagcagcagaagcatcggcgccctgaacaagatcaacttcaacaccagattcgtgatgaagaccctgatgaccatctgccccggcaccgtgctgctggtgttcagcatcagcctgtggatcatcgccgcctggaccgtgagagtgtgcgagagataccacgaccagcaggacgtgaccagcaacttcctgggcgccatgtggctgatcagcatcaccttcctgagcatcggctacggcgacatggtgccccacacctactgcggcaagggcgtgtgcctgctgaccggcatcatgggcgccggctgcaccgccctggtggtggccgtggtggccagaaagctggagctgaccaaggccgagaagcacgtgcacaacttcatgatggacacccagctgaccaagagaatcaagaacgccgccgccaacgtgctgagagagacctggctgatctacaagcacaccaagctgctgaagaagatcgaccacgccaaggtgagaaagcaccagagaaagttcctgcaggccatccaccagctgagaagcgtgaagatggagcagagaaagctgagcgaccaggccaacaccctggtggacctgagcaagatgcagaacgtgatgtacgacctgatcaccgagctgaacgacagaagcgaggacctggagaagcagatcggcagcctggagagcaagctggagcacctgaccgccagcttcaacagcctgcccctgctgatcgccgacaccctgagacagcagcagcagcagctgctgagcgccatcatcgaggccagaggcgtgagcgtggccgtgggcaccacccacacccccatcagcgacagccccatcggcgtgagcagcaccagcttccccaccccctacaccagcagcagcagctgctag

SEQ ID NO: 126859 - DNA, 684 bp, Artificial Sequence
  derived and/or modified sequence
ccccacaccctgctggaggaccacctgctgagagagttcttccaccccctgttcttcctgcaggcccccctgctgctgagcctgcccgcccagtacaacgccttcctgagcggcagcgtgtggacccccggcagccccagagagcccaagcaggccaaggagagaaccggcgccaagatcctggtgggcgagatcggctgcctggccttcttcgaggacatcttcggcgccagagtggccctgggctggggcctggtgctgcagggcatccagcccggccccaagatggacaccagcggccacttccacgacagcggcgtgggcgacctggacgaggaccccaagtgcccctgccccagcagcggcgacgagcagcagcagcagcagcagcagcagcagcagcagcagccccccccccccgccccccccgccgccccccagcagcccctgggccccagcctgcagccccagcccccccagctgcagcagcagcagcagcagcagcagcagcagcagcagcagcagcccccccaccccctgagccagctggcccagctgcagagccagcccgtgcaccccggcctgctgcacagcagccccaccgccttcagaccccccttcgtgcagctgcacagacaccccccccccttcctgcaggccagacagcccgcccagagccagtag

SEQ ID NO: 126860 - protein, 427 aa, Artificial Sequence
  derived and/or modified sequence
MGGDLVLGLGALRRRKRLLEQEKSLAGWALVLAGTGIGLMVLHAEMLWFGGCSWALYLFLVKCTISISTFLLLCLIVAFHAKEVQLFMTDNGLRDWRVALTGRQAAQIVLELVVCGLHPAPVRGPPCVQDLGAPLTSPQPWPGFLGQGEALLSLAMLLRLYLVPRAVLLRSGVLLNASYRSIGALNQVRFRHWFVAKLYMNTHPGRLLLGLTLGLWLTTAWVLSVAERQAVNATGHLSDTLWLIPITFLTIGYGDVVPGTMWGKIVCLCTGVMGVCCTALLVAVVARKLEFNKAEKHVHNFMMDIQYTKEMKESAARVLQEAWMFYKHTRRKESHAARRHQRKLLAAINAFRQVRLKHRKLREQVNSMVDISKMHMILYDLQQNLSSSHRALEKQIDTLAGKLDALTELLSTALGPRQLPEPSQQSK

SEQ ID NO: 126861 - protein, 295 aa, Artificial Sequence
  derived and/or modified sequence
MHDQHFHLLTPLPHRGLSCQRGPAVHDRQRAAGLARGADRAAGNASYRSIGALNQVRFRHWFVAKLYMNTHPGRLLLGLTLGLWLTTAWVLSVAERQAVNATGHLSDTLWLIPITFLTIGYGDVVPGTMWGKIVCLCTGVMGVCCTALLVAVVARKLEFNKAEKHVHNFMMDIQYTKEMKESAARVLQEAWMFYKHTRRKESHAARRHQRKLLAAINAFRQVRLKHRKLREQVNSMVDISKMHMILYDLQQNLSSSHRALEKQIDTLAGKLDALTELLSTALGPRQLPEPSQQSK

SEQ ID NO: 126862 - DNA, 1284 bp, Artificial Sequence
  derived and/or modified sequence
atgggcggcgatcttgtgcttggactgggcgcactgaggcgccggaaacgactactggaacaagaaaagtctctggcaggatgggcgctggtgctagctggaaccggcattggactcatggttctccacgccgaaatgctttggttcggtggttgtagctgggccctgtatttattcctggtgaagtgcaccatctccatctcgacctttctacttttgtgcctgatcgtggcttttcacgccaaggaggttcagctttttatgaccgataatgggcttagagattggcgtgtggccctaacaggccgacaggccgcccagattgtcctagagctagtggtgtgcgggcttcatcctgcacccgttcgggggcccccttgtgtgcaggatctcggggctcctctgacttctccccagccttggccgggttttttagggcagggcgaagccctgctttcactagcaatgctcttgcggttgtacctcgttcccagggccgttctcctccggagcggggtcctgctgaatgcctcttaccgctccatcggtgccctgaatcaagttagatttagacattggttcgtggcaaagctgtatatgaatacccaccctggccgcttgctcctaggtcttactctggggctttggctgacaacagcatgggtactgagcgtggccgaacggcaagctgtgaatgccaccggacatctgtcagatactctctggctgattcctattaccttcctcaccatcgggtacggggacgttgtcccgggcactatgtggggaaaaatcgtttgcctctgcaccggcgtcatgggcgtttgttgcaccgccttgcttgtcgcagtggtcgcaagaaagctggaatttaataaggcagaaaagcacgtgcacaactttatgatggatattcagtataccaaggagatgaaggaatcagcagcccgtgtccttcaagaagcgtggatgttctacaagcatacccggcgtaaggagtcgcacgccgcccgccgacatcagagaaagctgttggcggccatcaacgcattccggcaggtcagacttaagcatcggaagctccgggagcaagtgaactctatggtggatatttctaagatgcatatgattctctacgatctgcagcagaacctctcctcatcccatagagccctggagaaacagatcgacaccttagctgggaagctggatgccctgactgagctgctttctaccgcactgggtccccgacagctgccagagccttcacaacaaagcaaatag

SEQ ID NO: 126863 - DNA, 1284 bp, Artificial Sequence
  derived and/or modified sequence
atgggcggggacctggtgctgggcctgggcgccctgcggcggaggaagaggctgctggagcaggagaagagcctggccggctgggccctggtgctggccggcactggaattggcctgatggtgctgcacgccgagatgctgtggtttggaggctgctcctgggccctgtacctgttcctggtgaagtgcaccatcagcatcagcaccttcctgctgctgtgcctgattgtggccttccacgccaaggaggtgcagctgttcatgacagacaatggcctgcgggactggagggtggccctgaccggccggcaggccgcccagatcgtgctggagctggtggtgtgtggcctgcacccagcccctgtgcggggccccccctgtgtgcaggacctgggcgcccccctgaccagcccccagccctggccaggcttcctgggccagggcgaggccctgctgagcctggccatgctgctgcggctgtacctggtgcccagggctgtgctgctgcggtctggagtgctgctgaatgccagctaccgcagcatcggggccctgaaccaggtgcgcttccgccactggtttgtggccaagctgtacatgaacacccaccctggccgcctgctgctgggcctgaccctgggcctgtggctgaccacagcctgggtgctgtctgtggccgagcggcaggccgtgaatgccaccggccacctgagtgacaccctgtggctgatccccatcaccttcctgaccatcggctatggagatgtggtgcccggcaccatgtggggcaagatcgtgtgcctgtgcaccggggtgatgggcgtgtgctgcacagccctgctggtggccgtggtggccaggaagctggagttcaacaaggccgagaagcacgtgcacaacttcatgatggacatccagtacaccaaggagatgaaggagagcgctgcccgggtgctgcaggaggcctggatgttctacaagcacaccaggaggaaggagagccacgccgcccggcggcaccagaggaagctgctggccgccatcaatgccttccggcaggtgcggctgaagcacaggaagctgcgggagcaggtgaacagcatggtggacatcagcaagatgcacatgatcctgtatgacctgcagcagaacctgagcagcagccaccgggccctggagaagcagattgacaccctggccggcaagctggatgccctgacagagctgctgagcacagccctgggcccccggcagctgcctgagcccagccagcagagcaagtag

SEQ ID NO: 126864 - DNA, 1284 bp, Artificial Sequence
  derived and/or modified sequence
atgggcggcgacctggtgctgggcctgggcgccctgcggcggcggaagcgattattggagcaggagaagtctctcgccggctgggctctcgtgcttgcagggacgggtattgggcttatggtgctccacgctgagatgctgtggttcgggggctgctcctgggccctttacctgtttctggtaaagtgtaccatttctattagtacttttctgctcctgtgcttaatcgtggccttccatgcaaaggaagttcagctcttcatgactgacaacgggctgcgggactggcgggttgctctgacaggacgacaagccgcccagatcgttttggagctcgtcgtttgtggtctacaccccgccccggtgagagggccgccctgcgtccaagacctgggtgccccccttacctcccctcagccttggccgggatttctgggtcagggcgaagcacttctgagcctggctatgctcttgcggctatatctagtccctagggccgtactgctgagatcaggcgtattattgaacgcctcgtatagatccatcggcgcactcaatcaggtcaggttccggcactggtttgtcgccaaactttacatgaacactcatcctggcagattactactgggtctgacacttggactctggttgactactgcatgggtgctttccgttgccgagcggcaggccgtcaatgcgacaggtcatctgagtgatacattgtggctgattcccataaccttcctgactattgggtacggagatgtggttccaggtaccatgtggggaaaaattgtctgtctatgcacaggtgtgatgggcgtctgctgcacagccctgctggttgctgtagtggcgagaaaattagagtttaacaaggccgagaaacatgtgcacaatttcatgatggacatccagtacactaaagagatgaaggaatcggcagcgagggtgctgcaggaggcctggatgttttataaacacactaggcgcaaagaaagtcacgcagcccgccgtcaccaacgcaagttgctggcagcgatcaatgccttcagacaggtgcgcctcaagcaccgcaagctccgcgaacaggtcaatagtatggttgacattagtaagatgcacatgatcttgtacgacctgcagcagaacctgagttcctctcatcgagccctagagaaacagattgacactctggctggcaagctcgacgctctgaccgaactattatcaactgccctcggacctcgccaactgcctgaaccgagccagcagtcaaagtag

SEQ ID NO: 126865 - DNA, 2240 bp, Artificial Sequence
  derived and/or modified sequence
gtccttcggtgtctgggtgtggtgagtagaggtgtgtgtcacaaagtacagaccattgtgtgtgacaaagcccatcgtgtgtctgtgtgtgtctttatccacgtggatggacgtctctttcttgctctgccccaagacacaccctagcccctccttattctcaaaagggggagctggggagcctccccctaccctggggcctcccctgcccctccccgccctgcctggccgtcaccactccccagagggcacagggctctgctgtgcctcagagcaaaagtcccagagccagcagagcaggctgacgacctgcaagccacagtggctgccctgtgcgtgctgcgaggtgggggaccctgggcaggaagctggctgagccccaagaccccgggggccatgggcggggatctggtgcttggcctgggggccttgagacgccgaaagcgcttgctggagcaggagaagtctctggccggctgggcactggtgctggcaggaactggcattggactcatggtgctgcatgcagagatgctgtggttcggggggtgctcgtgggcgctctacctgttcctggttaaatgcacgatcagcatttccaccttcttactcctctgcctcatcgtggcctttcatgccaaagaggtccagctgttcatgaccgacaacgggctgcgggactggcgcgtggcgctgaccgggcggcaggcggcgcagatcgtgctggagctggtggtgtgtgggctgcacccggcgcccgtgcggggcccgccgtgcgtgcaggatttaggggcgccgctgacctccccgcagccctggccgggattcctgggccaaggggaagcgctgctgtccctggccatgctgctgcgtctctacctggtgccccgcgccgtgctcctgcgcagcggcgtcctgctcaacgcttcctaccgcagcatcggcgctctcaatcaagtccgcttccgccactggttcgtggccaagctttacatgaacacgcaccctggccgcctgctgctcggcctcacgcttggcctctggctgaccaccgcctgggtgctgtccgtggccgagaggcaggctgttaatgccactgggcacctttcagacacactttggctgatccccatcacattcctgaccatcggctatggtgacgtggtgccgggcaccatgtggggcaagatcgtctgcctgtgcactggagtcatgggtgtctgctgcacagccctgctggtggccgtggtggcccggaagctggagtttaacaaggcagagaagcacgtgcacaacttcatgatggatatccagtataccaaagagatgaaggagtccgctgcccgagtgctacaagaagcctggatgttctacaaacatactcgcaggaaggagtctcatgctgcccgcaggcatcagcgcaagctgctggccgccatcaacgcgttccgccaggtgcggctgaaacaccggaagctccgggaacaagtgaactccatggtggacatctccaagatgcacatgatcctgtatgacctgcagcagaatctgagcagctcacaccgggccctggagaaacagattgacacgctggcggggaagctggatgccctgactgagctgcttagcactgccctggggccgaggcagcttccagaacccagccagcagtccaagtagctggacccacgaggaggaaccaggctactttccccagtactgaggtggtggacatcgtctctgccactcctgacccagccctgaacaaagcacctcaagtgcaaggaccaaagggggccctggcttggagtgggttggcttgctgatggctgctggaggggacgctggctaaagtgggtaggccttggcccacctgaggccccaggtgggaacatggtcacccccactctgcataccctcatcaaaaacactctcactatgctgctatggacgacctccagctctcagttacaagtgcaggcgactggaggcaggactcctgggtccctgggaaagagggtactaggggcccggatccaggattctgggaggcttcagttaccgctggccgagctgaagaactgggtatgaggctggggcggggctggaggtggcgccccctggtgggacaacaaagaggacaccatttttccagagctgcagagagcacctggtggggaggaagaagtgtaactcaccagcctctgctcttatctttgtaataaatgttaaagccagaa

SEQ ID NO: 126866 - DNA, 1284 bp, Artificial Sequence
  derived and/or modified sequence
atgggcggagatctggtcctcggcttgggggctcttaggcgcagaaagagactattggaacaggagaagtccttagctggatgggccttggtgctggcaggaaccgggatcggcctcatggtgctgcatgccgagatgctctggttcggtggctgctcttgggctttgtacctcttcctggtgaagtgcaccattagcatctccacctttcttttattatgtcttatcgtggccttccacgctaaggaagtgcagctgttcatgactgataacggcctccgagattggagagtggcactgacaggtaggcaggcagctcaaatcgttctggagctggtagtttgtggactgcacccagcgcctgtgagagggcctccatgcgtccaggacttgggggctccactgacctcgccgcagccctggccaggcttcctcggacaaggtgaggcccttctttcgctcgccatgctcctcaggctttacctcgtgcctcgtgcagtactgttgcgctccggagtgctattgaacgcgagttataggtctatcggagcactgaaccaggtcaggttcagacattggttcgtcgctaaactatacatgaatacacaccctggacggctcctgttgggtctgactctgggcctgtggctgactaccgcatgggtgctcagcgtggccgagcgccaagccgtcaatgccactgggcatctgtccgatacactgtggttaattcccatcacatttcttacaataggttatggcgacgtcgtccctggaactatgtggggtaagattgtctgtctgtgcaccggcgtgatgggtgtctgctgcaccgcccttctcgtagcagtcgtcgcccgtaagctagagttcaataaggctgaaaaacatgtccacaactttatgatggatattcagtacaccaaagaaatgaaggagtcggccgcacgggtcctgcaggaagcatggatgttttataagcataccaggaggaaagagagccatgccgctagacgccatcagaggaagctcctggctgctatcaacgcatttcgccaagtgcgcctgaaacatagaaaactgagagaacaagtaaatagcatggtagacatttcaaagatgcacatgatcctgtacgatctgcagcagaacttgtctagtagccatagggcgcttgagaagcagattgacacactggctggaaagctggatgctctcactgagctgttaagtactgcactgggacctaggcagctccctgagccatcccagcaaagcaaatag

SEQ ID NO: 126867 - DNA, 1284 bp, Artificial Sequence
  derived and/or modified sequence
atgggcggcgacctggtgctgggcctgggcgccctgagaagaagaaagagactgctggagcaggagaagagcctggccggctgggccctggtgctggccggcaccggcatcggcctgatggtgctgcacgccgagatgctgtggttcggcggctgcagctgggccctgtacctgttcctggtgaagtgcaccatcagcatcagcaccttcctgctgctgtgcctgatcgtggccttccacgccaaggaggtgcagctgttcatgaccgacaacggcctgagagactggagagtggccctgaccggcagacaggccgcccagatcgtgctggagctggtggtgtgcggcctgcaccccgcccccgtgagaggccccccctgcgtgcaggacctgggcgcccccctgaccagcccccagccctggcccggcttcctgggccagggcgaggccctgctgagcctggccatgctgctgagactgtacctggtgcccagagccgtgctgctgagaagcggcgtgctgctgaacgccagctacagaagcatcggcgccctgaaccaggtgagattcagacactggttcgtggccaagctgtacatgaacacccaccccggcagactgctgctgggcctgaccctgggcctgtggctgaccaccgcctgggtgctgagcgtggccgagagacaggccgtgaacgccaccggccacctgagcgacaccctgtggctgatccccatcaccttcctgaccatcggctacggcgacgtggtgcccggcaccatgtggggcaagatcgtgtgcctgtgcaccggcgtgatgggcgtgtgctgcaccgccctgctggtggccgtggtggccagaaagctggagttcaacaaggccgagaagcacgtgcacaacttcatgatggacatccagtacaccaaggagatgaaggagagcgccgccagagtgctgcaggaggcctggatgttctacaagcacaccagaagaaaggagagccacgccgccagaagacaccagagaaagctgctggccgccatcaacgccttcagacaggtgagactgaagcacagaaagctgagagagcaggtgaacagcatggtggacatcagcaagatgcacatgatcctgtacgacctgcagcagaacctgagcagcagccacagagccctggagaagcagatcgacaccctggccggcaagctggacgccctgaccgagctgctgagcaccgccctgggccccagacagctgcccgagcccagccagcagagcaagtag

SEQ ID NO: 126868 - protein, 1356 aa, Artificial Sequence
  derived and/or modified sequence
MQSKVLLAVALWLCVETRAASVGLPSVSLDLPRLSIQKDILTIKANTTLQITCRGQRDLDWLWPNNQSGSEQRVEVTECSDGLFCKTLTIPKVIGNDTGAYKCFYRETDLASVIYVYVQDYRSPFIASVSDQHGVVYITENKNKTVVIPCLGSISNLNVSLCARYPEKRFVPDGNRISWDSKKGFTIPSYMISYAGMVFCEAKINDESYQSIMYIVVVVGYRIYDVVLSPSHGIELSVGEKLVLNCTARTELNVGIDFNWEYPSSKHQHKKLVNRDLKTQSGSEMKKFLSTLTIDGVTRSDQGLYTCAASSGLMTKKNSTFVRVHEKPFVAFGSGMESLVEATVGERVRIPAKYLGYPPPEIKWYKNGIPLESNHTIKAGHVLTIMEVSERDTGNYTVILTNPISKEKQSHVVSLVVYVPPQIGEKSLISPVDSYQYGTTQTLTCTVYAIPPPHHIHWYWQLEEECANEPSQAVSVTNPYPCEEWRSVEDFQGGNKIEVNKNQFALIEGKNKTVSTLVIQAANVSALYKCEAVNKVGRGERVISFHVTRGPEITLQPDMQPTEQESVSLWCTADRSTFENLTWYKLGPQPLPIHVGELPTPVCKNLDTLWKLNATMFSNSTNDILIMELKNASLQDQGDYVCLAQDRKTKKRHCVVRQLTVLERVAPTITGNLENQTTSIGESIEVSCTASGNPPPQIMWFKDNETLVEDSGIVLKDGNRNLTIRRVRKEDEGLYTCQACSVLGCAKVEAFFIIEGAQEKTNLEIIILVGTAVIAMFFWLLLVIILRTVKRANGGELKTGYLSIVMDPDELPLDEHCERLPYDASKWEFPRDRLKLGKPLGRGAFGQVIEADAFGIDKTATCRTVAVKMLKEGATHSEHRALMSELKILIHIGHHLNVVNLLGACTKPGGPLMVIVEFCKFGNLSTYLRSKRNEFVPYKTKGARFRQGKDYVGAIPVDLKRRLDSITSSQSSASSGFVEEKSLSDVEEEEAPEDLYKDFLTLEHLICYSFQVAKGMEFLASRKCIHRDLAARNILLSEKNVVKICDFGLARDIYKDPDYVRKGDARLPLKWMAPETIFDRVYTIQSDVWSFGVLLWEIFSLGASPYPGVKIDEEFCRRLKEGTRMRAPDYTTPEMYQTMLDCWHGEPSQRPTFSELVEHLGNLLQANAQQDGKDYIVLPISETLSMEEDSGLSLPTSPVSCMEEEEVCDPKFHYDNTAGISQYLQNSKRKSRPVSVKTFEDIPLEEPEVKVIPDDNQTDSGMVLASEELKTLEDRTKLSPSFGGMVPSKSRESVASEGSNQTSGYQSGYHSDDTDTTVYSSEEAELLKLIEIGVQTGSTAQILQPDSGTTLSSPPV

SEQ ID NO: 126869 - DNA, 4071 bp, Artificial Sequence
  derived and/or modified sequence
atgcagagcaaggtgctgctggccgtggccctgtggctgtgcgtggagaccagagccgccagcgtgggcctgcccagcgtgagcctggacctgcccagactgagcatccagaaggacatcctgaccatcaaggccaacaccaccctgcagatcacctgcagaggccagagagacctggactggctgtggcccaacaaccagagcggcagcgagcagagagtggaggtgaccgagtgcagcgacggcctgttctgcaagaccctgaccatccccaaggtgatcggcaacgacaccggcgcctacaagtgcttctacagagagaccgacctggccagcgtgatctacgtgtacgtgcaggactacagaagccccttcatcgccagcgtgagcgaccagcacggcgtggtgtacatcaccgagaacaagaacaagaccgtggtgatcccctgcctgggcagcatcagcaacctgaacgtgagcctgtgcgccagataccccgagaagagattcgtgcccgacggcaacagaatcagctgggacagcaagaagggcttcaccatccccagctacatgatcagctacgccggcatggtgttctgcgaggccaagatcaacgacgagagctaccagagcatcatgtacatcgtggtggtggtgggctacagaatctacgacgtggtgctgagccccagccacggcatcgagctgagcgtgggcgagaagctggtgctgaactgcaccgccagaaccgagctgaacgtgggcatcgacttcaactgggagtaccccagcagcaagcaccagcacaagaagctggtgaacagagacctgaagacccagagcggcagcgagatgaagaagttcctgagcaccctgaccatcgacggcgtgaccagaagcgaccagggcctgtacacctgcgccgccagcagcggcctgatgaccaagaagaacagcaccttcgtgagagtgcacgagaagcccttcgtggccttcggcagcggcatggagagcctggtggaggccaccgtgggcgagagagtgagaatccccgccaagtacctgggctaccccccccccgagatcaagtggtacaagaacggcatccccctggagagcaaccacaccatcaaggccggccacgtgctgaccatcatggaggtgagcgagagagacaccggcaactacaccgtgatcctgaccaaccccatcagcaaggagaagcagagccacgtggtgagcctggtggtgtacgtgcccccccagatcggcgagaagagcctgatcagccccgtggacagctaccagtacggcaccacccagaccctgacctgcaccgtgtacgccatcccccccccccaccacatccactggtactggcagctggaggaggagtgcgccaacgagcccagccaggccgtgagcgtgaccaacccctacccctgcgaggagtggagaagcgtggaggacttccagggcggcaacaagatcgaggtgaacaagaaccagttcgccctgatcgagggcaagaacaagaccgtgagcaccctggtgatccaggccgccaacgtgagcgccctgtacaagtgcgaggccgtgaacaaggtgggcagaggcgagagagtgatcagcttccacgtgaccagaggccccgagatcaccctgcagcccgacatgcagcccaccgagcaggagagcgtgagcctgtggtgcaccgccgacagaagcaccttcgagaacctgacctggtacaagctgggcccccagcccctgcccatccacgtgggcgagctgcccacccccgtgtgcaagaacctggacaccctgtggaagctgaacgccaccatgttcagcaacagcaccaacgacatcctgatcatggagctgaagaacgccagcctgcaggaccagggcgactacgtgtgcctggcccaggacagaaagaccaagaagagacactgcgtggtgagacagctgaccgtgctggagagagtggcccccaccatcaccggcaacctggagaaccagaccaccagcatcggcgagagcatcgaggtgagctgcaccgccagcggcaacccccccccccagatcatgtggttcaaggacaacgagaccctggtggaggacagcggcatcgtgctgaaggacggcaacagaaacctgaccatcagaagagtgagaaaggaggacgagggcctgtacacctgccaggcctgcagcgtgctgggctgcgccaaggtggaggccttcttcatcatcgagggcgcccaggagaagaccaacctggagatcatcatcctggtgggcaccgccgtgatcgccatgttcttctggctgctgctggtgatcatcctgagaaccgtgaagagagccaacggcggcgagctgaagaccggctacctgagcatcgtgatggaccccgacgagctgcccctggacgagcactgcgagagactgccctacgacgccagcaagtgggagttccccagagacagactgaagctgggcaagcccctgggcagaggcgccttcggccaggtgatcgaggccgacgccttcggcatcgacaagaccgccacctgcagaaccgtggccgtgaagatgctgaaggagggcgccacccacagcgagcacagagccctgatgagcgagctgaagatcctgatccacatcggccaccacctgaacgtggtgaacctgctgggcgcctgcaccaagcccggcggccccctgatggtgatcgtggagttctgcaagttcggcaacctgagcacctacctgagaagcaagagaaacgagttcgtgccctacaagaccaagggcgccagattcagacagggcaaggactacgtgggcgccatccccgtggacctgaagagaagactggacagcatcaccagcagccagagcagcgccagcagcggcttcgtggaggagaagagcctgagcgacgtggaggaggaggaggcccccgaggacctgtacaaggacttcctgaccctggagcacctgatctgctacagcttccaggtggccaagggcatggagttcctggccagcagaaagtgcatccacagagacctggccgccagaaacatcctgctgagcgagaagaacgtggtgaagatctgcgacttcggcctggccagagacatctacaaggaccccgactacgtgagaaagggcgacgccagactgcccctgaagtggatggcccccgagaccatcttcgacagagtgtacaccatccagagcgacgtgtggagcttcggcgtgctgctgtgggagatcttcagcctgggcgccagcccctaccccggcgtgaagatcgacgaggagttctgcagaagactgaaggagggcaccagaatgagagcccccgactacaccacccccgagatgtaccagaccatgctggactgctggcacggcgagcccagccagagacccaccttcagcgagctggtggagcacctgggcaacctgctgcaggccaacgcccagcaggacggcaaggactacatcgtgctgcccatcagcgagaccctgagcatggaggaggacagcggcctgagcctgcccaccagccccgtgagctgcatggaggaggaggaggtgtgcgaccccaagttccactacgacaacaccgccggcatcagccagtacctgcagaacagcaagagaaagagcagacccgtgagcgtgaagaccttcgaggacatccccctggaggagcccgaggtgaaggtgatccccgacgacaaccagaccgacagcggcatggtgctggccagcgaggagctgaagaccctggaggacagaaccaagctgagccccagcttcggcggcatggtgcccagcaagagcagagagagcgtggccagcgagggcagcaaccagaccagcggctaccagagcggctaccacagcgacgacaccgacaccaccgtgtacagcagcgaggaggccgagctgctgaagctgatcgagatcggcgtgcagaccggcagcaccgcccagatcctgcagcccgacagcggcaccaccctgagcagcccccccgtgtag

SEQ ID NO: 126870 - DNA, 4071 bp, Artificial Sequence
  derived and/or modified sequence
atgcaatccaaagtgctgctggcagtggccctctggctctgcgtcgagaccagagccgcctctgtgggcttgccctcggtgtctttggatctgcccaggctgtcaattcagaaagatattttaacgattaaggctaacacaacccttcagattacctgccggggccagagagatctggattggctgtggccaaacaatcagagcggctcggagcagagagtcgaagtcactgagtgtagcgacggtctgttctgcaaaacactgaccatccctaaagtcatcgggaacgatacaggcgcatataagtgcttttatcgggaaactgatctggcaagcgtcatctatgtatatgtacaagactataggtcccctttcattgcgagtgtgtccgatcagcatggagtcgtgtacataactgaaaataagaataagacagtggttattccctgtttaggcagtataagcaatctcaacgtttctctgtgcgcccgttaccctgaaaaaagatttgttccagatgggaataggatttcctgggattccaagaaggggttcaccattccaagctacatgatatcttacgccggcatggtcttttgtgaggcaaagattaatgatgaatcctaccagtccatcatgtacatcgtagtggtagtcggatacagaatctacgacgtggtgttaagcccctctcacggcatcgagctgtccgtaggtgaaaaacttgtcttgaactgcactgctaggaccgaacttaatgttggcatcgatttcaactgggaatacccatcctctaagcatcagcacaaaaagctggtgaacagagaccttaaaactcagtcggggtctgagatgaagaagtttttatctacccttacaatcgacggagtgacacgctcagatcaggggctgtatacctgtgccgctagctcaggtttgatgacgaagaaaaactccacgtttgtccgggttcacgaaaaacctttcgttgcctttgggtccgggatggagagtctggtcgaggctactgtcggcgagagggtgcgcattccggccaaatacctcggctacccgcctccagaaataaagtggtataagaacggtataccgctggagtctaaccacacaatcaaggctggccacgtactgacgattatggaagtgtcagagcgagacaccggcaattatacggtgatccttaccaaccccatatccaaggaaaaacagagccacgtggtgagcctcgtggtgtatgtccctccacagatcggggagaaaagtctgattagtccagttgacagctatcagtatgggacgacacaaaccctaacctgcacggtgtacgccatccctccccctcaccacatacactggtactggcagctggaagaggaatgtgcaaacgagccctcgcaggccgtgagcgttactaatccttacccatgtgaggagtggcggtctgttgaagactttcaggggggaaacaaaattgaagtgaacaagaatcagttcgcgctgattgaagggaagaataaaaccgtatctaccttggtcatccaagccgcaaacgtgtctgccctgtataaatgcgaagccgtgaacaaagtcgggcgaggagaaagggttatcagctttcacgtgacaagggggcctgagatcacactacagcccgacatgcaaccaacagaacaggagtcagtctcactgtggtgcactgctgaccgctcaacatttgagaacctgacctggtataagcttggcccccagcctctgccgatccacgtgggggaactgcctactcccgtgtgtaagaatttagacactctgtggaaacttaatgctactatgttttcgaacagcactaacgacattctgatcatggagttaaagaacgcctccctccaagaccagggagactacgtgtgtctggctcaagaccgaaagacaaagaagagacattgtgttgtgcggcaacttacagtgttggagcgagtggcgccgactattacaggaaatctggagaaccagactaccagtatcggtgaaagcattgaggtgtcatgtacagcctccggcaacccaccgcctcagattatgtggttcaaggacaatgagaccctggtggaagattctggaatcgttctgaaggacggcaaccgcaatctgactatacgccgggtccgaaaagaggacgaggggttatacacatgtcaggcttgtagtgtcctagggtgtgcgaaagttgaggcttttttcattatcgagggcgcccaggaaaaaacaaatctggagatcatcatactcgtgggtactgcagtgattgctatgttcttttggcttctgctggtaattatactaaggactgtaaaacgagctaatggcggtgagctgaagactgggtacctgtctatcgtgatggatcctgatgaactgcctcttgatgagcattgcgagcggttaccttacgacgcatcaaaatgggaatttccccgcgaccgcttgaaactgggcaagccgcttggcagaggcgccttcgggcaagtcattgaggctgatgcttttggtatcgacaagaccgccacatgccggacagtggccgtgaagatgcttaaggaaggcgccacccactccgagcacagagctttaatgtctgagctcaaaatcttaatccatatcggccaccacctgaacgtcgtgaacctgttaggggcgtgtactaaacctggcgggcctcttatggtgatagtggagttttgtaaattcggaaatctgtccacttatctgaggtccaagcgcaatgagtttgtgccctacaaaactaaaggagccaggttccggcaagggaaggattatgttggggccatacctgtggatctgaagcgtaggctggacagtatcacttcctcacagtcctccgcctcttccggcttcgtggaggagaagagcttgtctgacgtggaggaggaggaagctcccgaggatttatacaaagacttcttgacactcgaacacctcatctgctacagcttccaagttgccaaggggatggagttcctggcttctcggaagtgtattcatagggacctggccgcccgaaacatcctgctttctgagaaaaacgtcgtgaagatctgcgacttcggcctggcccgggacatctacaaagacccagactatgtgcggaagggggacgcccggcttccgctaaaatggatggcccccgagaccatcttcgacagggtatacactatccaaagcgacgtgtggtcgttcggggtgctcctatgggaaatcttcagtctgggcgcttcaccataccctggtgtaaaaatagacgaggaattttgccggcgcctcaaagaggggacccgcatgcgtgcaccagactataccacgcccgaaatgtatcagaccatgctcgattgttggcatggcgagccctctcagaggcctaccttcagtgagttggtggagcacctcggcaatctcctgcaggcgaatgctcagcaggacggtaaggactacatcgtgttaccgattagcgagactctgagcatggaagaagacagtggcctctccctcccaacctctcccgtctcttgtatggaggaagaggaggtttgtgaccctaaattccactacgacaacaccgctggcatcagccaatacctccagaactctaagcgcaagtctagaccggtgtccgtaaagacgtttgaggacattcctctggaagagccagaagtcaaagtaatacctgacgacaaccagactgattccggaatggtgctcgcttctgaggaactgaaaaccttagaagacagaaccaagttatccccatcctttgggggaatggtgccttctaagtcaagggagagcgtggcaagcgaggggagtaaccagacttcaggctaccagtccggctaccactccgatgataccgacactactgtgtattcatctgaagaggctgagctgctgaaattgattgaaatcggggtccagaccggttccaccgcccagatcctgcagccggacagtgggacaacactgagttctcccccagtctag

SEQ ID NO: 126871 - DNA, 4071 bp, Artificial Sequence
  derived and/or modified sequence
atgcagagcaaggtgctgctggccgtggccctgtggctgtgtgtggagaccagggctgcctctgtgggcctgcccagcgtgtccctggacctgccccggctgagcatccagaaggacatcctgaccatcaaggccaacaccaccctgcagatcacctgccggggccagagggacctggactggctgtggcccaacaaccagagcggcagcgagcagagggtggaggtgacagagtgcagtgatggcctcttctgcaagaccctgaccatccccaaggtgattggaaatgacaccggggcctacaagtgcttctaccgggagacagacctggccagcgtcatctacgtgtatgtgcaggactaccgcagccccttcatcgcctctgtgtctgaccagcacggcgtggtgtacatcacagagaacaagaacaagacagtggtgatcccctgcctgggcagcatcagcaacctgaatgtgtccctgtgtgcccgctacccagagaagagatttgtgcctgatggcaaccgcatctcctgggacagcaagaagggcttcaccatccccagctacatgatctcctatgccggcatggtgttctgtgaggccaagatcaatgatgagagctaccagagcatcatgtacatcgtggtggtggtgggctaccgcatctatgatgtggtgctgagccccagccacggcatcgagctgtctgtgggggagaagctggtgctgaactgcacagccaggacagagctgaatgtgggcatcgacttcaactgggagtaccccagcagcaagcaccagcacaagaagctggtgaacagagacctgaagacccagagcggcagcgagatgaagaagttcctgagcaccctgaccattgatggagtgaccaggagtgaccagggcctgtacacctgtgccgccagcagcggcctgatgaccaagaagaacagcacctttgtgcgggtgcatgagaagccctttgtggccttcggcagcggcatggagagcctggtggaggccaccgtgggggagcgggtgcgcatcccagccaagtacctgggctacccacctcctgagatcaagtggtacaagaatggcatccccctggagagcaaccacaccatcaaggccggccacgtgctgaccatcatggaggtgtctgagcgggacaccggcaactacaccgtcatcctgaccaaccccatcagcaaggagaagcagagccacgtggtgtccctggtggtgtatgtgcccccccagattggagagaagagcctcatcagccctgtggacagctaccagtatggcaccacccagaccctgacctgcaccgtgtatgccatccccccaccccaccacatccactggtactggcagctggaggaggagtgtgccaatgagcccagccaggccgtgtctgtgaccaacccctacccctgtgaggagtggaggtctgtggaggacttccagggcggcaacaagattgaggtgaacaagaaccagtttgccctgattgagggcaagaacaagacagtgtccaccctggtgatccaggccgccaacgtgtctgccctgtacaagtgtgaggccgtgaacaaggtgggccgcggggagagggtcatctccttccacgtgacccggggccctgagatcaccctgcagcctgacatgcagcccacagagcaggagagcgtgtccctgtggtgcacagctgacaggagcacctttgagaacctgacctggtacaagctgggcccccagcccctgcccatccacgtgggggagctgcccacccctgtgtgcaagaacctggacaccctgtggaagctgaatgccaccatgttcagcaacagcaccaatgacatcctgatcatggagctgaagaatgccagcctgcaggaccagggcgactatgtgtgcctggcccaggacaggaagaccaagaagaggcactgtgtggtgcggcagctgactgtgctggagcgggtggcccccaccatcaccggcaacctggagaaccagaccaccagcatcggggagagcattgaggtgtcctgcacagccagcggcaaccccccaccccagatcatgtggttcaaggacaatgagaccctggtggaggacagcggcatcgtgctgaaggatggcaacagaaacctgaccatcagaagagtgaggaaggaggatgagggcctgtacacctgccaggcctgcagcgtgctgggctgtgccaaggtggaggccttcttcatcatcgagggcgcccaggagaagaccaacctggagatcatcatcctggtgggcacagctgtgattgccatgttcttctggctgctgctggtgatcatcctgaggacagtgaagagggccaatggaggagagctgaagacaggctacctgagcatcgtgatggaccctgatgagctgcccctggatgagcactgtgagcggctgccctatgatgccagcaagtgggagttcccccgggaccggctgaagctgggcaagcccctgggccgcggggccttcggccaggtgattgaagcagatgccttcggcatcgacaagacagccacctgcaggacagtggccgtgaagatgctgaaggagggcgccacccacagcgagcaccgggccctgatgtctgagctgaagatcctgatccacatcggccaccacctgaatgtggtgaacctgctgggcgcctgcaccaagccaggcggccccctgatggtgattgtggagttctgcaagtttggaaacctgagcacctacctgcggagcaagagaaatgaatttgtgccctacaagaccaagggggcccgcttccggcagggcaaggactatgtgggcgccatccctgtggacctgaagaggcggctggacagcatcaccagcagccagagcagcgccagcagcggctttgtggaggagaagagcctgagtgatgtggaggaggaggaggccccagaagatctctacaaggacttcctgaccctggagcacctgatctgctacagcttccaggtggccaagggcatggagttcctggccagcaggaagtgcatccaccgggacctggccgccaggaacatcctgctgtctgagaagaatgtggtgaagatctgtgactttggcctggcccgggacatctacaaggaccctgactatgtgaggaaaggagatgcccggctgcccctgaagtggatggcccctgagaccatctttgacagagtgtacaccatccagagtgatgtgtggagctttggagtgctgctgtgggagatcttcagcctgggcgccagcccctacccaggagtgaagattgatgaggagttctgccggcggctgaaggagggcaccaggatgagggccccagactacaccaccccagagatgtaccagaccatgctggactgctggcacggggagcccagccagaggcccaccttcagcgagctggtggagcacctgggcaacctgctgcaggccaatgcccagcaggacggcaaggactacatcgtgctgcccatcagcgagaccctgtccatggaggaggacagcggcctgagcctgcccaccagccctgtgtcctgcatggaggaggaggaggtgtgtgaccccaagttccactatgacaacacagctggcatcagccagtacctgcagaacagcaagaggaagagcaggcctgtgtctgtgaagacctttgaggacatccccctggaggagcctgaggtgaaggtgatcccagatgacaaccagacagacagcggcatggtgctggccagcgaggagctgaagaccctggaggacaggaccaagctgagccccagctttggaggcatggtgcccagcaagagccgggagagcgtggccagcgagggcagcaaccagaccagcggctaccagagcggctaccacagtgatgacacagacaccaccgtgtacagcagcgaggaggccgagctgctgaagctgattgaaattggagtgcagacaggcagcacagcccagatcctgcagccagattctggcaccaccctgagcagcccccctgtgtag

SEQ ID NO: 126872 - DNA, 5831 bp, Artificial Sequence
  derived and/or modified sequence
tcccgggaccccgggagagcggtcaatgtgtggtcgctgcgtttcctctgcctgcgccgggcatcacttgcgcgccgcagaaagtccgtctggcagcctggatatcctctcctaccggcacccgcagacgcccctgcagccgcggtcggcgcccgggctccctagccctgtgcgctcaactgtcctgcgctgcggggtgccgcgagttccacctccgcgcctccttctctagacaggcgctgggagaaagaaccggctcccgagttctgggcatttcgcccggctcgaggtgcaggatgcagagcaaggtgctgctggccgtcgccctgtggctctgcgtggagacccgggccgcctctgtgggtttgcctagtgtttctcttgatctgcccaggctcagcatacaaaaagacatacttacaattaaggctaatacaactcttcaaattacttgcaggggacagagggacttggactggctttggcccaataatcagagtggcagtgagcaaagggtggaggtgactgagtgcagcgatggcctcttctgtaagacactcacaattccaaaagtgatcggaaatgacactggagcctacaagtgcttctaccgggaaactgacttggcctcggtcatttatgtctatgttcaagattacagatctccatttattgcttctgttagtgaccaacatggagtcgtgtacattactgagaacaaaaacaaaactgtggtgattccatgtctcgggtccatttcaaatctcaacgtgtcactttgtgcaagatacccagaaaagagatttgttcctgatggtaacagaatttcctgggacagcaagaagggctttactattcccagctacatgatcagctatgctggcatggtcttctgtgaagcaaaaattaatgatgaaagttaccagtctattatgtacatagttgtcgttgtagggtataggatttatgatgtggttctgagtccgtctcatggaattgaactatctgttggagaaaagcttgtcttaaattgtacagcaagaactgaactaaatgtggggattgacttcaactgggaatacccttcttcgaagcatcagcataagaaacttgtaaaccgagacctaaaaacccagtctgggagtgagatgaagaaatttttgagcaccttaactatagatggtgtaacccggagtgaccaaggattgtacacctgtgcagcatccagtgggctgatgaccaagaagaacagcacatttgtcagggtccatgaaaaaccttttgttgcttttggaagtggcatggaatctctggtggaagccacggtgggggagcgtgtcagaatccctgcgaagtaccttggttacccacccccagaaataaaatggtataaaaatggaataccccttgagtccaatcacacaattaaagcggggcatgtactgacgattatggaagtgagtgaaagagacacaggaaattacactgtcatccttaccaatcccatttcaaaggagaagcagagccatgtggtctctctggttgtgtatgtcccaccccagattggtgagaaatctctaatctctcctgtggattcctaccagtacggcaccactcaaacgctgacatgtacggtctatgccattcctcccccgcatcacatccactggtattggcagttggaggaagagtgcgccaacgagcccagccaagctgtctcagtgacaaacccatacccttgtgaagaatggagaagtgtggaggacttccagggaggaaataaaattgaagttaataaaaatcaatttgctctaattgaaggaaaaaacaaaactgtaagtacccttgttatccaagcggcaaatgtgtcagctttgtacaaatgtgaagcggtcaacaaagtcgggagaggagagagggtgatctccttccacgtgaccaggggtcctgaaattactttgcaacctgacatgcagcccactgagcaggagagcgtgtctttgtggtgcactgcagacagatctacgtttgagaacctcacatggtacaagcttggcccacagcctctgccaatccatgtgggagagttgcccacacctgtttgcaagaacttggatactctttggaaattgaatgccaccatgttctctaatagcacaaatgacattttgatcatggagcttaagaatgcatccttgcaggaccaaggagactatgtctgccttgctcaagacaggaagaccaagaaaagacattgcgtggtcaggcagctcacagtcctagagcgtgtggcacccacgatcacaggaaacctggagaatcagacgacaagtattggggaaagcatcgaagtctcatgcacggcatctgggaatccccctccacagatcatgtggtttaaagataatgagacccttgtagaagactcaggcattgtattgaaggatgggaaccggaacctcactatccgcagagtgaggaaggaggacgaaggcctctacacctgccaggcatgcagtgttcttggctgtgcaaaagtggaggcatttttcataatagaaggtgcccaggaaaagacgaacttggaaatcattattctagtaggcacggcggtgattgccatgttcttctggctacttcttgtcatcatcctacggaccgttaagcgggccaatggaggggaactgaagacaggctacttgtccatcgtcatggatccagatgaactcccattggatgaacattgtgaacgactgccttatgatgccagcaaatgggaattccccagagaccggctgaagctaggtaagcctcttggccgtggtgcctttggccaagtgattgaagcagatgcctttggaattgacaagacagcaacttgcaggacagtagcagtcaaaatgttgaaagaaggagcaacacacagtgagcatcgagctctcatgtctgaactcaagatcctcattcatattggtcaccatctcaatgtggtcaaccttctaggtgcctgtaccaagccaggagggccactcatggtgattgtggaattctgcaaatttggaaacctgtccacttacctgaggagcaagagaaatgaatttgtcccctacaagaccaaaggggcacgattccgtcaagggaaagactacgttggagcaatccctgtggatctgaaacggcgcttggacagcatcaccagtagccagagctcagccagctctggatttgtggaggagaagtccctcagtgatgtagaagaagaggaagctcctgaagatctgtataaggacttcctgaccttggagcatctcatctgttacagcttccaagtggctaagggcatggagttcttggcatcgcgaaagtgtatccacagggacctggcggcacgaaatatcctcttatcggagaagaacgtggttaaaatctgtgactttggcttggcccgggatatttataaagatccagattatgtcagaaaaggagatgctcgcctccctttgaaatggatggccccagaaacaatttttgacagagtgtacacaatccagagtgacgtctggtcttttggtgttttgctgtgggaaatattttccttaggtgcttctccatatcctggggtaaagattgatgaagaattttgtaggcgattgaaagaaggaactagaatgagggcccctgattatactacaccagaaatgtaccagaccatgctggactgctggcacggggagcccagtcagagacccacgttttcagagttggtggaacatttgggaaatctcttgcaagctaatgctcagcaggatggcaaagactacattgttcttccgatatcagagactttgagcatggaagaggattctggactctctctgcctacctcacctgtttcctgtatggaggaggaggaagtatgtgaccccaaattccattatgacaacacagcaggaatcagtcagtatctgcagaacagtaagcgaaagagccggcctgtgagtgtaaaaacatttgaagatatcccgttagaagaaccagaagtaaaagtaatcccagatgacaaccagacggacagtggtatggttcttgcctcagaagagctgaaaactttggaagacagaaccaaattatctccatcttttggtggaatggtgcccagcaaaagcagggagtctgtggcatctgaaggctcaaaccagacaagcggctaccagtccggatatcactccgatgacacagacaccaccgtgtactccagtgaggaagcagaacttttaaagctgatagagattggagtgcaaaccggtagcacagcccagattctccagcctgactcggggaccacactgagctctcctcctgtttaaaaggaagcatccacacccccaactcctggacatcacatgagaggtgctgctcagattttcaagtgttgttctttccaccagcaggaagtagccgcatttgattttcatttcgacaacagaaaaaggacctcggactgcagggagccagtcttctaggcatatcctggaagaggcttgtgacccaagaatgtgtctgtgtcttctcccagtgttgacctgatcctctttttcattcatttaaaaagcatttatcatgccccctgctgcgggtctcaccatgggtttagaacaaagacgttcaagaaatggccccatcctcaaagaagtagcagtacctggggagctgacacttctgtaaaactagaagataaaccaggcaatgtaagtgttcgaggtgttgaagatgggaaggatttgcagggctgagtctatccaagaggctttgtttaggacgtgggtcccaagccaagccttaagtgtggaattcggattgatagaaaggaagactaacgttaccttgctttggagagtactggagcctgcaaatgcattgtgtttgctctggtggaggtgggcatggggtctgttctgaaatgtaaagggttcagacggggtttctggttttagaaggttgcgtgttcttcgagttgggctaaagtagagttcgttgtgctgtttctgactcctaatgagagttccttccagaccgttacgtgtctcctggccaagccccaggaaggaaatgatgcagctctggctccttgtctcccaggctgatcctttattcagaataccacaaagaaaggacattcagctcaaggctccctgccgtgttgaagagttctgactgcacaaaccagcttctggtttcttctggaatgaataccctcatatctgtcctgatgtgatatgtctgagactgaatgcgggaggttcaatgtgaagctgtgtgtggtgtcaaagtttcaggaaggattttacccttttgttcttccccctgtccccaacccactctcaccccgcaacccatcagtattttagttatttggcctctactccagtaaacctgattgggtttgttcactctctgaatgattattagccagacttcaaaattattttatagcccaaattataacatctattgtattatttagacttttaacatatagagctatttctactgatttttgcccttgttctgtcctttttttcaaaaaagaaaatgtgttttttgtttggtaccatagtgtgaaatgctgggaacaatgactataagacatgctatggcacatatatttatagtctgtttatgtagaaacaaatgtaatatattaaagccttatatataatgaactttgtactattcacattttgtatcagtattatgtagcataacaaaggtcataatgctttcagcaattgatgtcattttattaaagaacattgaaaaacttgaaggaa

SEQ ID NO: 126873 - DNA, 4071 bp, Artificial Sequence
  derived and/or modified sequence
atgcagagcaaggtgctgctggccgtggccctgtggctgtgcgtggaaacaagagcggcttccgttggcctcccaagtgtgagtctcgacctgcccaggctgtccatccaaaaggacattctgactatcaaggccaacacaactctccaaatcacgtgtcgaggacaacgtgatctagactggctgtggcccaataaccagagcggctccgaacagagggtggaagtgactgaatgcagcgacggattgttctgcaaaaccctgactatcccgaaggtaattgggaatgataccggggcatacaaatgtttctaccgcgaaacggatttggcaagtgtgatatatgtctacgttcaagactaccgctctccttttatcgcctctgtgtccgatcaacatggggtggtttacattactgaaaacaaaaataaaacagtcgtgattccatgcttggggtcgatatccaacctgaatgtgtccctgtgtgctcgataccctgaaaagagatttgtgccagacgggaaccggatctcctgggatagtaagaaaggttttacaatccccagttacatgatctcatacgcagggatggtgttctgcgaagcaaagattaacgacgaatcttatcaatcaattatgtatatagtcgtcgtggtgggctatcggatctacgacgtagtgctctctccaagtcacggaattgaattatcggtaggagagaagctcgtgcttaattgtacagccaggacggaattgaacgtgggaatcgattttaactgggaatacccctctagcaaacaccagcacaaaaagctggtgaatagagacctgaagacacagagtggatcggaaatgaaaaaattcctgagcaccctcactatagacggcgtgactcgcagcgaccaaggtctctacacctgtgccgcgtcttccgggcttatgaccaagaagaatagcacatttgtgagagtgcatgaaaaaccgttcgtcgcttttgggagcgggatggagagcctcgttgaggccaccgtgggcgaaagggttaggatcccagcaaagtatttagggtaccccccccccgaaattaaatggtacaagaacggcatcccactcgaatctaatcatacaataaaagccgggcatgtgctgactatcatggaagtgtctgagagggacactggtaactacactgttatcctgacaaaccccatctctaaggagaagcaatctcacgtggtctccttggtagtgtacgtgcctcctcaaatcggagagaaatcactgatctctccggtggactcgtaccagtacgggaccactcagacacttacctgcaccgtttatgccataccacccccacatcacatacattggtactggcagctcgaggaagagtgcgctaatgaaccaagtcaggctgtgtccgtgaccaatccttacccatgtgaagagtggcggagcgtggaggattttcagggtggtaataaaatagaagtgaataagaaccagtttgctttgattgagggaaagaataagaccgtctccacactggtgattcaggctgcaaatgtatccgcactgtacaaatgcgaagctgttaacaaggtaggacgcggcgaacgggtgatcagttttcatgtgacaagaggtccagaaattacacttcagcctgatatgcaacccactgagcaggaaagcgtctcactgtggtgtaccgccgatcgcagcacattcgagaatctgacttggtataagttaggaccccagccattaccaattcacgtcggagagcttcccacgcccgtgtgtaaaaacctcgacacgctatggaagcttaatgccacaatgttttccaacagtactaacgatatcctcataatggagttgaaaaacgcgtcgctgcaagaccaaggggactatgtctgtctggcacaagaccggaagaccaagaaaagacattgcgtggtccggcagctaacagtgctggagcgcgtcgctcccacaattacggggaacctggagaaccagacaacatcgattggcgagagcatagaagtatcctgcactgcctctggtaatccaccaccccagattatgtggttcaaggataacgagaccttggttgaggatagcgggatcgtgttgaaggatggcaatcgaaaccttacaatcaggcgagtccgaaaagaggacgagggcctttacacctgccaggcctgctccgtcctgggctgtgctaaagtcgaggccttcttcataatcgagggtgcacaggaaaaaactaatctggaaattattatcctggtaggaaccgccgtgattgcgatgttcttctggttactcctggtaataattctccggactgtgaagcgggccaacggtggagagttaaagacaggatacctctctatcgtcatggaccctgatgaactgccgttagacgagcactgcgaaagattgccctacgacgcttccaaatgggaatttccgagagacaggctcaagttaggaaagcctttaggcaggggggcttttggacaggtgattgaggccgacgcatttggaatcgataagactgctacctgccgaactgtcgccgtcaagatgttgaaagaaggggccacacactctgaacacagagcattaatgtccgagctcaagatcttgatacatatcggtcaccatttgaacgtggtcaacttgttaggtgcttgcaccaaacccggagggcctcttatggtcatcgtagagttctgcaaatttggaaacctgagcacttacctccggtctaaaaggaatgaattcgtaccctacaagacaaaaggggcccgcttcaggcagggtaaagactacgtgggggccatccccgtggacctgaagcgacgccttgactccatcaccagcagtcaaagttcggcgagttctgggttcgttgaagagaaatccctgtcagacgtagaggaagaggaagcccccgaagacctctataaagatttcctaacccttgagcatttaatatgttatagcttccaagtggcgaagggaatggagtttctggcctctcgcaaatgtatccaccgcgacttggcggcgcggaacatattgctgtccgagaagaacgttgtgaaaatatgtgatttcggactggctcgcgatatctataaggaccccgactacgtacggaagggagacgcccgtctgcccttgaagtggatggccccagagaccatttttgatcgcgtgtatactattcagagcgacgtctggagcttcggagtactgttgtgggaaatcttctctctgggagcctcaccctatcccggcgtgaagatcgacgaagaattttgtaggcgattgaaggaaggcaccaggatgcgcgcccccgactacaccactccagaaatgtatcagaccatgttagattgttggcacggagaaccatcccagagaccgacattctccgagctggtggaacacctgggaaacctcctgcaagccaatgctcaacaagacggtaaagattacattgtccttccgatttcggaaacactgtccatggaagaggacagcggcctgagcctgccaacgtccccagtgtcctgtatggaagaagaggaagtctgcgatccgaaattccattacgataatactgccggaatctcacagtacctgcagaattccaaacgaaagtcccgtcctgtctccgtgaaaactttcgaggacattcccctcgaagagccagaagtcaaggtgataccagacgacaatcagactgatagcgggatggttttggcttccgaggaactgaagacactcgaagatcggaccaagttgtccccatcttttggcggcatggttcctagcaagtctagagagtcagttgcttccgaggggagcaaccaaacatctggctaccaatccggttatcactccgacgacacggatactacggtgtattctagtgaggaagcggagctgttgaagcttattgaaataggcgttcagacaggctcgaccgcacagattttgcagcctgacagcgggacaacccttagcagtccccctgtgtag

SEQ ID NO: 126874 - DNA, 4071 bp, Artificial Sequence
  derived and/or modified sequence
atgcaaagcaaagtgctcttggctgtcgccttatggctctgcgtggaaaccagggccgcaagtgtaggcctgcccagcgtttcactggacctccctaggctgagcattcagaaagacatactgacaatcaaagcaaatacaacattacagatcacatgcagaggccagcgcgacttggactggctgtggcccaataatcagtctggaagcgagcaacgcgtggaagttacggagtgctcagacgggctcttctgtaagacccttactatccccaaagtaatcggaaacgacacaggggcatataagtgcttctatagagagaccgatctcgcttccgtgatctacgtgtatgtgcaggattaccgcagcccatttatcgccagcgtgtcagatcaacatggagtggtgtacatcaccgaaaataagaacaagacggtggtcattccttgcctcggtagcatctctaatctcaacgtgtctctgtgcgcgcgataccccgaaaaaaggttcgtgcccgatggtaacagaatttcctgggatagtaagaagggttttactattccctcttacatgatctcttatgccggaatggtgttttgtgaggccaaaataaacgatgagagctaccagagcattatgtatatcgtcgtggtcgtgggttaccggatctacgatgttgttctgtccccgtcgcacggtattgagttaagcgtgggggagaagcttgtgttaaattgcacagccagaaccgagctaaacgtggggattgatttcaattgggagtaccctagctccaaacaccagcacaagaagctcgtcaatagggatctgaagactcagtctggatccgagatgaaaaagttcttatctaccttgacaatcgacggtgtgacccgatctgatcagggcttgtacacatgcgctgcctccagcgggcttatgaccaaaaagaattctacatttgtcagagtgcacgaaaaacccttcgtagcatttggatccggaatggaatctctggtggaagctacggtgggcgagcgggtcaggatcccagcaaaatacctggggtacccgccaccagagattaagtggtacaagaacggcatcccactggagtctaatcataccattaaggctggccacgtgttaacaattatggaggtttccgaacgagacacagggaactacacggttatcctgactaacccaatctcaaaagaaaagcagtctcacgtggtgagtctcgtggtgtacgtgcctccacagatcggagagaagtctctgatatcgccggtcgatagctatcagtacggaactacccagacgttgacgtgcaccgtgtatgccatcccccctccccaccacatccattggtattggcagctcgaggaggaatgtgctaacgagcccagccaggccgtgagtgttacaaatccgtatccctgcgaggagtggagatctgtcgaagactttcagggcggaaataagattgaagtcaataaaaaccagttcgcattgatcgaaggaaaaaacaagacagtgtctacactcgtcattcaggctgccaatgtcagcgccttatacaagtgcgaggccgtgaacaaggtgggtcggggtgagagggtgatcagttttcacgtcacaaggggtccagagatcaccctccagcccgacatgcagcctaccgagcaagagtcagtatccctgtggtgtaccgccgaccgcagcacattcgagaatctgacttggtataagttgggaccacagcctctccccatccatgttggtgagctgccgacacctgtttgcaagaatctcgacactctctggaagctgaacgcgacaatgtttagcaattctacaaatgacatcctcatcatggagctgaaaaacgctagcctgcaagatcaaggggactatgtttgcctggcacaggatcggaagacgaagaagcgtcattgcgttgttcggcagctcacagtactggaacgtgttgccccaacaatcactggaaatctcgagaatcagaccaccagtattggggagtctatcgaggtcagttgtactgcatcaggcaatccgcctccacaaattatgtggttcaaggataacgagactctggtcgaggacagtgggattgtgctgaaagatggaaataggaatctgactattcgtagggtcaggaaagaagacgagggtttatatacttgtcaagcttgttccgttcttggctgcgcaaaggtggaggccttcttcattatcgaaggggctcaggagaagacgaacctggagataattatccttgtcggcacagccgtgattgccatgttcttttggctgctgctggtgattatcttgaggacagtaaagagggccaacggaggcgagctgaagaccggctatctgtccatcgttatggatcctgacgagttgcccttggatgagcactgtgagcgcctgccatatgatgcaagtaaatgggaatttcccagagacaggttaaagctcggcaagcctctggggaggggcgcttttggccaggtcattgaggcagatgcgtttggaattgacaaaactgctacctgccgcaccgttgccgtgaaaatgctcaaagagggcgcaacccacagcgagcatagggctctgatgagcgaattgaagatcctgattcatatcggacaccatctaaatgtggtaaatctcctcggagcctgtactaaacctggagggccactcatggtaatagttgagttttgcaaatttggcaacctaagcacttatcttcggtcaaagcgtaacgaatttgttccatacaagacaaagggagctcgcttccgccaaggaaaagattacgttggagccatcccagtcgacctgaagcgacgtcttgacagcatcacatcatcacaatcctctgctagcagtggatttgttgaggagaagtcgctctcagatgtagaggaagaagaagctcccgaggacctctacaaggactttcttaccttagagcacctgatctgctatagttttcaggtcgcgaagggaatggagttcctggcctcaaggaagtgtatccatagagacctcgccgcacggaatatactgttatcagagaagaatgtggtcaaaatctgcgatttcggcctcgccagggacatatacaaggatcccgattacgtccggaaaggggacgcacggcttcctttaaaatggatggctccggaaacgatcttcgatcgcgtgtacaccattcagtccgacgtgtggtcctttggcgtgcttttgtgggaaatcttttctcttggcgcttccccatacccgggagtgaagattgatgaagagttctgtaggcggctgaaggaaggtaccaggatgcgcgctcccgattacaccacccccgaaatgtaccagactatgcttgactgctggcacggagaaccctcccagcgccctaccttttcagaactggtggagcacctcggtaacctactccaggcaaacgcgcagcaggacggcaaagattacatcgtgctaccgattagcgaaaccctgtcaatggaagaggacagtggtctatccctgcccacctccccggtaagttgcatggaagaggaagaagtgtgcgatcctaaattccactacgacaataccgccggtatctcccagtatctccagaactctaagagaaagagtcgccctgtttctgtaaagacctttgaagacatcccactagaagaaccagaggtgaaagtcattccggatgacaaccagacagattccgggatggtgctggcgagcgaggagctgaagacactggaagatcggacgaagctatcccccagttttggaggcatggtgcccagcaaatcccgcgaatccgtggcgtctgaagggtcgaaccaaacatctggctaccagagcggctaccacagtgatgacaccgacaccaccgtttacagctcggaggaggccgaactgcttaagctgattgaaattggagtccagacagggtcgaccgcccagatcctgcagccggactctggaaccacccttagctcccccccagtctag

SEQ ID NO: 126875 - protein, 793 aa, Artificial Sequence
  derived and/or modified sequence
MASKTKASEALKVVARCRPLSRKEEAAGHEQILTMDVKLGQVTLRNPRAAPGELPKTFTFDAVYDASSKQADLYDETVRPLIDSVLQGFNGTVFAYGQTGTGKTYTMQGTWVEPELRGVIPNAFEHIFTHISRSQNQQYLVRASYLEIYQEEIRDLLSKEPGKRLELKENPETGVYIKDLSSFVTKNVKEIEHVMNLGNQTRAVGSTHMNEVSSRSHAIFIITVECSERGSDGQDHIRVGKLNLVDLAGSERQNKAGPNTAGGAATPSSGGGGGGGGSGGGAGGERPKEASKINLSLSALGNVIAALAGNRSTHIPYRDSKLTRLLQDSLGGNAKTIMVATLGPASHSYDESLSTLRFANRAKNIKNKPQVNEDPKDTLLREFQEEIARLKAQLEKRGMLGKRPRRKSSRRKKAVSAPPGYPEGPVIEAWVAEEEDDNNNNHRPPQPILESALEKNMENYLQEQKERLEEEKAAIQDDRSLVSEEKQKLLEEKEKMLEDLRREQQATELLAAKYKAMESKLLIGGRNIMDHTNEQQKMLELKRQEIAEQKRREREMQQEMMLRDEETMELRGTYTSLQQEVEVKTKKLKKLYAKLQAVKAEIQDQHDEYIRVRQDLEEAQNEQTRELKLKYLIIENFIPPEEKNKIMNRLFLDCEEEQWKFQPLVPAGVSSSQMKKRPTSAVGYKRPISQYARVAMAMGSHPRYRAENIMFLELDVSPPAVFEMEFSHDQEQDPRALHMERLMRLDSFLERPSTSKVRKSRSWCQSPQRPPPSTTHASLASASLRPATVADHE

SEQ ID NO: 126876 - protein, 599 aa, Artificial Sequence
  derived and/or modified sequence
MNLGNQTRAVGSTHMNEVSSRSHAIFIITVECSERGSDGQDHIRVGKLNLVDLAGSERQNKAGPNTAGGAATPSSGGGGGGGGSGGGAGGERPKEASKINLSLSALGNVIAALAGNRSTHIPYRDSKLTRLLQDSLGGNAKTIMVATLGPASHSYDESLSTLRFANRAKNIKNKPQVNEDPKDTLLREFQEEIARLKAQLEKRGMLGKRPRRKSSRRKKAVSAPPGYPEGPVIEAWVAEEEDDNNNNHRPPQPILESALEKNMENYLQEQKERLEEEKAAIQDDRSLVSEEKQKLLEEKEKMLEDLRREQQATELLAAKYKAMESKLLIGGRNIMDHTNEQQKMLELKRQEIAEQKRREREMQQEMMLRDEETMELRGTYTSLQQEVEVKTKKLKKLYAKLQAVKAEIQDQHDEYIRVRQDLEEAQNEQTRELKLKYLIIENFIPPEEKNKIMNRLFLDCEEEQWKFQPLVPAGVSSSQMKKRPTSAVGYKRPISQYARVAMAMGSHPRYRAENIMFLELDVSPPAVFEMEFSHDQEQDPRALHMERLMRLDSFLERPSTSKVRKSRSWCQSPQRPPPSTTHASLASASLRPATVADHE

SEQ ID NO: 126877 - DNA, 2382 bp, Artificial Sequence
  derived and/or modified sequence
atggccagcaaaactaaggcgtccgaagctctcaaggtggtggctcgctgtagaccccttagcagaaaggaagaggctgcaggtcatgagcaaattcttacaatggatgtcaagttaggacaagttactcttcggaaccccagggctgcccccggcgaattgccaaaaaccttcacatttgacgccgtttatgacgccagttcaaagcaggccgacctatatgacgagactgtcagacccttaatcgactcagtcttacagggattcaatggcacggtgttcgcctacggacagaccggaacaggcaagacatatactatgcaaggcacgtgggtggagcctgaacttaggggcgtcataccaaatgctttcgaacatattttcacgcacatcagtcgctctcagaatcagcaatatctggtccgcgcaagctatttggaaatctatcaagaggagataagggacctcttatcaaaagagccaggcaagaggctggagttgaaggagaaccccgagactggagtatatattaaagacctgtcctcattcgtgacaaagaatgtgaaggagatagagcatgtgatgaacctgggaaatcagacaagagcagttggcagtacacatatgaatgaagttagcagtcgttctcatgccattttcatcatcaccgtagagtgctccgaacgcggctccgatgggcaggatcacattagggtcggtaaactcaacttagtagatctagctgggtctgagaggcagaataaggcaggacctaacaccgctgggggtgccgcaaccccctctagcggcggcggaggtggaggcggtggctccggtggcggggctggcggcgagaggcctaaggaggcgagcaagattaacctttcactgagtgctttggggaacgtaatcgcagccttagcaggaaaccgctctacccatataccgtaccgtgacagcaagctaacccggttgttgcaagatagcttgggtgggaacgccaaaactataatggtggctacactgggcccagccagtcacagctacgacgagagtctgtccacactccgctttgccaacagggccaagaatatcaaaaacaagcctcaggtgaatgaagatccaaaagacaccctgctgcgggagtttcaggaagagatcgcgcgactcaaggcccaactagagaaacgaggcatgctgggaaagcggccacgccggaagtcttcccgacgcaaaaaagctgtgagtgccccgccaggataccctgaaggccccgtgatcgaggcctgggttgccgaagaagaagatgataacaacaacaaccaccgtccacctcagcccatattagagagcgcactcgaaaaaaatatggaaaactatttgcaagagcagaaggagaggctggaggaagaaaaagcagccattcaagacgacaggtccctggtgagcgaggaaaagcagaagctgctcgaagagaaagagaagatgcttgaggatttgagacgagaacaacaggccacagaattgctggccgccaagtacaaagcaatggagtccaagctgctaataggcggaagaaacattatggatcataccaatgagcagcagaagatgctcgaactgaaacgtcaggagatagctgaacagaaacgccgtgagcgtgaaatgcaacaggaaatgatgctacgcgatgaagagactatggagctcaggggaacttacacctccctgcagcaggaggtcgaggtgaagacaaaaaagctcaaaaaactgtacgcaaaactgcaggccgtgaaggccgaaattcaagatcagcacgacgagtacatcagggtaagacaggatctcgaggaagctcagaatgaacagactagggaactgaaactgaaatacctcatcatagaaaactttatccccccggaggaaaaaaataaaatcatgaaccgcctattccttgattgtgaagaggagcagtggaaatttcagccattagtgcctgcaggcgtgtcaagctcacaaatgaaaaagaggcccacaagtgctgtgggatataagcggcccatcagtcagtacgccagagtcgccatggccatgggatcccaccccaggtacagggctgaaaatataatgttcctggaactggacgtgtcaccacccgctgtgttcgaaatggagttctcacacgaccaagaacaggacccgcgagctcttcatatggaacggctgatgaggttggatagctttctggaacggccaagcacttctaaggtacgtaagtctcgttcttggtgtcaatcaccccagcggccaccccccagtaccacacacgcctccctggccagcgcctcattgaggcctgcaaccgtcgccgatcacgagtag

SEQ ID NO: 126878 - DNA, 2382 bp, Artificial Sequence
  derived and/or modified sequence
atggcttccaaaacaaaagccagcgaagcactcaaggtcgtggccaggtgtcggcctctgagtaggaaagaggaggccgcgggtcacgaacagatactcacaatggacgttaagttgggccaggttacactcaggaaccccagggctgccccaggggagctgcccaagacttttaccttcgatgcagtttatgatgcctcctccaagcaggccgacctctatgacgagaccgtgagacctctaatcgatagtgtccttcaaggattcaacgggaccgttttcgcctatggtcaaaccgggactggcaagacctatacgatgcagggaacatgggtcgagccagagcttcgtggagtcattcccaatgccttcgaacatatcttcacccacatctcacggtctcaaaaccagcaatacctggtccgagctagctatctcgaaatttatcaggaggagattcgggacctactctccaaggaacctggcaagcggcttgagctcaaagaaaaccctgaaaccggagtctatataaaggacctttctagcttcgtgaccaagaacgtgaaagaaattgagcacgtgatgaatctggggaatcagacccgcgccgtgggctcaacacacatgaacgaggtttctagtcgatcccacgccatcttcatcatcactgttgagtgtagcgaaagagggtccgacggtcaagaccatattagggtcggcaagctgaatctggttgacctcgccgggtctgagcgccagaataaagccgggcccaatactgcgggaggagccgctacccctagtagcgggggagggggaggcggtggcggcagcggcgggggagcggggggagaacgccccaaggaagcatccaagatcaacttatcattgagcgcactgggcaacgtgatcgccgcgcttgccgggaacaggagtacccacatcccttaccgagattctaagctcacacgcctcctccaggattcccttggcggaaacgccaagaccatcatggtagccaccctcggcccagcaagccattcttatgatgaatcgctgtctacattgcgcttcgcaaaccgtgctaaaaacataaagaacaagccacaggttaatgaagatccgaaggacacactcctgagagagttccaagaggagattgcaagactcaaggcccagcttgagaagagagggatgctcggcaaacgcccacgcagaaaaagctccagaagaaagaaggcagtgagtgccccccccggctaccctgagggaccagtaatcgaggcgtgggtggcagaggaggaggacgataataataataatcaccgtccaccccagccaattctcgaatccgctctcgagaaaaacatggagaactacctgcaggaacagaaggagagactagaggaggaaaaagcagctattcaggacgaccggagccttgtgtccgaggagaaacagaagttgctggaagagaaggaaaaaatgctcgaggatctccggcgggagcagcaagctacggagctgttggcggcaaagtacaaggctatggaatcgaaattgttaatcggcggtcgtaacattatggaccacaccaatgaacagcaaaagatgctcgagctcaaaagacaggaaatcgcggaacagaagcgccgtgagagagagatgcagcaggagatgatgctgagggacgaggaaactatggaattaaggggaacttacacatctctccagcaagaggttgaggtgaaaactaagaaacttaagaaactgtacgccaaactgcaggcagtaaaggccgaaatccaggatcaacatgatgagtatatcagggtccggcaggatctggaggaagctcagaatgagcagactagagaacttaagctcaaatatctgatcatcgagaacttcattcctccagaggagaagaataaaataatgaatcgcctgtttctcgactgtgaagaagaacagtggaagttccaacctctggttccggcaggcgtcagctcatcgcagatgaaaaagaggccaacaagtgctgtgggctacaagcggcccatatcacagtatgcaagagtggccatggctatggggagccatcctagatatcgagcagaaaacattatgttcctggagttggacgtctctccccctgccgtgtttgagatggagttttcacacgaccaggaacaggatcccagggcattacacatggaacgcctcatgaggcttgactcattcttggagcggccctcaacctcaaaagtgcggaagagtcgcagttggtgtcaaagcccccaaaggcccccaccatcaaccacccacgctagcctggcctcagcatctctgcgtccagctactgtcgcagatcacgagtag

SEQ ID NO: 126879 - DNA, 1800 bp, Artificial Sequence
  derived and/or modified sequence
atgaatttggggaaccagacgagggctgtcgggtccacacacatgaacgaggtcagcagtcgaagccatgctatcttcattataacggtggagtgcagtgaacggggaagcgatggacaagaccatattagagttggcaaactgaacctagtggatctcgccggcagcgagagacaaaacaaggcaggtcctaacaccgctggcggtgcagccaccccttcttccgggggtggaggtgggggagggggcagcggcgggggcgctggcggagagcgcccaaaggaagcaagtaaaattaatctctccctgagtgctttgggaaacgtcattgcagctctcgccggaaatcggtccactcacatcccatatagggacagcaagttaaccaggctactgcaggatagtctggggggaaacgccaaaactatcatggttgccacactcgggcctgcctcccatagttatgacgaaagcctgtcgaccttgaggtttgctaaccgcgcaaagaatattaagaataaacctcaggtcaatgaggatcctaaggacaccctgttgagagagttccaggaagaaattgccaggctaaaggcccagcttgaaaagcgaggcatgctcggaaagcgccctaggcggaaatctagccgtcgaaaaaaggccgtttctgctccaccgggttatcctgaggggccggtcatagaagcttgggttgcagaggaagaagatgataataacaacaaccaccgtcctccccagcccatccttgaaagtgccctggaaaaaaacatggagaattatctgcaggagcagaaggagaggctggaggaagagaaggccgccattcaggacgatagatctctcgtgagcgaagaaaagcagaagctcctagaagaaaaggaaaagatgctggaagacctgcggcgtgagcagcaggccaccgaattacttgctgccaagtacaaggccatggagagtaagctgttgatcggcggacggaacatcatggaccacacaaacgaacagcagaaaatgctagaactcaaacgtcaggagatagccgagcagaaacggcgtgaaagggagatgcagcaggagatgatgctgcgagacgaggaaacaatggagctaaggggcacatacacatcactgcagcaagaggtagaggtgaagactaagaaacttaaaaagctttatgccaagctgcaagctgtgaaagccgagatacaggaccagcatgacgagtacatcagggtacgtcaggatctagaggaagcgcaaaatgagcagacacgcgaacttaagcttaagtacctcatcattgagaacttcattccgcccgaagaaaagaataagatcatgaaccggctctttctagattgtgaggaggagcagtggaaattccaaccactggtcccggctggagtatcatcctctcagatgaagaagcgtccaactagcgctgtgggatacaagagacctatatctcaatatgccagggtggccatggccatggggagccaccctaggtacagagccgagaacatcatgtttttggagctggacgtgagcccgccagccgtgtttgagatggagttcagtcacgatcaggaacaggatccccgggctctccacatggagcgattgatgagactggatagcttcctggaacggcctagtacctcaaaagtacgaaaaagtcgcagctggtgccagtcccctcagcgcccccctccaagtactacacacgcaagcctggccagtgccagcctgcgcccagccacagtagctgaccatgagtag

SEQ ID NO: 126880 - DNA, 5338 bp, Artificial Sequence
  derived and/or modified sequence
gtttttctctctcattctccagtggcggcggcggggaaggcggaggcagaggcagcagcagccgcgctggctgcaatgaatgatcccccagcttggggggaggactccaggtgagcctctgccctcgggaggcccgggacccccggccgcccacgaccggcagcccacgctatggatccctagaggaaggaggagaagacagctcgccgcccacccccatcccattttcctcttcctttatctcattgttgccgaagctgtttacggcagcgctccctctgctcctgcatggggcgggctccgggcacggctgctcggcaggcgctgctcccgcggcgactgggggattctgcctaattcacctcccagccggtgcagagaggaccggagagcggtggaggcccggactgcagcagcgttggggccacctcccagcgtccccaccctaggaggctgcatgcggattgaagagctgcgcctgggggctgggccggccccgctgatcccgacctagcgagcaggatagcaggaccgcccaggctgcggaggggctcgggggcaggaaggtcagagcagcaagatggccagtaagaccaaggccagcgaggccctcaaggtggtggcccggtgccgccccctcagcaggaaggaggaggctgctggtcacgagcagatcctgaccatggacgtgaaactgggccaggtgaccctgcggaacccccgcgccgccccgggggagctgcccaagaccttcacctttgacgccgtgtatgatgccagctccaagcaggccgacctgtatgacgaaaccgtgaggcccctgatagactccgtgctccagggtttcaatggcacggtgtttgcctatggccagacgggcactggcaagacctataccatgcaggggacctgggtggagcccgagctgcgcggggtcatcccgaatgcctttgagcacatcttcacccacatctcccgctcccagaaccaacagtacctggtccgggcctcctatttggagatctaccaggaagagattcgagacctgctctccaaggagccgggcaagaggctagagctgaaagagaaccccgagactggcgtctacatcaaggacctctcctccttcgtcaccaagaatgtcaaggagattgagcatgtgatgaacctggggaaccagacccgggctgtgggcagcacccacatgaatgaggtcagctcccgctcccatgccatcttcatcatcactgtggagtgcagcgaacgtggctctgatggccaggaccacatccgagtgggcaagctcaacctcgtggacctggctggcagcgagaggcagaacaaggcaggccccaacacagcgggaggggcagccacaccatcctcgggtggcggtggtggcggtggaggcagtggtggtggtgctggtggagagaggcctaaggaagcctccaaaatcaacctctcattatctgccctgggcaacgtgattgctgccctggcgggcaacaggagcacccacattccctaccgggactccaagctgacccggctgctccaggactccctgggggggaatgccaagaccatcatggtagccacactggggccagcttctcacagctacgatgagagcctctccaccttgcgctttgccaaccgagccaagaacatcaagaacaagccccaggtgaacgaggaccccaaggacacactgctgcgggaattccaagaggagattgcccgcctgaaggcccagctggagaagagggggatgctggggaagcggccccggaggaagagcagccgcaggaagaaggccgtgtccgccccgcctgggtaccctgagggcccagtgattgaggcctgggtggcagaagaggaggatgacaacaacaacaaccaccgcccgccccagcccatcctggagtcagccttggagaagaacatggagaattacctgcaggaacagaaggagcggctggaggaggagaaggcagccatccaggatgaccgcagcctggtgagcgaggagaagcagaagctgctggaggagaaggagaagatgctggaggacctgcggcgggaacagcaggccacagagctgcttgcggccaagtacaaggccatggagagcaagctcctcatcgggggcaggaacatcatggatcacaccaacgaacagcagaagatgttggaactgaagaggcaggagattgccgagcagaaacgtcgtgagcgggagatgcagcaggagatgatgctccgggacgaggagactatggagctccggggcacctacacatccctgcagcaggaggtggaggtcaaaaccaagaaactcaagaagctctacgccaagctgcaggcggtgaaggcggagatccaggaccagcatgatgagtatatccgcgtgcggcaggacctggaggaggcgcagaacgagcagacccgcgaactcaagctcaagtacctaatcatcgagaacttcatcccgccggaggagaagaacaagatcatgaaccggcttttcctggactgtgaggaggagcagtggaagttccagccactggtgccagccggcgtcagtagcagccagatgaagaagcggccaacatctgcagtgggctacaagaggcctatcagccagtatgctcgggttgccatggcaatggggtcccaccccaggtacagggctgaaaacataatgtttctggagttggatgtgtcccctccagctgtctttgagatggaattctctcacgaccaagaacaagaccctcgtgcgctacacatggagaggctcatgcgattggacagctttctggaaagaccttccacgtctaaagtccgaaagtccagatcctggtgccagagtcctcagcggcctccaccttccaccacacatgcctccctggcctctgcttctctgcgccctgcaacagtggcggaccatgagtgacaaccatcacgtcaggctgcccatccaatagactcctgggatggggcagccaaccctggctcatctcatctgccgcttggtgcgtgtgcgtgtgcgtgcatgtgcgtgtgcgtgtgtgcaggggtgagaatctggcagatggtgcctctgcctgctcttcttcgcctcctttatttaattcatgttatttattcgcggagctctgttcgtgttggggagatgccctcgcctgagccgtctgggcctaccgtggtcactgcgtagcctctttttcttctgacttgagagctcccccagtcagatctcaggcttgtccccctgtcagctgcctccagaagggaaggtagccagtgcctgagaagacagtcccttttctacccaccgcactccataacctccatcttctcccacactgatggcgagcagcccctgagcactttctgggactgggagactgcttggtgttccctgaggacaagagacatcctgacagtgttgggcatctgctccccgtggacacagccccactctccactttctgagcctcagacaacctcattcagcctcttgggctccttttcaaggacattaataacctcaccaacatagctcatgcccttcagctttgacaagaactcacagcttcccaaactctgctttctgcccaccttggatgggaactgtggaccaagcaattaccatcgccttggaacctgcaggaaatggaacagcaattgagacaacttgaacagtcatcaacggaagtccctccactggattcctttgtttctgtcccctccgaggagtcattttggtcgacaggctctcaaggcaactccccattttcaagaggctgctcctgcctgcttcgatcatttctccctgcagctgcctagaccccgttcacagtgggaggagtcaatgtcattctacccctcgctaaacgaagatattaacatctattgctttttcccttcatctgtcacaggaaacagaagcccaggcacaatcttttccagctttgcctgttacccctgtttctgaattgcatctttaaggtattattttgttgaaaatagatcctttattcactagttacgcaaattggttcctagggggatactccttaccttcctttgtgatggcccaaaatgtctctaggtatctcaagtgataagtaaatttctacaaaaaaaaatggttaatgttcattgactggctttttaagtgtatattttggaggacgggtgaagaggtcataacgaaagcaagcgagtgaattaggatttcaaagtgccctaatagtgtgagtctccagttcctagaatatgaagagtgctgtcgttggggtgaaaccatgagactgacagatctgcctgaaatggggggtgtgggaggtggtggcgggggttattctctttccttcaggaaatgaacccttcttacatcattcaagttctgctctgaggatcaagcttgggtctgatttaactcagcgacactgtcatttctgcttcattactggactagagggttgagccacccacttgccatttgctcctgtccttccaggaaatcacaattttcatcagagcccaagagattatttgagactcaggattcagatcagaggttcgactgtggctgggacaggagttgtgtgtagaaattcaccaggtggcctgagcgcagggggacctccagggctgcgttgagcagcctctcccactgacctctttctcgtttgtggacaaagcagcacgtatcacctcattcatcacttggacacatcgcctttgcattgtcttgtcacacctccctcacagtcttatagcacaatatacccaaatcagcccccccagtccgagggctgggcccgaggtatggtcggaggaggagctcctgcctgcggttttgtgtatgtgtgtatgtgtgtgcgtgtttgtgtgcgtgtttacctccacaggggacactctacactcagtgtaagatctgctgggaacagggccaccaggagtggctggatctcagtctctctgtctctctttctctccttttccttttggtgtatcaaatatttgattgacaaagtaagggccttgattaggaccaaattctcgtgtgttgctatggtctttatttaggacaacaattaacaatgcagtggcccattcttgtcactctacacatatgactatacgggacatatgtaatatataaatatatatataaaacattcccctctgtccccttggcttcggatggaggcctttctgttgagctgaaatgcacctgcagctgggtgctgccagcagcttgcaggccccagccctgttccaatcaatgcagttgacaataaaggaatgagtatcgtca

SEQ ID NO: 126881 - DNA, 3180 bp, Artificial Sequence
  derived and/or modified sequence
ggcggtggctgcgctgcacccgactggtgggcgcaggacctgggtcggcaccggagcctgtcatcccggagcggtcggcgggggtgcagagacggcgatgcgcccctgtcccccgcacccgggccgctccgggctcgcgcctcccgccccgcggccccgccccctgccccaccccagtcgggaggcttagctggggccgcagcgcggcggcaacatcactctcgctgccgctgctccgccccatccccttctgtttttctctctcattctccagtggcggcggcggggaaggcggaggcagaggcagcagcagccgcgctggctgcaatgaatgatcccccagcttggggggaggactccagccggtgcagagaggaccggagagcggtggaggcccggactgcagcagcgttggggccacctcccagcgtccccaccctaggaggctgcatgcggattgaagagctgcgcctgggggctgggccggccccgctgatcccgacctagcgagcaggatagcaggaccgcccaggctgcggaggggctcgggggcaggaaggtcagagcagcaagatggccagtaagaccaaggccagcgaggccctcaaggtggtggcccggtgccgccccctcagcaggaaggaggaggctgctggtcacgagcagatcctgaccatggacgtgaaactgggccaggtgaccctgcggaacccccgcgccgccccgggggagctgcccaagaccttcacctttgacgccgtgtatgatgccagctccaagcaggccgacctgtatgacgaaaccgtgaggcccctgatagactccgtgctccagggtttcaatggcacggtgtttgcctatggccagacgggcactggcaagacctataccatgcaggggacctgggtggagcccgagctgcgcggggtcatcccgaatgcctttgagcacatcttcacccacatctcccgctcccagaaccaacagtacctggtccgggcctcctatttggagatctaccaggaagagattcgagacctgctctccaaggagccgggcaagaggctagagctgaaagagaaccccgagactggcgtctacatcaaggacctctcctccttcgtcaccaagaatgtcaaggagattgagcatgtgatgaacctggggaaccagacccgggctgtgggcagcacccacatgaatgaggtcagctcccgctcccatgccatcttcatcatcactgtggagtgcagcgaacgtggctctgatggccaggaccacatccgagtgggcaagctcaacctcgtggacctggctggcagcgagaggcagaacaaggcaggccccaacacagcgggaggggcagccacaccatcctcgggtggcggtggtggcggtggaggcagtggtggtggtgctggtggagagaggcctaaggaagcctccaaaatcaacctctcattatctgccctgggcaacgtgattgctgccctggcgggcaacaggagcacccacattccctaccgggactccaagctgacccggctgctccaggactccctgggggggaatgccaagaccatcatggtagccacactggggccagcttctcacagctacgatgagagcctctccaccttgcgctttgccaaccgagccaagaacatcaagaacaagccccaggtgaacgaggaccccaaggacacactgctgcgggaattccaagaggagattgcccgcctgaaggcccagctggagaagagggggatgctggggaagcggccccggaggaagagcagccgcaggaagaaggccgtgtccgccccgcctgggtaccctgagggcccagtgattgaggcctgggtggcagaagaggaggatgacaacaacaacaaccaccgcccgccccagcccatcctggagtcagccttggagaagaacatggagaattacctgcaggaacagaaggagcggctggaggaggagaaggcagccatccaggatgaccgcagcctggtgagcgaggagaagcagaagctgctggaggagaaggagaagatgctggaggacctgcggcgggaacagcaggccacagagctgcttgcggccaagtacaaggccatggagagcaagctcctcatcgggggcaggaacatcatggatcacaccaacgaacagcagaagatgttggaactgaagaggcaggagattgccgagcagaaacgtcgtgagcgggagatgcagcaggagatgatgctccgggacgaggagactatggagctccggggcacctacacatccctgcagcaggaggtggaggtcaaaaccaagaaactcaagaagctctacgccaagctgcaggcggtgaaggcggagatccaggaccagcatgatgagtatatccgcgtgcggcaggacctggaggaggcgcagaacgagcagacccgcgaactcaagctcaagtacctaatcatcgagaacttcatcccgccggaggagaagaacaagatcatgaaccggcttttcctggactgtgaggaggagcagtggaagttccagccactggtgccagccggcgtcagtagcagccagatgaagaagcggccaacatctgcagtgggctacaagaggcctatcagccagtatgctcgggttgccatggcaatggggtcccaccccaggtacagggctgaaaacataatgtttctggagttggatgtgtcccctccagctgtctttgagatggaattctctcacgaccaagaacaagaccctcgtgcgctacacatggagaggctcatgcgattggacagctttctggaaagaccttccacgtctaaagtccgaaagtccagatcctggtgccagagtcctcagcggcctccaccttccaccacacatgcctccctggcctctgcttctctgcgccctgcaacagtggcggaccatgagtgacaaccatcacgtcaggctgcccatccaatagactcctgggatggggcagccaaccctggctcatctcatctgccgcttggtgcgtgtgcgtgtgcgtgcatgtgcgtgtgcgtgtgtgcaggggtgagaatctggcagatggtgcctctgcctgctcttcttcgcctcctttatttaattcatgttatttattcgcggagctctgttcgtgttggggagatgccc

SEQ ID NO: 126882 - DNA, 2544 bp, Artificial Sequence
  derived and/or modified sequence
attctccagtggcggcggcggggaaggcggaggcagaggcagcagcagccgcgctggctgcaatgaatgatcccccagcttggggggaggactccaggtgagcctctgccctcgggaggcccgggacccccggccgcccacgaccggcagcccacgctatggatccctagaggaaggaggagaagacagctcgccgcccacccccatcccattttcctcttcctttatctcattgttgccgaagctgtttacggcagcgctccctctgctcctgcatggggcgggctccgggcacggctgctcggcaggcgctgctcccgcggcgactgggggattctgcctaattcacctcccatttggagatctaccaggaagagattcgagacctgctctccaaggagccgggcaagaggctagagctgaaagagaaccccgagactggcgtctacatcaaggacctctcctccttcgtcaccaagaatgtcaaggagattgagcatgtgatgaacctggggaaccagacccgggctgtgggcagcacccacatgaatgaggtcagctcccgctcccatgccatcttcatcatcactgtggagtgcagcgaacgtggctctgatggccaggaccacatccgagtgggcaagctcaacctcgtggacctggctggcagcgagaggcagaacaaggcaggccccaacacagcgggaggggcagccacaccatcctcgggtggcggtggtggcggtggaggcagtggtggtggtgctggtggagagaggcctaaggaagcctccaaaatcaacctctcattatctgccctgggcaacgtgattgctgccctggcgggcaacaggagcacccacattccctaccgggactccaagctgacccggctgctccaggactccctgggggggaatgccaagaccatcatggtagccacactggggccagcttctcacagctacgatgagagcctctccaccttgcgctttgccaaccgagccaagaacatcaagaacaagccccaggtgaacgaggaccccaaggacacactgctgcgggaattccaagaggagattgcccgcctgaaggcccagctggagaagagggggatgctggggaagcggccccggaggaagagcagccgcaggaagaaggccgtgtccgccccgcctgggtaccctgagggcccagtgattgaggcctgggtggcagaagaggaggatgacaacaacaacaaccaccgcccgccccagcccatcctggagtcagccttggagaagaacatggagaattacctgcaggaacagaaggagcggctggaggaggagaaggcagccatccaggatgaccgcagcctggtgagcgaggagaagcagaagctgctggaggagaaggagaagatgctggaggacctgcggcgggaacagcaggccacagagctgcttgcggccaagtacaaggccatggagagcaagctcctcatcgggggcaggaacatcatggatcacaccaacgaacagcagaagatgttggaactgaagaggcaggagattgccgagcagaaacgtcgtgagcgggagatgcagcaggagatgatgctccgggacgaggagactatggagctccggggcacctacacatccctgcagcaggaggtggaggtcaaaaccaagaaactcaagaagctctacgccaagctgcaggcggtgaaggcggagatccaggaccagcatgatgagtatatccgcgtgcggcaggacctggaggaggcgcagaacgagcagacccgcgaactcaagctcaagtacctaatcatcgagaacttcatcccgccggaggagaagaacaagatcatgaaccggcttttcctggactgtgaggaggagcagtggaagttccagccactggtgccagccggcgtcagtagcagccagatgaagaagcggccaacatctgcagtgggctacaagaggcctatcagccagtatgctcgggttgccatggcaatggggtcccaccccaggtacagggctgaaaacataatgtttctggagttggatgtgtcccctccagctgtctttgagatggaattctctcacgaccaagaacaagaccctcgtgcgctacacatggagaggctcatgcgattggacagctttctggaaagaccttccacgtctaaagtccgaaagtccagatcctggtgccagagtcctcagcggcctccaccttccaccacacatgcctccctggcctctgcttctctgcgccctgcaacagtggcggaccatgagtgacaaccatcacgtcaggctgcccatccaatagactcctgggatggggcagccaaccctggctcatctcatctgccgcttggtgcgtgtgcgtgtgcgtgcatgtgcgtgtgcgtgtgtgcaggggtgagaatctggcagatggtgcctctgcctgctcttcttcgcctcctttatttaattcatgttatttattcgcggagctctgttcgtgttggggagatgccctcgcctgagccgtctg

SEQ ID NO: 126883 - DNA, 2382 bp, Artificial Sequence
  derived and/or modified sequence
atggccagcaagaccaaggccagcgaggccctgaaggtggtggcccgctgccggcccctgagcaggaaggaggaggccgccggccacgagcagatcctgaccatggatgtgaagctgggccaggtgaccctgaggaaccccagggctgcccctggagagctgcccaagaccttcacctttgatgctgtgtatgatgccagcagcaagcaggccgacctgtatgatgaaacagtgcggcccctgattgacagcgtgctgcagggcttcaacggcaccgtgtttgcctacggccagacaggaacaggcaagacctacaccatgcagggcacctgggtggagcctgagctgcggggcgtcatccccaatgcctttgagcacatcttcacccacatcagccgcagccagaaccagcagtacctggtgcgggccagctacctggagatctaccaggaggagatccgggacctgctgagcaaggagcccgggaagaggctggagctgaaggaaaatcctgagactggagtgtacatcaaggacctgagcagctttgtgaccaagaatgtgaaggagattgaacatgtgatgaacctgggcaaccagaccagggctgtgggcagcacccacatgaatgaggtgagcagccgcagccacgccatcttcatcatcaccgtggagtgcagcgagcggggcagtgatggccaggaccacatccgggtgggcaagctgaacctggtggacctggccggcagcgagcggcagaacaaggccggccccaacacagctggaggagctgccacccccagcagcggcggcggcggcggcggcggcggcagcggcggcggggccggcggggagcggcccaaggaggccagcaagatcaacctgagcctgagcgccctgggcaatgtgattgctgccctggccggcaacagaagcacccacatcccctacagagacagcaagctgacccggctgctgcaggacagcctgggcggcaatgccaagaccatcatggtggccaccctgggccctgccagccacagctatgatgagagcctgagcaccctgcgctttgccaacagagccaagaacatcaagaacaagccccaggtgaatgaagaccccaaggacaccctgctgcgggagttccaggaggagatcgcccggctgaaggcccagctggagaagaggggcatgctgggcaagaggcccaggaggaagagcagcaggaggaagaaggctgtgtctgcccctcctggctacccagagggccctgtgattgaggcctgggtggccgaggaggaggatgacaacaacaacaaccaccggcccccccagcccatcctggagagcgccctggagaagaacatggagaactacctgcaggagcagaaggagcggctggaggaggagaaggccgccatccaggatgacaggagcctggtgtctgaggagaagcagaagctgctggaggagaaggagaagatgctggaggacctgcggcgggagcagcaggccacagagctgctggccgccaagtacaaggccatggagagcaagctgctgattggaggcaggaacatcatggaccacaccaatgagcagcagaagatgctggagctgaagaggcaggagattgctgagcagaagagaagagagcgggagatgcagcaggagatgatgctgagagatgaggagaccatggagctgcggggcacctacaccagcctgcagcaggaggtggaggtgaagaccaagaagctgaagaagctgtatgccaagctgcaggccgtgaaggccgagatccaggaccagcatgatgagtacatccgggtgcggcaggacctggaggaggcccagaatgagcagacccgggagctgaagctgaagtacctgatcatcgagaacttcatccccccagaggagaagaacaagatcatgaacagactcttcctggactgtgaggaggagcagtggaagttccagcccctggtgcctgctggggtgagcagcagccagatgaagaagaggcccaccagcgctgtgggctacaagaggcccatcagccagtatgcccgggtggccatggccatgggcagccacccccgctacagagctgagaacatcatgttcctggagctggatgtgagccccccagctgtgtttgagatggagttcagccatgaccaggagcaggacccccgggccctgcacatggagcggctgatgaggctggacagcttcctggagcggcccagcaccagcaaggtgaggaagagccgctcctggtgccagagcccccagaggcccccacccagcaccacccacgccagcctggccagcgccagcctgcggcctgccaccgtggccgaccacgagtag

SEQ ID NO: 126884 - DNA, 1800 bp, Artificial Sequence
  derived and/or modified sequence
atgaacctgggcaaccagaccagggctgtgggcagcacccacatgaatgaggtgagcagccgcagccacgccatcttcatcatcaccgtggagtgcagcgagcggggcagtgatggccaggaccacatccgggtgggcaagctgaacctggtggacctggccggcagcgagcggcagaacaaggccggccccaacacagctggaggagctgccacccccagcagcggcggcggcggcggcggcggcggcagcggcggcggggccggcggggagcggcccaaggaggccagcaagatcaacctgagcctgagcgccctgggcaatgtgattgctgccctggccggcaacagaagcacccacatcccctacagagacagcaagctgacccggctgctgcaggacagcctgggcggcaatgccaagaccatcatggtggccaccctgggccctgccagccacagctatgatgagagcctgagcaccctgcgctttgccaacagagccaagaacatcaagaacaagccccaggtgaatgaagaccccaaggacaccctgctgcgggagttccaggaggagatcgcccggctgaaggcccagctggagaagaggggcatgctgggcaagaggcccaggaggaagagcagcaggaggaagaaggctgtgtctgcccctcctggctacccagagggccctgtgattgaggcctgggtggccgaggaggaggatgacaacaacaacaaccaccggcccccccagcccatcctggagagcgccctggagaagaacatggagaactacctgcaggagcagaaggagcggctggaggaggagaaggccgccatccaggatgacaggagcctggtgtctgaggagaagcagaagctgctggaggagaaggagaagatgctggaggacctgcggcgggagcagcaggccacagagctgctggccgccaagtacaaggccatggagagcaagctgctgattggaggcaggaacatcatggaccacaccaatgagcagcagaagatgctggagctgaagaggcaggagattgctgagcagaagagaagagagcgggagatgcagcaggagatgatgctgagagatgaggagaccatggagctgcggggcacctacaccagcctgcagcaggaggtggaggtgaagaccaagaagctgaagaagctgtatgccaagctgcaggccgtgaaggccgagatccaggaccagcatgatgagtacatccgggtgcggcaggacctggaggaggcccagaatgagcagacccgggagctgaagctgaagtacctgatcatcgagaacttcatccccccagaggagaagaacaagatcatgaacagactcttcctggactgtgaggaggagcagtggaagttccagcccctggtgcctgctggggtgagcagcagccagatgaagaagaggcccaccagcgctgtgggctacaagaggcccatcagccagtatgcccgggtggccatggccatgggcagccacccccgctacagagctgagaacatcatgttcctggagctggatgtgagccccccagctgtgtttgagatggagttcagccatgaccaggagcaggacccccgggccctgcacatggagcggctgatgaggctggacagcttcctggagcggcccagcaccagcaaggtgaggaagagccgctcctggtgccagagcccccagaggcccccacccagcaccacccacgccagcctggccagcgccagcctgcggcctgccaccgtggccgaccacgagtag

SEQ ID NO: 126885 - DNA, 2382 bp, Artificial Sequence
  derived and/or modified sequence
atggccagcaagaccaaggccagcgaggccctgaaggtggtggcccggtgtagacccctgtctaggaaagaggaagctgccggtcatgagcagatccttaccatggacgtcaagttaggccaggtgaccctgcggaacccgagggctgcaccgggtgagttacctaaaacattcacctttgacgcggtgtatgacgcatcctccaaacaggcagatttgtatgatgaaaccgtgcgaccacttatcgatagcgtccttcaggggtttaatgggactgttttcgcatatggacaaactggaacagggaagacttataccatgcagggtacatgggttgagccggaacttcgaggggtgattcccaacgcgtttgagcatatcttcacgcatatctcccggtcacagaaccagcagtacctggtgcgtgcttcctatctagaaatctaccaggaggagatccgggatctgctctcaaaagagccaggaaagcggctcgagctgaaagagaacccagaaaccggagtgtatattaaggacctctcttctttcgtaaccaagaatgtgaaagaaattgagcacgtgatgaaccttggcaaccagacaagggccgtgggctctacccacatgaatgaagtttccagccggtcgcatgctatcttcatcattacagttgaatgctctgagcggggcagcgacggacaagaccacatccgcgtagggaaactgaacctggtcgacctggctggttctgaaaggcaaaataaagccgggcctaacacggcaggaggcgccgctaccccatcatccgggggcggtggtggaggcggtggaagcggtgggggcgccgggggcgagagaccgaaggaggctagcaagattaaccttagcctcagtgctctgggtaatgttattgctgccttggccggtaatcggtccacacacattccttatagggatagcaagttgacccggctgctgcaggattccctcggtgggaatgcaaagaccatcatggtggccactctgggaccagcttctcattcctatgacgagtccttgagcactcttcgcttcgccaatcgagccaagaacatcaagaacaaacctcaggtgaacgaagatcccaaggatactctgctcagagagttccaggaggaaattgcccgcttaaaggctcagctcgagaaaagagggatgttgggaaagcggccacggcggaaaagcagcaggcgaaagaaggcagtgagcgcgccacccgggtatccagaaggccccgtcattgaggcgtgggttgcggaagaagaagacgataacaacaataaccaccggcccccacagccaatccttgaaagtgcgctggagaaaaacatggagaactacctgcaggaacagaaagagagactggaggaggaaaaggctgctattcaggacgatcgatctctggtgtcggaggagaaacagaaattacttgaggaaaaggaaaagatgctggaagatcttaggcgggagcagcaagccaccgaactgttggcagccaagtataaagccatggagtctaagctactgattggggggaggaacatcatggaccatacaaacgagcagcagaagatgctggaattgaagcggcaggagattgcggagcagaagagacgggagagagagatgcaacaggagatgatgctgagagatgaggagactatggaactcaggggcacctacacttccctacagcaggaagtggaggtaaaaactaaaaagctgaaaaaactgtatgccaaactgcaggccgtcaaggctgaaatccaggaccagcatgatgaatatatcagggtccgccaggacctggaagaagcccagaacgagcaaacaagggagctcaaattgaagtacctaattatcgagaattttatccctccagaggaaaagaataaaatcatgaaccgactgtttctggactgcgaggaagagcagtggaagttccagcctctcgttccagccggagttagtagcagccagatgaagaaacgccctacatccgctgtgggatacaagagaccaatctcacagtacgctcgcgtggcgatggctatgggatcgcatccacgctatcgcgcagagaatatcatgttcctggagctggacgtcagcccccctgcggtttttgagatggagttcagtcatgatcaggagcaagatcctcgagccctgcacatggaacgcctgatgcgtttggattcattcctagagcggccctctacctccaaagtgagaaagtcacgcagctggtgccaaagtccacagagaccgcctccctctacaacccacgcttcccttgctagtgcatccttgagaccagccacggttgccgaccatgagtag

SEQ ID NO: 126886 - DNA, 2382 bp, Artificial Sequence
  derived and/or modified sequence
atggccagcaagaccaaggccagcgaggccctgaaggtggtggcccggtgtcgccccctgtctcggaaggaagaagcggcaggtcacgaacagattttaacaatggacgtgaaactgggacaggttaccctgcggaaccctcgcgcggcacctggtgagttacccaaaaccttcacttttgatgccgtgtacgatgctagtagcaagcaggcagatctctacgatgagacggtgaggcctttaattgacagtgtgctgcagggtttcaatgggacagtgtttgcttatggacagacaggaactggaaagacatatacaatgcagggaacctgggtcgagcccgagctgaggggtgttattcctaacgcttttgaacatatttttacacatatctcacggtcccagaaccagcagtatctggtgcgcgcatcttatctggaaatataccaggaagaaatcagggaccttctttcaaaagagcccggaaaaagacttgagttgaaggaaaaccctgagaccggcgtgtatattaaagacttaagttcctttgtgactaaaaatgtgaaggagatcgaacatgtcatgaaccttggtaatcagacgagagccgtgggttctacgcacatgaacgaagtcagttcaagatcacatgcgattttcataatcacagtggaatgcagcgaacgagggtcagatggccaggaccacatcagagtgggaaagctgaacctcgtggatctggcgggcagtgaacgccagaataaagccggtcccaacacggccggaggggccgccactcccagctctggcggcggcgggggcggcggaggaagtggaggcggagcaggaggagagagacccaaagaagcctctaagatcaacctgagcctttccgcattaggaaacgtgatcgccgcactggcggggaaccggagcacccatattccctatcgcgattctaagctcacccgtctcctccaggacagcctgggcggcaatgccaagactatcatggttgccactttaggcccagcctcacattcctatgacgaatccctttctaccctccgcttcgctaatagagctaaaaacattaagaacaagccacaagtcaatgaggatccaaaggacaccctactgagggagtttcaggaagagatcgctcgactgaaagctcaactggagaaacggggaatgctgggaaaaaggcctcggaggaagagcagcagacgcaagaaagctgtgagcgctcctccagggtatccagaagggcccgttatcgaagcctgggtggcggaggaagaagacgacaataacaacaatcaccggcccccacagccaatcttggagtccgccttagaaaagaacatggaaaactacctgcaagagcagaaggaacgcctggaagaggaaaaagcggccattcaagacgacaggtccctggtgagcgaagagaaacagaagcttctggaggaaaaggaaaagatgcttgaagacttacggagagaacagcaggccacggagctgcttgctgcgaagtacaaggccatggagtcaaaactcttgataggtggtcgcaacattatggatcacactaacgagcaacagaagatgcttgagcttaaaaggcaggagatcgccgagcagaagaggcgcgaacgagaaatgcagcaagagatgatgctacgggatgaggagacaatggagctcagggggacgtacacctccttacaacaggaggtcgaagtgaagaccaagaagttaaaaaaactctatgctaagctgcaggccgttaaagccgaaatccaagaccaacatgatgagtacatacgagtgcgccaggacctcgaggaagcccagaacgaacagacacgcgagctgaaattaaagtacctgatcattgaaaatttcattcctccggaagaaaagaataagattatgaaccggctgtttctggactgtgaagaggagcagtggaagtttcaacctctggtgcctgcaggtgtaagcagcagtcagatgaagaaaaggccaactagcgcggtaggatacaaaaggcctatcagccagtacgcgagagtggcaatggcaatgggctctcatccgcgctatcgggcagagaacattatgttcctcgaactcgatgtgtcccctccagccgtctttgagatggagtttagccatgatcaggaacaggatccacgggccctgcacatggagagattaatgaggcttgatagttttctggagcgtccatccacatcaaaagtgcgcaagagtagaagctggtgccagtcacctcaacggccacctcccagcaccacgcacgctagtcttgctagcgccagcctccgcccggctacagtagccgatcatgagtag

SEQ ID NO: 126887 - DNA, 1800 bp, Artificial Sequence
  derived and/or modified sequence
atgaacctgggcaaccagacccgggccgtgggcagcacccacatgaacgaagtttcctctcggtcgcacgccatctttataataacagttgagtgttccgagcgtggctccgatgggcaggaccacattcgcgtggggaagctgaacttggtggatctggccgggtccgagaggcagaacaaagctgggccaaacactgctggtggtgccgctacccccagtagcggaggaggtggaggcggcggcggttccggtggcggcgcgggtggtgaaagacctaaggaggcttctaaaattaacttgagcctcagcgccctgggcaatgttatagccgcccttgccgggaacagatcaacccatattccctacagggactccaagttgactagactgctccaagatagccttggcgggaatgccaaaaccataatggtggctacacttgggccagctagccactcatatgatgaaagcttatctaccctgagattcgcgaatagagccaaaaacattaaaaacaagccccaagtcaatgaggatcctaaagatactctgcttcgtgagttccaggaggagatcgcacgcctcaaggcacagctcgaaaagagaggcatgttgggaaaacgccctcgccgcaaatcctcccggagaaagaaggcagtctccgctcctcccgggtatcctgaaggtccggtgatagaggcatgggtcgccgaggaggaggatgacaataataacaatcaccgcccaccccaacctatactcgaaagcgccctggagaagaatatggaaaactacctccaggaacagaaagagcggctggaggaggaaaaagcagccatccaggatgaccgttctctggttagtgaggaaaagcaaaagttattagaagaaaaagagaaaatgctggaggatctgagaagggaacagcaggcgaccgagttactggcggccaaatacaaagccatggagtcaaaactccttatcggaggaagaaacatcatggaccatacgaacgaacagcaaaagatgcttgaattgaaaagacaggagatcgccgaacagaagagaagggaaagggagatgcagcaagaaatgatgctgagggatgaggagactatggaacttaggggcacatacacaagtttgcaacaagaagttgaggtcaagacaaagaagctgaaaaaactatatgctaaacttcaggcggtgaaggctgaaatacaggaccagcatgacgaatacataagagtcagacaggatctcgaggaggcccagaacgaacagacgagagaactaaaattaaagtacctcatcatcgagaacttcattcccccggaggaaaagaataagatcatgaatcgactttttttggactgtgaggaagaacagtggaaatttcagccactggtccctgccggcgttagtagttcccagatgaagaagcgacctacatcagcagttggatataaaagacctatcagccagtacgcaagagtggcaatggctatggggtcccacccccgatatcgcgccgagaatataatgttcctggaattggacgtgtcccccccagcagtgttcgaaatggagttttcacacgaccaagaacaggatccccgtgccctgcatatggagagacttatgcggcttgattcctttcttgagcggccttcgacttctaaggtgcgcaaatctcggtcctggtgccaatctcctcaacgcccccctccatcgactactcatgcttcattggctagcgcatccctccgccctgccactgtggccgaccacgagtag

SEQ ID NO: 126888 - DNA, 2382 bp, Artificial Sequence
  derived and/or modified sequence
atggcctctaagaccaaggcaagtgaggctctcaaggtggtggccagatgtcgacctctgtctcgaaaggaggaagcagccggacatgagcagattcttaccatggatgtaaaattaggacaggtcacccttaggaatcctcgggctgctccaggcgaattacctaagacttttacatttgacgcagtgtacgacgcaagcagtaagcaggccgacctttacgacgaaacagtgcgacccctgatcgatagcgtacttcaaggatttaacgggactgtgttcgcgtatggccagaccggaacaggcaaaacctatacgatgcagggtacctgggtagagccagaactcaggggggtgatacccaatgcgttcgaacatatatttacacacatcagcaggtctcaaaaccagcaatacttggttcgagcctcatatcttgaaatttaccaggaagagattagggacttacttagtaaggagcctggtaagaggctagagcttaaagaaaatcctgaaaccggcgtgtacatcaaagacttgagtagcttcgtcaccaagaacgtgaaagaaattgaacatgtcatgaacctggggaatcagactagggccgtcggctctacacacatgaacgaggtctccagccgcagtcatgcaatattcatcatcactgtcgagtgttcagagagaggaagcgacgggcaggaccacatccgtgtgggaaagcttaacttggtggacctggccggatctgagcgacaaaacaaggcaggtccgaatacagccggtggcgctgcaaccccgtcctctggtggtggtggaggcggaggcggttccggaggaggcgcagggggagaacgaccaaaagaggctagtaagataaatttgagcctatccgccctggggaacgtgattgcagctctggccggtaatcggagcacccatattccctaccgggactcaaagttgactcgactgttgcaggactctctcggtggcaatgcaaagacaatcatggtggctactctgggtcccgcatcgcattcatacgatgaatctctttccacgctgaggtttgcaaacagggctaagaacattaagaacaaaccacaggtaaacgaagaccccaaagatacactgctgcgagaattccaagaggagattgcaaggttgaaggctcagctcgagaagcgcggtatgttgggaaaaaggccacgtagaaagagttccaggagaaaaaaggcagtctcagcccctcccggttacccggagggccctgtcattgaagcttgggtcgccgaagaggaagacgataacaacaacaaccaccggccaccacagccaatcctcgaatctgctcttgagaagaacatggaaaactatctgcaggagcagaaagaacggttggaggaagagaaagccgcaatccaggacgatagatccttagtgagcgaggaaaagcagaagttgctagaggagaaggaaaagatgctggaagacctgcgcagggaacagcaggcaacggagctcctcgctgcgaaatataaagctatggagagcaaactcctcattggcggtcgcaacatcatggaccacacaaacgaacagcagaagatgctcgagttgaagcgccaggaaatcgccgagcagaagcgcagggagcgggaaatgcagcaagaaatgatgctgcgagatgaggaaactatggaactacgcggtacgtacacatcccttcaacaggaagtggaagtaaaaacaaagaagttaaagaagctctatgccaaactgcaggccgttaaagccgagattcaagaccaacatgatgaatatatcagagtccggcaggatttagaggaagcccagaacgagcagacacgggaactgaaacttaaatatctaattattgagaattttattcctccagaagagaaaaataagatcatgaaccggctctttcttgattgtgaggaggagcagtggaaatttcaaccactagtccctgcgggagtcagttctagccagatgaaaaaacggccaacaagcgctgtcggttataagcggccaatttctcagtacgccagagttgcaatggcaatgggctcccaccctcggtatagagcagagaatataatgttcttggaactggacgtcagcccaccggcagtgtttgagatggaatttagccatgaccaggagcaggatcccagagcactccatatggaaaggctaatgcgcctggatagctttctggaaagaccctccacgagcaaagtaaggaagagcaggagctggtgtcagtctccccagcgccctccaccatcaactacccacgccagcctggcttctgcctcccttcgcccagcaaccgttgctgaccatgagtag

SEQ ID NO: 126889 - DNA, 2382 bp, Artificial Sequence
  derived and/or modified sequence
atggcttccaagactaaagcctctgaggccctcaaggtggttgctcgatgtcgcccattgtcaagaaaggaagaggcagctggccatgaacagatcctaaccatggatgttaagctgggccaggtcacattgcggaatccacgggctgcacctggagagctgcccaagacctttacgttcgacgctgtctacgacgcgtcatccaaacaggcggacctgtatgatgagacagttaggcccttaattgatagcgtgttgcagggtttcaacggcactgtcttcgcttatggacagactggcactggaaagacttatacaatgcaaggaacttgggtagagcccgagctgagaggggtaattcctaatgcctttgagcatattttcactcacatcagccggtctcagaatcagcagtatctggtcagggcgagttacctagagatatatcaggaggagatccgcgacctcttgagtaaagagccaggcaagcggcttgagttgaaagagaatccagagaccggcgtttacatcaaggatctgagctcgttcgtcaccaaaaacgtgaaagagatcgaacacgttatgaatctgggaaaccaaacccgggcagtcggatcaacgcatatgaacgaagtgagctctcggtctcatgctattttcatcataacggtagaatgcagcgaacggggatccgatgggcaggatcacatccgcgtgggcaaactgaacctggtcgacctcgcgggatctgaacggcagaacaaggccggaccgaacactgctggcggagccgctacccctagttcggggggtgggggtggcggaggtggctcaggcggaggagccggtggcgagcggccaaaggaggcaagtaaaatcaacttatccctgtccgccctcggcaatgtgatagctgcgctcgcgggaaacagaagcacccacatcccatacagggacagcaagttgactagactccttcaagattctcttggaggtaacgcgaagacgattatggtggccaccctgggtccagcttcccattcgtacgatgaatctctgagtacacttaggtttgcgaaccgggctaagaacatcaagaataagccccaggtaaatgaggatccaaaagacacgttgctccgagaattccaagaagaaatcgctcggctcaaggcgcagctggaaaaacgagggatgctggggaaaagacccagaagaaagtcatctcgcagaaagaaagctgtgtccgccccaccaggctatcctgagggacctgtcatcgaagcctgggtggctgaggaggaggacgacaacaacaataatcacagaccgccacagcccatccttgaatctgccttagaaaaaaacatggagaattatctgcaagaacagaaggagaggcttgaggaagaaaaggccgctatccaagacgaccggagcctggtgtccgaggagaagcaaaagctgctggaggaaaaggagaagatgctcgaagacctgaggcgagaacaacaggctacagaattgctggcagcaaagtacaaagcgatggaatccaaattactgatcggcggaaggaacattatggatcatactaatgaacagcaaaagatgttggaactgaagcggcaggaaatagcagagcagaagaggagagagcgggagatgcagcaagaaatgatgttgagagacgaagaaacaatggagctgagaggaacatacacctccctgcaacaagaggtcgaagttaagaccaaaaaactgaaaaaactttatgctaagctccaggcagtgaaagctgaaatccaggaccagcatgatgagtatataagggtgcgccaggacttagaagaggcacagaatgagcagacaagagagctcaaactgaagtacttgatcatcgagaactttattccaccggaggaaaagaataagatcatgaaccgactgttcctcgactgcgaggaagagcagtggaaattccagccattggtccccgctggcgtgagttcatcgcaaatgaaaaagagacctacctctgccgtaggatataagcgacccatatctcaatacgcacgcgtcgcaatggccatggggtcccacccacggtacagggccgagaatattatgttccttgagcttgacgtatcccctcctgcggtgttcgagatggagttctctcatgaccaggagcaagatccgagggcactccatatggagcgcttgatgcgtctggactcttttctggagcggccatctacctctaaggttcgcaagagcaggagctggtgccagtcccctcagcgccctccaccgtccacaacccatgcctctctggcatctgcctcgctgcgtcctgccactgtcgccgatcacgaatag

SEQ ID NO: 126890 - DNA, 1800 bp, Artificial Sequence
  derived and/or modified sequence
atgaatctcgggaatcaaacacgcgctgtcggctctacccatatgaatgaggtgagcagcaggagccacgcaatctttattatcacagtggaatgttctgagcgtgggtcagatggacaggatcacattcgggttggcaagctcaacctcgtcgatctcgccggatcagagaggcagaataaggcgggacccaacacggcaggcggagcagcaaccccttcatctgggggtggaggtggagggggtggcagcggcggaggtgcaggtggcgagcggcctaaagaggcctcaaagataaacttatcgctctccgctctgggaaacgtgatagctgctcttgcaggcaacaggtcaacccacataccttatcgggatagcaagctgactcgcctactacaggacagcttaggcggaaacgctaaaactatcatggtcgcaactttggggcctgcatcccattcctacgatgagtcgctgagtactctgcgttttgcaaatcgggcaaaaaatatcaagaacaagccacaggtgaatgaagacccgaaagacacacttctgcgcgagtttcaggaagagattgctaggctgaaagctcagctcgagaaacgtgggatgctggggaagaggcctaggcgaaagagctcccgcagaaaaaaggcggttagcgcccctcccggatatcctgaaggcccagtaatcgaggcttgggtagccgaagaggaggatgataataacaacaaccatcgacctccacagcccatcctcgaaagcgcgcttgaaaagaatatggagaactatctgcaggaacagaaagagagactcgaagaagagaaggctgccattcaggacgacagatcactagtgagtgaagaaaaacagaagttgctcgaggaaaaggagaaaatgttggaggacctgagacgcgaacaacaagccacggagctgctcgctgcaaagtacaaagcgatggaatccaagcttttaataggaggcaggaacatcatggatcataccaatgagcagcagaagatgctggagctgaagcggcaagaaattgccgagcagaagagaagggagagggaaatgcagcaggagatgatgctccgtgatgaggaaactatggagctgagaggcacctatacttcgctgcagcaggaagtggaggtgaaaacgaaaaagttgaagaagctgtatgccaagctgcaagccgtcaaagccgagatacaggaccagcacgacgagtacatcagggttcgccaggatctggaggaggcccagaacgagcagaccagagaactgaagcttaagtatttaatcatagagaacttcatcccaccggaggagaaaaataagataatgaatcgcctcttcttggactgcgaggaggagcagtggaaattccaacctcttgtaccagctggggtctccagctcccaaatgaagaagcgaccaaccagcgcggtcggttacaaaaggcccattagccagtatgcaagggtggccatggctatggggtcccacccaagatacagagccgagaacatcatgttcctggaactggatgtgagcccgccagcagtatttgagatggagttctcccacgatcaggaacaagatccccgagctttgcacatggagcgccttatgcggcttgattcgttcctggagagacccagtaccagtaaggtgagaaagtcacgctcgtggtgccaatccccccagcggcctccgccaagcactacccacgcctcattagcgtctgccagcctccgaccagcaactgtcgctgaccatgaatag

SEQ ID NO: 126891 - DNA, 2382 bp, Artificial Sequence
  derived and/or modified sequence
atggccagcaagaccaaggccagcgaggccctgaaggtggtggccagatgcagacccctgagcagaaaggaggaggccgccggccacgagcagatcctgaccatggacgtgaagctgggccaggtgaccctgagaaaccccagagccgcccccggcgagctgcccaagaccttcaccttcgacgccgtgtacgacgccagcagcaagcaggccgacctgtacgacgagaccgtgagacccctgatcgacagcgtgctgcagggcttcaacggcaccgtgttcgcctacggccagaccggcaccggcaagacctacaccatgcagggcacctgggtggagcccgagctgagaggcgtgatccccaacgccttcgagcacatcttcacccacatcagcagaagccagaaccagcagtacctggtgagagccagctacctggagatctaccaggaggagatcagagacctgctgagcaaggagcccggcaagagactggagctgaaggagaaccccgagaccggcgtgtacatcaaggacctgagcagcttcgtgaccaagaacgtgaaggagatcgagcacgtgatgaacctgggcaaccagaccagagccgtgggcagcacccacatgaacgaggtgagcagcagaagccacgccatcttcatcatcaccgtggagtgcagcgagagaggcagcgacggccaggaccacatcagagtgggcaagctgaacctggtggacctggccggcagcgagagacagaacaaggccggccccaacaccgccggcggcgccgccacccccagcagcggcggcggcggcggcggcggcggcagcggcggcggcgccggcggcgagagacccaaggaggccagcaagatcaacctgagcctgagcgccctgggcaacgtgatcgccgccctggccggcaacagaagcacccacatcccctacagagacagcaagctgaccagactgctgcaggacagcctgggcggcaacgccaagaccatcatggtggccaccctgggccccgccagccacagctacgacgagagcctgagcaccctgagattcgccaacagagccaagaacatcaagaacaagccccaggtgaacgaggaccccaaggacaccctgctgagagagttccaggaggagatcgccagactgaaggcccagctggagaagagaggcatgctgggcaagagacccagaagaaagagcagcagaagaaagaaggccgtgagcgccccccccggctaccccgagggccccgtgatcgaggcctgggtggccgaggaggaggacgacaacaacaacaaccacagacccccccagcccatcctggagagcgccctggagaagaacatggagaactacctgcaggagcagaaggagagactggaggaggagaaggccgccatccaggacgacagaagcctggtgagcgaggagaagcagaagctgctggaggagaaggagaagatgctggaggacctgagaagagagcagcaggccaccgagctgctggccgccaagtacaaggccatggagagcaagctgctgatcggcggcagaaacatcatggaccacaccaacgagcagcagaagatgctggagctgaagagacaggagatcgccgagcagaagagaagagagagagagatgcagcaggagatgatgctgagagacgaggagaccatggagctgagaggcacctacaccagcctgcagcaggaggtggaggtgaagaccaagaagctgaagaagctgtacgccaagctgcaggccgtgaaggccgagatccaggaccagcacgacgagtacatcagagtgagacaggacctggaggaggcccagaacgagcagaccagagagctgaagctgaagtacctgatcatcgagaacttcatcccccccgaggagaagaacaagatcatgaacagactgttcctggactgcgaggaggagcagtggaagttccagcccctggtgcccgccggcgtgagcagcagccagatgaagaagagacccaccagcgccgtgggctacaagagacccatcagccagtacgccagagtggccatggccatgggcagccaccccagatacagagccgagaacatcatgttcctggagctggacgtgagcccccccgccgtgttcgagatggagttcagccacgaccaggagcaggaccccagagccctgcacatggagagactgatgagactggacagcttcctggagagacccagcaccagcaaggtgagaaagagcagaagctggtgccagagcccccagagacccccccccagcaccacccacgccagcctggccagcgccagcctgagacccgccaccgtggccgaccacgagtag

SEQ ID NO: 126892 - DNA, 1800 bp, Artificial Sequence
  derived and/or modified sequence
atgaacctgggcaaccagaccagagccgtgggcagcacccacatgaacgaggtgagcagcagaagccacgccatcttcatcatcaccgtggagtgcagcgagagaggcagcgacggccaggaccacatcagagtgggcaagctgaacctggtggacctggccggcagcgagagacagaacaaggccggccccaacaccgccggcggcgccgccacccccagcagcggcggcggcggcggcggcggcggcagcggcggcggcgccggcggcgagagacccaaggaggccagcaagatcaacctgagcctgagcgccctgggcaacgtgatcgccgccctggccggcaacagaagcacccacatcccctacagagacagcaagctgaccagactgctgcaggacagcctgggcggcaacgccaagaccatcatggtggccaccctgggccccgccagccacagctacgacgagagcctgagcaccctgagattcgccaacagagccaagaacatcaagaacaagccccaggtgaacgaggaccccaaggacaccctgctgagagagttccaggaggagatcgccagactgaaggcccagctggagaagagaggcatgctgggcaagagacccagaagaaagagcagcagaagaaagaaggccgtgagcgccccccccggctaccccgagggccccgtgatcgaggcctgggtggccgaggaggaggacgacaacaacaacaaccacagacccccccagcccatcctggagagcgccctggagaagaacatggagaactacctgcaggagcagaaggagagactggaggaggagaaggccgccatccaggacgacagaagcctggtgagcgaggagaagcagaagctgctggaggagaaggagaagatgctggaggacctgagaagagagcagcaggccaccgagctgctggccgccaagtacaaggccatggagagcaagctgctgatcggcggcagaaacatcatggaccacaccaacgagcagcagaagatgctggagctgaagagacaggagatcgccgagcagaagagaagagagagagagatgcagcaggagatgatgctgagagacgaggagaccatggagctgagaggcacctacaccagcctgcagcaggaggtggaggtgaagaccaagaagctgaagaagctgtacgccaagctgcaggccgtgaaggccgagatccaggaccagcacgacgagtacatcagagtgagacaggacctggaggaggcccagaacgagcagaccagagagctgaagctgaagtacctgatcatcgagaacttcatcccccccgaggagaagaacaagatcatgaacagactgttcctggactgcgaggaggagcagtggaagttccagcccctggtgcccgccggcgtgagcagcagccagatgaagaagagacccaccagcgccgtgggctacaagagacccatcagccagtacgccagagtggccatggccatgggcagccaccccagatacagagccgagaacatcatgttcctggagctggacgtgagcccccccgccgtgttcgagatggagttcagccacgaccaggagcaggaccccagagccctgcacatggagagactgatgagactggacagcttcctggagagacccagcaccagcaaggtgagaaagagcagaagctggtgccagagcccccagagacccccccccagcaccacccacgccagcctggccagcgccagcctgagacccgccaccgtggccgaccacgagtag

SEQ ID NO: 126893 - protein, 416 aa, Artificial Sequence
  derived and/or modified sequence
MSPSHVVVNVSTARSGPLTTSSAPVSRAESLRPGSRSCTMSMSPTVIILACLGFFLDQSVWAHVGGQDKPFCSAWPSAVVPQGGHVTLRCHCRRGFNIFTLYKKDGVPVPELYNRIFWNSFLISPVTPAHAGTYRCRGFHPHSPTEWSAPSNPLVIMVTGLYEKPSLTARPGPTVRAGENVTLSCSSQSSFDIYHLSREGEAHELRLPAVPSINGTFQADFPLGPATHGETYRCFGSFHGSPYEWSDPSDPLPVSVTGNPSSSWPSPTEPSFKTGIARHLHAVIRYSVAIILFTILPFFLLHRWCSKKKNAAVMNQEPAGHRTVNREDSDEQDPQEVTYAQLDHCIFTQRKITGPSQRSKRPSTDTSVCIELPNAEPRALSPAHEHHSQALMGSSRETTALSQTQLASSNVPAAGI

SEQ ID NO: 126894 - protein, 273 aa, Artificial Sequence
  derived and/or modified sequence
MSMSPTVIILACLGFFLDQSVWAHVGGQDKPFCSAWPSAVVPQGGHVTLRCHYRRGFNIFTLYKKDGVPVPELYNRIFWNSFLISPVTPAHAGTYRCRGFHPHSPTEWSAPSNPLVIMVTGLYEKPSLTARPGPTVRAGENVTLSCSSQSSFDIYHLSREGEAHELRLPAVPSINGTFQADFPLGPATHGETYRCFGSFHGSPYEWSDPSDPLPVSVTGNPSSSWPSPTEPSFKTGIARHLHAVIRYSVAIILFTILPFFLLHRWCSKKKMLL

SEQ ID NO: 126895 - protein, 397 aa, Artificial Sequence
  derived and/or modified sequence
MSLMVVSMACVGFFLDQSVWAHVGGQDKPFCSAWPSAVVPQGGHVTLRCHCRRGFNIFTLYKKDGVPVPELYNRIFWNSFLISPVTPAHAGTYRCRGFHPHSPTEWSAPSNPLVIMVTGLYEKPSLTARPGPTVRAGENVTLSCSSQSSFDIYHLSREGEAHELRLPAVPSINGTFQADFPLGPATHGETYRCFGSFHGSPYEWSDPSDPLPVSVTGNPSSSWPSPTEPSFKTGIARHLHAVIRYSVAIILFTILPFFLLHRWCSKKKVSLTKQRPENSGPCAEAGWEHADAAVMNQEPAGHRTVNREDSDEQDPQEVTYAQLDHCIFTQRKITGPSQRSKRPSTDTSVCIELPNAEPRALSPAHEHHSQALMGSSRETTALSQTQLASSNVPAAGI

SEQ ID NO: 126896 - protein, 360 aa, Artificial Sequence
  derived and/or modified sequence
MSMSPTVIILACLGFFLDQSVWAHVGGQDKPFCSAWPSAVVPQGGHVTLRCHCRRGFNIFTLYKKDGVPVPELYNRIFWNSFLISPVTPAHAGTYRCRGFHPHSPTEWSAPSNPLVIMVTGLYEKPSLTARPGPTVRAGENVTLSCSSQSSFDIYHLSREGEAHELRLPAVPSINGTFQADFPLGPATHGETYRCFGSFHGSPYEWSDPSDPLPVSVTGIARHLHAVIRYSVAIILFTILPFFLLHRWCSKKKNAAVMNQEPAGHRTVNREDSDEQDPQEVTYAQLDHCIFTQRKITGPSQRSKRPSTDTSVCIELPNAEPRALSPAHEHHSQALMGSSRETTALSQTQLASSNVPAAGI

SEQ ID NO: 126897 - protein, 377 aa, Artificial Sequence
  derived and/or modified sequence
MSMSPTVIILACLGFFLDQSVWAHVGGQDKPFCSAWPSAVVPQGGHVTLRCHCRRGFNIFTLYKKDGVPVPELYNRIFWNSFLISPVTPAHAGTYRCRGFHPHSPTEWSAPSNPLVIMVTGLYEKPSLTARPGPTVRAGENVTLSCSSQSSFDIYHLSREGEAHELRLPAVPSINGTFQADFPLGPATHGETYRCFGSFHGSPYEWSDPSDPLPVSVTGNPSSSWPSPTEPSFKTGIARHLHAVIRYSVAIILFTILPFFLLHRWCSKKKNAAVMNQEPAGHRTVNREDSDEQDPQEVTYAQLDHCIFTQRKITGPSQRSKRPSTDTSVCIELPNAEPRALSPAHEHHSQALMGSSRETTALSQTQLASSNVPAAGI

SEQ ID NO: 126898 - protein, 397 aa, Artificial Sequence
  derived and/or modified sequence
MSLMVVSMACVGFFLDQSVWAHVGGQDKPFCSAWPSAVVPQGGHVTLRCHYRRGFNIFTLYKKDGVPVPELYNRIFWNSFLISPVTPAHAGTYRCRGFHPHSPTEWSAPSNPLVIMVTGLYEKPSLTARPGPTVRAGENVTLSCSSQSSFDIYHLSREGEAHELRLPAVPSINGTFQADFPLGPATHGETYRCFGSFHGSPYEWSDPSDPLPVSVTGNPSSSWPSPTEPSFKTGIARHLHAVIRYSVAIILFTILPFFLLHRWCSKKKVSLTKQRPENSGPCAEAGWEHADAAVMNQEPAGHRTVNREDSDEQDPQEVTYAQLDHCIFTQRKITGPSQRSKRPSTDTSVCIELPNAEPRALSPAHEHHSQALMGSSRETTALSQTQLASSNVPAAGI

SEQ ID NO: 126899 - protein, 377 aa, Artificial Sequence
  derived and/or modified sequence
MSMSPTVIILACLGFFLDQSVWAHVGGQDKPFCSAWPSAVVPQGGHVTLRCHYRRGFNIFTLYKKDGVPVPELYNRIFWNSFLISPVTPAHAGTYRCRGFHPHSPTEWSAPSNPLVIMVTGLYEKPSLTARPGPTVRAGENVTLSCSSQSSFDIYHLSREGEAHELRLPAVPSINGTFQADFPLGPATHGETYRCFGSFHGSPYEWSDPSDPLPVSVTGNPSSSWPSPTEPSFKTGIARHLHAVIRYSVAIILFTILPFFLLHRWCSKKKNAAVMNQEPAGHRTVNREDSDEQDPQEVTYAQLDHCIFTQRKITGPSQRSKRPSTDTSVCIELPNAEPRALSPAHEHHSQALMGSSRETTALSQTQLASSNVPAAGI

SEQ ID NO: 126900 - DNA, 1251 bp, Artificial Sequence
  derived and/or modified sequence
atgagccccagccacgtggtggtgaacgtgagcaccgccagaagcggccccctgaccaccagcagcgcccccgtgagcagagccgagagcctgagacccggcagcagaagctgcaccatgagcatgagccccaccgtgatcatcctggcctgcctgggcttcttcctggaccagagcgtgtgggcccacgtgggcggccaggacaagcccttctgcagcgcctggcccagcgccgtggtgccccagggcggccacgtgaccctgagatgccactgcagaagaggcttcaacatcttcaccctgtacaagaaggacggcgtgcccgtgcccgagctgtacaacagaatcttctggaacagcttcctgatcagccccgtgacccccgcccacgccggcacctacagatgcagaggcttccacccccacagccccaccgagtggagcgcccccagcaaccccctggtgatcatggtgaccggcctgtacgagaagcccagcctgaccgccagacccggccccaccgtgagagccggcgagaacgtgaccctgagctgcagcagccagagcagcttcgacatctaccacctgagcagagagggcgaggcccacgagctgagactgcccgccgtgcccagcatcaacggcaccttccaggccgacttccccctgggccccgccacccacggcgagacctacagatgcttcggcagcttccacggcagcccctacgagtggagcgaccccagcgaccccctgcccgtgagcgtgaccggcaaccccagcagcagctggcccagccccaccgagcccagcttcaagaccggcatcgccagacacctgcacgccgtgatcagatacagcgtggccatcatcctgttcaccatcctgcccttcttcctgctgcacagatggtgcagcaagaagaagaacgccgccgtgatgaaccaggagcccgccggccacagaaccgtgaacagagaggacagcgacgagcaggacccccaggaggtgacctacgcccagctggaccactgcatcttcacccagagaaagatcaccggccccagccagagaagcaagagacccagcaccgacaccagcgtgtgcatcgagctgcccaacgccgagcccagagccctgagccccgcccacgagcaccacagccaggccctgatgggcagcagcagagagaccaccgccctgagccagacccagctggccagcagcaacgtgcccgccgccggcatctag

SEQ ID NO: 126901 - DNA, 1251 bp, Artificial Sequence
  derived and/or modified sequence
atgtcgccctcccatgtcgttgtgaatgtgtccactgcccgctccgggcctctcaccacatccagcgctcccgtgtctcgagcagagtccttgaggccaggctctcgcagctgtacaatgtccatgagccctaccgtcatcatactcgcatgcctgggatttttcctggaccaaagtgtgtgggctcatgtcggcggccaggacaaacctttttgctctgcgtggccctcagccgtggtacctcaggggggacacgtgacactgcgctgccactgcagaagaggcttcaatatctttaccctgtacaagaaggatggagtacctgttccagaactgtacaatcgaatcttttggaatagctttctcatttcccccgttacccctgcccatgccgggacttatcggtgccgtgggtttcaccctcactctcctacagaatggtccgccccaagtaatccgctggttattatggtgacaggcctgtacgagaagccttccctgaccgcaagaccaggacctacggtgagagcgggcgagaacgtaacattgtcctgttcctctcaatctagctttgatatctatcacctgagtagagagggggaggcccatgaattgcgattgcccgccgtgccctctattaacggcacattccaggcggatttcccattgggccccgctacacacggggagacatataggtgcttcggtagttttcacgggagcccgtacgagtggagcgaccccagcgaccctctgcccgtcagcgtgacaggtaatccgtcctctagctggccctctccgacagaaccgtctttcaagaccggtatcgctcgtcatctgcacgccgtgattagatattccgtggccattatcttattcacaatccttccattcttccttctccacagatggtgctccaagaaaaagaacgccgccgtaatgaatcaggaaccagccggccacagaaccgtgaatagggaagactcagatgaacaggatcctcaagaagtgacatacgcccagctggatcactgcatttttactcagagaaagataaccggccccagtcagcgcagtaagcggccctctaccgatacatctgtgtgtattgagctgccgaacgctgagccacgcgctctcagccccgctcatgagcaccacagccaagccctcatggggagcagtcgcgaaacaactgcgctttcacagacacagctggctagttccaacgtccccgctgctgggatctag

SEQ ID NO: 126902 - DNA, 1251 bp, Artificial Sequence
  derived and/or modified sequence
atgagccccagccacgtggtggtgaatgtgtccacagcccggagcggccccctgaccaccagcagcgcccctgtgtccagagctgagagcctgcggcccggcagccgcagctgcaccatgtccatgagccccaccgtcatcatcctggcctgcctgggcttcttcctggaccagagcgtgtgggcccacgtgggcggccaggacaagcccttctgcagcgcctggcccagcgctgtggtgccccagggcggccacgtgaccctgcgctgccactgcagaagaggcttcaacatcttcaccctgtacaagaaggatggagtgcctgtgcctgagctgtacaaccgcatcttctggaacagcttcctgatcagccctgtgaccccagcccatgctggcacctaccgctgccggggcttccacccccacagccccacagagtggagcgcccccagcaaccccctggtgatcatggtgacaggcctgtatgagaagcccagcctgacagcccggcccggccccaccgtgcgggctggagaaaatgtgaccctgagctgcagcagccagagcagctttgacatctaccacctgagccgggagggggaggcccacgagctgcggctgcctgctgtgcccagcatcaatggcaccttccaggccgacttccccctgggccctgccacccacggggagacctaccgctgcttcggcagcttccacggcagcccctatgagtggagcgaccccagcgaccccctgcctgtgtctgtgactggaaaccccagcagctcctggcccagccccacagagcccagcttcaagacaggcatcgcccggcacctgcacgccgtcatccgctacagcgtggccatcatcctcttcaccatcctgcccttcttcctgctgcaccgctggtgcagcaagaagaagaatgctgctgtgatgaaccaggagcctgctggccacaggacagtgaacagagaagattctgatgagcaggacccccaggaggtgacctacgcccagctggaccactgcatcttcacccagaggaagatcaccggccccagccagaggagcaagaggcccagcacagacacctctgtgtgcatcgagctgcccaatgctgagccccgggccctgagccctgcccacgagcaccacagccaggccctgatgggcagcagccgggagaccacagccctgagccagacccagctggccagcagcaatgtgcctgctgctggcatctag

SEQ ID NO: 126903 - DNA, 1742 bp, Artificial Sequence
  derived and/or modified sequence
tctagtctgcagttttcagaaaccctcattcctcccttgactgattcaccacttgaacctcatatgacgtagaagaagcctacctatgtccccttcacatgttgtggtcaatgtgtcaactgcacgatccgggcccctcaccacatcctctgcaccggtcagtcgagccgagtcactgcgtcctggcagcagaagctgcaccatgtccatgtcacccacggtcatcatcctggcatgtcttgggttcttcttggaccagagtgtgtgggcacacgtgggtggtcaggacaagcccttctgctctgcctggcccagcgctgtggtgcctcaaggaggacacgtgactcttcggtgtcactgtcgtcgtgggtttaacatcttcacgctgtacaagaaagatggggtccctgtccctgagctctacaacagaatattctggaacagtttcctcattagccctgtgaccccagcacacgcagggacctacagatgtcgaggttttcacccgcactcccccactgagtggtcggcacccagcaaccccctggtgatcatggtcacaggtctatatgagaaaccttcgcttacagcccggccgggccccacggttcgcgcaggagagaacgtgaccttgtcctgcagctcccagagctcctttgacatctaccatctatccagggagggggaagcccatgaacttaggctccctgcagtgcccagcatcaatggaacattccaggccgacttccctctgggtcctgccacccacggagagacctacagatgcttcggctctttccatggatctccctacgagtggtcagacccgagtgacccactgcctgtttctgtcacaggaaacccttctagtagttggccttcacccactgaaccaagcttcaaaactggtatcgccagacacctgcatgctgtgattaggtactcagtggccatcatcctcttcaccatccttcccttctttctccttcatcgctggtgctccaaaaaaaaaaatgctgctgtaatgaaccaagagcctgcgggacacagaacagtgaacagggaggactctgatgaacaagaccctcaggaggtgacatacgcacagttggatcactgcattttcacacagagaaaaatcactggcccttctcagaggagcaagagaccctcaacagataccagcgtgtgtatagaacttccaaatgctgagcccagagcgttgtctcctgcccatgagcaccacagtcaggccttgatgggatcttctagggagacaacagccctgtctcaaacccagcttgccagctctaatgtaccagcagctggaatctgaaggcgtgagtctccatcttagagcatcactcttcctcacaccacaaatctggtgcctgtctcttgcttaccaatgtctaaggtccccactgcctgctgcagagaaaacacactcctttgcttagcccacaattctctatttcacttgacccctgcccacctctccaacctaactggcttacttcctagtctacttgaggctgcaatcacactgaggaactcacaattccaaacatacaagaggctctctcttaacacggcacttagacacgtgctgttccaccttccctcgtgctgttccacctttcctcagactatttttcagccttctggcatcagcaaaccttataaaatttttttgatttcagtgtagttctctcctcttcaaataaacatgtctgccttca

SEQ ID NO: 126904 - DNA, 1251 bp, Artificial Sequence
  derived and/or modified sequence
atgagccccagccacgtggtggtgaacgtgagcaccgcccggagcgggcccctaaccacctcctcagccccggtctcacgcgccgagtcgctgcgcccaggatctagatcatgtaccatgtcaatgtctcccaccgtgattattctggcgtgcttgggcttcttcctcgaccagtctgtgtgggcccatgtgggaggacaagataaacctttctgctccgcgtggcctagcgctgtagttccccagggcgggcacgtgacattgaggtgccattgccgcagaggctttaatatttttacactgtacaaaaaagacggcgtacctgtgcccgagctctataatcgaatcttctggaattcattcctgatttcccccgtaacacccgcgcacgccggcacctaccggtgcagaggctttcatcctcactctcccacagagtggtcagcaccctcaaatccgctggtcattatggtgaccggactatacgaaaagccatcattaaccgcccgtccaggcccgaccgtgagagcgggtgagaacgtgaccctgagctgtagttcccaatctagctttgatatttaccatcttagtcgagagggtgaggcccatgagctgaggttacccgccgttccgtcaataaatgggacctttcaggctgatttccctctaggaccagccacacacggcgagacctataggtgtttcggtagctttcatggttccccctacgaatggtcagacccctccgacccacttcctgtgtccgtgacaggcaacccgagcagcagttggccatcccctacagagccatccttcaagaccggcattgccagacatcttcatgcagtgataagatattcagtcgcaataattctcttcacaattctgccattttttctgctgcaccggtggtgttccaaaaagaagaacgctgcagtgatgaatcaggaacctgccgggcatagaaccgtgaacagggaggactccgatgaacaggacccccaagaagtgacctatgctcagctggaccattgcatcttcacccagcgcaaaatcacgggcccgtcccaacggagcaagagacccagcacagataccagcgtctgcatcgagttacccaatgcagaaccacgggcgttaagtcctgcgcacgagcaccacagtcaagcactgatggggagttccagggagaccacagcactgtcacagacccagttggccagcagtaacgtccctgccgcgggcatttag

SEQ ID NO: 126905 - DNA, 1251 bp, Artificial Sequence
  derived and/or modified sequence
atgtcaccctctcacgtagtggtaaacgtgtccaccgctaggagcggcccactgacaacaagctctgctccagttagccgggcagaatcactgcggcctgggagtagaagctgtactatgtctatgtcgcctacagtaattatcctcgcctgtctaggattttttctggatcaaagcgtgtgggcacatgttggtggccaagataagcctttttgctcagcatggccctccgcagtagtgcctcagggaggacacgtgacccttcggtgccactgtagaagaggatttaatatatttactttgtacaaaaaagacggagtccccgtgcccgagctgtataaccgaatcttttggaactccttcctgattagtccagtaacccctgcacacgctggaacctataggtgtcggggatttcacccacattccccaacggagtggagcgccccaagtaaccccctggtcataatggtgactggattatacgagaagcccagccttacggctaggccgggtccaaccgtgcgcgcaggcgagaatgtgactttatcttgcagcagccagtcaagtttcgacatctaccacctgagcagagagggtgaagcccacgagttaaggctgcctgcagttccctccattaatggcactttccaggcagacttcccactcggaccagccactcacggagaaacgtacagatgtttcggatccttccacggctctccctatgagtggagcgacccctcagaccccctacctgtcagcgttaccggaaacccatcttcttcatggcctagtcccaccgaacccagcttcaagaccggtattgctaggcacctacatgccgtgataagatatagtgtggccattatccttttcacaatcctgcctttctttttgttgcatcgttggtgtagcaagaaaaaaaacgcagctgtgatgaatcaggagcccgctggacaccggaccgtcaatcgcgaggattcagacgagcaggacccccaggaggtgacctacgcacaactcgaccattgtattttcacgcaacggaagatcacggggccttctcaacggagcaagcgcccaagtactgatactagtgtttgtattgagctgcctaatgccgaaccacgcgcactgtcgccagcccacgagcatcattctcaggctcttatgggctctagccgagaaaccaccgccttatctcagacccagctagcctcctcaaatgtgccggctgcaggaatctag

SEQ ID NO: 126906 - DNA, 1194 bp, Artificial Sequence
  derived and/or modified sequence
atgtctctgatggtggtcagtatggcatgtgttggattcttcctggatcagagcgtctgggcacatgtgggaggtcaggacaagcccttttgctcggcatggccatcagctgtagtgccccagggcggtcacgtgactttaagatgtcattgcagaagagggtttaatatcttcaccctttacaaaaaggacggggtgcccgtccccgaactctataacagaatcttctggaacagctttcttatctcaccagtgacacctgcccatgccggcacatatcgatgtcgcggttttcatccccacagcccgaccgagtggtctgcaccttctaaccctctggttattatggttaccgggctctacgagaaaccctcactcaccgctcgccctggtcccaccgtccgtgcgggcgagaacgttacgctgagttgttccagccagtctagcttcgacatttatcatttatcgagagaaggtgaggcccacgaattgagactgccagctgttccctctatcaacggcacatttcaggctgattttcctctgggtcctgctacccatggagaaacttacaggtgcttcggatcatttcatggatccccatatgagtggagcgaccctagtgacccactgcctgtgtcggtgaccggaaatcctagctcttcctggccttcccctacggagccatctttcaagaccggtatagccaggcatctccacgccgtgattagatacagtgtggcaattattctgttcacaattcttccgttctttctactgcaccgctggtgctccaaaaagaaggttagcctgaccaagcagcggcctgagaactcgggcccatgcgctgaggcggggtgggagcacgcggatgccgccgtcatgaaccaagaacctgcaggccacaggactgtgaatcgagaggattctgacgagcaggatcctcaagaggtgacatacgcacagctggaccactgtatctttacccagagaaagatcacaggcccttctcagcggtcaaagcgtccctccaccgacacgtccgtgtgcatcgagctccccaatgctgaaccgagggcgctcagtccagcacatgaacaccactcccaggcattgatggggagttcccgggagacaaccgcactgagtcagacgcaacttgcctcttccaatgtacctgccgccggaatatag

SEQ ID NO: 126907 - DNA, 1083 bp, Artificial Sequence
  derived and/or modified sequence
atgtcgatgagtccaaccgtgattattctggcatgtttgggatttttccttgatcagtcagtatgggctcacgtaggagggcaggataaaccattttgttcagcttggccctcggccgtggtgcctcaagggggacacgtcacactcagatgtcactgcaggagaggattcaacatttttactctgtacaagaaggatggggttcccgtgcccgaactgtacaacagaatattttggaattccttcctgatcagcccagtgacaccagcacacgccggaacctacaggtgcaggggcttccatcctcattcaccaacagaatggagcgccccttctaatccacttgttatcatggtgactggactgtatgagaagcccagcctcacggccagaccaggacctacagtgagggctggggaaaacgtcaccctatcttgctcatctcagtcctccttcgacatctatcacttgtccagagagggtgaggctcatgagctgaggctgccggccgtgccatccatcaatggcacctttcaggctgattttccattaggacctgccacccatggcgaaacctaccgatgcttcgggagctttcatggatcgccatacgaatggtctgatccaagtgaccctcttcctgtgtcggtgacaggaatagccaggcatctccatgccgtgatacggtacagcgtagcaataatcttgtttacaatcctcccattctttctgctgcatagatggtgctcaaagaagaagaatgcagccgtgatgaatcaggagccagcgggacatcgcactgttaatcgggaagattctgacgagcaggacccccaggaagtgacctacgcgcagctggaccactgtattttcacccagaggaaaataacgggaccatctcagaggagtaagcgcccaagcacggatacctctgtctgcatcgagttgcccaacgccgagccccgcgccctctcacccgcccacgaacaccatagtcaagcccttatggggagttctcgagagaccaccgctctgtctcaaacccagctggcttccagcaatgtgcctgccgcagggatctag

SEQ ID NO: 126908 - DNA, 1134 bp, Artificial Sequence
  derived and/or modified sequence
atgtccatgagtcccacagtcattatccttgcatgccttggatttttccttgatcagagcgtctgggctcacgttgggggccaggataagcctttttgctctgcctggccgtccgccgttgtccctcagggcggccacgtcacattgcggtgtcattgtagaagaggatttaacatcttcactctgtataagaaggacggtgttcccgtaccagagctgtataaccggatcttttggaacagcttcctcatctctccagtgacccccgctcacgccggcacttataggtgcagaggctttcacccccattctcccactgagtggtctgctccctccaaccctctggtcatcatggtgactggactgtacgaaaagccatctttgaccgcccgtcctgggcccacagtgcgtgcgggagagaacgtcacactgagttgtagttcacagagttcattcgacatctaccatctttctcgcgaaggggaggctcacgagctgcgcttgcctgcagtgccatctattaacgggaccttccaggctgactttcctctgggtccggctacccacggggagacctataggtgctttggctccttccacgggagcccgtacgagtggagcgatccctctgatccgctgcccgtctcggtcacagggaacccatcctcgagttggccctctccgaccgagccatcattcaaaaccggaatcgcacgacatcttcacgcagtcataaggtattcagtggctattatcctctttactatcctgccattttttctacttcatcgctggtgtagtaagaaaaaaaatgcggccgttatgaatcaggagcccgctggacacagaaccgttaaccgtgaagactctgacgagcaggatcctcaggaggttacttacgctcaactcgatcactgtatcttcactcaaagaaagattacaggaccgtctcagcggtcaaaaaggccaagcaccgacaccagcgtctgtatcgaacttccaaacgctgagcctcgcgctctttcccctgctcacgaacaccactctcaggctttgatggggagtagccgagagaccacggcactgtcccagacccagctggctagtagcaatgtgccagccgctgggatctag

SEQ ID NO: 126909 - DNA, 1194 bp, Artificial Sequence
  derived and/or modified sequence
atgtcacttatggtggttagcatggcttgtgtgggctttttcctagaccagtcagtttgggcccacgtgggaggacaagataagccattttgctccgcatggccctctgctgttgtgccgcaggggggacacgttactttaagatgccactatagacgtggattcaatatatttactttgtacaagaaggatggcgttcccgtgcctgaactttacaataggatcttctggaacagcttcctcattagtcccgtgaccccagcccacgcaggcacttatagatgccggggattccatcctcattctcctaccgagtggagcgccccctccaacccccttgttatcatggtgacaggcttatacgagaagccgagtttgacagcccgcccagggccaacggtaagagcgggtgagaacgtcacactatcctgtagctcccaaagtagcttcgacatctatcatttatctagagagggtgaagcccacgagttgcgacttccagcggtgcccagcataaatggcacttttcaggctgacttccctctgggacccgcaactcatggtgaaacgtatagatgttttgggagtttccacggaagcccatacgagtggtcggatcctagtgaccctctgcctgtctccgtgactggaaacccttctagctcttggccctcacccactgagccatcattcaaaactggcatagcgagacacctgcacgctgtgatccgatactcagtggccatcatcctgtttacaatactcccattcttcttattgcatcggtggtgtagcaaaaaaaaggtatcactgaccaagcagcgaccagagaacagtggcccctgcgcagaggccggatgggagcatgctgatgccgcagtgatgaaccaagagcccgccggtcaccgtactgtaaatcgggaagacagcgacgagcaagatcctcaagaggttacctatgctcaattggaccattgcatattcacccaaaggaagataaccggtccttcccaacgcagtaaacggccttcaactgacacaagcgtgtgtatcgagctgcctaacgcggagcctagggccttgagtcctgctcacgagcatcatagtcaggcactcatgggatcttcaagagaaacaacagctctttcacaaacccaattggctagctcgaacgtgcccgcagcagggatctag

SEQ ID NO: 126910 - DNA, 1580 bp, Artificial Sequence
  derived and/or modified sequence
gtcgagccgagtcactgcgtcctggcagcagaagctgcaccatgtccatgtcacccacggtcatcatcctggcatgtcttgggttcttcttggaccagagtgtgtgggcacacgtgggtggtcaggacaagcccttctgctctgcctggcccagcgctgtggtgcctcaaggaggacacgtgactcttcggtgtcactatcgtcgtgggtttaacatcttcacgctgtacaagaaagatggggtccctgtccctgagctctacaacagaatattctggaacagtttcctcattagccctgtgaccccagcacacgcagggacctacagatgtcgaggttttcacccgcactcccccactgagtggtcggcacccagcaaccccctggtgatcatggtcacaggtctatatgagaaaccttcgcttacagcccggccgggccccacggttcgcgcaggagagaacgtgaccttgtcctgcagctcccagagctcctttgacatctaccatctatccagggagggggaagcccatgaacttaggctccctgcagtgcccagcatcaatggaacattccaggccgacttccctctgggtcctgccacccacggagagacctacagatgcttcggctctttccatggatctccctacgagtggtcagacccgagtgacccactgcctgtttctgtcacaggaaacccttctagtagttggccttcacccactgaaccaagcttcaaaactggtatcgccagacacctgcatgctgtgattaggtactcagtggccatcatcctctttaccatccttcccttctttctccttcatcgctggtgctccaaaaaaaaaatgctgctgtaatgaaccaagagcctgcgggacacagaacagtgaacagggaggactctgatgaacaagaccctcaggaggtgacatacgcacagttggatcactgcattttcacacagagaaaaatcactggcccttctcagaggagcaagagaccctcaacagataccagcgtgtgtatagaacttccaaatgctgagcccagagcgttgtctcctgcccatgagcaccacagtcaggccttgatgggatcttctagggagacaacagccctgtctcaaacccagcttgccagctctaatgtaccagcagctggaatctgaaggcgtgagtctccatcttagagcatcactcttcctcacaccacaaatctggtgcctgtctcttgcttaccaatgtctaaggtccccactgcctgctgcagagaaaacacactcctttgcttagcccacaattctctatttcacttgacccctgcccacctctccaacctaactggcttacttcctagtctacttgaggctgcaatcacactgaggaactcacaattccaaacatacaagaggctctctcttaacacggcacttagacacgtgctgttccaccttccctcgtgctgttccacctttcctcagactatttttcagccttctggcatcagcaaaccttataaaatttttttgatttcagtgtagttctctcctcttcaaataaacatgtctgccttca

SEQ ID NO: 126911 - DNA, 1596 bp, Artificial Sequence
  derived and/or modified sequence
atgtcgctcatggtcgtcagcatggcgtgtgttgggttcttcttggaccagagtgtgtgggcacacgtgggtggtcaggacaagcccttctgctctgcctggcccagcgctgtggtgcctcaaggaggacacgtgactcttcggtgtcactgtcgtcgtgggtttaacatcttcacgctgtacaagaaagatggggtccctgtccctgagctctacaacagaatattctggaacagtttcctcattagccctgtgaccccagcacacgcagggacctacagatgtcgaggttttcacccgcactcccccactgagtggtcggcacccagcaaccccctggtgatcatggtcacaggtctatatgagaaaccttcgcttacagcccggccgggccccacggttcgcgcaggagagaacgtgaccttgtcctgcagctcccagagctcctttgacatctaccatctatccagggagggggaagcccatgaacttaggctccctgcagtgcccagcatcaatggaacattccaggccgacttccctctgggtcctgccacccacggagagacctacagatgcttcggctctttccatggatctccctacgagtggtcagacccgagtgacccactgcctgtttctgtcacaggaaacccttctagtagttggccttcacccactgaaccaagcttcaaaactggtatcgccagacacctgcatgctgtgattaggtactcagtggccatcatcctcttcaccatccttcccttctttctccttcatcgctggtgctccaaaaaaaaagtaagcctcacgaagcagaggccagagaactcagggccctgtgcggaagcaggatgggagcacgcagatgctgctgtaatgaaccaagagcctgcgggacacagaacagtgaacagggaggactctgatgaacaagaccctcaggaggtgacatacgcacagttggatcactgcattttcacacagagaaaaatcactggcccttctcagaggagcaagagaccctcaacagataccagcgtgtgtatagaacttccaaatgctgagcccagagcgttgtctcctgcccatgagcaccacagtcaggccttgatgggatcttctagggagacaacagccctgtctcaaacccagcttgccagctctaatgtaccagcagctggaatctgaaggcgtgagtctccatcttagagcatcactcttcctcacaccacaaatctggtgcctgtctcttgcttaccaatgtctaaggtccccactgcctgctgcagagaaaacacactcctttgcttagcccacaattctctatttcacttgacccctgcccacctctccaacctaactggcttacttcctagtctacttgaggctgcaatcacactgaggaactcacaattccaaacatacaagaggctctctcttaacacggcacttagacacgtgctgttccaccttccctcgtgctgttccacctttcctcagactatttttcagccttctggcatcagcaaaccttataaaatttttttgatttcagtgtagttctctcctcttcaaataaacatgtctgcc

SEQ ID NO: 126912 - DNA, 1529 bp, Artificial Sequence
  derived and/or modified sequence
gtcgagccgagtcactgcgtcctggcagcagaagctgcaccatgtccatgtcacccacggtcatcatcctggcatgtcttgggttcttcttggaccagagtgtgtgggcacacgtgggtggtcaggacaagcccttctgctctgcctggcccagcgctgtggtgcctcaaggaggacacgtgactcttcggtgtcactgtcgtcgtgggtttaacatcttcacgctgtacaagaaagatggggtccctgtccctgagctctacaacagaatattctggaacagtttcctcattagccctgtgaccccagcacacgcagggacctacagatgtcgaggttttcacccgcactcccccactgagtggtcggcacccagcaaccccctggtgatcatggtcacaggtctatatgagaaaccttcgcttacagcccggccgggccccacggttcgcgcaggagagaacgtgaccttgtcctgcagctcccagagctcctttgacatctaccatctatccagggagggggaagcccatgaacttaggctccctgcagtgcccagcatcaatggaacattccaggccgacttccctctgggtcctgccacccacggagagacctacagatgcttcggctctttccatggatctccctacgagtggtcagacccgagtgacccactgcctgtttctgtcacaggtatcgccagacacctgcatgctgtgattaggtactcagtggccatcatcctcttcaccatccttcccttctttctccttcatcgctggtgctccaaaaaaaaaaatgctgctgtaatgaaccaagagcctgcgggacacagaacagtgaacagggaggactctgatgaacaagaccctcaggaggtgacatacgcacagttggatcactgcattttcacacagagaaaaatcactggcccttctcagaggagcaagagaccctcaacagataccagcgtgtgtatagaacttccaaatgctgagcccagagcgttgtctcctgcccatgagcaccacagtcaggccttgatgggatcttctagggagacaacagccctgtctcaaacccagcttgccagctctaatgtaccagcagctggaatctgaaggcgtgagtctccatcttagagcatcactcttcctcacaccacaaatctggtgcctgtctcttgcttaccaatgtctaaggtccccactgcctgctgcagagaaaacacactcctttgcttagcccacaattctctatttcacttgacccctgcccacctctccaacctaactggcttacttcctagtctacttgaggctgcaatcacactgaggaactcacaattccaaacatacaagaggctctctcttaacacggcacttagacacgtgctgttccaccttccctcgtgctgttccacctttcctcagactatttttcagccttctggcatcagcaaaccttataaaatttttttgatttcagtgtagttctctcctcttcaaataaacatgtctgccttc

SEQ ID NO: 126913 - DNA, 1580 bp, Artificial Sequence
  derived and/or modified sequence
gtcgagccgagtcactgcgtcctggcagcagaagctgcaccatgtccatgtcacccacggtcatcatcctggcatgtcttgggttcttcttggaccagagtgtgtgggcacacgtgggtggtcaggacaagcccttctgctctgcctggcccagcgctgtggtgcctcaaggaggacacgtgactcttcggtgtcactgtcgtcgtgggtttaacatcttcacgctgtacaagaaagatggggtccctgtccctgagctctacaacagaatattctggaacagtttcctcattagccctgtgaccccagcacacgcagggacctacagatgtcgaggttttcacccgcactcccccactgagtggtcggcacccagcaaccccctggtgatcatggtcacaggtctatatgagaaaccttcgcttacagcccggccgggccccacggttcgcgcaggagagaacgtgaccttgtcctgcagctcccagagctcctttgacatctaccatctatccagggagggggaagcccatgaacttaggctccctgcagtgcccagcatcaatggaacattccaggccgacttccctctgggtcctgccacccacggagagacctacagatgcttcggctctttccatggatctccctacgagtggtcagacccgagtgacccactgcctgtttctgtcacaggaaacccttctagtagttggccttcacccactgaaccaagcttcaaaactggtatcgccagacacctgcatgctgtgattaggtactcagtggccatcatcctcttcaccatccttcccttctttctccttcatcgctggtgctccaaaaaaaaaaatgctgctgtaatgaaccaagagcctgcgggacacagaacagtgaacagggaggactctgatgaacaagaccctcaggaggtgacatacgcacagttggatcactgcattttcacacagagaaaaatcactggcccttctcagaggagcaagagaccctcaacagataccagcgtgtgtatagaacttccaaatgctgagcccagagcgttgtctcctgcccatgagcaccacagtcaggccttgatgggatcttctagggagacaacagccctgtctcaaacccagcttgccagctctaatgtaccagcagctggaatctgaaggcgtgagtctccatcttagagcatcactcttcctcacaccacaaatctggtgcctgtctcttgcttaccaatgtctaaggtccccactgcctgctgcagagaaaacacactcctttgcttagcccacaattctctatttcacttgacccctgcccacctctccaacctaactggcttacttcctagtctacttgaggctgcaatcacactgaggaactcacaattccaaacatacaagaggctctctcttaacacggcacttagacacgtgctgttccaccttccctcgtgctgttccacctttcctcagactatttttcagccttctggcatcagcaaaccttataaaatttttttgatttcagtgtagttctctcctcttcaaataaacatgtctgccttc

SEQ ID NO: 126914 - DNA, 1596 bp, Artificial Sequence
  derived and/or modified sequence
atgtcgctcatggtcgtcagcatggcgtgtgttgggttcttcttggaccagagtgtgtgggcacacgtgggtggtcaggacaagcccttctgctctgcctggcccagcgctgtggtgcctcaaggaggacacgtgactcttcggtgtcactatcgtcgtgggtttaacatcttcacgctgtacaagaaagatggggtccctgtccctgagctctacaacagaatattctggaacagtttcctcattagccctgtgaccccagcacacgcagggacctacagatgtcgaggttttcacccgcactcccccactgagtggtcggcacccagcaaccccctggtgatcatggtcacaggtctatatgagaaaccttcgcttacagcccggccgggccccacggttcgcgcaggagagaacgtgaccttgtcctgcagctcccagagctcctttgacatctaccatctatccagggagggggaagcccatgaacttaggctccctgcagtgcccagcatcaatggaacattccaggccgacttccctctgggtcctgccacccacggagagacctacagatgcttcggctctttccatggatctccctacgagtggtcagacccgagtgacccactgcctgtttctgtcacaggaaacccttctagtagttggccttcacccactgaaccaagcttcaaaactggtatcgccagacacctgcatgctgtgattaggtactcagtggccatcatcctctttaccatccttcccttctttctccttcatcgctggtgctccaaaaaaaaagtaagcctcacgaagcagaggccagagaactcagggccctgtgcggaagcaggatgggagcacgcagatgctgctgtaatgaaccaagagcctgcgggacacagaacagtgaacagggaggactctgatgaacaagaccctcaggaggtgacatacgcacagttggatcactgcattttcacacagagaaaaatcactggcccttctcagaggagcaagagaccctcaacagataccagcgtgtgtatagaacttccaaatgctgagcccagagcgttgtctcctgcccatgagcaccacagtcaggccttgatgggatcttctagggagacaacagccctgtctcaaacccagcttgccagctctaatgtaccagcagctggaatctgaaggcgtgagtctccatcttagagcatcactcttcctcacaccacaaatctggtgcctgtctcttgcttaccaatgtctaaggtccccactgcctgctgcagagaaaacacactcctttgcttagcccacaattctctatttcacttgacccctgcccacctctccaacctaactggcttacttcctagtctacttgaggctgcaatcacactgaggaactcacaattccaaacatacaagaggctctctcttaacacggcacttagacacgtgctgttccaccttccctcgtgctgttccacctttcctcagactatttttcagccttctggcatcagcaaaccttataaaatttttttgatttcagtgtagttctctcctcttcaaataaacatgtctgcc

SEQ ID NO: 126915 - DNA, 1194 bp, Artificial Sequence
  derived and/or modified sequence
atgagcctgatggtggtgtccatggcctgtgtgggcttcttcctggaccagagcgtgtgggcccacgtgggcggccaggacaagcccttctgcagcgcctggcccagcgctgtggtgccccagggcggccacgtgaccctgcgctgccactgccggcggggcttcaacatcttcaccctgtacaagaaggatggagtgcctgtgcctgagctgtacaaccgcatcttctggaacagcttcctgatcagccctgtgaccccagcccacgccggcacctaccgctgccggggcttccacccccacagccccacagagtggagcgcccccagcaaccccctggtgatcatggtgacaggcctgtatgagaagcccagcctgacagcccggcccggccccaccgtgcgggccggggagaatgtgaccctgagctgcagcagccagagcagctttgacatctaccacctgagccgggagggggaggcccacgagctgcggctgcctgctgtgcccagcatcaatggcaccttccaggccgacttccccctgggccctgccacccatggagagacctaccgctgcttcggcagcttccacggcagcccctatgagtggagcgaccccagcgaccccctgcctgtgtctgtgacaggcaaccccagcagctcctggcccagccccacagagcccagcttcaagacaggaattgcccggcacctgcatgctgtgatccgctacagcgtggccatcatcctcttcaccatcctgcccttcttcctgctgcaccgctggtgcagcaagaagaaggtgtccctgaccaagcagaggccagaaaattctggcccctgtgccgaggccggctgggagcacgcagatgctgctgtgatgaaccaggagcccgccggccacaggacagtgaaccgggaggacagtgatgagcaggacccccaggaggtgacctacgcccagctggaccactgcatcttcacccagaggaagatcaccggccccagccagaggagcaagaggcccagcacagacacctctgtgtgcatcgagctgcccaatgctgagccccgggccctgagccctgcccacgagcaccacagccaggccctgatgggcagcagccgggagaccacagccctgagccagacccagctggccagcagcaatgtgcctgctgctggcatctag

SEQ ID NO: 126916 - DNA, 1083 bp, Artificial Sequence
  derived and/or modified sequence
atgtccatgagccccaccgtcatcatcctggcctgcctgggcttcttcctggaccagagcgtgtgggcccacgtgggcggccaggacaagcccttctgcagcgcctggcccagcgctgtggtgccccagggcggccacgtgaccctgcgctgccactgccggcggggcttcaacatcttcaccctgtacaagaaggatggagtgcctgtgcctgagctgtacaaccgcatcttctggaacagcttcctgatcagccctgtgaccccagcccacgccggcacctaccgctgccggggcttccacccccacagccccacagagtggagcgcccccagcaaccccctggtgatcatggtgacaggcctgtatgagaagcccagcctgacagcccggcccggccccaccgtgcgggccggggagaatgtgaccctgagctgcagcagccagagcagctttgacatctaccacctgagccgggagggggaggcccacgagctgcggctgcctgctgtgcccagcatcaatggcaccttccaggccgacttccccctgggccctgccacccatggagagacctaccgctgcttcggcagcttccacggcagcccctatgagtggagcgaccccagcgaccccctgcctgtgtctgtgacaggcatcgcccggcacctgcacgccgtcatccgctacagcgtggccatcatcctcttcaccatcctgcccttcttcctgctgcaccgctggtgcagcaagaagaagaatgctgctgtgatgaaccaggagcctgctggccacaggacagtgaacagagaagattctgatgagcaggacccccaggaggtgacctacgcccagctggaccactgcatcttcacccagaggaagatcaccggccccagccagaggagcaagaggcccagcacagacacctctgtgtgcatcgagctgcccaatgctgagccccgggccctgagccctgcccacgagcaccacagccaggccctgatgggcagcagccgggagaccacagccctgagccagacccagctggccagcagcaatgtgcctgctgctggcatctag

SEQ ID NO: 126917 - DNA, 1134 bp, Artificial Sequence
  derived and/or modified sequence
atgtccatgagccccaccgtcatcatcctggcctgcctgggcttcttcctggaccagagcgtgtgggcccacgtgggcggccaggacaagcccttctgcagcgcctggcccagcgctgtggtgccccagggcggccacgtgaccctgcgctgccactgccggcggggcttcaacatcttcaccctgtacaagaaggatggagtgcctgtgcctgagctgtacaaccgcatcttctggaacagcttcctgatcagccctgtgaccccagcccacgccggcacctaccgctgccggggcttccacccccacagccccacagagtggagcgcccccagcaaccccctggtgatcatggtgacaggcctgtatgagaagcccagcctgacagcccggcccggccccaccgtgcgggccggggagaatgtgaccctgagctgcagcagccagagcagctttgacatctaccacctgagccgggagggggaggcccacgagctgcggctgcctgctgtgcccagcatcaatggcaccttccaggccgacttccccctgggccctgccacccatggagagacctaccgctgcttcggcagcttccacggcagcccctatgagtggagcgaccccagcgaccccctgcctgtgtctgtgacaggcaaccccagcagctcctggcccagccccacagagcccagcttcaagacaggaattgcccggcacctgcatgctgtgatccgctacagcgtggccatcatcctcttcaccatcctgcccttcttcctgctgcaccgctggtgcagcaagaagaagaatgctgctgtgatgaaccaggagcccgccggccacaggacagtgaaccgggaggacagtgatgagcaggacccccaggaggtgacctacgcccagctggaccactgcatcttcacccagaggaagatcaccggccccagccagaggagcaagaggcccagcacagacacctctgtgtgcatcgagctgcccaatgctgagccccgggccctgagccctgcccacgagcaccacagccaggccctgatgggcagcagccgggagaccacagccctgagccagacccagctggccagcagcaatgtgcctgctgctggcatctag

SEQ ID NO: 126918 - DNA, 1194 bp, Artificial Sequence
  derived and/or modified sequence
atgagcctgatggtggtgtccatggcctgtgtgggcttcttcctggaccagagcgtgtgggcccacgtgggcggccaggacaagcccttctgcagcgcctggcccagcgctgtggtgccccagggcggccacgtgaccctgcgctgccactaccgccggggcttcaacatcttcaccctgtacaagaaggatggagtgcctgtgcctgagctgtacaaccgcatcttctggaacagcttcctgatcagccctgtgaccccagcccacgccggcacctaccgctgccggggcttccacccccacagccccacagagtggagcgcccccagcaaccccctggtgatcatggtgacaggcctgtatgagaagcccagcctgacagcccggcccggccccaccgtgcgggccggggagaatgtgaccctgagctgcagcagccagagcagctttgacatctaccacctgagccgggagggggaggcccacgagctgcggctgcctgctgtgcccagcatcaatggcaccttccaggccgacttccccctgggccctgccacccatggagagacctaccgctgcttcggcagcttccacggcagcccctatgagtggagcgaccccagcgaccccctgcctgtgtctgtgacaggcaaccccagcagctcctggcccagccccacagagcccagcttcaagacaggaattgcccggcacctgcatgctgtgatccgctacagcgtggccatcatcctcttcaccatcctgcccttcttcctgctgcaccgctggtgcagcaagaagaaggtgtccctgaccaagcagaggccagaaaattctggcccctgtgccgaggccggctgggagcacgcagatgctgctgtgatgaaccaggagcccgccggccacaggacagtgaaccgggaggacagtgatgagcaggacccccaggaggtgacctacgcccagctggaccactgcatcttcacccagaggaagatcaccggccccagccagaggagcaagaggcccagcacagacacctctgtgtgcatcgagctgcccaatgctgagccccgggccctgagccctgcccacgagcaccacagccaggccctgatgggcagcagccgggagaccacagccctgagccagacccagctggccagcagcaatgtgcctgctgctggcatctag

SEQ ID NO: 126919 - DNA, 1194 bp, Artificial Sequence
  derived and/or modified sequence
atgagcctgatggtggtgagcatggcctgcgtgggcttcttcctggatcaaagtgtgtgggctcacgtggggggccaagacaagccgttttgttctgcatggccaagtgcagtagtaccacagggcggtcacgtgacactgaggtgccattgtagaagaggattcaacattttcacactctacaaaaaggatggtgtgccagtccccgagctttacaataggattttttggaactccttcttgatttccccggtaactcctgcccacgctggtacctacagatgccgggggttccacccccattcccccactgagtggagcgctccctccaatcctctcgtgattatggttacaggattatacgagaaaccgtcactgactgctcgccctgggccgaccgtgagggccggggagaatgtgacactgtcatgtagctcacaaagttcctttgatatctaccacctgagcagggaaggcgaggcccatgaactcaggctccccgccgtgcctagcattaacggcactttccaagctgacttcccattaggaccagccacgcacggagagacctatcggtgctttggctcattccacgggtcaccttatgagtggagtgatccttcagacccccttcccgttagtgttacagggaacccaagctcatcttggccatccccgaccgagccatctttcaaaacaggcatcgcccggcacctgcatgccgtgataaggtactcagtggccatcatactgtttacaattctgcccttcttcctcctacaccggtggtgttcgaagaaaaaggtctccctgacaaagcaaagacctgagaactcaggcccgtgcgccgaagctgggtgggagcatgctgacgccgccgtaatgaaccaagagccagcaggacatagaaccgtgaatcgggaggacagcgacgaacaagatccccaggaagtaacatatgctcagctggaccattgcatcttcacacaaagaaaaatcaccggaccctcccagcggtctaagcgcccaagcactgacacttccgtttgcatcgagctgccaaatgcagagccccgagccttgtcaccagcacatgaacatcacagccaagcattgatgggctcaagtcgggagaccacagcccttagtcagactcaattagcatcctccaatgtgcccgccgcaggaatttag

SEQ ID NO: 126920 - DNA, 1083 bp, Artificial Sequence
  derived and/or modified sequence
atgagcatgagccccaccgtgatcatcctggcctgcctgggcttctttcttgatcagtcagtgtgggcccatgtgggcggtcaggacaaaccgttctgctccgcatggcctagcgccgtggtcccccagggcgggcacgttacgctccgatgccattgtcgtagggggtttaatatctttacactttacaaaaaagacggcgtccccgttcctgagctgtacaaccgtattttttggaattccttcctgatttctcctgtgacacccgcccacgccggcacatatcgatgtaggggcttccatccccacagccccaccgaatggtcagccccctctaaccccctggttatcatggttaccggactgtatgaaaagccatcactgactgctcgacccggacctacggtgagagccggcgagaacgtgacccttagttgcagttcccagagcagcttcgacatctatcatctgtcaagagagggggaggcccacgagctgcggttgccggctgttccctccatcaacggcacatttcaggccgacttccctctgggcccagccactcacggcgagacttacaggtgcttcggctcctttcatgggagcccatacgagtggagcgacccctccgatccactaccggtctctgtgacaggtatagcccgccatctgcatgcggtgattcggtattctgtggccattattttgttcactattcttccttttttccttctccacaggtggtgcagcaagaagaagaacgccgctgttatgaaccaggaaccagctgggcacaggacagtcaatagggaagatagcgatgagcaagacccacaggaagtgacctacgcgcaactggaccactgcattttcacccagaggaaaattactggaccatcccaacggagtaagcgcccatccacagacacaagcgtatgtattgaattgcccaacgcagagccaagagctctttctccagcacacgagcaccattctcaagccttaatgggatcctctagagagactacagcattgagccagacccagctggctagtagcaatgtcccagctgccggcatatag

SEQ ID NO: 126921 - DNA, 1134 bp, Artificial Sequence
  derived and/or modified sequence
atgagcatgagccccaccgtgatcatcctggcctgcctgggcttctttctggaccaaagtgtatgggcgcacgttgggggacaggataagcctttctgttccgcttggccatcagccgtggtcccccagggtggccatgtgaccctccgctgtcattgtagaaggggctttaatattttcaccctgtacaaaaaggacggcgtacccgtacctgagctgtacaatcgtatcttttggaacagcttcctgattagtccagtgacgcctgcccacgccggtacctatcggtgtcgtggctttcacccccactcacccacagaatggtcagcaccatcaaaccctctggtgattatggtgaccggattatatgaaaaaccatccctcacggctcgccctggccctactgtgagagcaggagagaatgtgactttgtcttgctcatcccagagcagcttcgatatttaccatctgtctagggaaggagaagcccatgagctgagactcccggccgtgccttctatcaatggtactttccaggctgacttcccgctgggacccgctactcatggcgagacttaccggtgtttcggttcctttcacggatcaccctacgaatggtcagacccctccgacccacttccggtgtctgttaccggcaacccatcatcctcctggccttcacctacagagccctccttcaagacaggaattgcccgtcatctgcacgccgttatccgctacagtgtggctatcattctgtttactattctccctttctttctattgcaccgttggtgcagtaaaaagaaaaacgcggccgttatgaaccaagagccagccggacacaggactgtcaacagagaggactcggatgaacaagacccacaagaggtaacttacgcccaactggaccactgtatcttcacccagcggaagatcacaggaccatcacagcggtctaagcggcccagcacagatacctctgtttgcattgagcttcctaatgccgagccccgagccctcagcccagcacacgagcaccattcacaagccctaatgggcagcagccgcgagaccaccgccctgagtcagacgcagctggcaagtagtaacgttcccgccgccgggatttag

SEQ ID NO: 126922 - DNA, 1194 bp, Artificial Sequence
  derived and/or modified sequence
atgagcctgatggtggtgagcatggcctgcgtgggcttcttcctggaccagagcgtctgggcgcacgtgggtgggcaggataagcctttctgttcagcgtggcccagcgccgtagtccctcaaggggggcacgtgaccctcagatgccactacaggcgaggctttaacattttcactctgtataagaaggacggagttccagtccccgaactttacaacaggattttttggaactcgtttttaatcagcccagtgacacccgcccacgcaggcacctatcggtgcaggggattccacccacattcacccaccgagtggtcggcacctagtaaccccctcgtgatcatggtaactgggctttacgaaaagccctctttaaccgccagaccggggcccacggtgcgggccggggagaacgttacattgtcttgttccagccagtccagctttgatatataccatctgtcgcgtgagggtgaagcacacgagctccgcctgcccgccgtaccgagcataaacggtactttccaggcggatttcccgctcggccccgcaacacacggcgaaacctatcgatgcttcgggagctttcacggaagcccctatgagtggagtgacccctccgatccactccccgtttctgttacagggaatccatcttctagctggcccagcccgaccgagccatcttttaagactggaatcgcaaggcacctgcacgcagtcataagatacagcgtggctataattctgtttaccatcctgcccttcttcctgctgcaccggtggtgcagcaaaaaaaaggtgtcactcacgaagcagcgccccgaaaatagtggcccctgtgcggaggcaggttgggaacacgcagatgctgcagttatgaatcaggaacccgccggccaccgtaccgtcaatcgtgaagacagtgacgagcaggacccgcaggaggtaacttacgctcagttggaccactgtatttttactcagcgcaagatcacaggccccagccagagaagcaagcgcccatctacagacacctccgtgtgtatagagctgcccaatgcggagccccgcgcgttatctccagcccacgaacaccactcccaggccttgatgggttcaagcagggaaacgaccgcactgtctcagactcagttagcaagctccaacgttccggccgctggaatctag

SEQ ID NO: 126923 - DNA, 1194 bp, Artificial Sequence
  derived and/or modified sequence
atgagtcttatggttgtctcaatggcatgtgtgggatttttcctggatcaaagcgtgtgggcccatgtgggcggacaggacaaacctttctgtagcgcgtggccgtctgccgtggttccccaggggggacacgtgaccttgcggtgccattgcaggaggggtttcaacatctttacactgtacaagaaagatggggtccctgtgcctgagctctacaaccggattttctggaattcattcctgatctctcctgtcacccccgctcatgccggaacgtaccggtgcagaggctttcaccctcattccccgactgagtggtccgcccctagcaatcctcttgtgattatggtgactgggctgtatgagaagcctagtctgaccgcgaggcccggaccaacggtgagagctggagagaacgtgacactgagctgcagctcgcagtcgagttttgacatttatcatctcagccgggagggcgaagcacacgagttaagactgcctgctgttccatccatcaatggaacatttcaagccgactttccgttgggacctgcaacacacggagagacttatcgctgtttcggatcattccatgggagtccatacgaatggtctgaccccagcgatccactaccagtgtccgtcaccgggaatccatcgtcttcctggccatctccgaccgaaccctccttcaagacgggcatcgctagacatttgcatgcggttatcaggtactcagtcgcaataatcctctttacaattctcccgttttttttgctgcatcggtggtgcagtaagaaaaaagtttcactgaccaagcagcggcctgaaaatagtggtccttgcgccgaagctgggtgggagcacgccgacgccgctgtgatgaatcaggaaccagcaggccaccgcaccgttaaccgagaggattccgatgaacaggaccctcaggaggttacttatgcccaactggatcactgcattttcacgcagcgcaaaatcacaggacccagccagcgcagtaagcggcctagcacagacacgagtgtttgcattgagctcccgaacgcagagccacgcgctctgtctcccgcacatgaacaccacagccaagccctcatggggtcatcacgggagactacagccctgagccaaacacagctggcaagttccaacgttcctgcggctgggatctag

SEQ ID NO: 126924 - DNA, 1083 bp, Artificial Sequence
  derived and/or modified sequence
atgtctatgtccccgacggtgatcatactggcttgcttagggttcttcctggatcaatccgtgtgggcgcatgtgggaggacaggataagccattttgttccgcctggcccagcgccgttgtgccgcagggaggacacgtaacgctgaggtgccactgcagaagagggttcaacatctttaccctgtacaagaaagatggagtgcccgttcctgagctgtataataggatcttctggaattcttttcttattagtccagttactcccgctcacgccggaacttaccgctgtcgcggattccatccccactcgcctacagagtggagcgctcccagcaatcccttagtaatcatggtgactggcttatacgaaaagccaagcctcacagccagacccggacctacagtgcgcgcaggggaaaatgtgacgctctcctgcagcagccagagtagtttcgacatttaccatctcagcagggaaggggaagcccacgaattaaggctgccagctgtccctagcatcaatggtacctttcaggctgacttccccctgggacccgcaactcacggcgagacgtacaggtgttttggatcttttcatggtagtccctatgagtggtctgacccatcagaccccttgccagtgagtgtgacaggtatagcgaggcatttacacgcagtcattcgatactccgttgcaatcattttgtttactatcttacccttttttctgcttcaccgctggtgtagcaaaaagaaaaatgccgctgtcatgaaccaagagcccgctggacatcggaccgtgaatagagaggactccgacgagcaggacccacaagaggtaacttacgcgcagctcgaccattgtatattcactcagaggaaaataactggtccaagccagcgctcaaagcgaccctcaaccgatactagtgtatgtattgagctgcccaatgcagagcccagggcactgagtcctgcccacgagcatcatagccaggccctcatgggctcctctcgagaaacgacagccctgagccagacccagctcgctagctctaacgttcctgctgcaggcatctag

SEQ ID NO: 126925 - DNA, 1134 bp, Artificial Sequence
  derived and/or modified sequence
atgtccatgagtccaacggtaattatcctggcctgcctgggatttttcctggaccagtctgtgtgggcacatgtaggaggccaggataaaccattttgttcggcctggccgagcgccgttgtgccgcagggtggacacgttaccctgagatgtcattgccggcgaggattcaatatctttacactgtacaaaaaggacggcgtcccagtaccggagctgtataaccgaattttctggaattcctttctcatatctcctgtgacccctgctcacgctggtacctacaggtgccgagggttccacccgcatagtcccacagaatggagcgctccgagcaacccactggtgatcatggtcaccgggctgtatgaaaagccctcccttactgccaggccgggacctacagtgcgcgcaggcgagaacgttacactgtcctgcagttctcagtcttcttttgacatttaccatctgtctcgagaaggtgaggcacacgagctccgattgcctgctgtgccctctatcaacggcacctttcaggcagactttccgctgggtccagctacacacggtgagacgtatcgctgctttggcagcttccacggcagcccctacgagtggtctgaccccagtgatccactgcctgtttctgtaacaggcaatccctcctcctcatggccgagtcctaccgagccctccttcaagaccggcatagcacgccatcttcacgcggtgattagatattcagtcgcgattatcctgttcacaatacttccatttttcctgctgcacagatggtgttccaagaagaagaacgctgccgtgatgaaccaggagccagcgggacatcgcacagttaaccgcgaggattccgacgagcaggacccacaagaggttacctacgcccagctcgaccactgtatattcactcagcgaaagattacaggacctagccagcggtcaaagagaccatcaacagacacgagcgtttgtatcgagttaccaaacgccgagcccagggccttaagcccagctcacgagcaccatagtcaagctctgatgggttcatccagggaaacaaccgctctgagccagacacagctcgcgtccagcaacgtgccagccgcaggcatctag

SEQ ID NO: 126926 - DNA, 1194 bp, Artificial Sequence
  derived and/or modified sequence
atgagtctcatggtggtgtcaatggcctgcgtagggtttttcctagatcagtcagtgtgggcccacgtcggtggccaggacaaacctttttgttcagcttggccgtctgctgtggtaccacagggaggccatgtgaccctgcggtgtcattacaggcgcggatttaacatttttacactctataaaaaggacggcgtgccagtccccgagctatacaaccgtatcttctggaacagcttcttgatttcccccgtgacccctgctcacgccggaacatatagatgtcggggttttcatccccactctccaaccgagtggtccgctccctccaaccccctcgtgatcatggtcacaggcctgtacgaaaagccctccttaaccgcccgtccaggtcccacagtgcgagctggggaaaatgtcacattgtcctgcagctcacagtcctcgttcgacatataccatctgtctcgagaaggcgaggcccatgagctgcggctcccggctgtgccatccattaatggaacctttcaagcagattttcctttagggccagctacgcatggggaaacctaccgttgctttggctcatttcatggctccccgtatgagtggtccgacccctccgaccctctgccagtgtctgtgaccggaaatccgagctccagctggcctagccccacagagccttcttttaagacaggcatcgcgaggcacctccatgctgtgatcaggtactctgtcgccatcatcctgttcacaatcttgccatttttcctgcttcacagatggtgctcgaagaagaaagtgagcttgactaagcaacggcctgaaaattctggcccatgcgctgaggccggatgggagcacgctgacgccgctgtgatgaatcaggaaccagcaggccaccgcactgtgaatcgggaagacagcgatgagcaggatccccaggaggtgacgtatgctcagctggaccactgcattttcacccagcgcaagattacaggcccatctcaaagaagtaagcgaccctcgacagacaccagtgtgtgtatcgagttaccaaatgctgaaccacgagcactgagccccgcacacgaacaccatagtcaagcattgatgggatcatcccgggaaaccaccgctctttcccagactcagttggcatcctccaatgttccggctgccggtatttag

SEQ ID NO: 126927 - DNA, 1194 bp, Artificial Sequence
  derived and/or modified sequence
atgagcctgatggtggtgagcatggcctgcgtgggcttcttcctggaccagagcgtgtgggcccacgtgggcggccaggacaagcccttctgcagcgcctggcccagcgccgtggtgccccagggcggccacgtgaccctgagatgccactgcagaagaggcttcaacatcttcaccctgtacaagaaggacggcgtgcccgtgcccgagctgtacaacagaatcttctggaacagcttcctgatcagccccgtgacccccgcccacgccggcacctacagatgcagaggcttccacccccacagccccaccgagtggagcgcccccagcaaccccctggtgatcatggtgaccggcctgtacgagaagcccagcctgaccgccagacccggccccaccgtgagagccggcgagaacgtgaccctgagctgcagcagccagagcagcttcgacatctaccacctgagcagagagggcgaggcccacgagctgagactgcccgccgtgcccagcatcaacggcaccttccaggccgacttccccctgggccccgccacccacggcgagacctacagatgcttcggcagcttccacggcagcccctacgagtggagcgaccccagcgaccccctgcccgtgagcgtgaccggcaaccccagcagcagctggcccagccccaccgagcccagcttcaagaccggcatcgccagacacctgcacgccgtgatcagatacagcgtggccatcatcctgttcaccatcctgcccttcttcctgctgcacagatggtgcagcaagaagaaggtgagcctgaccaagcagagacccgagaacagcggcccctgcgccgaggccggctgggagcacgccgacgccgccgtgatgaaccaggagcccgccggccacagaaccgtgaacagagaggacagcgacgagcaggacccccaggaggtgacctacgcccagctggaccactgcatcttcacccagagaaagatcaccggccccagccagagaagcaagagacccagcaccgacaccagcgtgtgcatcgagctgcccaacgccgagcccagagccctgagccccgcccacgagcaccacagccaggccctgatgggcagcagcagagagaccaccgccctgagccagacccagctggccagcagcaacgtgcccgccgccggcatctag

SEQ ID NO: 126928 - DNA, 1083 bp, Artificial Sequence
  derived and/or modified sequence
atgagcatgagccccaccgtgatcatcctggcctgcctgggcttcttcctggaccagagcgtgtgggcccacgtgggcggccaggacaagcccttctgcagcgcctggcccagcgccgtggtgccccagggcggccacgtgaccctgagatgccactgcagaagaggcttcaacatcttcaccctgtacaagaaggacggcgtgcccgtgcccgagctgtacaacagaatcttctggaacagcttcctgatcagccccgtgacccccgcccacgccggcacctacagatgcagaggcttccacccccacagccccaccgagtggagcgcccccagcaaccccctggtgatcatggtgaccggcctgtacgagaagcccagcctgaccgccagacccggccccaccgtgagagccggcgagaacgtgaccctgagctgcagcagccagagcagcttcgacatctaccacctgagcagagagggcgaggcccacgagctgagactgcccgccgtgcccagcatcaacggcaccttccaggccgacttccccctgggccccgccacccacggcgagacctacagatgcttcggcagcttccacggcagcccctacgagtggagcgaccccagcgaccccctgcccgtgagcgtgaccggcatcgccagacacctgcacgccgtgatcagatacagcgtggccatcatcctgttcaccatcctgcccttcttcctgctgcacagatggtgcagcaagaagaagaacgccgccgtgatgaaccaggagcccgccggccacagaaccgtgaacagagaggacagcgacgagcaggacccccaggaggtgacctacgcccagctggaccactgcatcttcacccagagaaagatcaccggccccagccagagaagcaagagacccagcaccgacaccagcgtgtgcatcgagctgcccaacgccgagcccagagccctgagccccgcccacgagcaccacagccaggccctgatgggcagcagcagagagaccaccgccctgagccagacccagctggccagcagcaacgtgcccgccgccggcatctag

SEQ ID NO: 126929 - DNA, 1134 bp, Artificial Sequence
  derived and/or modified sequence
atgagcatgagccccaccgtgatcatcctggcctgcctgggcttcttcctggaccagagcgtgtgggcccacgtgggcggccaggacaagcccttctgcagcgcctggcccagcgccgtggtgccccagggcggccacgtgaccctgagatgccactgcagaagaggcttcaacatcttcaccctgtacaagaaggacggcgtgcccgtgcccgagctgtacaacagaatcttctggaacagcttcctgatcagccccgtgacccccgcccacgccggcacctacagatgcagaggcttccacccccacagccccaccgagtggagcgcccccagcaaccccctggtgatcatggtgaccggcctgtacgagaagcccagcctgaccgccagacccggccccaccgtgagagccggcgagaacgtgaccctgagctgcagcagccagagcagcttcgacatctaccacctgagcagagagggcgaggcccacgagctgagactgcccgccgtgcccagcatcaacggcaccttccaggccgacttccccctgggccccgccacccacggcgagacctacagatgcttcggcagcttccacggcagcccctacgagtggagcgaccccagcgaccccctgcccgtgagcgtgaccggcaaccccagcagcagctggcccagccccaccgagcccagcttcaagaccggcatcgccagacacctgcacgccgtgatcagatacagcgtggccatcatcctgttcaccatcctgcccttcttcctgctgcacagatggtgcagcaagaagaagaacgccgccgtgatgaaccaggagcccgccggccacagaaccgtgaacagagaggacagcgacgagcaggacccccaggaggtgacctacgcccagctggaccactgcatcttcacccagagaaagatcaccggccccagccagagaagcaagagacccagcaccgacaccagcgtgtgcatcgagctgcccaacgccgagcccagagccctgagccccgcccacgagcaccacagccaggccctgatgggcagcagcagagagaccaccgccctgagccagacccagctggccagcagcaacgtgcccgccgccggcatctag

SEQ ID NO: 126930 - DNA, 1194 bp, Artificial Sequence
  derived and/or modified sequence
atgagcctgatggtggtgagcatggcctgcgtgggcttcttcctggaccagagcgtgtgggcccacgtgggcggccaggacaagcccttctgcagcgcctggcccagcgccgtggtgccccagggcggccacgtgaccctgagatgccactacagaagaggcttcaacatcttcaccctgtacaagaaggacggcgtgcccgtgcccgagctgtacaacagaatcttctggaacagcttcctgatcagccccgtgacccccgcccacgccggcacctacagatgcagaggcttccacccccacagccccaccgagtggagcgcccccagcaaccccctggtgatcatggtgaccggcctgtacgagaagcccagcctgaccgccagacccggccccaccgtgagagccggcgagaacgtgaccctgagctgcagcagccagagcagcttcgacatctaccacctgagcagagagggcgaggcccacgagctgagactgcccgccgtgcccagcatcaacggcaccttccaggccgacttccccctgggccccgccacccacggcgagacctacagatgcttcggcagcttccacggcagcccctacgagtggagcgaccccagcgaccccctgcccgtgagcgtgaccggcaaccccagcagcagctggcccagccccaccgagcccagcttcaagaccggcatcgccagacacctgcacgccgtgatcagatacagcgtggccatcatcctgttcaccatcctgcccttcttcctgctgcacagatggtgcagcaagaagaaggtgagcctgaccaagcagagacccgagaacagcggcccctgcgccgaggccggctgggagcacgccgacgccgccgtgatgaaccaggagcccgccggccacagaaccgtgaacagagaggacagcgacgagcaggacccccaggaggtgacctacgcccagctggaccactgcatcttcacccagagaaagatcaccggccccagccagagaagcaagagacccagcaccgacaccagcgtgtgcatcgagctgcccaacgccgagcccagagccctgagccccgcccacgagcaccacagccaggccctgatgggcagcagcagagagaccaccgccctgagccagacccagctggccagcagcaacgtgcccgccgccggcatctag

SEQ ID NO: 126931 - DNA, 1609 bp, Artificial Sequence
  derived and/or modified sequence
tcgagccgagtcactgcgtcctggcagcagaagctgcaccatgtccatgtcacccacggtcatcatcctggcatgtcttgggttcttcttggaccagagtgtgtgggcacacgtgggtggtcaggacaagcccttctgctctgcctggcccagcgctgtggtgcctcaaggaggacacgtgactcttcggtgtcactatcgtcgtgggtttaacatcttcacgctgtacaagaaagatggggtccctgtccctgagctctacaacagaatattctggaacagtttcctcattagccctgtgaccccagcacacgcagggacctacagatgtcgaggttttcacccgcactcccccactgagtggtcggcacccagcaaccccctggtgatcatggtcacaggtctatatgagaaaccttcgcttacagcccggccgggccccacggttcgcgcaggagagaacgtgaccttgtcctgcagctcccagagctcctttgacatctaccatctatccagggagggggaagcccatgaacttaggctccctgcagtgcccagcatcaatggaacattccaggccgacttccctctgggtcctgccacccacggagagacctacagatgcttcggctctttccatggatctccctacgagtggtcagacccgagtgacccactgcctgtttctgtcacaggaaacccttctagtagttggccttcacccactgaaccaagcttcaaaactggtatcgccagacacctgcatgctgtgattaggtactcagtggccatcatcctctttaccatccttcccttctttctccttcatcgctggtgctccaaaaaaaaaatgctgctgtaatgaaccaagagcctgcgggacacagaacagtgaacagggaggactctgatgaacaagaccctcaggaggtgacatacgcacagttggatcactgcattttcacacagagaaaaatcactggcccttctcagaggagcaagagaccctcaacagataccagcgtgtgtatagaacttccaaatgctgagcccagagcgttgtctcctgcccatgagcaccacagtcaggccttgatgggatcttctagggagacaacagccctgtctcaaacccagcttgccagctctaatgtaccagcagctggaatctgaaggcgtgagtctccatcttagagcatcactcttcctcacaccacaaatctggtgcctgtctcttgcttaccaatgtctaaggtccccactgcctgctgcagagaaaacacactcctttgcttagcccacaattctctatttcacttgacccctgcccacctctccaacctaactggcttacttcctagtctacttgaggctgcaatcacactgaggaactcacaattccaaacatacaagaggctctctcttaacacggcacttagacacgtgctgttccaccttccctcgtgctgttccacctttcctcagactatttttcagccttctggcatcagcaaaccttataaaatttttttgatttcagtgtagttctctcctcttcaaataaacatgtctgccttcaaaaaaaaaaaaaaaaaaaaaaaaaaaaaaa

SEQ ID NO: 126932 - DNA, 1610 bp, Artificial Sequence
  derived and/or modified sequence
tcgagccgagtcactgcgtcctggcagcagaagctgcaccatgtccatgtcacccacggtcatcatcctggcatgtcttgggttcttcttggaccagagtgtgtgggcacacgtgggtggtcaggacaagcccttctgctctgcctggcccagcgctgtggtgcctcaaggaggacacgtgactcttcggtgtcactatcgtcgtgggtttaacatcttcacgctgtacaagaaagatggggtccctgtccctgagctctacaacagaatattctggaacagtttcctcattagccctgtgaccccagcacacgcagggacctacagatgtcgaggttttcacccgcactcccccactgagtggtcggcacccagcaaccccctggtgatcatggtcacaggtctatatgagaaaccttcgcttacagcccggccgggccccacggttcgcgcaggagagaacgtgaccttgtcctgcagctcccagagctcctttgacatctaccatctatccagggagggggaagcccatgaacttaggctccctgcagtgcccagcatcaatggaacattccaggccgacttccctctgggtcctgccacccacggagagacctacagatgcttcggctctttccatggatctccctacgagtggtcagacccgagtgacccactgcctgtttctgtcacaggaaacccttctagtagttggccttcacccactgaaccaagcttcaaaactggtatcgccagacacctgcatgctgtgattaggtactcagtggccatcatcctctttaccatccttcccttctttctccttcatcgctggtgctccaaaaaaaaaaatgctgctgtaatgaaccaagagcctgcgggacacagaacagtgaacagggaggactctgatgaacaagaccctcaggaggtgacatacgcacagttggatcactgcattttcacacagagaaaaatcactggcccttctcagaggagcaagagaccctcaacagataccagcgtgtgtatagaacttccaaatgctgagcccagagcgttgtctcctgcccatgagcaccacagtcaggccttgatgggatcttctagggagacaacagccctgtctcaaacccagcttgccagctctaatgtaccagcagctggaatctgaaggcgtgagtctccatcttagagcatcactcttcctcacaccacaaatctggtgcctgtctcttgcttaccaatgtctaaggtccccactgcctgctgcagagaaaacacactcctttgcttagcccacaattctctatttcacttgacccctgcccacctctccaacctaactggcttacttcctagtctacttgaggctgcaatcacactgaggaactcacaattccaaacatacaagaggctctctcttaacacggcacttagacacgtgctgttccaccttccctcgtgctgttccacctttcctcagactatttttcagccttctggcatcagcaaaccttataaaatttttttgatttcagtgtagttctctcctcttcaaataaacatgtctgccttcaaaaaaaaaaaaaaaaaaaaaaaaaaaaaaa

SEQ ID NO: 126933 - protein, 262 aa, Artificial Sequence
  derived and/or modified sequence
MWFLVLCLALSLGGTGAAPPIQSRIVGGWECEQHSQPWQAALYHFSTFQCGGILVHRQWVLTAAHCISDNYQLWLGRHNLFDDENTAQFVHVSESFPHPGFNMSLLENHTRQADEDYSHDLMLLRLTEPADTITDAVKVVELPTEEPEVGSTCLASGWGSIEPENFSFPDDLQCVDLKILPNDECKKAHVQKVTDFMLCVGHLEGGKDTCVGDSGGPLMCDGVLQGVTSWGYVPCGTPNKPSVAVRVLSYVKWIEDTIAENS

SEQ ID NO: 126934 - DNA, 789 bp, Artificial Sequence
  derived and/or modified sequence
atgtggtttctcgtgctctgtctcgccctgagtctggggggcacaggagcagccccccctattcagtccagaatagtaggtggatgggaatgcgagcagcactcacagccatggcaggcagctctgtatcacttctccacctttcaatgcgggggaattttagtacaccgccaatgggttctcactgccgctcactgtatcagtgataactaccaattgtggctcggccgtcacaatctttttgatgatgaaaatactgcgcagttcgtccacgtatctgaatcttttccccacccaggctttaacatgagcctgttagagaatcatacccggcaggccgatgaagactatagccatgatcttatgctgctgaggctcacagagccggccgatacaatcaccgatgccgtcaaggtggtggagctgcccaccgaggagccggaagtgggcagcacctgcttggcctccggttggggatccattgagcccgagaattttagttttcctgacgatctacagtgcgtggatttgaaaattttaccgaacgatgagtgcaaaaaagcccatgttcagaaagttactgacttcatgctctgcgtgggccacctggaaggaggtaaagatacctgtgtaggggatagcggcggtcctctgatgtgcgatggcgtcctccaaggggtaacatcttggggttacgtgccctgcggaaccccaaataagccctctgttgccgtgcgggtcttgtcctacgtaaaatggattgaagatacaattgccgagaacagttag

SEQ ID NO: 126935 - DNA, 874 bp, Artificial Sequence
  derived and/or modified sequence
agttcctccacctgctggcccctggacacctctgtcaccatgtggttcctggttctgtgcctcgccctgtccctgggggggactggtgctgcgcccccgattcagtcccggattgtgggaggctgggagtgtgagcagcattcccagccctggcaggcggctctgtaccatttcagcactttccagtgtgggggcatcctggtgcaccgccagtgggtgctcacagctgctcattgcatcagcgacaattaccagctctggctgggtcgccacaacttgtttgacgacgaaaacacagcccagtttgttcatgtcagtgagagcttcccacaccctggcttcaacatgagcctcctggagaaccacacccgccaagcagacgaggactacagccacgacctcatgctgctccgcctgacagagcctgctgataccatcacagatgctgtgaaggtcgtggagttgcccaccgaggaacccgaagtggggagcacctgtttggcttccggctggggcagcatcgaaccagagaatttctcatttccagatgatctccagtgtgtggacctcaaaatcctgcctaatgatgagtgcaaaaaagcccacgtccagaaggtgacagacttcatgctgtgtgtcggacacctggaaggtggcaaagacacctgtgtgggtgattcagggggcccgctgatgtgtgatggtgtgctccaaggtgtcacatcatggggctacgtcccttgtggcacccccaataagccttctgtcgccgtcagagtgctgtcttatgtgaagtggatcgaggacaccatagcggagaactcctgaacgcccagccctgtcccctacccccagtaaaatcaaatgtgcatcc

SEQ ID NO: 126936 - DNA, 1854 bp, Artificial Sequence
  derived and/or modified sequence
agttcctccacctgctggcccctggacacctctgtcaccatgtggttcctggttctgtgcctcgccctgtccctgggggggactgctctggttttctggaaccccaccccaaggatcctgaatgccttctcagccagcgcttctgccctggcctcccccaagattgcctccaagaggaccccatatccttccagtaccctcagaccatgaaccccatccccatgagaaacgaagatcccatccttcaccctgtccgagaaggactgccactcacgcctccctcctcctgagccccgtcccagtcctgaccgcaactgtgttctcagggccccaacctcccctcagattgccattcctggttcacaggaaggaccccaaaacctctcggaagcccacctctagccttaaccatagccctttcttttaccctttaaccaggaagccctgaaatctaactgtcccagccaagctggccccttccaaccccaatgtagggaccccaagtcacccccaaactcttcagtccagatgctcttctttacctctcagacctggttccctaaagctgcatcctttcctgaacctcaaaagcccaacccaggtcctgtttccctagcctaggagccccttagccctccagattcttcctcagtgagcctctgatcctgtcccacccttggcgccttgatccctggtttccagaatccctttccactcccctaacccaccacctcccatcccccagccccagaccccaaatgacctgacgcccagatgcagtgtctgctccagacactgtctcctgtctcctaccctgatccctggaggctgctctactgtcagagcacaaaatctccccaccaggtccagccaccactccaaaagcccagggaacagtccagagtcccaccccttcccaacaccccttgcccatgtccccaacctccagccctggtcctctacccgcaatgtcccttcagacccacagcccagctccctctcctagccttgtccctggcctctcctgccaaccctgcccttcctgacccagcaccgcctctgcaggtgctgcgcccccgattcagtcccggattgtgggaggctgggagtgtgagcagcattcccagccctggcaggcggctctgtaccatttcagcactttccagtgtgggggcatcctggtgcaccgccagtgggtgctcacagctgctcattgcatcagcgacaattaccagctctggctgggtcgccacaacttgtttgacgacgaaaacacagcccagtttgttcatgtcagtgagagcttcccacaccctggcttcaacatgagcctcctggagaaccacacccgccaagcagacgaggactacagccacgacctcatgctgctccgcctgacagagcctgctgataccatcacagatgctgtgaaggtcgtggagttgcccaccgaggaacccgaagtggggagcacctgtttggcttccggctggggcagcatcgaaccagagaatttctcatttccagatgatctccagtgtgtggacctcaaaatcctgcctaatgatgagtgcaaaaaagcccacgtccagaaggtgacagacttcatgctgtgtgtcggacacctggaaggtggcaaagacacctgtgtgggtgattcagggggcccgctgatgtgtgatggtgtgctccaaggtgtcacatcatggggctacgtcccttgtggcacccccaataagccttctgtcgccgtcagagtgctgtcttatgtgaagtggatcgaggacaccatagcggagaactcctgaacgcccagccctgtcccctacccccagtaaaatcaaatgtgcatcc

SEQ ID NO: 126937 - DNA, 789 bp, Artificial Sequence
  derived and/or modified sequence
atgtggttcctggtgctgtgcctggccctgagcctgggcggcactggagctgccccacccatccagagcagaattgtgggcggctgggagtgtgagcagcacagccagccctggcaggccgccctgtaccacttcagcaccttccagtgtggcggcatcctggtgcaccggcagtgggtgctgacagctgcccactgcatcagtgacaactaccagctgtggctgggccgccacaacctgtttgatgatgagaacacagcccagtttgtgcacgtgtctgagagcttcccccaccctggcttcaacatgagcctgctggagaaccacacccggcaggctgatgaggactacagccatgacctgatgctgctgcggctgacagagcctgctgacaccatcacagatgctgtgaaggtggtggagctgcccacagaggagcctgaggtgggcagcacctgcctggccagcggctggggcagcattgagcctgagaacttctccttcccagatgacctgcagtgtgtggacctgaagatcctgcccaatgatgagtgcaagaaggcccacgtgcagaaggtgacagacttcatgctgtgtgtgggccacctggagggcggcaaggacacctgtgtgggggacagcggcggccccctgatgtgtgatggagtgctgcagggcgtgacctcctggggctacgtgccctgtggcacccccaacaagcccagcgtggccgtgcgggtgctgtcctatgtgaagtggattgaggacaccatcgccgagaacagctag

SEQ ID NO: 126938 - DNA, 789 bp, Artificial Sequence
  derived and/or modified sequence
atgtggttcctggtgctgtgcctggccctgagcctgggcggcaccggtgccgctcccccgatccaatccagaatagtcggaggatgggaatgtgagcaacattctcaaccgtggcaagctgctctttatcactttagcacattccaatgtggtgggatcttggttcatagacaatgggtgctgaccgcagcccactgcatctcggacaactatcagctgtggctagggagacacaacctcttcgatgacgagaacaccgcccagttcgtccacgtgagtgaatcatttccccatcctggctttaacatgtctctcctcgagaaccacacccgacaggcggatgaggattactctcacgatttaatgctgttacgactgactgaacctgccgacactattacagatgccgtgaaggttgtggagctgccaactgaggaaccagaagtggggtcgacttgtttggcttctggctggggatctatcgaacctgagaactttagctttccagatgatctgcagtgtgtggaccttaaaattctcccaaatgatgaatgcaaaaaggcgcacgtgcagaaagtcacagacttcatgttatgtgttgggcacttggaggggggcaaagatacttgtgtgggcgatagcggtggccctctgatgtgcgatggcgtgttgcagggcgttacctcatggggttacgtcccatgtgggacccccaataagcctagcgtggctgtgcgtgtcctcagctatgtgaagtggatcgaagatactattgctgagaactcatag

SEQ ID NO: 126939 - DNA, 789 bp, Artificial Sequence
  derived and/or modified sequence
atgtggtttctggttctgtgtctagctctgtccttaggcggaaccggagccgctccacctattcagagtcgaatagtgggcggatgggaatgtgagcaacactcacagccttggcaggccgcattgtatcacttctccactttccagtgcggtgggattctcgtgcatagacagtgggtcctgaccgccgctcattgcatttcagataactaccagttgtggctgggaaggcacaacctcttcgacgatgaaaacacggcgcagttcgtccacgtgtcagagagttttccacacccaggatttaacatgtctctgctggaaaatcatacacgccaggccgacgaagattactcacatgatttgatgcttttgcgcctgacggagcctgccgataccattacggacgcagtgaaggtagtcgaactcccaacggaggaacccgaggtcggttcgacctgcctggctagtggatggggctcgatcgaacccgagaatttctcatttcccgacgacctgcagtgtgtggatctgaagatcttgccgaacgatgagtgtaagaaggctcatgtacagaaggtcactgattttatgttgtgtgtaggccacctcgagggtggaaaagacacctgcgtgggggactctgggggtcctctgatgtgcgatggggtactgcagggggtaacaagttggggatatgtcccttgtggaactccgaacaagcccagtgtggccgtccgggttctgtcctacgttaaatggattgaggatactattgccgaaaattcttag

SEQ ID NO: 126940 - DNA, 789 bp, Artificial Sequence
  derived and/or modified sequence
atgtggttcctggtgctgtgcctggccctgagcctgggcggcaccggcgccgccccccccatccagagcagaatcgtgggcggctgggagtgcgagcagcacagccagccctggcaggccgccctgtaccacttcagcaccttccagtgcggcggcatcctggtgcacagacagtgggtgctgaccgccgcccactgcatcagcgacaactaccagctgtggctgggcagacacaacctgttcgacgacgagaacaccgcccagttcgtgcacgtgagcgagagcttcccccaccccggcttcaacatgagcctgctggagaaccacaccagacaggccgacgaggactacagccacgacctgatgctgctgagactgaccgagcccgccgacaccatcaccgacgccgtgaaggtggtggagctgcccaccgaggagcccgaggtgggcagcacctgcctggccagcggctggggcagcatcgagcccgagaacttcagcttccccgacgacctgcagtgcgtggacctgaagatcctgcccaacgacgagtgcaagaaggcccacgtgcagaaggtgaccgacttcatgctgtgcgtgggccacctggagggcggcaaggacacctgcgtgggcgacagcggcggccccctgatgtgcgacggcgtgctgcagggcgtgaccagctggggctacgtgccctgcggcacccccaacaagcccagcgtggccgtgagagtgctgagctacgtgaagtggatcgaggacaccatcgccgagaacagctag

SEQ ID NO: 126941 - protein, 225 aa, Artificial Sequence
  derived and/or modified sequence
MDQQAIYAELNLPTDSGPESSSPSSLPRDVCQGSPWHQFALKLSCAGIILLVLVVTGLSVSVTSLIQKSSIEKCSVDIQQSRNKTTERPGLLNCPIYWQQLREKCLLFSHTVNPWNNSLADCSTKESSLLLIRDKDELIHTQNLIRDKAILFWIGLNFSLSEKNWKWINGSFLNSNDLEIRGDAKENSCISISQTSVYSEYCSTEIRWICQKELTPVRNKVYPDS

SEQ ID NO: 126942 - DNA, 678 bp, Artificial Sequence
  derived and/or modified sequence
atggaccagcaggctatctatgctgagcttaacctcccaaccgactccggccctgagagctcgtccccatcaagtctgcccagagacgtttgtcagggcagcccatggcaccagttcgcacttaaactgtcttgcgccggcatcatcctgctggtgctggtggtgactgggttgtcggtgtccgtcacatcactgatccagaagtcatccatcgagaaatgtagcgtggatatacagcagtctcgtaacaaaacaacagagcgtcctggactgctcaactgtcctatctactggcagcagctgcgagagaaatgcctactttttagccacaccgtgaacccgtggaacaacagtctggcagactgttcaacaaaagagagttcactgctgctgatacgtgacaaggacgagctaatccacacacagaatttaataagggacaaggctatactgttctggattggtctgaacttttctctctcagaaaaaaactggaagtggattaacggatctttcttgaactccaatgaccttgagatcagaggcgatgcaaaggagaacagctgtatttcaatttcccagacaagtgtctactctgagtattgctcaacggaaatccggtggatttgccaaaaggaactcacccccgtgcgtaataaagtgtaccccgactcctag

SEQ ID NO: 126943 - DNA, 1448 bp, Artificial Sequence
  derived and/or modified sequence
gagtttgttcttacacacaagtttaatgccaccttcctctgtctgccatggaccaacaagcaatatatgctgagttaaacttacccacagactcaggcccagaaagttcttcaccttcatctcttcctcgggatgtctgtcagggttcaccttggcatcaatttgccctgaaacttagctgtgctgggattattctccttgtcttggttgttactgggttgagtgtttcagtgacatccttaatacagaaatcatcaatagaaaaatgcagtgtggacattcaacagagcaggaataaaacaacagagagaccgggtctcttaaactgcccaatatattggcagcaactccgagagaaatgcttgttattttctcacactgtcaacccttggaataacagtctagctgattgttccaccaaagaatccagcctgctgcttattcgagataaggatgaattgatacacacacagaacctgatacgtgacaaagcaattctgttttggattggattaaatttttcattatcagaaaagaactggaagtggataaacggctcttttttaaattctaatgacttagaaattagaggtgatgctaaagaaaacagctgtatttccatctcacagacatctgtgtattctgagtactgtagtacagaaatcagatggatctgccaaaaagaactaacacctgtgagaaataaagtgtatcctgactcttgactatgaatcccatctcaatttatttgcttcccattactgatctctgtacttgtagctgcacatactattggtactacctaatagtgccacatttagtggcacaaagtgaacaattctgagaattgacaactgttatgaatcttacagaagttcatgtttatcatattcattctattaaatgaggaaacagagacatagagaaaaacgtgcatcgttttaaagaaacagtgatattctatggtgaaggagtgaaggatgtccccgaatatgccagattggtatatgattgttttgtgtttaaaacagtggagaaattgtagattcagaaagggagagctgacctgtctcttcccgcacgcggcaagccgtgaagattcctctgggagggctatccgagtcatacaagggcaagaaaatagctcttatcgccagagacctggaattggatgctgcaatgaacctgaataaagatacttaataaacacctatctttcacctattttacagccccccgcaaccaatatatctcctagtgactcctctagaaaatttattgcccctagccagcttttcttcatcctgtcatttcttttcaaatttatcattcttggtctaaaaagcataaaagcatcttgcttaggccacttctatggatttcactctcttgcgagttcctcatgtacatgcaaaacgaataaaatgtgtatacttttattttgttca

SEQ ID NO: 126944 - DNA, 678 bp, Artificial Sequence
  derived and/or modified sequence
atggaccagcaggccatctatgcagagctgaacctgcccacagacagcggccctgagagcagcagccccagcagcctgcccagagatgtgtgccagggcagcccctggcaccagtttgccctgaagctgagctgtgccggcatcatcctgctggtgctggtggtgacaggcctgtctgtgtctgtgaccagcctcatccagaagagcagcattgaaaaatgttctgtggacatccagcagagcaggaacaagaccacagagaggcctggcctgctgaactgccccatctactggcagcagctgcgggagaagtgcctgctcttcagccacacagtgaacccctggaacaacagcctggccgactgcagcaccaaggagagcagcctgctgctgatccgggacaaggatgagctgatccacacccagaacctgatccgggacaaggccatcctcttctggattggcctgaacttcagcctgtctgagaagaactggaagtggatcaatggcagcttcctgaacagcaatgacctggagatcagaggagatgccaaggagaacagctgcatcagcatcagccagacctctgtgtacagcgagtactgcagcacagagatccgctggatctgccagaaggagctgacccctgtgaggaacaaggtgtacccagacagctag

SEQ ID NO: 126945 - DNA, 678 bp, Artificial Sequence
  derived and/or modified sequence
atggaccagcaggccatctacgccgagctgaacctgcccaccgactctgggcccgaatcttcaagtccaagctcacttcctcgggatgtctgccagggctcaccatggcaccagttcgctttgaagctcagctgtgccggcattattctgttggtgctcgtggtaacaggactgagcgtgagtgtgacgtcacttatacagaagtcctcaattgagaagtgcagtgttgacattcagcagagtaggaacaagactactgagcgacccggcctcctaaactgccctatttattggcagcagctccgcgagaaatgtctgctgttctcccataccgtcaacccgtggaacaacagtctcgccgactgttccaccaaggagagcagcctgttgctgatcagagataaggatgagctgatccatacacaaaatctgatccgtgataaggccattctcttttggataggactcaatttttcgctgagtgagaaaaactggaagtggatcaacggctcatttctcaacagcaatgacctggagataaggggggacgccaaagaaaactcttgtattagcattagtcagacctccgtctattcagagtactgttcaaccgagataaggtggatctgccaaaaggagctgactccagtgaggaacaaagtgtacccggattcctag

SEQ ID NO: 126946 - DNA, 678 bp, Artificial Sequence
  derived and/or modified sequence
atggaccagcaagcgatctatgcagagttgaacttaccaacagatagtgggcctgaatctagttcaccaagctcactccctagggacgtgtgccaggggtccccatggcatcagtttgcactgaagctcagctgcgccggaatcatcctcctggttcttgtggttacaggtctttctgttagcgttactagcctaattcagaagtcgtctatagaaaaatgctctgtggacatccagcagtcaagaaataagacgaccgaaagaccgggtctccttaactgcccgatctactggcagcagctgcgggagaaatgcttattgttctctcacactgtgaatccttggaataacagtctcgctgactgttctacaaaggaatccagcctgctcctaattcgtgacaaggacgaattgattcacacgcaaaacctgattcgagacaaagctatcctgttttggatcggcttaaatttctctctctctgaaaaaaactggaagtggattaatgggtcattcctcaattctaatgatctggagattcggggagatgcaaaggagaattcctgcatttccatctcccaaacttcagtgtactctgaatactgttccactgaaattcggtggatctgccagaaggagctgacccctgtccgcaataaggtgtaccctgattcgtag

SEQ ID NO: 126947 - DNA, 678 bp, Artificial Sequence
  derived and/or modified sequence
atggaccagcaggccatctacgccgagctgaacctgcccaccgacagcggccccgagagcagcagccccagcagcctgcccagagacgtgtgccagggcagcccctggcaccagttcgccctgaagctgagctgcgccggcatcatcctgctggtgctggtggtgaccggcctgagcgtgagcgtgaccagcctgatccagaagagcagcatcgagaagtgcagcgtggacatccagcagagcagaaacaagaccaccgagagacccggcctgctgaactgccccatctactggcagcagctgagagagaagtgcctgctgttcagccacaccgtgaacccctggaacaacagcctggccgactgcagcaccaaggagagcagcctgctgctgatcagagacaaggacgagctgatccacacccagaacctgatcagagacaaggccatcctgttctggatcggcctgaacttcagcctgagcgagaagaactggaagtggatcaacggcagcttcctgaacagcaacgacctggagatcagaggcgacgccaaggagaacagctgcatcagcatcagccagaccagcgtgtacagcgagtactgcagcaccgagatcagatggatctgccagaaggagctgacccccgtgagaaacaaggtgtaccccgacagctag

SEQ ID NO: 126948 - protein, 231 aa, Artificial Sequence
  derived and/or modified sequence
MNKQRGTFSEVSLAQDPKRQQRKPKGNKSSISGTEQEIFQVELNLQNPSLNHQGIDKIYDCQGLLPPPEKLTAEVLGIICIVLMATVLKTIVLIPFLEQNNSSPNTRTQKTRHCGHCPEEWITYSNSCYYIGKERRTWEESLLACTSKNSSLLSIDNEEEMKFLASILPSSWIGVFRNSSHHPWVTINGLAFKHKIKDSDNAELNCAVLQVNRLKSAQCGSSMIYHCKHKL

SEQ ID NO: 126949 - protein, 231 aa, Artificial Sequence
  derived and/or modified sequence
MNKQRGTFSEVSLAQDPKRQQRKPKGNKSSISGTEQEIFQVELNLQNPSLNHQGIDKIYDCQGLLPPPEKLTAEVLGIICIVLMATVLKTIVLIPFLEQNNFSPNTRTQKARHCGHCPEEWITYSNSCYYIGKERRTWEESLLACTSKNSSLLSIDNEEEMKFLASILPSSWIGVFRNSSHHPWVTINGLAFKHKIKDSDNAELNCAVLQVNRLKSAQCGSSMIYHCKHKL

SEQ ID NO: 126950 - protein, 124 aa, Artificial Sequence
  derived and/or modified sequence
MIPTRHCGHCPEEWITYSNSCYYIGKERRTWEESLLACTSKNSSLLSIDNEEEMKFLASILPSSWIGVFRNSSHHPWVTINGLAFKHKIKDSDNAELNCAVLQVNRLKSAQCGSSMIYHCKHKL

SEQ ID NO: 126951 - DNA, 696 bp, Artificial Sequence
  derived and/or modified sequence
atgaacaagcagcgtgggacattcagcgaggtgagcctggctcaggacccgaagaggcagcagaggaagcctaaaggcaacaaatcctccatcagtgggaccgaacaggaaatctttcaggtcgaattaaacttgcagaatcctagtttgaaccatcaggggatcgataaaatctacgattgtcaaggacttttgccaccccctgagaaactaaccgctgaggtcctggggatcatctgcattgttcttatggctacagtactcaaaacaatcgtgttgattccattccttgaacaaaacaactccagccctaataccagaacccagaagacgcgccactgtggccattgtccggaggaatggattacttactcgaatagttgctattatatcggcaaagaacggagaacgtgggaagagagcctgctggcctgcacatccaagaactccagcttactttccatcgataatgaagaagagatgaaattcctcgcttcaattctcccctctagctggataggggtatttcggaattcctctcaccacccctgggtgaccattaatggacttgcctttaagcacaagattaaggactctgacaacgcggagttaaactgcgctgttcttcaggttaatcgcctcaagagcgcccaatgtggctcatctatgatttatcactgcaaacacaaactgtag

SEQ ID NO: 126952 - DNA, 696 bp, Artificial Sequence
  derived and/or modified sequence
atgaataagcagagaggtactttctcagaagtcagtcttgctcaagaccccaagcggcagcaaagaaaacccaaaggaaacaagtcctccatcagcgggaccgagcaggagatctttcaggtggagctcaaccttcaaaatccttctttaaaccaccagggaatcgataaaatttatgactgccaggggctgctgccacctcccgaaaaactgacagctgaagtcctaggcataatctgcatcgttctcatggccactgtgctgaagaccatcgtcctgatccccttccttgagcagaacaacttctcccccaacactagaacccagaaagcccgccattgtggacactgtcctgaagagtggatcacttattcaaatagttgctattacataggaaaagagaggcgcacttgggaggaatctctccttgcatgtacatccaagaacagtagccttttaagcattgacaacgaagaggagatgaagttcttagcctctatattgccctcctcttggattggcgtgttccgcaacagctcacatcatccctgggtgacaatcaatggccttgcatttaagcataaaatcaaagacagcgacaacgcagagttaaattgcgccgtcctccaagttaataggctgaagagcgctcagtgcggcagtagcatgatttatcactgtaagcacaaactctag

SEQ ID NO: 126953 - DNA, 375 bp, Artificial Sequence
  derived and/or modified sequence
atgattccaacgcggcactgcggtcactgtcccgaggaatggataacctacagtaacagttgctattatattggaaaggaaagaaggacatgggaggagagcctcctggcatgtaccagtaaaaatagttcattgttgagtatagataatgaggaagagatgaaattcttagcttctatactgccttcttcttggatcggtgtttttagaaactcaagtcatcacccctgggttaccattaatggtctcgcatttaagcataagatcaaagacagcgacaacgccgaattgaattgcgctgttcttcaagtcaatcggctaaagtctgctcagtgtggcagcagcatgatctatcactgtaaacataagttatag

SEQ ID NO: 126954 - DNA, 1209 bp, Artificial Sequence
  derived and/or modified sequence
tgcagagatgaataaacaaagaggaaccttctcagaagtgagtctggcccaggacccaaagcggcagcaaaggaaacctaaaggcaataaaagctccatttcaggaaccgaacaggaaatattccaagtagaattaaatcttcaaaatccttccctgaatcatcaagggattgataaaatatatgactgccaaggtttactgccacctccagagaagctcactgccgaggtcctaggaatcatttgcattgtcctgatggccactgtgttaaaaacaatagttcttattcctttcctggagcagaacaattcttccccaaatacaagaacccagaaaacacgtcattgtggccattgtcctgaggagtggattacatattccaacagttgttattacattggtaaggaaagaagaacttgggaagagagtttgctggcctgtacttcgaagaactccagtctgctttctatagataatgaagaagaaatgaaatttctggccagcattttaccttcctcatggattggtgtgtttcgtaacagcagtcatcatccatgggtgacaataaatggtttggctttcaaacataagataaaagactcagataatgctgaacttaactgtgcagtgctacaagtaaatcgacttaaatcagcccagtgtggatcttcaatgatatatcattgtaagcataagctttagaagtaaagcatttgcgtttgcagtgcatcagatacattttatatttcttaaaatagaaatattatgattgcataaatctgaaaatgaattatgttatttgctctgatacaaaaattctaaatcaattattgaaataggatgcacacaattactaaagtacagacatcctagcatttgtgtcgggctcattttgctcaacatggtatttgtggttttcagcctttctaaaagttgcatgttatgtgagtcagcttataggaagtaccaagaacagtcaaacccatggagacagaaagtagaatagtggttgccaatgtctcagggaggttgaaataggagatgaccactaattgatagaacgtttctttgtgtcgtgatgaaaactttctaaatttcagtagtggtgatggttgtaactctgcgaatatactaaacatcattgatttttaatcattttaagtgcatgaaatgtatgctttgtacatgacacttcaataaagctatcc

SEQ ID NO: 126955 - DNA, 1221 bp, Artificial Sequence
  derived and/or modified sequence
tgcagagatgaataaacaaagaggaaccttctcagaagtgagtctggcccaggacccaaagcggcagcaaaggaaacctaaaggcaataaaagctccatttcaggaaccgaacaggaaatattccaagtagaattaaatcttcaaaatccttccctgaatcatcaagggattgataaaatatatgactgccaaggtttactgccacctccagagaagctcactgccgaggtcctaggaatcatttgcattgtcctgatggccactgtgttaaaaacaatagttcttattcctttcctggagcagaacaatttttccccgaatacaagaacgcagaaagcacgtcattgtggccattgtcctgaggagtggattacatattccaacagttgttattacattggtaaggaaagaagaacttgggaagagagtttgctggcctgtacttcgaagaactccagtctgctttctatagataatgaagaagaaatgaaatttctggccagcattttaccttcctcatggattggtgtgtttcgtaacagcagtcatcatccatgggtgacaataaatggtttggctttcaaacataagataaaagactcagataatgctgaacttaactgtgcagtgctacaagtaaatcgacttaaatcagcccagtgtggatcttcaatgatatatcattgtaagcataagctttagaagtaaagcatttgcgtttgcagtgcatcagatacattttatatttcttaaaatagaaatattatgattgcataaatctgaaaatgaattatgttatttgctctgatacaaaaattctaaatcaattattgaaataggatgcacacaattactaaagtacagacatcctagcatttgtgtcgggctcattttgctcaacatggtatttgtggttttcagcctttctaaaagttgcatgttatgtgagtcagcttataggaagtaccaagaacagtcaaacccatggagacagaaagtagaatagtggttgccaatgtctcagggaggttgaaataggagatgaccactaattgatagaacgtttctttgtgtcgtgatgaaaactttctaaatttcagtagtggtgatggttgtaactctgcgaatatactaaacatcattgatttttaatcattttaagtgcatgaaatgtatgctttgtacatgacacttcaataaagctatccagaaaaaaaaaa

SEQ ID NO: 126956 - DNA, 881 bp, Artificial Sequence
  derived and/or modified sequence
atgataccaacacgtcattgtggccattgtcctgaggagtggattacatattccaacagttgttattacattggtaaggaaagaagaacttgggaagagagtttgctggcctgtacttcgaagaactccagtctgctttctatagataatgaagaagaaatgaaatttctggccagcattttaccttcctcatggattggtgtgtttcgtaacagcagtcatcatccatgggtgacaataaatggtttggctttcaaacataagataaaagactcagataatgctgaacttaactgtgcagtgctacaagtaaatcgacttaaatcagcccagtgtggatcttcaatgatatatcattgtaagcataagctttagaagtaaagcatttgcgtttgcagtgcatcagatacattttatatttcttaaaatagaaatattatgattgcataaatctgaaaatgaattatgttatttgctctgatacaaaaattctaaatcaattattgaaataggatgcacacaattactaaagtacagacatcctagcatttgtgtcgggctcattttgctcaacatggtatttgtggttttcagcctttctaaaagttgcatgttatgtgagtcagcttataggaagtaccaagaacagtcaaacccatggagacagaaagtagaatagtggttgccaatgtctcagggaggttgaaataggagatgaccactaattgatagaacgtttctttgtgtcgtgatgaaaactttctaaatttcagtagtggtgatggttgtaactctgcgaatatactaaacatcattgatttttaatcattttaagtgcatgaaatgtatgctttgtacatgacacttcaataaagctatcc

SEQ ID NO: 126957 - DNA, 696 bp, Artificial Sequence
  derived and/or modified sequence
atgaacaagcagaggggcaccttcagcgaggtgtccctggcccaggaccccaagaggcagcagaggaagcccaagggcaacaagagcagcatcagcggcacagagcaggagatcttccaggtggagctgaacctgcagaaccccagcctgaaccaccagggcatcgacaagatctatgactgccagggcctgctgcccccacctgagaagctgacagctgaggtgctgggcatcatctgcatcgtgctgatggccaccgtgctgaagaccatcgtgctgatccccttcctggagcagaacaacagcagccccaacaccaggacccagaagaccaggcactgcggccactgcccagaggagtggatcacctacagcaacagctgctactacatcggcaaggagaggaggacctgggaggagagcctgctggcctgcaccagcaagaacagcagcctgctgagcattgacaatgaggaggagatgaagttcctggccagcatcctgcccagctcctggattggagtcttcaggaacagcagccaccacccctgggtgaccatcaatggcctggccttcaagcacaagatcaaggacagcgacaatgctgagctgaactgtgctgtgctgcaggtgaaccggctgaagagcgcccagtgtggcagctccatgatctaccactgcaagcacaagctgtag

SEQ ID NO: 126958 - DNA, 696 bp, Artificial Sequence
  derived and/or modified sequence
atgaacaagcagaggggcaccttcagcgaggtgtccctggcccaggaccccaagaggcagcagaggaagcccaagggcaacaagagcagcatcagcggcacagagcaggagatcttccaggtggagctgaacctgcagaaccccagcctgaaccaccagggcatcgacaagatctatgactgccagggcctgctgcccccacctgagaagctgacagctgaggtgctgggcatcatctgcatcgtgctgatggccaccgtgctgaagaccatcgtgctgatccccttcctggagcagaacaacttcagccccaacaccaggacccagaaggcccggcactgcggccactgcccagaggagtggatcacctacagcaacagctgctactacatcggcaaggagaggaggacctgggaggagagcctgctggcctgcaccagcaagaacagcagcctgctgagcattgacaatgaggaggagatgaagttcctggccagcatcctgcccagctcctggattggagtcttcaggaacagcagccaccacccctgggtgaccatcaatggcctggccttcaagcacaagatcaaggacagcgacaatgctgagctgaactgtgctgtgctgcaggtgaaccggctgaagagcgcccagtgtggcagctccatgatctaccactgcaagcacaagctgtag

SEQ ID NO: 126959 - DNA, 375 bp, Artificial Sequence
  derived and/or modified sequence
atgatccccaccaggcactgcggccactgcccagaggagtggatcacctacagcaacagctgctactacatcggcaaggagaggaggacctgggaggagagcctgctggcctgcaccagcaagaacagcagcctgctgagcattgacaatgaggaggagatgaagttcctggccagcatcctgcccagctcctggattggagtcttcaggaacagcagccaccacccctgggtgaccatcaatggcctggccttcaagcacaagatcaaggacagcgacaatgctgagctgaactgtgctgtgctgcaggtgaaccggctgaagagcgcccagtgtggcagctccatgatctaccactgcaagcacaagctgtag

SEQ ID NO: 126960 - DNA, 696 bp, Artificial Sequence
  derived and/or modified sequence
atgaacaagcagcggggcaccttcagcgaggtgagcctggcccaggatccaaaacgccagcagcgcaagcctaagggaaataagagctcgatcagcggaactgaacaagaaattttccaggtggaactgaacctgcagaacccctctctgaatcatcagggcattgacaagatttacgattgtcaggggctgttaccgccacccgagaaactcaccgcagaggtgttgggtataatttgtatcgtgttgatggctacagtcctgaagacaattgtgctgatccccttcttggaacaaaataactcttcccctaatacaaggacccagaaaactcgccattgtggtcactgcccagaagaatggataacctattcgaacagctgctactatatcggcaaagaacgccggacgtgggaagagtcactcttggcctgcacttctaaaaactccagcctcctgtccatcgacaatgaggaggagatgaagtttctggcttccatccttcccagctcatggatcggagtgttccgcaattccagccaccatccatgggtgactatcaacggtctggccttcaagcataagatcaaggattcggataatgcagagctgaactgcgccgtgctccaagtgaaccgcttaaaaagcgcccagtgcggatcctcaatgatttaccactgcaaacacaagttgtag

SEQ ID NO: 126961 - DNA, 696 bp, Artificial Sequence
  derived and/or modified sequence
atgaacaagcagcggggcaccttcagcgaggtgagcctggcccaggatcccaagcgccagcagaggaagccaaagggtaataaaagcagtatctctggaaccgagcaggaaatcttccaggttgagcttaacctccagaaccctagcctcaatcatcagggcatcgacaaaatctacgactgtcagggattattgccgccccctgaaaaacttaccgctgaggtactcggaataatatgcattgttctgatggcaaccgtgctgaagacaatcgtactgataccttttcttgagcaaaataatttctcgcccaacacccgaacgcaaaaagccagacactgtggccactgtcccgaggagtggatcacctattccaacagctgttattacatcgggaaggagcgaaggacttgggaagaaagtctcctcgcctgcacctctaaaaattcttcgctgttgtcaattgataacgaggaagagatgaagttcctagcttccatcttgccaagctcctggattggagtgttccgaaattctagtcaccacccctgggtgactataaatggactcgccttcaagcacaagatcaaggactctgacaacgctgaacttaattgcgccgtgctgcaggttaaccggctcaaatcagcccagtgcggatcatccatgatttatcactgcaagcacaaactatag

SEQ ID NO: 126962 - DNA, 375 bp, Artificial Sequence
  derived and/or modified sequence
atgatccccacccggcactgcggccactgccccgaggagtggatcacctactctaactcttgttactatatcggaaaagaaagacgcacatgggaagagagtctgctagcctgtacgtctaaaaacagtagtcttctgtccattgacaacgaggaagagatgaaattccttgctagtatactcccatcctcctggattggtgtcttcaggaattcatcccaccatccgtgggtaaccattaacggcctcgccttcaaacacaaaattaaagacagtgataacgccgagcttaactgtgccgtcctgcaagtgaacaggctcaaatccgctcagtgcgggtcaagcatgatatatcattgcaagcataagctgtag

SEQ ID NO: 126963 - DNA, 696 bp, Artificial Sequence
  derived and/or modified sequence
atgaataagcagcgagggaccttttctgaggtgtcactggcccaggatccaaagcggcagcagcgcaagcccaaggggaacaaatctagtattagcggcaccgagcaggagatatttcaagtggagctcaacctgcagaatccgagcttaaaccaccaaggtatcgacaaaatctatgattgtcaaggattactgccaccaccagagaagctgactgctgaagtgcttggaattatttgcatcgttctaatggcaacagtgctgaaaactattgtgctgattcccttcctagagcagaacaactcaagcccgaacactcgaacccaaaagacgcggcactgtggacactgcccggaggagtggatcacctacagcaattcatgttactacatcgggaaggagagacggacctgggaggagtcactgttagcatgtactagcaaaaatagtagcctcctgagtattgacaatgaggaagaaatgaagtttttagcttcgattttaccaagctcctggatcggggtgttccggaactcaagtcatcacccttgggtgaccatcaacgggctcgcattcaagcacaagatcaaagatagcgataatgcagagctgaactgcgccgtgctccaggtgaatagacttaaatctgctcagtgcgggtctagcatgatataccactgcaaacataaactctag

SEQ ID NO: 126964 - DNA, 696 bp, Artificial Sequence
  derived and/or modified sequence
atgaataagcaaaggggtactttctcagaggttagcctggcacaggaccctaagagacagcagagaaagccgaaggggaacaaatcctccatcagtgggacagagcaggaaattttccaggtggagctcaatctgcagaacccatctctcaaccatcaaggcatcgacaagatctacgactgtcagggccttcttccaccacccgagaagctgaccgccgaggtgctggggattatctgcatcgtgctgatggcgaccgtgcttaagacaatcgtcctcatcccattcctcgagcaaaataattttagcccaaacacacggacccaaaaggcacgacactgcggacactgccctgaggaatggataacgtatagcaactcctgctattacattgggaaggagcggagaacctgggaagagtccctcttagcgtgcacttccaagaattcgtcattgctctctatagataacgaagaagaaatgaagttccttgcctccatcctgccctctagttggatcggtgtattccgcaactcatctcaccatccctgggtgaccatcaatggactcgctttcaaacacaagatcaaagatagcgacaatgcagaactgaattgcgctgtcctgcaggttaaccggctaaagtccgctcaatgcggctcttccatgatataccattgtaaacacaagttgtag

SEQ ID NO: 126965 - DNA, 375 bp, Artificial Sequence
  derived and/or modified sequence
atgataccgacgaggcattgtggacactgtcctgaagagtggattacttactctaactcttgttactatatcggcaaggaaaggcgaacatgggaagaatccctcctcgcatgcacctcaaaaaactcaagcctgctgagcattgataacgaggaggagatgaaattcttggcctctattctccctagttcttggataggtgtttttcgcaattcttcacatcatccctgggtaaccatcaatggactcgctttcaaacataaaataaaggattccgacaatgcggaactgaactgcgctgtcctgcaagtgaatcgcctcaaaagtgcccagtgtggctctagcatgatttaccactgcaagcataaattatag

SEQ ID NO: 126966 - DNA, 696 bp, Artificial Sequence
  derived and/or modified sequence
atgaacaagcagagaggcaccttcagcgaggtgagcctggcccaggaccccaagagacagcagagaaagcccaagggcaacaagagcagcatcagcggcaccgagcaggagatcttccaggtggagctgaacctgcagaaccccagcctgaaccaccagggcatcgacaagatctacgactgccagggcctgctgcccccccccgagaagctgaccgccgaggtgctgggcatcatctgcatcgtgctgatggccaccgtgctgaagaccatcgtgctgatccccttcctggagcagaacaacagcagccccaacaccagaacccagaagaccagacactgcggccactgccccgaggagtggatcacctacagcaacagctgctactacatcggcaaggagagaagaacctgggaggagagcctgctggcctgcaccagcaagaacagcagcctgctgagcatcgacaacgaggaggagatgaagttcctggccagcatcctgcccagcagctggatcggcgtgttcagaaacagcagccaccacccctgggtgaccatcaacggcctggccttcaagcacaagatcaaggacagcgacaacgccgagctgaactgcgccgtgctgcaggtgaacagactgaagagcgcccagtgcggcagcagcatgatctaccactgcaagcacaagctgtag

SEQ ID NO: 126967 - DNA, 696 bp, Artificial Sequence
  derived and/or modified sequence
atgaacaagcagagaggcaccttcagcgaggtgagcctggcccaggaccccaagagacagcagagaaagcccaagggcaacaagagcagcatcagcggcaccgagcaggagatcttccaggtggagctgaacctgcagaaccccagcctgaaccaccagggcatcgacaagatctacgactgccagggcctgctgcccccccccgagaagctgaccgccgaggtgctgggcatcatctgcatcgtgctgatggccaccgtgctgaagaccatcgtgctgatccccttcctggagcagaacaacttcagccccaacaccagaacccagaaggccagacactgcggccactgccccgaggagtggatcacctacagcaacagctgctactacatcggcaaggagagaagaacctgggaggagagcctgctggcctgcaccagcaagaacagcagcctgctgagcatcgacaacgaggaggagatgaagttcctggccagcatcctgcccagcagctggatcggcgtgttcagaaacagcagccaccacccctgggtgaccatcaacggcctggccttcaagcacaagatcaaggacagcgacaacgccgagctgaactgcgccgtgctgcaggtgaacagactgaagagcgcccagtgcggcagcagcatgatctaccactgcaagcacaagctgtag

SEQ ID NO: 126968 - DNA, 375 bp, Artificial Sequence
  derived and/or modified sequence
atgatccccaccagacactgcggccactgccccgaggagtggatcacctacagcaacagctgctactacatcggcaaggagagaagaacctgggaggagagcctgctggcctgcaccagcaagaacagcagcctgctgagcatcgacaacgaggaggagatgaagttcctggccagcatcctgcccagcagctggatcggcgtgttcagaaacagcagccaccacccctgggtgaccatcaacggcctggccttcaagcacaagatcaaggacagcgacaacgccgagctgaactgcgccgtgctgcaggtgaacagactgaagagcgcccagtgcggcagcagcatgatctaccactgcaagcacaagctgtag

SEQ ID NO: 126969 - protein, 673 aa, Artificial Sequence
  derived and/or modified sequence
MDPQRSPLLEVKGNIELKRPLIKAPSQLPLSGSRLKRRPDQMEDGLEPEKKRTRGLGATTKITTSHPRVPSLTTVPQTQGQTTAQKVSKKTGPRCSTAIATGLKNQKPVPAVPVQKSGTSGVPPMAGGKKPSKRPAWDLKGQLCDLNAELKRCRERTQTLDQENQQLQDQLRDAQQQVKALGTERTTLEGHLAKVQAQAEQGQQELKNLRACVLELEERLSTQEGLVQELQKKQVELQEERRGLMSQLEEKERRLQTSEAALSSSQAEVASLRQETVAQAALLTEREERLHGLEMERRRLHNQLQELKGNIRVFCRVRPVLPGEPTPPPGLLLFPSGPGGPSDPPTRLSLSRSDERRGTLSGAPAPPTRHDFSFDRVFPPGSGQDEVFEEIAMLVQSALDGYPVCIFAYGQTGSGKTFTMEGGPGGDPQLEGLIPRALRHLFSVAQELSGQGWTYSFVASYVEIYNETVRDLLATGTRKGQGGECEIRRAGPGSEELTVTNARYVPVSCEKEVDALLHLARQNRAVARTAQNERSSRSHSVFQLQISGEHSSRGLQCGAPLSLVDLAGSERLDPGLALGPGERERLRETQAINSSLSTLGLVIMALSNKESHVPYRNSKLTYLLQNSLGGSAKMLMFVNISPLEENVSESLNSLRFASKVNQCVIGTAQANRK

SEQ ID NO: 126970 - DNA, 2022 bp, Artificial Sequence
  derived and/or modified sequence
atggacccacagcgcagccctctgctcgaagtgaaggggaacattgagcttaagcgcccgttgataaaggccccctcccagttaccactatctggaagtcggcttaaaagacggcctgaccagatggaagacggcctggaacctgagaaaaaaaggacacgaggactcggagccacaactaaaatcaccacaagccaccctagagtgccttccctcacaactgtccctcagacgcagggccaaactacagcacagaaagtcagcaagaagacaggacccagatgttccaccgccatcgcaactgggttgaaaaatcagaagccagtgcccgccgttcccgtgcagaaatcaggcaccagcggggtcccacctatggcgggaggaaagaaaccaagtaaaagaccagcctgggacctgaagggtcagctgtgcgatttgaatgctgaactgaagcgctgtcgcgagagaacccaaactctggaccaggagaaccagcagctgcaggaccagctgcgggacgcgcagcagcaagtgaaggccctgggcacagagcggaccactcttgagggccatctcgctaaggtacaggcccaggctgagcaggggcagcaggaacttaagaatcttcgggcctgtgtgctggaattagaggagcgattgagtacgcaggaaggattggtgcaagagctgcagaagaaacaagtcgaactccaagaggagaggcgggggctgatgagccagctggaggaaaaggagcggcggctccaaacctctgaggcagcactctcctcaagccaggccgaggtggcgtccctaagacaggaaacagtggctcaagcagcattgctcaccgaacgtgaagagcggctacatggactggagatggaacgcaggcgcttgcacaaccaattacaggagctcaaaggaaatattcgcgtgttttgcagggtgcgccccgtgctgccgggggagccaactcctccaccaggactgttgctgttccccagtggaccggggggcccaagcgaccctcccacgcgcttgtccttgtccagaagcgatgaacgcaggggcactctgtcaggtgcaccagccccccctacccgtcatgactttagcttcgatcgggtatttccccctggatctggccaggacgaggtattcgaagaaattgcgatgttagtccagtccgcgcttgatggataccccgtgtgcatctttgcctacggccagacgggctcgggtaaaactttcacaatggaagggggccctggaggcgacccccagctcgagggcctaatccccagggctctccgtcacctgtttagtgtcgcacaggagttgtctggccaaggatggacttattcctttgttgccagttacgtcgaaatctataacgagaccgtccgcgatctactggccactggcactcgtaaagggcaaggtggagaatgtgagatccggcgggcaggaccaggttccgaagaactgacagtgactaacgctaggtacgtaccggtaagttgcgaaaaagaggtggatgccctcttgcacctggcccgccagaatagagctgtggccaggacggctcagaacgaacgcagttcccgttctcactctgtcttccaactgcaaatctctggggaacacagcagccggggactgcagtgcggggcacctctgagccttgtggaccttgcagggtccgaaaggcttgacccaggactggcactgggtcctggggaacgagaaaggcttcgcgaaactcaggctatcaattccagtttatctactctgggtctcgtgattatggccctttcaaacaaagaatcacatgtcccctatagaaattccaagctgacatatctgctccaaaactccctagggggttcagcaaaaatgttaatgtttgtcaatatttcacccctagaagaaaacgtctcagagtctctcaactctctaaggtttgctagtaaggtgaatcagtgtgtgattggtaccgcccaagcaaacaggaagtag

SEQ ID NO: 126971 - DNA, 2022 bp, Artificial Sequence
  derived and/or modified sequence
atggacccacaacggagccctttgctcgaggtgaaggggaacatcgaattaaagagacctctcatcaaagcccctagccagctgcccctgtctgggagcagactgaagagacgtcctgaccagatggaagacggcttggagcccgagaagaagcggaccagggggctcggcgccacaactaaaattacaacctctcacccaagggttccctctctgacaacagtgcctcagacgcagggacagactacagcacagaaagtgagtaagaagactggccccaggtgttcgaccgctatcgccaccggcctgaagaatcagaaacccgtgcctgccgtgccagtgcagaaaagtggcactagcggagtcccaccgatggccggtgggaaaaaaccatcaaagaggcccgcctgggatttaaaaggtcagctgtgcgacctgaacgcggagctgaagcgctgcagggagcggacccagacactggaccaagaaaatcaacaactccaggaccaactgcgcgatgcccagcagcaggtcaaagccctcggcacagaaaggacgactcttgaaggccatctggcaaaggtgcaagcccaggcagagcagggacagcaggaactgaagaatctgcgcgcctgtgttttagagctggaggaacgcctgagcactcaagagggcctcgtccaagagttacagaaaaaacaggtcgagctccaggaggagaggcgcggccttatgagtcagctagaggagaaggaacggagactgcagacctccgaagccgccctcagttcgtcacaggctgaggttgcaagcctgaggcaagagaccgtcgcacaggcagcattgctcactgagcgcgaggagcgcctgcacggcctggagatggagcgtaggaggctccacaatcaattgcaggagctgaaaggaaatatcagggtgttttgcagggtccgccccgtgctgcctggtgagccaacccctccccccggcctgctgttattcccgtctgggcccggcggcccttcagatcctccaacccggctaagcctttctcggagtgacgagcgtcgaggaacattgagtggagcccctgctccgcccacacgtcacgatttttccttcgacagggtttttcccccgggctccggccaagacgaggtcttcgaggaaattgccatgctagtccaaagcgccctggatgggtaccccgtctgcattttcgcctatggacagacgggctcaggcaagacctttaccatggaggggggaccaggcggtgaccctcagctggaggggctaatccccagagccctccggcacctcttttccgtggcgcaggaattgtccgggcagggatggacgtattctttcgtcgcttcctacgtggaaatttataacgagacggtgagagacctcctcgccactggtacgcgcaagggccaaggcggcgagtgcgagatccgtagggcaggtccgggcagcgaggagttgactgtgacaaatgcacggtacgtgcctgtcagttgcgaaaaagaggtcgatgctctgctgcatctggcgaggcagaacagagccgtggccaggacggctcagaacgaacgctcttcacgctcccattccgtcttccaattgcaaataagcggggagcacagctcccggggtcttcagtgtggtgcacccctctcgctagtagatttggccgggagtgagcgccttgatcctggcctcgcgcttgggcctggcgagcgcgaaaggctcagggagacccaagctatcaattctagtttaagcacattgggactagtcattatggccctatctaataaggaatcccatgttccgtacagaaattctaagttgacgtatctacttcagaactcgctggggggctccgcgaagatgctcatgttcgtgaacatatccccactggaagaaaatgtgagtgagtcactcaactctctgaggtttgcttcgaaggtcaatcagtgtgtcatcggtacagctcaggcaaaccggaaatag

SEQ ID NO: 126972 - DNA, 2022 bp, Artificial Sequence
  derived and/or modified sequence
atggatccccagagaagccctctgctggaagttaagggcaacatcgaactgaaacgtcccctgattaaggctcccagccagctgcctctttcggggagccggctgaagcgccgacctgaccagatggaagacggcctcgaaccagagaaaaagagaacccgcgggcttggagccactaccaagattaccacatctcatcctagagtgccaagcttaaccaccgtgccccaaacacagggccagacaacggcgcagaaagtcagcaagaagaccggccctaggtgctctactgctattgctaccggtcttaagaatcagaaaccagtgccagctgtgccagtgcagaagagcgggacctctggagttccaccaatggctggaggcaagaagcccagcaagcgccccgcgtgggaccttaaggggcagctgtgcgacttaaatgccgaactgaagagatgtcgcgagcgaactcagactctggaccaggaaaatcagcagctgcaagaccagttacgggacgctcagcagcaggtgaaagctctggggaccgaacggaccaccctggagggccaccttgcgaaagtgcaagcccaggcagaacagggccagcaggagctgaagaacctgagggcctgtgtgcttgagctggaggagagattgtccacgcaagagggcctggttcaggagctccaaaaaaagcaggtagaactgcaggaagaacgcaggggactgatgtctcagcttgaggaaaaagaacgtaggctccagaccagcgaggctgccctctcatctagccaggcggaagtggcttctctgaggcaagagaccgtggcccaggcggccctactgacggagcgagaggagaggctgcatggactcgaaatggagcgacgtaggctgcacaaccagctccaagagctgaagggaaatatacgggtgttttgcagggtgcgtccagtacttcccggcgagcccaccccccctccaggcctcctgctgtttccctcgggcccgggaggcccatctgaccccccaacgcgcctgtcactgagccggtccgatgaacggcgcggcaccctatccggcgcaccagcccctcctactcgacacgatttcagttttgaccgtgttttccctcctggcagtggccaagacgaagtcttcgaggaaatcgccatgctggtgcagtctgcgctcgacggctatcccgtctgcatatttgcatacggccagacgggcagtgggaaaaccttcacaatggaaggaggtcctggcggcgatccacagctggaggggctgatccccagggctctgcgccatctcttctccgtggcccaggagctttccggtcagggatggacgtacagtttcgtcgcatcatacgtcgagatttataatgagacagtccgcgatctgctagcaacagggaccaggaaaggtcaggggggagagtgcgagatccggcgcgccgggccgggtagcgaagagttgaccgtaacaaacgcaagatacgtgcccgtctcctgcgaaaaagaagtggatgcgttacttcacctggctagacagaatcgggctgtagcgcggacagcgcagaacgagagaagtagcagatcgcatagtgttttccagttacagattagtggggaacattccagcagaggcctccagtgcggagctcctctgtccctggtggacctggcaggatccgaacgtctggacccaggcctcgcactggggcccggagagagagagaggctgagagaaacccaggcaattaattcatcactatcaacacttggtctcgtcattatggcactgtcgaataaggagtcacacgttccatacaggaacagtaagctgacttatcttcttcagaatagcctgggggggtccgcgaaaatgctgatgttcgtaaacatctcaccactcgaagaaaatgtttctgaatctctgaacagccttcggtttgcctctaaggtgaaccagtgcgtgattggaacggcccaggccaataggaagtag

SEQ ID NO: 126973 - DNA, 2694 bp, Artificial Sequence
  derived and/or modified sequence
gcggcgacgtccacgcattttctgacgtagcgagcgacggcggggagccgagcggaagtccagcactattgccgctagaggaggggaggggtgagaagcataagtggcaccggaagtggaattaatccgcctacctctcctgcgcctgcgaaacagaaaagacaaggcgcctgtcgggcggggtgtggcttcgggtggcggagaacgctgcgattggccctcggctgtggcgacagcgacgattggtccctgcgtgcagagcgcggtgagagtgggtggtggccgttggaattcaaaagtggcgggtgtggcgcggggctggtagcggccggagccgtgcgagttctctaccctgcttcgcgagcgggcgagagaacgcgagtcccaggatccccggcacccagttctcttccactgcattcccccggcgcgtgtgggaccgaggtggacatggatccgcagaggtcccccctattggaagtaaaggggaacatagaactgaagagacctctgattaaggccccttcccagctgcctctctcaggaagcagactcaagaggaggcctgaccagatggaagatggcctggagcctgagaagaaacggacaagaggcctgggtgcaacgaccaaaattaccacatcccacccaagagttccatccctcactacagtgccacagacacaaggccagaccacagctcaaaaagtttccaagaagacaggaccccggtgttccacagctattgccacagggttgaagaaccagaagccagttcctgctgttcctgtccagaagtctggcacatcaggtgttcctcccatggcaggagggaagaaacccagcaaacgtccagcctgggacttaaagggtcagttatgtgacctaaatgcagaactaaaacggtgccgtgagaggactcaaacgttggaccaagagaaccagcagcttcaggaccagctcagagatgcccagcagcaggtcaaggccctggggacagagcgcacaacactggaggggcatttagccaaggtacaggcccaggctgagcagggccaacaggagctgaagaacttgcgtgcttgtgtcctggagctggaagagcggctgagcacgcaggagggcttggtgcaagagcttcagaaaaaacaggtggaattgcaggaagaacggaggggactgatgtcccaactagaggagaaggagaggaggctgcagacatcagaagcagccctgtcaagcagccaagcagaggtggcatctctgcggcaggagactgtggcccaggcagccttactgactgagcgggaagaacgtcttcatgggctagaaatggagcgccggcgactgcacaaccagctgcaggaactcaagggcaacatccgtgtattctgccgggtccgccctgtcctgccgggggagcccactccaccccctggcctcctcctgtttccctctggccctggtgggccctctgatcctccaacccgccttagcctctcccggtctgacgagcggcgtgggaccctgagtggggcaccagctcccccaactcgccatgatttttcctttgaccgggtattcccaccaggaagtggacaggatgaagtgtttgaagagattgccatgcttgtccagtcagccctggatggctatccagtatgcatctttgcctatggccagacaggcagtggcaagaccttcacaatggagggtgggcctgggggagacccccagttggaggggctgatccctcgggccctgcggcacctcttctctgtggctcaggagctgagtggtcagggctggacctacagctttgtagcaagctacgtagagatctacaatgagactgtccgggacctgctggccactggaacccggaagggtcaagggggcgagtgtgagattcgccgtgcagggccagggagtgaggagctcactgtcaccaatgctcgatatgtccctgtctcctgtgagaaagaagtggacgccctgcttcatctggcccgccagaatcgggctgtggcccgcacagcccagaatgaacggtcatcacgcagccacagtgtattccagctacagatttctggggagcactccagccgaggcctgcagtgtggggcccccctcagtcttgtggacctggccgggagtgagcgacttgaccccggcttagccctcggccccggggagcgggaacgccttcgggaaacacaggccattaacagcagcctgtccacgctggggctggttatcatggccctgagcaacaaggagtcccacgtgccttaccggaacagcaaactgacctacctgctgcagaactctctgggtggtagtgctaagatgctcatgtttgtgaacatttctccactggaagagaacgtctccgagtccctcaactctctacgctttgcctccaaggtgaaccagtgtgttattggtactgctcaggccaacaggaagtgaagacggatccagatctgtgtgtgtgtgtgtgtgtgtgtgtgtgtgtgtgtgtccctatgtctatgtatcgggtgaggggtgggagggttgctggagggtgctttattgggtggagggcaccatgtcccagggctatcaaataaagaatagtttggttttttttttaaataaaggttttattagcatttgcccaagaaggcagatactttcatatctgtaaaa

SEQ ID NO: 126974 - DNA, 2706 bp, Artificial Sequence
  derived and/or modified sequence
gcggcgacgtccacgcattttctgacgtagcgagcgacggcggggagccgagcggaagtccagcactattgccgctagaggaggggaggggtgagaagcataagtggcaccggaagtggaattaatccgcctacctctcctgcgcctgcgaaacagaaaagacaaggcgcctgtcgggcggggtgtggcttcgggtggcggagaacgctgcgattggccctcggctgtggcgacagcgacgattggtccctgcgtgcagagcgcggtgagagtgggtggtggccgttggaattcaaaagtggcgggtgtggcgcggggctggtagcggccggagccgtgcgagttctctaccctgcttcgcgagcgggcgagagaacgcgagtcccaggatccccggcacccagttctcttccactgcattcccccggcgcgtgtgggaccgaggtggacatggatccgcagaggtcccccctattggaagtaaaggggaacatagaactgaagagacctctgattaaggccccttcccagctgcctctctcaggaagcagactcaagaggaggcctgaccagatggaagatggcctggagcctgagaagaaacggacaagaggcctgggtgcaacgaccaaaattaccacatcccacccaagagttccatccctcactacagtgccacagacacaaggccagaccacagctcaaaaagtttccaagaagacaggaccccggtgttccacagctattgccacagggttgaagaaccagaagccagttcctgctgttcctgtccagaagtctggcacatcaggtgttcctcccatggcaggagggaagaaacccagcaaacgtccagcctgggacttaaagggtcagttatgtgacctaaatgcagaactaaaacggtgccgtgagaggactcaaacgttggaccaagagaaccagcagcttcaggaccagctcagagatgcccagcagcaggtcaaggccctggggacagagcgcacaacactggaggggcatttagccaaggtacaggcccaggctgagcagggccaacaggagctgaagaacttgcgtgcttgtgtcctggagctggaagagcggctgagcacgcaggagggcttggtgcaagagcttcagaaaaaacaggtggaattgcaggaagaacggaggggactgatgtcccaactagaggagaaggagaggaggctgcagacatcagaagcagccctgtcaagcagccaagcagaggtggcatctctgcggcaggagactgtggcccaggcagccttactgactgagcgggaagaacgtcttcatgggctagaaatggagcgccggcgactgcacaaccagctgcaggaactcaagggcaacatccgtgtattctgccgggtccgccctgtcctgccgggggagcccactccaccccctggcctcctcctgtttccctctggccctggtgggccctctgatcctccaacccgccttagcctctcccggtctgacgagcggcgtgggaccctgagtggggcaccagctcccccaactcgccatgatttttcctttgaccgggtattcccaccaggaagtggacaggatgaagtgtttgaagagattgccatgcttgtccagtcagccctggatggctatccagtatgcatctttgcctatggccagacaggcagtggcaagaccttcacaatggagggtgggcctgggggagacccccagttggaggggctgatccctcgggccctgcggcacctcttctctgtggctcaggagctgagtggtcagggctggacctacagctttgtagcaagctacgtagagatctacaatgagactgtccgggacctgctggccactggaacccggaagggtcaagggggcgagtgtgagattcgccgtgcagggccagggagtgaggagctcactgtcaccaatgctcgatatgtccctgtctcctgtgagaaagaagtggacgccctgcttcatctggcccgccagaatcgggctgtggcccgcacagcccagaatgaacggtcatcacgcagccacagtgtattccagctacagatttctggggagcactccagccgaggcctgcagtgtggggcccccctcagtcttgtggacctggccgggagtgagcgacttgaccccggcttagccctcggccccggggagcgggaacgccttcgggaaacacaggccattaacagcagcctgtccacgctggggctggttatcatggccctgagcaacaaggagtcccacgtgccttaccggaacagcaaactgacctacctgctgcagaactctctgggtggtagtgctaagatgctcatgtttgtgaacatttctccactggaagagaacgtctccgagtccctcaactctctacgctttgcctccaaggtgaaccagtgtgttattggtactgctcaggccaacaggaagtgaagacggatccagatctgtgtgtgtgtgtgtgtgtgtgtgtgtgtgtgtgtgtgtgtgtgtgtgtccctatgtctatgtatcgggtgaggggtgggagggttgctggagggtgctttattgggtggagggcaccatgtcccagggctatcaaataaagaatagtttggttttttttttaaataaaggttttattagcatttgcccaagaaggcagatactttcatatctgtaaaa

SEQ ID NO: 126975 - DNA, 2022 bp, Artificial Sequence
  derived and/or modified sequence
atggacccccagaggagccccctgctggaggtgaagggcaacatcgagctgaagaggcccctcatcaaggcccccagccagctgcccctgagcggcagccggctgaagagaagaccagaccagatggaggatggcctggagcctgagaagaagaggacccggggcctgggcgccaccaccaagatcaccaccagccacccccgggtgcccagcctgaccaccgtgccccagacccagggccagaccacagcccagaaggtgtccaagaagacaggcccccgctgcagcacagccatcgccaccggcctgaagaaccagaagcctgtgcctgctgtgcctgtgcagaagagcggcaccagcggcgtgccccccatggccggcggcaagaagcccagcaagaggcctgcctgggacctgaagggccagctgtgtgacctgaatgctgagctgaagcgctgccgggagaggacccagaccctggaccaggagaaccagcagctgcaggaccagctgagagatgcccagcagcaggtgaaggccctgggcacagagaggaccaccctggagggccacctggccaaggtgcaggcccaggccgagcagggccagcaggagctgaagaacctgcgggcctgtgtgctggagctggaggagcggctgagcacccaggagggcctggtgcaggagctgcagaagaagcaggtggagctgcaggaggagcggcggggcctgatgagccagctggaggagaaggagcggcggctgcagaccagcgaggccgccctgagcagcagccaggccgaggtggccagcctgcggcaggagaccgtggcccaggccgccctgctgacagagcgggaggagcggctgcacggcctggagatggagcggcggcggctgcacaaccagctgcaggagctgaagggcaacatccgggtcttctgccgggtgcggcctgtgctgcccggggagcccaccccacctcctggcctgctgctcttccccagcggccctgggggccccagcgacccccccacccggctgagcctgagcagaagtgatgagcggcggggcaccctgagcggggccccagccccacccaccaggcatgacttctcctttgacagagtcttccccccaggcagcggccaggatgaggtgtttgaggagatcgccatgctggtgcagagcgccctggatggctaccctgtgtgcatctttgcctacggccagacaggcagcggcaagaccttcaccatggagggcggccctggaggagacccccagctggagggcctcatcccccgggccctgcggcacctgttctctgtggcccaggagctgagcggccagggctggacctacagctttgtggccagctatgtggagatctacaatgagaccgtgcgggacctgctggccaccggcaccaggaagggccagggcggggagtgtgagatccggcgggccggccctggcagcgaggagctgactgtgaccaatgcccgctacgtgcctgtgtcctgtgagaaggaggtggatgccctgctgcacctggcccggcagaacagagctgtggccaggacagcccagaatgaaagaagcagccgcagccacagcgtcttccagctgcagatctctggagagcacagcagccggggcctgcagtgtggggcccccctgagcctggtggacctggccggcagcgagcggctggaccccggcctggccctgggccctggagagcgggagcggctgcgggagacccaggccatcaacagcagcctgagcaccctgggcctggtgatcatggccctgagcaacaaggagagccacgtgccctacagaaacagcaagctgacctacctgctgcagaacagcctgggcggcagcgccaagatgctgatgtttgtgaacatcagccccctggaggagaatgtgtctgagagcctgaacagcctgcgctttgccagcaaggtgaaccagtgtgtgattggaacagcccaggccaacaggaagtag

SEQ ID NO: 126976 - DNA, 2022 bp, Artificial Sequence
  derived and/or modified sequence
atggacccccagcggagccccctgctggaggtgaagggcaacatcgaactgaagcgccctctcatcaaagcccccagccagttgcccctaagtggtagccggttgaagcggagacctgaccagatggaagatggtcttgagcctgagaagaaacggactcggggccttggtgctactactaagatcacaacctctcaccctagagtgccttctctgacaaccgttcctcaaacacagggacaaaccacagcacaaaaggtcagcaagaaaaccgggccgaggtgctctaccgccatcgccacagggctcaagaatcagaaaccagtgcctgccgtccccgtacagaagtccggcaccagcggagtaccccctatggccgggggcaagaagccctcaaagaggcccgcttgggatctgaagggccagttgtgtgatcttaatgccgaacttaaacgttgcagagagcgaactcagactctggaccaggaaaaccaacagctacaggatcaactgcgggacgctcaacagcaggtcaaagccctcggaactgaaagaacaactcttgaggggcacctcgccaaggtccaggcacaagctgagcaggggcagcaagaactcaaaaaccttcgcgcctgcgtgctggagctggaggaaaggttgtctacacaggagggccttgtgcaggagttacaaaaaaaacaggttgagctacaggaggaaaggcggggacttatgtcccagctcgaggaaaaggagaggcgcctacaaacctctgaagctgccctctcctcatcccaagcagaggtcgcttctctgcgacaggagacagttgcacaagccgccctcctcacagagagggaggagagactgcacggactggaaatggagcgccgtcgcctccacaatcagctgcaggagctgaaaggcaacattagggtgttctgtagagtcagaccagtccttcccggagagcctacacccccaccgggactgctactgttccctagtgggcctggtggcccctcggacccacccacacgactgtccttgtccaggtccgatgagcgtagagggacactgtctggagctcccgcgccgcccacccgccatgacttttcttttgaccgcgtattcccacctggcagtggtcaggatgaggtgtttgaggagatcgctatgctggtccagagtgccctagacggataccctgtgtgcatctttgcctacggacaaaccggatctggaaaaacttttacgatggaaggcggcccgggcggcgaccctcagctggagggtcttattccccgggctctccggcacttgttttcagtagcacaggagctgagtggccaaggttggacctactccttcgtcgccagctatgtcgaaatttacaacgaaactgttcgggatctgctggccacaggaacccgaaaaggacagggcggggaatgtgagatcaggagagcaggtcccgggtcagaagagctcacggtgaccaatgcccgttacgtacctgtatcatgcgagaaggaagtggacgccctgctgcatctggctagacagaatcgagcagtggccagaacagcacagaatgaaagaagctcgcggagtcatagcgtcttccaactgcagataagcggtgagcattcatctcggggcctgcagtgcggagcacctctgtctttagtcgatctggccggcagcgaacgactggatccaggcctcgctctcggtcccggtgaaagagagaggctgcgcgagacacaggcaatcaattcgtccctgagtacactgggattggtgattatggccctgagcaacaaggagagccatgtaccctaccgcaactctaagctgacttatctcttgcagaacagtctgggaggttccgccaagatgcttatgttcgtcaatattagcccactcgaagaaaacgtgagcgaatccctgaactccctacgctttgcttctaaggttaaccagtgcgtgattggcactgctcaagctaatagaaaatag

SEQ ID NO: 126977 - DNA, 2022 bp, Artificial Sequence
  derived and/or modified sequence
atggacccccagcggagccccctgctggaggtgaagggcaacatcgagctaaagcgtcctttaatcaaagccccatctcagctgccccttagtggttctagactcaaaaggaggcccgaccagatggaggatggcttagagcccgaaaagaagcgtacaagggggctaggcgctaccaccaagatcacaacttcgcatcctagagtgccctcgctcaccacagttcctcagacacaaggccagacaacagcccaaaaagtctcaaagaaaaccggccctcgctgtagcacggcaatcgcaaccggattaaagaaccagaagccagtgcctgcagtccctgtccaaaagagcgggacgtctggtgtaccccctatggccggcgggaagaagcccagcaaaaggccagcttgggacttgaaaggccagctctgtgatcttaacgctgagctgaagagatgccgcgaaaggacccagaccctggatcaggaaaaccaacagctgcaggaccagctgagggacgcccaacagcaggttaaggctctgggaacggaacgcactacactggagggccatcttgcaaaagtccaggctcaggccgagcagggacagcaggagttgaagaacctcagagcctgcgtgttggaactggaggaaaggctttccacccaggaaggattggtacaggaactacagaaaaagcaggttgagctgcaggaggagcgaaggggtttgatgagccaacttgaggaaaaggaacggcgactccagacttcagaggccgctctaagctccagtcaggcagaggttgcaagtctccggcaggagacagtggctcaggcagcactgctgacggagcgcgaggagcggctgcatggactggagatggagcgacgccgcttgcataatcaattgcaggaactaaaggggaacatccgggttttctgcagagttagaccagtgctccccggagagccaaccccgccacctggactgctgctgttcccgagcgggcctggcgggcctagtgacccacccactagactgagcctgtccaggtccgacgagcggcgtggcaccctcagtggtgctcccgcacccccaacacgtcacgatttctcgtttgaccgggtgtttccacccggatctggccaggacgaggtctttgaggaaattgcaatgctggttcaaagcgcattggatggttacccagtctgcatttttgcttacggacaaacaggcagcggcaagacattcaccatggagggcggcccggggggagatccccagctggaagggctgattccccgtgctctccggcacctcttcagcgttgctcaagagttgtccggacaggggtggacatacagtttcgtggcaagctatgtcgagatctacaatgagactgtgcgagacctccttgcaaccgggacacgcaagggtcaggggggcgaatgcgagatcagaagagccgggcccggatccgaagagctgacggttactaacgctcgctatgtgcctgtttcttgtgagaaagaagtcgacgccctcctccacttggccaggcagaacagagcagtggcacgtactgcacagaacgaaagatcatcacgctctcatagcgtgtttcagctacagattagcggtgagcactcctcccggggtctgcagtgtggcgcaccgctgtcgctggtggaccttgccggatcagagagattggatcccgggctggcactcgggcctggggaacgcgaacggctgagagaaacgcaggctattaactctagcctctccacattgggcctcgtgatcatggccctgagcaacaaagagtcgcatgtcccctaccgaaactccaagttaacttacttactgcagaattctctcggaggatccgctaagatgctgatgtttgttaacatctccccccttgaagagaacgtgtcagagtcccttaactctctgcgttttgcctctaaagtcaaccagtgcgtcataggtaccgctcaggctaaccgcaagtag

SEQ ID NO: 126978 - DNA, 2022 bp, Artificial Sequence
  derived and/or modified sequence
atggacccccagcggagccccctgctggaggtgaagggcaacatcgagctcaaaagacctctgattaaagccccctcacagctgccactgtccggctcccggcttaagagaaggcctgaccaaatggaagacgggcttgagccggaaaagaagagaactagaggcctgggggcaactactaaaataacaaccagtcatcccagggtcccaagtctcaccaccgtaccgcagacacaaggacaaacaaccgcccagaaggtttctaagaagacgggtcctcggtgctccacagccatcgcgactgggttaaaaaatcagaagcccgtgccagcggtcccagtgcagaaaagtgggacgagtggcgttccaccaatggccggcggtaaaaagccttcgaaaagacccgcttgggatctaaagggccagctctgtgacctgaacgccgaactgaagcgctgtagggagaggacccagacactggatcaagaaaaccagcagttacaggatcagttaagggacgctcagcagcaggtgaaagctctaggaacggaaagaaccaccctggaggggcatctcgctaaggtgcaggctcaggctgagcagggccagcaagagttaaaaaacctgagggcctgcgtcttggagctggaagagagactgtctacacaggaaggactcgtacaggagctccagaagaaacaggtggagctccaggaggagaggcggggactgatgtcccagctggaagagaaagagagaaggctccagacaagtgaggcggcactgagctccagccaggccgaggtggctagtcttcgtcaagaaacagtagcccaagcagccctcctaactgaacgcgaagaacggcttcatggtttagagatggaacgcagaaggttacataatcagcttcaggagctgaaagggaatatccgtgtcttctgtcgcgttaggccggtcctgcccggggagccaacgccgccccctggcctgcttctcttccccagtggtccgggaggacctagcgaccccccgactcggctgagtctgtctaggtctgacgaacggcgaggtaccctatctggggctcccgctccgccgacccggcatgactttagttttgatcgggtgttcccgcctggcagcggacaggacgaagtgtttgaagagatagccatgttagtccagagcgccttggatggttacccagtgtgcatttttgcttatggccagaccggctccgggaagacgtttactatggagggaggtccaggaggtgatcctcaattagaaggactcatccctcgcgccctgagacatctgttttccgtggcgcaggaactgtctggccagggatggacatattccttcgtcgccagttacgtagaaatctataacgaaactgtgcgggaccttctcgctaccggcacccggaaaggtcagggaggggaatgcgagattaggcgcgccggccccgggtccgaagagctgaccgtcaccaacgcccgctacgtccccgtgtcctgcgaaaaagaggtcgatgcgctgctgcacctcgcgcgtcagaatcgggccgttgcccggaccgcccagaatgagcggtccagccgcagtcattctgtcttccagttacagatttctggcgaacatagttcaagggggctgcagtgcggggcccccctcagcctcgtggacctggcgggatccgaaaggcttgatccagggttggcgctgggacccggcgagcgggagcgcctgcgggagacacaagctataaatagctccctctccaccctgggccttgtgatcatggccctttccaataaggagtcacatgtgccttataggaatagcaagcttacatacctgttacagaattctctggggggcagcgccaaaatgctgatgtttgtgaatatcagccctcttgaggagaatgtctctgaaagtctgaacagcttgcgattcgcgagtaaggtcaaccagtgtgtgataggtaccgcccaggccaataggaagtag

SEQ ID NO: 126979 - DNA, 2022 bp, Artificial Sequence
  derived and/or modified sequence
atggatccccaacgctccccgttgttggaagtcaagggcaacattgaattaaagagaccactgattaaagcaccgagtcagcttccgctatccggttcgagactgaagaggcgtccagaccagatggaggatgggttggagcctgaaaaaaagaggacaagaggcctgggcgctaccacaaagattaccacaagccatccaagagtgcccagcctcactaccgtcccccagacacagggccagacaacggcacagaaagtgtccaagaagacagggcctcggtgttctacagcaatcgccaccggtctcaagaatcagaaaccagtcccggctgtgcccgtccaaaaatccggaacaagtggcgtgcccccaatggccggaggtaagaaaccctcaaaaaggccagcttgggacctgaagggacaattatgcgatctcaatgccgagctgaaaaggtgtagggaacgaacccaaactctggaccaggaaaaccagcagctgcaggatcaattacgcgacgctcagcagcaagttaaggccctggggacagagcgaaccaccctagagggccatctggccaaggtgcaggcgcaagccgaacagggacagcaggaactcaaaaatttacgggcatgtgtcctggagctggaagagaggctctctactcaagaagggctcgttcaggagttgcagaaaaagcaagtggaacttcaagaagaaagaagaggattgatgagccagttggaagaaaaggaacgcaggctgcagacctcagaggccgctctgagctcttctcaggcggaggtggccagcctccgccaagaaacggtggcccaagctgcactgcttaccgagcgtgaggaacggttacatggcctcgagatggaacggagaagactgcacaatcaacttcaggagctcaaagggaacattagggtgttctgccgggtccgcccagtacttccaggcgagccaaccccccctcccggtctcctgctcttccctagcggtcctgggggtccaagcgacccacctaccaggcttagtctctcaagatcagacgagcgacgaggaactttgagcggggcacctgcccctccaacaagacatgatttctcttttgaccgcgtcttccctccaggctccggacaggacgaagtgtttgaggaaatcgctatgctggtgcagtcagcactggatggatatcccgtttgcatctttgcttatgggcaaaccgggtccggtaagacctttacaatggagggcggacctggaggagatcctcagctcgaaggcctgataccacgcgcactgcggcacttgttttctgtggcgcaggagctttccgggcaaggatggacctacagctttgtggcaagttacgtggagatctacaacgagaccgtgagggacttgttagcgacaggaacgagaaagggtcaggggggagagtgtgagataaggagggccggtcccggtagtgaagagcttaccgtcactaacgccagatacgtgcctgtgtcatgtgaaaaggaagtggacgccctcctgcacctcgcaaggcagaatcgagcggtcgcccgaacagcccagaatgaaaggagttccaggtcacactccgtgttccagcttcagatctctggggaacacagctcccgaggcttgcagtgcggggctcccctgtcactcgtggacttggcgggttctgagcgactggacccagggttggccctcggaccgggtgagagggaacgtctgcgagagacacaggctattaactcgtccctcagtactctcggcctggtcatcatggccctgtcaaacaaagaaagccacgtcccatacagaaactccaaattgacctatcttttacagaatagcctcggcggatccgctaagatgttgatgtttgtaaatatctcccctcttgaagaaaatgtcagcgaatccctgaatagcctgcgctttgccagtaaggtaaaccaatgcgtcattggcactgctcaggctaatcggaaatag

SEQ ID NO: 126980 - DNA, 2022 bp, Artificial Sequence
  derived and/or modified sequence
atggacccgcaacgttccccactattggaggtcaaagggaatatcgaactcaaaaggcctctcattaaggcgccatctcagcttccactgtctggatccagactgaaaaggcggccagaccagatggaagacggtctcgaacccgaaaaaaaacgcacaagaggactgggagccacgaccaagatcacaacatcccaccctagagtaccttcacttacgacagtcccccagacacagggccagacaacggcacagaaggtcagcaaaaagacaggaccacgatgcagcactgctattgccactggactgaaaaatcagaagcccgttcctgcagtgccggttcagaagagcgggacctctggggtgccccctatggcgggaggaaagaaacccagtaaaagaccggcttgggacctgaaggggcaactttgcgaccttaacgctgaactgaaaaggtgccgggagagaacccagaccctagatcaggagaaccagcagctgcaggatcagcttagagatgcccagcagcaggtgaaggctctgggaaccgaacgaacaacactagagggccaccttgccaaggtgcaggcccaggcagagcaaggccagcaggagctcaagaacctcagagcttgcgttctggaactggaagaacgactctctacacaggaggggttggtgcaggagcttcagaagaagcaggtcgaactgcaggaggaaagacgcggtttgatgtctcagctggaagagaaggagcgcaggttgcagacttctgaagcagctctgagctcttctcaagcggaggtagcttcccttaggcaggaaacagtagcacaggccgctctgctgacagagagggaagagcgactgcacggactggaaatggaacgcaggcgactgcacaatcagcttcaggagctgaagggtaacattagagtgttttgtagggtcaggcccgtgcttccaggtgaacccactccaccaccgggtttactcttgttcccatcgggcccaggtggaccaagcgaccctcccacaagactctcactcagtcgctccgacgaaaggcgcggtacgctaagtggggcacccgctcccccaacgcgccatgacttcagcttcgaccgtgtcttcccacccggatccggacaggacgaagtgttcgaagagatagcgatgctggtacaatcagctctggacggttaccccgtctgcattttcgcttacggacagaccggtagcggtaagacctttaccatggaaggtggccctggcggagatcctcagctcgagggtttgattccacgcgcacttcgccatctgttttcagtagctcaggagctcagtggtcagggatggacatactccttcgtcgcttcttacgtggagatttataacgagacagtgcgggacctgctggccactgggactagaaaggggcagggaggcgaatgcgagataagacgggctggcccagggtcagaagaactcactgttacgaatgcaaggtacgttcccgtctcttgcgagaaagaagtggatgcccttctgcacctcgctaggcagaatagagcggttgcccgaacagctcaaaatgagcggtcctcccggtcccacagtgtgttccagttgcagatctctggcgagcactccagcagaggccttcagtgcggagctcctctgtcactggtggatttggctggatctgagaggctggatcctggcctggctctcggcccaggcgaaagagagcgtttaagagagactcaggccatcaatagctcactaagcacactaggcctggtgatcatggcacttagtaacaaggaatcacacgtgccataccggaattctaaacttacttacctactgcagaacagcctcggcggatctgcaaaaatgctgatgtttgtgaacatttcaccattggaagaaaatgtatccgaatctcttaactccctgcgcttcgcatccaaggtgaatcagtgcgtaatcgggacagcccaggccaatcgtaaatag

SEQ ID NO: 126981 - DNA, 2022 bp, Artificial Sequence
  derived and/or modified sequence
atggatcctcagcggtcacctctgctagaggtgaaggggaatatcgagttaaagagacccctcataaaggctccgtcacagctgcctttgtcagggagcaggctcaagcggaggccagaccagatggaggacgggctcgaacctgagaaaaaaagaacccggggtttgggggctacaactaagatcacgacttcccacccaagggttccaagtctcaccactgtcccccagacccagggacagaccactgctcagaaagtaagtaagaagacagggccaaggtgcagtactgccatcgcgaccggactcaagaaccagaaacccgttcccgcagttccagtgcagaagagtggtaccagtggggtcccccctatggctggaggcaaaaagccttctaagcgaccagcctgggacctgaagggacagctgtgcgacctcaatgccgagcttaaacgttgtagagaaagaacccagacacttgaccaggaaaaccagcagctgcaagaccaacttcgcgatgctcaacagcaggttaaggcactaggcaccgaacggaccactttagaagggcatttggcaaaggttcaagctcaagccgaacagggccagcaggagctgaagaacttacgtgcttgcgttctagagctggaagagaggttatcaacccaggaagggcttgtgcaggagctgcagaagaagcaggtggagctgcaggaagaaaggaggggacttatgagccagcttgaagagaaagagcgaagactacagacaagtgaagccgctctctcgtccagtcaggctgaggtcgcgtctctgcggcaggagacagtggcccaggctgcgctgctaaccgagagggaagagcggttgcatggcctggagatggagaggcggagattgcacaaccagctgcaggagctgaagggcaatatccgggtgttctgccgggttagaccagtgctgcctggcgaaccaaccccacctccaggcctgctcctgtttccaagtgggccaggaggacctagtgacccccctaccaggctgtcactctcacggtcggacgagcggagaggcacactctctggggctcctgctcccccaaccaggcacgatttttcattcgacagagttttcccccctggctccgggcaggatgaggtctttgaggagattgcaatgcttgtacagtccgccttggatgggtatcccgtgtgtatcttcgcttatggacagacagggagtggtaaaacttttaccatggaaggaggtcccggaggagatccgcagctggaaggccttattccgcgtgccctgcgtcatcttttctcagtggctcaggagctctccggtcagggctggacgtatagctttgtcgcttcatacgtggagatctacaacgaaaccgtgagagacttactggctaccgggaccaggaagggacagggtggggagtgtgaaatcagacgggcaggacctggcagcgaggaactgacggtgaccaatgctagatacgtccctgtttcttgcgagaaagaagtggacgccttactccacctcgcaaggcagaatcgggctgttgctagaacggcacaaaatgagcgatcatcaagatcgcacagcgtttttcagcttcagatttcaggggaacactcatcccggggactgcagtgcggtgccccattgtctctagtagatctagccggatccgagcggcttgacccaggcctcgctcttggaccaggggaacgtgagaggttacgggagacacaggctattaattctagcctgtcaactctggggctggtgattatggcccttagtaacaaagagtcacatgtgccctacagaaactccaagttaacatacttgctccagaattctttgggtggttcagctaaaatgctgatgtttgtgaacatctctccgcttgaagagaacgtcagtgagtcactcaatagtctgcgttttgccagcaaagtcaatcagtgtgtgataggtactgcacaggctaatagaaagtag

SEQ ID NO: 126982 - DNA, 2022 bp, Artificial Sequence
  derived and/or modified sequence
atggacccccagagaagccccctgctggaggtgaagggcaacatcgagctgaagagacccctgatcaaggcccccagccagctgcccctgagcggcagcagactgaagagaagacccgaccagatggaggacggcctggagcccgagaagaagagaaccagaggcctgggcgccaccaccaagatcaccaccagccaccccagagtgcccagcctgaccaccgtgccccagacccagggccagaccaccgcccagaaggtgagcaagaagaccggccccagatgcagcaccgccatcgccaccggcctgaagaaccagaagcccgtgcccgccgtgcccgtgcagaagagcggcaccagcggcgtgccccccatggccggcggcaagaagcccagcaagagacccgcctgggacctgaagggccagctgtgcgacctgaacgccgagctgaagagatgcagagagagaacccagaccctggaccaggagaaccagcagctgcaggaccagctgagagacgcccagcagcaggtgaaggccctgggcaccgagagaaccaccctggagggccacctggccaaggtgcaggcccaggccgagcagggccagcaggagctgaagaacctgagagcctgcgtgctggagctggaggagagactgagcacccaggagggcctggtgcaggagctgcagaagaagcaggtggagctgcaggaggagagaagaggcctgatgagccagctggaggagaaggagagaagactgcagaccagcgaggccgccctgagcagcagccaggccgaggtggccagcctgagacaggagaccgtggcccaggccgccctgctgaccgagagagaggagagactgcacggcctggagatggagagaagaagactgcacaaccagctgcaggagctgaagggcaacatcagagtgttctgcagagtgagacccgtgctgcccggcgagcccacccccccccccggcctgctgctgttccccagcggccccggcggccccagcgacccccccaccagactgagcctgagcagaagcgacgagagaagaggcaccctgagcggcgcccccgccccccccaccagacacgacttcagcttcgacagagtgttcccccccggcagcggccaggacgaggtgttcgaggagatcgccatgctggtgcagagcgccctggacggctaccccgtgtgcatcttcgcctacggccagaccggcagcggcaagaccttcaccatggagggcggccccggcggcgacccccagctggagggcctgatccccagagccctgagacacctgttcagcgtggcccaggagctgagcggccagggctggacctacagcttcgtggccagctacgtggagatctacaacgagaccgtgagagacctgctggccaccggcaccagaaagggccagggcggcgagtgcgagatcagaagagccggccccggcagcgaggagctgaccgtgaccaacgccagatacgtgcccgtgagctgcgagaaggaggtggacgccctgctgcacctggccagacagaacagagccgtggccagaaccgcccagaacgagagaagcagcagaagccacagcgtgttccagctgcagatcagcggcgagcacagcagcagaggcctgcagtgcggcgcccccctgagcctggtggacctggccggcagcgagagactggaccccggcctggccctgggccccggcgagagagagagactgagagagacccaggccatcaacagcagcctgagcaccctgggcctggtgatcatggccctgagcaacaaggagagccacgtgccctacagaaacagcaagctgacctacctgctgcagaacagcctgggcggcagcgccaagatgctgatgttcgtgaacatcagccccctggaggagaacgtgagcgagagcctgaacagcctgagattcgccagcaaggtgaaccagtgcgtgatcggcaccgcccaggccaacagaaagtag

SEQ ID NO: 126983 - protein, 538 aa, Artificial Sequence
  derived and/or modified sequence
MTTPGKENFRLKSYKNKSLNPDEMRRRREEEGLQLRKQKREEQLFKRRNVATAEEETEEEVMSDGGFHEAQISNMEMAPGGVITSDMIEMIFSKSPEQQLSATQKFRKLLSKEPNPPIDEVISTPGVVARFVEFLKRKENCTLQFESAWVLTNIASGNSLQTRIVIQAGAVPIFIELLSSEFEDVQEQAVWALGNIAGDSTMCRDYVLDCNILPPLLQLFSKQNRLTMTRNAVWALSNLCRGKSPPPEFAKVSPCLNVLSWLLFVSDTDVLADACWALSYLSDGPNDKIQAVIDAGVCRRLVELLMHNDYKVVSPALRAVGNIVTGDDIQTQVILNCSALQSLLHLLSSPKESIKKEACWTISNITAGNRAQIQTVIDANIFPALISILQTAEFRTRKEAAWAITNATSGGSAEQIKYLVELGCIKPLCDLLTVMDSKIVQVALNGLENILRLGEQEAKRNGTGINPYCALIEEAYGLDKIEFLQSHENQEIYQKAFDLIEHYFGTEDEDSSIAPQVDLNQQQYIFQQCEAPMEGFQL

SEQ ID NO: 126984 - protein, 328 aa, Artificial Sequence
  derived and/or modified sequence
MTTPGKENFRLKSYKNKSLNPDEMRRRREEEGLQLRKQKREEQLFKRRNVATAEEETEEEVMSDGGFHEAQISNMEMAPGGVITSDMIEMIFSKSPEQQLSATQKFRKLLSKEPNPPIDEVISTPGVVARFVEFLKRKENCTLQFESAWVLTNIASGNSLQTRIVIQAGAVPIFIELLSSEFEDVQEQAVWALGNIAGDSTMCRDYVLDCNILPPLLQLFSKQNRLTMTRNAVWALSNLCRGKSPPPEFAKVSPCLNVLSWLLFVSDTDVLADACWALSYLSDGPNDKIQAVIDAGVCRRLVELLMHNDYKVVSPALRAVGNIVTGDD

SEQ ID NO: 126985 - protein, 215 aa, Artificial Sequence
  derived and/or modified sequence
MTTPGKENFRLKSYKNKSLNPDEMRRRREEEGLQLRKQKREEQLFKRRNVATAEEETEEEVMSDGGFHEAQISNMEMAPGGVITSDMIEMIFSKSPEQQLSATQKFRKLLSKEPNPPIDEVISTPGVVARFVEFLKRKENCTLQFESAWVLTNIASGNSLQTRIVIQAGAVPIFIELLSSEFEDVQEQAVWALGNIAGDSTMCRDYVLDCNILPP

SEQ ID NO: 126986 - protein, 174 aa, Artificial Sequence
  derived and/or modified sequence
MTTPGKENFRLKSYKNKSLNPDEMRRRREEEGLQLRKQKREEQLFKRRNVATAEEETEEEVMSDGGFHEAQISNMEMAPGGVITSDMIEMIFSKSPEQQLSATQKFRKLLSKEPNPPIDEVISTPGVVARFVEFLKRKENCTLQFESAWVLTNIASGNSLQTRIVIQAGAVPIF

SEQ ID NO: 126987 - DNA, 1617 bp, Artificial Sequence
  derived and/or modified sequence
atgactactcctggtaaggagaatttcaggctgaaaagttataagaataagagcttaaatccagacgagatgcgaaggcggagggaggaagaaggcctgcagcttagaaaacagaaaagggaagaacagctgtttaagagacgcaacgtagcgacagccgaggaagaaacggaagaagaggttatgagcgacggggggtttcacgaagcccagatcagcaatatggaaatggcacccggcggagtgattacttccgatatgatagagatgatcttctccaaaagccccgagcagcagctaagcgccacacagaaatttcgtaagctactgagtaaagagccaaaccccccaatcgatgaggtgattagcactccaggcgtggttgctcgattcgtggagttcctgaagagaaaggagaactgtaccctacaattcgagtccgcctgggtcctgacaaacatcgctagtggcaattccttacaaactagaatcgttattcaagctggtgccgtgcctattttcattgagctgttgtcctctgagttcgaggatgtgcaggagcaagccgtgtgggccctggggaatatcgcgggggattccacgatgtgtagagattacgtgcttgattgtaatatcctgcctccactgctccagttattctccaaacagaataggctgacgatgacaaggaacgcggtctgggctttgtctaacctgtgccgggggaagagccctccgcctgaattcgctaaagtctccccatgcctgaatgtgctcagctggctgctgtttgtgagcgacactgacgtgctggctgatgcctgctgggctttatcttacctgtccgacggtcctaatgataagatccaggccgtgatcgacgcaggggtatgccggcgtttagtggagttgctcatgcacaacgactataaagtcgttagccccgccctgcgcgctgtcggtaacatcgttaccggcgacgatattcagactcaagtgatcctgaattgcagtgcactgcagagcttgctgcatcttctttctagccccaaggaatccatcaaaaaggaagcatgctggaccatctccaatattacagccgggaatcgcgcccagattcaaacagtcattgatgcgaacattttcccggccttgatctctatcctgcagactgcggaattcagaacaaggaaggaggccgcgtgggctataaccaatgctacatccggcggctctgcggaacaaattaagtacctcgtggagctggggtgtatcaaacctttgtgtgatctgctcactgtcatggactccaaaattgtccaggtggcactgaatgggctggaaaatatcctcagactcggagaacaagaggctaagaggaacggcacaggaattaatccctattgtgccctgattgaggaggcctatggactggacaaaatagaattcctgcagagccacgaaaaccaggagatctaccaaaaggcattcgatttgatcgagcattatttcggcactgaggatgaggacagtagcatcgctccccaggtggatctgaaccagcagcaatatatttttcagcagtgcgaagctcccatggaaggttttcaactttag

SEQ ID NO: 126988 - DNA, 987 bp, Artificial Sequence
  derived and/or modified sequence
atgacaaccccaggcaaagagaacttccgtctgaagtcttataagaataagagcctgaaccccgatgaaatgcgcaggcggcgggaggaggagggtttacaactgaggaagcagaagcgtgaagagcagctcttcaaacgacgcaatgtcgcaactgccgaggaggagactgaggaggaggtcatgtctgacgggggattccacgaggcccagatctctaacatggagatggccccaggaggagtgatcacgtctgacatgatagagatgatcttcagcaaaagcccggagcagcagttgtctgcaacgcaaaagtttagaaaactgttgtcaaaggagcctaacccccctattgacgaggtaattagcacaccaggcgtagtagctaggttcgtggagttcttaaaacgcaaggagaactgcacactacaatttgaaagcgcgtgggtgctcacaaatattgcctctgggaatagcctccagaccaggatagttattcaagctggcgctgtcccaatcttcattgaactgctttcctccgaatttgaggatgtgcaagagcaagccgtgtgggcactaggaaatatcgcaggagactccacaatgtgccgggattacgtgttggactgcaatattttgcctccgcttttacagttgttctccaagcagaatcggctgaccatgactcgcaacgcggtgtgggccctctcgaacttgtgcaggggtaagtcacctccccctgagttcgcaaaggtttccccttgcctgaacgttctctcttggttattgtttgtgtccgatacagacgtcctcgctgacgcctgttgggccttgtcttacttgtcagacggccccaacgacaaaatacaagctgtgatagatgcaggagtgtgtcgccgattggtagaactgctgatgcataacgattacaaggtcgtctctcccgcactcagggccgtgggcaacatcgttaccggagacgattag

SEQ ID NO: 126989 - DNA, 648 bp, Artificial Sequence
  derived and/or modified sequence
atgactactcccggtaaggaaaattttaggttgaaatcctataagaataaaagccttaaccctgatgagatgcgccgaaggagggaagaggagggattgcagctgcgaaaacaaaagcgtgaagaacagctcttcaagcgaaggaacgtagcaacggcggaggaggaaactgaggaggaggttatgtccgacggcgggtttcacgaggcacaaatttctaacatggaaatggccccaggcggtgtgatcacaagcgacatgattgagatgattttctctaagtcgcctgaacagcagctcagtgctacacagaaatttcggaagctgctcagcaaagaaccgaatcccccaatcgacgaagtaatttcaacaccaggcgtggtagcacgattcgtggagttcctgaagagaaaggagaattgtacgctgcaatttgagagcgcctgggtgctgacaaacattgccagcggtaactcccttcaaactcgcatcgtcattcaggctggtgcggtacccatcttcatcgaactgctgtcaagcgaatttgaggacgttcaggagcaagcggtctgggcactggggaacatagcaggtgactctactatgtgccgagattatgtgctggattgtaacatcctgcccccatag

SEQ ID NO: 126990 - DNA, 525 bp, Artificial Sequence
  derived and/or modified sequence
atgaccacacccgggaaggaaaacttcaggctcaaaagctataaaaataagtctttgaatccagatgagatgagacggcgaagggaggaggaaggtctgcaactgcggaagcagaagcgtgaggaacagctgtttaagagacggaatgtggccaccgcggaagaggagacagaagaggaggtcatgtcggatggtgggttccacgaggctcagattagtaatatggagatggctccgggcggagtgattaccagcgacatgatcgaaatgatcttctctaaatcacccgagcagcagttaagtgcgacccaaaagtttcgcaagcttctcagtaaagaaccaaacccgccaatcgatgaagtaatatctacaccaggggttgttgcacggtttgtggaattcctgaagcggaaggaaaattgcacgctgcagtttgagagcgcatgggtgttaaccaatattgcttccggcaattctctgcagactcgtatcgtgattcaggctggagctgttccaatcttttag

SEQ ID NO: 126991 - DNA, 6830 bp, Artificial Sequence
  derived and/or modified sequence
gccggctgagctgagtctcgctgctcggtgcgaggcggcggagagcgaggcctggtgagcaccgccgaggcgcgggccagctcttcgaggttgtgcgcgggagtggcacggcgggcgggcgagcgaggggctaacttcagcggtggcaccgggatcggttgccttgagcctgaaatcatgaccaccccaggaaaagagaactttcgcctgaaaagttacaagaacaaatctctgaatcccgatgagatgcgcaggaggagggaggaagaaggactgcagttacgaaagcagaaaagagaagagcagttattcaagcggagaaatgttgctacagcagaagaagaaacagaagaagaagttatgtcagatggaggctttcatgaggctcagattagtaacatggagatggcaccaggtggtgtcatcacttctgacatgattgaaatgatattttccaaaagcccagagcaacagctttcagcaacacagaaattcaggaagctgctttcaaaagaacctaaccctcctattgatgaagttatcagcacaccaggagtagtggccaggtttgtggagttcctcaaacgaaaagagaattgtacactgcagtttgaatcagcttgggtactgacaaatattgcttcaggaaattctcttcagacccgaattgtgattcaggcaggagctgtgcccatcttcatagagttgctcagctcagagtttgaagatgtccaggaacaggcagtctgggctcttggcaacattgctggagatagtaccatgtgcagggactatgtcttagactgcaatatccttccccctcttttgcagttattttcaaagcaaaaccgcctgaccatgacccggaatgcagtatgggctttgtctaatctctgtagagggaaaagtccacctccagaatttgcaaaggtttctccatgtctgaatgtgctttcctggttgctgtttgtcagtgacactgatgtactggctgatgcctgctgggccctctcatatctatcagatggacccaatgataaaattcaagcggtcatcgatgcgggagtatgtaggagacttgtggaactgctgatgcataatgattataaagtggtttctcctgctttgcgagctgtgggaaacattgtcacaggggatgatattcagacacaggtaattctgaattgctcagctctgcagagtttattgcatttgctgagtagcccaaaggaatctatcaaaaaggaagcatgttggacgatatctaatattacagctggaaatagggcacagatccagactgtgatagatgccaacattttcccagccctcattagtattttacaaactgctgaatttcggacaagaaaagaagcagcttgggccatcacaaatgcaacttctggaggatcagctgaacagatcaagtacctagtagaactgggttgtatcaagccgctctgtgatctcctcacggtcatggactctaagattgtacaggttgccctaaatggcttggaaaatatcctgaggcttggagaacaggaagccaaaaggaatggcactggcattaacccttactgtgctttgattgaagaagcttatggtctggataaaattgagttcttacagagtcatgaaaaccaggagatctaccaaaaggcctttgatcttattgagcattacttcgggaccgaagatgaagacagcagcattgcaccccaggttgaccttaaccagcagcagtacatcttccaacagtgtgaggctcctatggaaggtttccagctttgaagcaatactctgctttcacgtacctgtgtcagaccaggctacccagtcgagtcctcttgtggagcccacagtcctcatggagctaacttctcaaatgttttccataatactgtttgcgctcatttgcttgccttgcgcacctgctctcttacacacatctggaaaacctccggctctctgtggtggaatacccttctaataaaagggtaaccagaacggcccactctcttttacggaaaaatccctaggctttggagatccgcacttacattagagttatgggaatatacacatattaatgtggctccctttttcttgtgggggaataaaagaggactcctcctcattccctttaacatgggggaaaaaactgacattaaaagatgagactaaatctttatcttgaattttacacaactacttacgacaagggagatgtttagacctgttgtgtatacttcagagtacttttcatgagttcttccacagtgaacccttggattacctggtggctttttctagccagatttgcattaatccttactgagattggatggttttctttcctctattggcgccattcttcagatattaaagttaaaccatccactccctcaccttcagccttcagtgaatgtgctttctagttgtcaggaatgctgaagaattaacactttgactcctaaatgtgatactggtttgtagattcccttagagcagaaaggagaggggcacatattaatttgtatcgcttttgcttctctttggtcttttgtgtcttagaatttggaagtggttcatttctgttgctggtatgaggatttcgaatacttagtaatcgaaaaccatatcctgtaatttaataaaaaaaactaaggacgaaaaaaccctccaattttcccaaatgcaatcagtgtaactaggggctgtgtttctgcattaaaataaatgtttcaggctttgtggtcctgatcaaggtcctcattaaaaaattggagttcaccctaggtgcttttcccctctgtgactggcagataacacatacttttgaaagtaactttgggatttttttcttaggtgcagctcgattctaatcttttcatgctgcacacgattcctttaatgtagcatccttatctgaaagaaataaccatcttctcaacatgacctgcttaacccaaataagaacagtgatcttataacctcattgtttcctaatcattttatttcatctcctgctagtactgtgccgcttccccctccccccacacaaaataaaaacagtatctgccttctggctcatttaatgatgactgcaatctgtacctgcaaatggcgcttccagtactgtgttcagtgatccacatttgtgcttggactggaatgaaaaaatacgcttaattgccaagacaactgcaaatgagttcaatacgacttctcggtgctagttggccatcttgactcaatgttgggatacactaccagagaagatttttttgttgatgtgctgttcaaagtgaattctgaaggaaaaggttgctcacctctgtttcagagcatacccttttaaacctttttagacttgtcctcttctagaattcattataaccccaaagtgtaaaaactatttggaagttgcccctgacaagctattatacatctctggtaaatcctgctgaatgtaagggatattcagagcttttcatacctcatcatgatgttatttaagcagccaacttatgtgacctgatttaaacttttaaaaaatccacttcattcaaactagaaagagtcaaagacaaaggacatttatcagccaagagtgtgacgcattcttcgcatctagtctgtagtagtgtctgtgctctgggatggataccgtctgatgtctgtttgttattgatggcgcagccactgcaaaactagtcaactcccatctataactgttactttttctagtgctgctttgtgctgagagaacattttagtttactgcacttgacctgtaaaagactgattctttgtaattttagggataaattaggtggttaatttaaagaagaaatttcaatgttgcctttacatcacattaaaatataacttctttcagaaggataatagaagcactgattcatagtaaaaatcttgtttttagctttgacttttttgtggctgttttttaaaattgtaaattactagtaacatgtcatttctataggatgttttaaattatgtaccttccattggatagttaaaataatttcattttataagccaatttgagtgggaaagatacaaagcacacagttgtctccccacattaggaagagtagtgtgcattcagacattcggaatttttgctagtagttggagatgtttcagtgagtgaattaaaacaaagtctatttaactgacgtgatctattttgtgtctaaaacagaggaatttatcttgtcctagaagttcatgaactataagatctaagtttttttttcttttttaacaataaaatgattttttcttaaagtatcaaagttggaattggctaaaagtgaagtagcataactcagatatgttggaacttggtactgaagcaggctttttggtaacagaaatgacattttaaggggtaactgtatatcctgtttttagttctttgcctctcagattctgttaacttagtttaaattcactgaataccctaccactaaggcgttgctcattacaaaagcatgttaatttcaatacaggaaaactcttttgtagttttatatatggattggggaaagtgactttgttttacttttcctttttattcccctccatcctccaaacttccaatctatattatttgtaatgagaactttggtgggggaaaaaaagcattaagagaattttggatgtaaaggcatctggtatctgatggaccagcaggtagatgtggttggattgagaaattttgggtaaggtagatgatagaagaaagagattttaggagacacagttctctgtggaacactttctttcatgttcctgtaactaattgatcaagacccttttaaacgcttatctttgtcagttccgcttttgaaaaaactattgccctaggattgtttcttccatatgacagatgaaggttattggctctgagtcatttttggcattatcgtcacagataaaaagattggcaattaatctcataaaaaatctgaattattccagattgctgccgatttttgcctaagaaacaatatgtaagtatattttataaaccaaactttgtcaaccaattctattgtacgtctacccacaggcaactttgaatttacttctctagtgctaaataaacatttcagcgatttaatcccccaacttgggggatgcattatgaaaaggttttcctggagtcaaggggtttttctttctcgctagttttgtgaaaatttttatatcaataggcaaatcattataactttttaggggttgatggtttttaagtatattggaaattgtggtgtctaaggatgatgttcagtgaagaaaagggatccacttttagaaaccagcattgtttgctttcaactttcatactgtatgctaactcctacgttccaaaatgtgctcatttgcagacacaggtatgcctatatacatggaagtctcaaatctgaatttttatccatctcaatatgaccatttctctctgttgtgagctgaacagattaagtatatatctgccaggttgggaaatattttggtctatcttttcctgtcatcagaacttaatttaaaaaaattatcaaaggtcagatgtgactactacagtaagttggctatcataaagaatattccataaaatgttttatctgccatacaaaattactgggtttatggccggatgtggtggctcatgcctgtaatcccagcagttcaggattacaggttatatacaggttataacaatggataccaggacatcagaatatctgataaagcaaatatttatatgctaatttaaaatatcaaattgctactggacataaaatacatctggaagcttggggtaagaagaaagaaaagaagtgttccgttctgttttcaactaagggtaaacgaagtcccagagtgttttccctgtaggtcaaattaaggtaacatgtctttatttgatcatctattgtacaccagatacctggctaagggctttccttttttctcatgtagtcttccaaatgttctttgataattgtcactatattatagatgacaaagtgaagacttacgagaaattactttgccccaaggttacaacacttagatggctgtccaagggcggggaagagccctgcaaattctgtgtcttgaagaaagcagtggccacgcagtagttccgtgcccaggatctcccagaactagacttggcaaccacagctgggccagccttttttgttagaccattcttcctgactcctgcttaccatcagcacccttaaaatgacgaaatcaggcttaagttgcttttaggttacacagactggagtgtaggccctctcaggccaaacatctttcctcttctgtggtgctaaaattctgtatgaccagacaagtatggtaataggttttttttttttttttttttgtgcaaatgattttgtgtttagtaaaataatggctaaacacatggatccattcaaacgcacaaatgtggaaagtattgacacggaaggaaaggctttgaagaattactgcctcaggaagcagtgccatggatgcgaatttaacacagtctacttcttcctaaaggaatatcatcccaaggaatgtcaaaaattaaaatcaccttttaatgtactggttgttgagtgtttctgctttacctcaagtcattctgaccactctacatcctgcttcaaagtgttctgacacttagatttggaatggctctaatgattctttgtacttgaatgtggtctgtcaggccatgggtgagtgccttgcacatagtagacattcaataaatactaaatgaaggaata

SEQ ID NO: 126992 - DNA, 1062 bp, Artificial Sequence
  derived and/or modified sequence
gcaggcgcactgcgaacgccggctgagctgagtctcgctgctcggtgcgaggcggcggagagcgaggcctgaaatcatgaccaccccaggaaaagagaactttcgcctgaaaagttacaagaacaaatctctgaatcccgatgagatgcgcaggaggagggaggaagaaggactgcagttacgaaagcagaaaagagaagagcagttattcaagcggagaaatgttgctacagcagaagaagaaacagaagaagaagttatgtcagatggaggctttcatgaggctcagattagtaacatggagatggcaccaggtggtgtcatcacttctgacatgattgaaatgatattttccaaaagcccagagcaacagctttcagcaacacagaaattcaggaagctgctttcaaaagaacctaaccctcctattgatgaagttatcagcacaccaggagtagtggccaggtttgtggagttcctcaaacgaaaagagaattgtacactgcagtttgaatcagcttgggtactgacaaatattgcttcaggaaattctcttcagacccgaattgtgattcaggcaggagctgtgcccatcttcatagagttgctcagctcagagtttgaagatgtccaggaacaggcagtctgggctcttggcaacattgctggagatagtaccatgtgcagggactatgtcttagactgcaatatccttccccctcttttgcagttattttcaaagcaaaaccgcctgaccatgacccggaatgcagtatgggctttgtctaatctctgtagagggaaaagtccacctccagaatttgcaaaggtttctccatgtctgaatgtgctttcctggttgctgtttgtcagtgacactgatgtactggctgatgcctgctgggccctctcatatctatcagatggacccaatgataaaattcaagcggtcatcgatgcgggagtatgtaggagacttgtggaactgctgatgcataatgattataaagtggtttctcctgctttgcgagctgtgggaaacattgtcacaggggatgatat

SEQ ID NO: 126993 - DNA, 727 bp, Artificial Sequence
  derived and/or modified sequence
ggagccctggtgtgatcgccatcgggaacgccggtcgaggctaggcggggcggggcggcgtggcgcggcggcggggctaaatcatgaccaccccaggaaaagagaactttcgcctgaaaagttacaagaacaaatctctgaatcccgatgagatgcgcaggaggagggaggaagaaggactgcagttacgaaagcagaaaagagaagagcagttattcaagcggagaaatgttgctacagcagaagaagaaacagaagaagaagttatgtcagatggaggctttcatgaggctcagattagtaacatggagatggcaccaggtggtgtcatcacttctgacatgattgaaatgatattttccaaaagcccagagcaacagctttcagcaacacagaaattcaggaagctgctttcaaaagaacctaaccctcctattgatgaagttatcagcacaccaggagtagtggccaggtttgtggagttcctcaaacgaaaagagaattgtacactgcagtttgaatcagcttgggtactgacaaatattgcttcaggaaattctcttcagacccgaattgtgattcaggcaggagctgtgcccatcttcatagagttgctcagctcagagtttgaagatgtccaggaacaggcagtctgggctcttggcaacattgctggagatagtaccatgtgcagggactatgtcttagactgcaatatccttccccc

SEQ ID NO: 126994 - DNA, 596 bp, Artificial Sequence
  derived and/or modified sequence
gctcggtgcgaggcggcggagagcgaggcctggtgagcaccgccgaggcgcgggccagctcttcgagaaatcatgaccaccccaggaaaagagaactttcgcctgaaaagttacaagaacaaatctctgaatcccgatgagatgcgcaggaggagggaggaagaaggactgcagttacgaaagcagaaaagagaagagcagttattcaagcggagaaatgttgctacagcagaagaagaaacagaagaagaagttatgtcagatggaggctttcatgaggctcagattagtaacatggagatggcaccaggtggtgtcatcacttctgacatgattgaaatgatattttccaaaagcccagagcaacagctttcagcaacacagaaattcaggaagctgctttcaaaagaacctaaccctcctattgatgaagttatcagcacaccaggagtagtggccaggtttgtggagttcctcaaacgaaaagagaattgtacactgcagtttgaatcagcttgggtactgacaaatattgcttcaggaaattctcttcagacccgaattgtgattcaggcaggagctgtgcccatcttcat

SEQ ID NO: 126995 - DNA, 1617 bp, Artificial Sequence
  derived and/or modified sequence
atgaccacccctgggaaggagaacttccggctgaagagctacaagaacaagagcctgaacccagatgagatgagaagaagaagagaggaggagggcctgcagctgaggaagcagaagcgggaggagcagctgttcaagagaagaaatgtggccacagctgaggaggagacagaggaggaggtgatgtctgatggcggcttccacgaggcccagatcagcaacatggagatggcccctggaggagtcatcaccagtgacatgattgagatgatcttcagcaagagccctgagcagcagctgagcgccacccagaagttcaggaagctgctgagcaaggagcccaacccccccattgatgaagtcatcagcaccccaggagtggtggccaggtttgtggagttcctgaagaggaaagaaaactgcaccctgcagtttgaaagtgcctgggtgctgaccaacatcgccagcggcaacagcctgcagacccgcatcgtcatccaggccggggctgtgcccatcttcatcgagctgctgagcagcgagtttgaagatgtgcaggagcaggccgtgtgggccctgggcaacattgctggggacagcaccatgtgccgggactatgtgctggactgcaacatcctgccccccctgctgcagctgttcagcaagcagaaccggctgaccatgaccagaaatgctgtgtgggccctgagcaacctgtgccggggcaagagccccccacctgagtttgccaaggtgagcccctgcctgaatgtgctgtcctggctgctgtttgtgtctgacacagatgtgctggctgatgcctgctgggccctgagctacctgagtgatggccccaatgacaagatccaggccgtgattgatgctggggtgtgccggcggctggtggagctgctgatgcacaatgactacaaggtggtgtccccagccctgcgggctgtgggcaacatcgtgactggagatgacatccagacccaggtgatcctgaactgcagcgccctgcagagcctgctgcacctgctgagcagccccaaggagagcatcaagaaggaggcctgctggaccatcagcaacatcacagctggcaacagagcccagatccagacagtgattgatgccaacatcttccctgccctgatcagcatcctgcagacagctgagttccgcaccaggaaggaggccgcctgggccatcaccaatgccaccagcggcggcagcgctgagcagatcaagtacctggtggagctgggctgcatcaagcccctgtgtgacctgctgactgtgatggacagcaagatcgtgcaggtggccctgaatggcctggagaacatcctgcggctgggggagcaggaggccaagagaaatggaacaggcatcaacccctactgtgccctgattgaggaggcctacggcctggacaagattgagttcctgcagagccatgagaaccaggagatctaccagaaggcctttgacctgattgagcactacttcggcacagaagatgaggacagcagcatcgccccccaggtggacctgaaccagcagcagtacatcttccagcagtgtgaggcccccatggagggcttccagctgtag

SEQ ID NO: 126996 - DNA, 987 bp, Artificial Sequence
  derived and/or modified sequence
atgaccacccctgggaaggagaacttccggctgaagagctacaagaacaagagcctgaacccagatgagatgagaagaagaagagaggaggagggcctgcagctgaggaagcagaagcgggaggagcagctgttcaagagaagaaatgtggccacagctgaggaggagacagaggaggaggtgatgtctgatggcggcttccacgaggcccagatcagcaacatggagatggcccctggaggagtcatcaccagtgacatgattgagatgatcttcagcaagagccctgagcagcagctgagcgccacccagaagttcaggaagctgctgagcaaggagcccaacccccccattgatgaagtcatcagcaccccaggagtggtggccaggtttgtggagttcctgaagaggaaagaaaactgcaccctgcagtttgaaagtgcctgggtgctgaccaacatcgccagcggcaacagcctgcagacccgcatcgtcatccaggccggggctgtgcccatcttcatcgagctgctgagcagcgagtttgaagatgtgcaggagcaggccgtgtgggccctgggcaacattgctggggacagcaccatgtgccgggactatgtgctggactgcaacatcctgccccccctgctgcagctgttcagcaagcagaaccggctgaccatgaccagaaatgctgtgtgggccctgagcaacctgtgccggggcaagagccccccacctgagtttgccaaggtgagcccctgcctgaatgtgctgtcctggctgctgtttgtgtctgacacagatgtgctggctgatgcctgctgggccctgagctacctgagtgatggccccaatgacaagatccaggccgtgattgatgctggggtgtgccggcggctggtggagctgctgatgcacaatgactacaaggtggtgtccccagccctgcgggctgtgggcaacatcgtgactggagatgactag

SEQ ID NO: 126997 - DNA, 648 bp, Artificial Sequence
  derived and/or modified sequence
atgaccacccctgggaaggagaacttccggctgaagagctacaagaacaagagcctgaacccagatgagatgagaagaagaagagaggaggagggcctgcagctgaggaagcagaagcgggaggagcagctgttcaagagaagaaatgtggccacagctgaggaggagacagaggaggaggtgatgtctgatggcggcttccacgaggcccagatcagcaacatggagatggcccctggaggagtcatcaccagtgacatgattgagatgatcttcagcaagagccctgagcagcagctgagcgccacccagaagttcaggaagctgctgagcaaggagcccaacccccccattgatgaagtcatcagcaccccaggagtggtggccaggtttgtggagttcctgaagaggaaagaaaactgcaccctgcagtttgaaagtgcctgggtgctgaccaacatcgccagcggcaacagcctgcagacccgcatcgtcatccaggccggggctgtgcccatcttcatcgagctgctgagcagcgagtttgaagatgtgcaggagcaggccgtgtgggccctgggcaacattgctggggacagcaccatgtgccgggactatgtgctggactgcaacatcctgcccccatag

SEQ ID NO: 126998 - DNA, 525 bp, Artificial Sequence
  derived and/or modified sequence
atgaccacccctgggaaggagaacttccggctgaagagctacaagaacaagagcctgaacccagatgagatgagaagaagaagagaggaggagggcctgcagctgaggaagcagaagcgggaggagcagctgttcaagagaagaaatgtggccacagctgaggaggagacagaggaggaggtgatgtctgatggcggcttccacgaggcccagatcagcaacatggagatggcccctggaggagtcatcaccagtgacatgattgagatgatcttcagcaagagccctgagcagcagctgagcgccacccagaagttcaggaagctgctgagcaaggagcccaacccccccattgatgaagtcatcagcaccccaggagtggtggccaggtttgtggagttcctgaagaggaaagaaaactgcaccctgcagtttgaaagtgcctgggtgctgaccaacatcgccagcggcaacagcctgcagacccgcatcgtcatccaggccggggctgtgcccatcttctag

SEQ ID NO: 126999 - DNA, 1617 bp, Artificial Sequence
  derived and/or modified sequence
atgaccacccccggcaaggagaacttccggctgaagagctacaagaacaaatcacttaacccagacgaaatgagaaggcggcgggaggaagaaggactccagctgcggaagcagaagcgagaagagcagttatttaagaggagaaatgtggctactgccgaggaagagaccgaggaggaggtaatgtctgatggaggatttcatgaggctcagatctctaatatggaaatggcacccggaggggtaatcacctctgacatgattgagatgatcttctcaaagagcccagagcagcagctgagcgctactcagaaattcaggaaactgctgtccaaagagcctaacccacctattgacgaggtcatatccacacctggtgtggtggcacggttcgtagagtttctgaaacgcaaggaaaactgcacactgcaattcgagtccgcctgggtgctgactaacattgccagtggcaattcactccaaactcgcatcgtaattcaggcaggcgcagtacccatctttattgaactcctgtcctctgaattcgaagacgtgcaggaacaggctgtgtgggctctgggtaatatcgctggagacagcaccatgtgtagggattatgtgctggattgtaatatcctgccacccctcctccagctgtttagcaagcagaacaggctaacgatgacgcgtaacgccgtctgggctttatcaaacctgtgtaggggtaagagcccgcccccggagtttgccaaggtttccccttgtctcaacgttctaagctggctcctgttcgtgtctgacacggacgtcctggccgatgcatgctgggccctgtcctacctgtccgacgggcccaacgataagattcaagctgtgattgacgccggtgtgtgccgcagactcgtggaattgctcatgcacaacgactataaggtggtgtctcctgctttgagggccgtgggaaacatcgtgacaggcgacgacatccagactcaggtgattctcaactgtagcgctctccagagccttcttcacctgctgtcctctccaaaagagtccataaaaaaagaagcttgttggactattagtaacataacagcagggaaccgtgcccagatacagaccgtgatagatgccaacatctttccagctttgatctccatacttcagacggccgaatttcgaaccaggaaagaagccgcctgggcgatcacgaacgctacttccggcggtagcgccgaacagataaaatacctcgtggagctggggtgcattaagcctctttgcgatctccttaccgtgatggacagcaagatcgtgcaagtggctctgaatggactcgagaacatcctgcggctaggcgaacaggaagccaagcgcaacggtacaggcatcaatccttattgcgcactgatagaggaagcttacggcctggataaaattgagtttctgcagtcacatgaaaaccaggaaatctatcagaaggcttttgatctcattgaacactactttggcaccgaggatgaagacagttctatagccccacaggtagatctcaatcaacaacagtacatattccagcaatgcgaggcccccatggagggcttccagttgtag

SEQ ID NO: 127000 - DNA, 987 bp, Artificial Sequence
  derived and/or modified sequence
atgaccacccccggcaaggagaacttccggctgaagagctacaagaataagtctctgaaccccgacgagatgagaaggcgccgagaagaagaggggctgcagttaaggaaacagaaacgagaggagcagctgtttaagagaagaaacgtggcaaccgcggaagaggagactgaggaagaggtgatgagcgacggaggcttccacgaagcgcagattagcaatatggaaatggcgccagggggcgtgattacttctgacatgatagaaatgattttttctaaatcccccgagcagcagctgagtgcaactcagaagtttaggaaattgttgagcaaggagcctaacccccccatagacgaagtgatcagtacccctggggtcgtcgcccgatttgtggagttccttaaaagaaaagaaaattgcacactacagttcgagtctgcctgggtgctgacaaacatcgcttcgggcaactcattgcaaactaggatagttattcaggccggcgcggttccgattttcatcgagttgctctcatccgagttcgaggacgttcaagaacaagcagtttgggccctgggtaacatcgccggggactctactatgtgccgtgattatgtcctggactgcaacatacttccccccctcttacaacttttttctaaacaaaacagacttactatgactcgtaacgcggtgtgggccctctctaacctgtgtcggggaaaatctccaccaccagagtttgcaaaggtatccccatgccttaacgttctaagctggttgttgtttgtatcagacacagacgtgctggccgatgcctgttgggctttgagctaccttagtgacggtccgaacgacaaaattcaggcagtgatagacgcgggggtttgccgaagactggtggaactcctgatgcataatgactacaaggtcgtgtcccccgctctacgtgccgtcggtaatattgtgactggggacgattag

SEQ ID NO: 127001 - DNA, 648 bp, Artificial Sequence
  derived and/or modified sequence
atgaccacccccggcaaggagaacttccggctgaagagctacaagaacaaatctctcaatcctgacgaaatgagaagaaggagagaagaggagggtctacagttgcgaaaacaaaagcgggaggaacaattgttcaagcgacggaacgtagctactgctgaggaggaaaccgaagaggaggtgatgtcagatgggggcttccacgaagctcagatatccaacatggagatggcccctggaggcgtaatcacttctgacatgatcgagatgatattttccaagtcccctgagcagcaattgagcgcgacacagaagtttaggaaattactctccaaggagcctaacccccctattgacgaagtcatctcaactccaggagttgtggctcggttcgtggagtttcttaaacgcaaggagaattgtaccctgcaatttgaatcggcctgggttctcaccaatatcgcttcagggaatagtctgcagacgaggatcgtcatccaggcaggggcagttcccatctttatagagcttctgtcttcagaattcgaggacgtgcaagaacaggccgtctgggctttgggcaatatagccggcgattccacgatgtgcagggattatgtgctggattgtaatatcttgcccccttag

SEQ ID NO: 127002 - DNA, 525 bp, Artificial Sequence
  derived and/or modified sequence
atgaccacccccggcaaggagaacttccggctgaagagctacaagaataagtcacttaatccggacgaaatgcgacggcggagagaagaggaaggtctccagctacgcaagcagaagagggaagagcaacttttcaagcgacgaaatgtggccacagcagaggaggagaccgaagaggaagtaatgtcggacggaggctttcatgaggctcagatttccaacatggagatggccccgggaggcgtgataacttcagacatgattgagatgattttcagcaagtccccagaacagcagctgagcgcgacccagaaatttaggaaattgctctctaaagagcctaacccacctattgatgaggttatttccactcccggggtggtagccagatttgtggaatttctgaagaggaaggagaattgtactctgcagtttgaatccgcttgggtcttgaccaacatagccagcggcaactctctccagacacgcatcgtgatacaggccggggcagtccccattttttag

SEQ ID NO: 127003 - DNA, 1617 bp, Artificial Sequence
  derived and/or modified sequence
atgacaacccctggaaaagagaacttcagattgaagtcttataagaacaaatcactaaatcctgatgaaatgcggcgtagaagggaagaagagggccttcagctgaggaaacagaagagagaagaacaactgttcaagcgaagaaatgtggcgaccgcagaggaagaaaccgaggaggaggttatgtccgatgggggtttccatgaggcccagattagtaacatggagatggcccctggcggagttatcacaagcgacatgattgagatgattttctctaagagtccggaacagcaactgagtgccacccagaagttcaggaaactcctttctaaggagcccaaccctccaatagatgaggtgatctctacacccggagttgtcgcacgatttgtagagttcctgaagcgcaaagagaactgcacgctccaatttgagagcgcatgggtgcttactaacattgccagcggaaactcattgcaaactaggattgttattcaggccggagcggtccctatctttatcgaactgctcagttcagaatttgaggacgtgcaagagcaggctgtctgggctctgggaaacatcgccggagattcaaccatgtgcagagactatgtgcttgattgcaacatcctgccacctctgttacaactcttcagcaagcagaatagacttactatgactcggaacgcagtgtgggctctctcgaacctgtgtcgcggaaagagccccccaccagaatttgcaaaagtgtcgccttgcctaaatgtgctctcctggctcctctttgtctcagacacggatgtgctggctgacgcctgttgggcactgtcatatctgtctgatggccctaacgacaaaatccaggccgtgatcgacgcaggggtttgcagacgcttagttgaactactcatgcataatgattacaaagtggtctctccagccctccgggctgtcggaaatatcgtcactggtgatgacattcagacccaagtgatacttaactgctcggctcttcagtccctgctgcacctcctgtcctcacctaaggagtccattaagaaagaggcatgttggacgattagtaatatcactgccggaaatcgagcccagattcagaccgtgatagacgccaacatctttcctgctctgatctccatcctgcagacagcggagtttcggacacgaaaggaagcggcttgggccataacaaatgcaacatccggagggagcgctgaacagatcaagtacttggtggaactgggatgtattaagccactgtgtgatctcttgaccgtgatggattccaagatagttcaagtcgccttgaacggcctggagaacatcctcagactgggggaacaggaggctaaaagaaacggcactggcattaatccatactgcgcgctcatcgaagaagcatacggacttgataagatcgagttccttcagagccatgaaaatcaagaaatctatcagaaggcgtttgatctcattgaacattatttcgggacagaggatgaagactcgagcatcgcaccgcaagttgacctgaaccagcaacagtacatcttccaacagtgtgaggctcccatggaaggcttccagctctag

SEQ ID NO: 127004 - DNA, 987 bp, Artificial Sequence
  derived and/or modified sequence
atgacaacacctgggaaagagaattttaggctcaaatcttacaagaacaaatcccttaaccccgacgaaatgcggagacgacgagaggaggagggattgcaattgcgaaaacagaaacgtgaagaacaattgttcaagaggcgaaatgtggcaactgcagaagaggaaacagaggaagaggtgatgtctgacggcggatttcacgaggcacaaatttcgaatatggaaatggcccctggcggtgtaataacatcagacatgattgagatgattttctccaagtcacctgagcaacagctgtctgcgacacaaaagtttcggaaacttttaagcaaggaaccaaatcctcccatagacgaagtgatttctacacccggtgttgtggccagatttgtagaattcctgaagcgtaaggagaattgtacacttcagttcgaaagcgcctgggtactgacaaatatagcttccggtaacagtcttcaaacccggattgtgatccaagccggagcagtccctatctttatcgagttgctttccagtgaattcgaggatgtgcaggagcaggctgtgtgggcactgggcaacatcgccggagactcaaccatgtgccgtgactatgtcctcgactgtaacattcttccaccactccttcagctgttttccaagcagaacaggctcacaatgacgcgcaacgctgtttgggctttgagcaacctctgtcggggaaaaagcccacccccagaattcgctaaggtgagtccctgccttaacgtgctctcctggctcttgttcgtatccgataccgacgtgctcgcagacgcatgttgggcgctgtcttacctctccgatggccctaacgataaaatccaggcagtgattgatgctggagtttgtagaaggctggttgagctgctgatgcacaacgattacaaggtcgtctcccccgctctccgggctgtgggcaatatagttacgggggatgattag

SEQ ID NO: 127005 - DNA, 648 bp, Artificial Sequence
  derived and/or modified sequence
atgactacacccggtaaagagaattttcgtctgaagagttacaagaacaaaagtctgaatcctgacgagatgcggagacgtcgggaggaggagggactgcaattgcgcaagcagaagcgcgaggaacagttattcaaaagacgcaatgtcgccacggccgaggaagagacagaagaagaggtcatgtctgatgggggtttccatgaggcccaaatcagtaatatggagatggctcccggaggagtgataacctctgatatgattgagatgatattttctaagagccctgaacagcagctgagtgctacacagaagtttcgcaagttgttgtccaaggagcctaatccaccgatcgacgaggtgatcagcaccccaggtgtggtagcaaggtttgtcgaatttctgaaaaggaaggagaattgcactctgcagtttgaaagcgcctgggtactcaccaacatcgcttctgggaacagtcttcaaacacgcatcgtgattcaggccggagcagtgccaatctttattgagctcctgtcatccgaatttgaggacgtgcaggagcaggcagtctgggccctgggtaatattgcaggagacagtacaatgtgcagggactatgttctggattgcaacatacttcctccctag

SEQ ID NO: 127006 - DNA, 525 bp, Artificial Sequence
  derived and/or modified sequence
atgactacacccggtaaagaaaattttcggctgaagtcctataagaataagagtctcaaccccgacgaaatgcggcgtcgaagggaggaggaggggctgcagctgcgtaaacagaaacgcgaggaacaactattcaagaggcgcaatgtcgccactgcagaggaagagaccgaagaagaggtaatgagcgatggaggattccacgaagcacagataagcaatatggaaatggctcctggtggcgtgataacttcagatatgattgagatgatttttagcaagtcccctgaacaacagctgagcgctacacaaaagttccggaagctcctgtccaaagagccaaatccgcctattgacgaggtcatctcaacgccaggagtcgtagccaggttcgtggagtttctcaaaaggaaagagaactgtactttacagttcgagtcagcatgggtgctgactaacatcgcatccgggaactcccttcaaacccgcatagtgattcaggctggggctgttccaatcttctag

SEQ ID NO: 127007 - DNA, 1617 bp, Artificial Sequence
  derived and/or modified sequence
atgaccacccccggcaaggagaacttcagactgaagagctacaagaacaagagcctgaaccccgacgagatgagaagaagaagagaggaggagggcctgcagctgagaaagcagaagagagaggagcagctgttcaagagaagaaacgtggccaccgccgaggaggagaccgaggaggaggtgatgagcgacggcggcttccacgaggcccagatcagcaacatggagatggcccccggcggcgtgatcaccagcgacatgatcgagatgatcttcagcaagagccccgagcagcagctgagcgccacccagaagttcagaaagctgctgagcaaggagcccaacccccccatcgacgaggtgatcagcacccccggcgtggtggccagattcgtggagttcctgaagagaaaggagaactgcaccctgcagttcgagagcgcctgggtgctgaccaacatcgccagcggcaacagcctgcagaccagaatcgtgatccaggccggcgccgtgcccatcttcatcgagctgctgagcagcgagttcgaggacgtgcaggagcaggccgtgtgggccctgggcaacatcgccggcgacagcaccatgtgcagagactacgtgctggactgcaacatcctgccccccctgctgcagctgttcagcaagcagaacagactgaccatgaccagaaacgccgtgtgggccctgagcaacctgtgcagaggcaagagccccccccccgagttcgccaaggtgagcccctgcctgaacgtgctgagctggctgctgttcgtgagcgacaccgacgtgctggccgacgcctgctgggccctgagctacctgagcgacggccccaacgacaagatccaggccgtgatcgacgccggcgtgtgcagaagactggtggagctgctgatgcacaacgactacaaggtggtgagccccgccctgagagccgtgggcaacatcgtgaccggcgacgacatccagacccaggtgatcctgaactgcagcgccctgcagagcctgctgcacctgctgagcagccccaaggagagcatcaagaaggaggcctgctggaccatcagcaacatcaccgccggcaacagagcccagatccagaccgtgatcgacgccaacatcttccccgccctgatcagcatcctgcagaccgccgagttcagaaccagaaaggaggccgcctgggccatcaccaacgccaccagcggcggcagcgccgagcagatcaagtacctggtggagctgggctgcatcaagcccctgtgcgacctgctgaccgtgatggacagcaagatcgtgcaggtggccctgaacggcctggagaacatcctgagactgggcgagcaggaggccaagagaaacggcaccggcatcaacccctactgcgccctgatcgaggaggcctacggcctggacaagatcgagttcctgcagagccacgagaaccaggagatctaccagaaggccttcgacctgatcgagcactacttcggcaccgaggacgaggacagcagcatcgccccccaggtggacctgaaccagcagcagtacatcttccagcagtgcgaggcccccatggagggcttccagctgtag

SEQ ID NO: 127008 - DNA, 987 bp, Artificial Sequence
  derived and/or modified sequence
atgaccacccccggcaaggagaacttcagactgaagagctacaagaacaagagcctgaaccccgacgagatgagaagaagaagagaggaggagggcctgcagctgagaaagcagaagagagaggagcagctgttcaagagaagaaacgtggccaccgccgaggaggagaccgaggaggaggtgatgagcgacggcggcttccacgaggcccagatcagcaacatggagatggcccccggcggcgtgatcaccagcgacatgatcgagatgatcttcagcaagagccccgagcagcagctgagcgccacccagaagttcagaaagctgctgagcaaggagcccaacccccccatcgacgaggtgatcagcacccccggcgtggtggccagattcgtggagttcctgaagagaaaggagaactgcaccctgcagttcgagagcgcctgggtgctgaccaacatcgccagcggcaacagcctgcagaccagaatcgtgatccaggccggcgccgtgcccatcttcatcgagctgctgagcagcgagttcgaggacgtgcaggagcaggccgtgtgggccctgggcaacatcgccggcgacagcaccatgtgcagagactacgtgctggactgcaacatcctgccccccctgctgcagctgttcagcaagcagaacagactgaccatgaccagaaacgccgtgtgggccctgagcaacctgtgcagaggcaagagccccccccccgagttcgccaaggtgagcccctgcctgaacgtgctgagctggctgctgttcgtgagcgacaccgacgtgctggccgacgcctgctgggccctgagctacctgagcgacggccccaacgacaagatccaggccgtgatcgacgccggcgtgtgcagaagactggtggagctgctgatgcacaacgactacaaggtggtgagccccgccctgagagccgtgggcaacatcgtgaccggcgacgactag

SEQ ID NO: 127009 - DNA, 648 bp, Artificial Sequence
  derived and/or modified sequence
atgaccacccccggcaaggagaacttcagactgaagagctacaagaacaagagcctgaaccccgacgagatgagaagaagaagagaggaggagggcctgcagctgagaaagcagaagagagaggagcagctgttcaagagaagaaacgtggccaccgccgaggaggagaccgaggaggaggtgatgagcgacggcggcttccacgaggcccagatcagcaacatggagatggcccccggcggcgtgatcaccagcgacatgatcgagatgatcttcagcaagagccccgagcagcagctgagcgccacccagaagttcagaaagctgctgagcaaggagcccaacccccccatcgacgaggtgatcagcacccccggcgtggtggccagattcgtggagttcctgaagagaaaggagaactgcaccctgcagttcgagagcgcctgggtgctgaccaacatcgccagcggcaacagcctgcagaccagaatcgtgatccaggccggcgccgtgcccatcttcatcgagctgctgagcagcgagttcgaggacgtgcaggagcaggccgtgtgggccctgggcaacatcgccggcgacagcaccatgtgcagagactacgtgctggactgcaacatcctgcccccctag

SEQ ID NO: 127010 - DNA, 525 bp, Artificial Sequence
  derived and/or modified sequence
atgaccacccccggcaaggagaacttcagactgaagagctacaagaacaagagcctgaaccccgacgagatgagaagaagaagagaggaggagggcctgcagctgagaaagcagaagagagaggagcagctgttcaagagaagaaacgtggccaccgccgaggaggagaccgaggaggaggtgatgagcgacggcggcttccacgaggcccagatcagcaacatggagatggcccccggcggcgtgatcaccagcgacatgatcgagatgatcttcagcaagagccccgagcagcagctgagcgccacccagaagttcagaaagctgctgagcaaggagcccaacccccccatcgacgaggtgatcagcacccccggcgtggtggccagattcgtggagttcctgaagagaaaggagaactgcaccctgcagttcgagagcgcctgggtgctgaccaacatcgccagcggcaacagcctgcagaccagaatcgtgatccaggccggcgccgtgcccatcttctag

SEQ ID NO: 127011 - protein, 876 aa, Artificial Sequence
  derived and/or modified sequence
MELITILEKTVSPDRLELEAAQKFLERAAVENLPTFLVELSRVLANPGNSQVARVAAGLQIKNSLTSKDPDIKAQYQQRWLAIDANARREVKNYVLQTLGTETYRPSSASQCVAGIACAEIPVNQWPELIPQLVANVTNPNSTEHMKESTLEAIGYICQDIDPEQLQDKSNEILTAIIQGMRKEEPSNNVKLAATNALLNSLEFTKANFDKESERHFIMQVVCEATQCPDTRVRVAALQNLVKIMSLYYQYMETYMGPALFAITIEAMKSDIDEVALQGIEFWSNVCDEEMDLAIEASEAAEQGRPPEHTSKFYAKGALQYLVPILTQTLTKQDENDDDDDWNPCKAAGVCLMLLATCCEDDIVPHVLPFIKEHIKNPDWRYRDAAVMAFGCILEGPEPSQLKPLVIQAMPTLIELMKDPSVVVRDTAAWTVGRICELLPEAAINDVYLAPLLQCLIEGLSAEPRVASNVCWAFSSLAEAAYEAADVADDQEEPATYCLSSSFELIVQKLLETTDRPDGHQNNLRSSAYESLMEIVKNSAKDCYPAVQKTTLVIMERLQQVLQMESHIQSTSDRIQFNDLQSLLCATLQNVLRKVQHQDALQISDVVMASLLRMFQSTAGSGGVQEDALMAVSTLVEVLGGEFLKYMEAFKPFLGIGLKNYAEYQVCLAAVGLVGDLCRALQSNIIPFCDEVMQLLLENLGNENVHRSVKPQILSVFGDIALAIGGEFKKYLEVVLNTLQQASQAQVDKSDYDMVDYLNELRESCLEAYTGIVQGLKGDQENVHPDVMLVQPRVEFILSFIDHIAGDEDHTDGVVACAAGLIGDLCTAFGKDVLKLVEARPMIHELLTEGRRSKTNKAKTLATWATKELRKLKNQA

SEQ ID NO: 127012 - protein, 731 aa, Artificial Sequence
  derived and/or modified sequence
MKESTLEAIGYICQDIDPEQLQDKSNEILTAIIQGMRKEEPSNNVKLAATNALLNSLEFTKANFDKESERHFIMQVVCEATQCPDTRVRVAALQNLVKIMSLYYQYMETYMGPALFAITIEAMKSDIDEVALQGIEFWSNVCDEEMDLAIEASEAAEQGRPPEHTSKFYAKGALQYLVPILTQTLTKQDENDDDDDWNPCKAAGVCLMLLATCCEDDIVPHVLPFIKEHIKNPDWRYRDAAVMAFGCILEGPEPSQLKPLVIQAMPTLIELMKDPSVVVRDTAAWTVGRICELLPEAAINDVYLAPLLQCLIEGLSAEPRVASNVCWAFSSLAEAAYEAADVADDQEEPATYCLSSSFELIVQKLLETTDRPDGHQNNLRSSAYESLMEIVKNSAKDCYPAVQKTTLVIMERLQQVLQMESHIQSTSDRIQFNDLQSLLCATLQNVLRKVQHQDALQISDVVMASLLRMFQSTAGSGGVQEDALMAVSTLVEVLGGEFLKYMEAFKPFLGIGLKNYAEYQVCLAAVGLVGDLCRALQSNIIPFCDEVMQLLLENLGNENVHRSVKPQILSVFGDIALAIGGEFKKYLEVVLNTLQQASQAQVDKSDYDMVDYLNELRESCLEAYTGIVQGLKGDQENVHPDVMLVQPRVEFILSFIDHIAGDEDHTDGVVACAAGLIGDLCTAFGKDVLKLVEARPMIHELLTEGRRSKTNKAKTLATWATKELRKLKNQA

SEQ ID NO: 127013 - protein, 660 aa, Artificial Sequence
  derived and/or modified sequence
MKESTLEAIGYICQDIDPEQLQDKSNEILTAIIQGMRKEEPSNNVKLAATNALLNSLEFTKANFDKESERHFIMQVVCEATQCPDTRVRVAALQNLVKIMSLYYQYMETYMGPALFADENDDDDDWNPCKAAGVCLMLLATCCEDDIVPHVLPFIKEHIKNPDWRYRDAAVMAFGCILEGPEPSQLKPLVIQAMPTLIELMKDPSVVVRDTAAWTVGRICELLPEAAINDVYLAPLLQCLIEGLSAEPRVASNVCWAFSSLAEAAYEAADVADDQEEPATYCLSSSFELIVQKLLETTDRPDGHQNNLRSSAYESLMEIVKNSAKDCYPAVQKTTLVIMERLQQVLQMESHIQSTSDRIQFNDLQSLLCATLQNVLRKVQHQDALQISDVVMASLLRMFQSTAGSGGVQEDALMAVSTLVEVLGGEFLKYMEAFKPFLGIGLKNYAEYQVCLAAVGLVGDLCRALQSNIIPFCDEVMQLLLENLGNENVHRSVKPQILSVFGDIALAIGGEFKKYLEVVLNTLQQASQAQVDKSDYDMVDYLNELRESCLEAYTGIVQGLKGDQENVHPDVMLVQPRVEFILSFIDHIAGDEDHTDGVVACAAGLIGDLCTAFGKDVLKLVEARPMIHELLTEGRRSKTNKAKTLATWATKELRKLKNQA

SEQ ID NO: 127014 - DNA, 2631 bp, Artificial Sequence
  derived and/or modified sequence
atggagttgatcacgatcttggagaaaaccgtgtctcctgatagactggagctagaagctgcacaaaagttcttagagcgggctgcagtggaaaatttaccgacgtttctggtggaactcagcagagtgctggccaaccccggaaactcccaggttgccagggtggcagccggcctgcagattaaaaacagtctcacgtccaaagatcccgatataaaggctcagtatcaacagaggtggctggccattgacgcaaatgcccggcgggaggtgaagaactacgtgctgcagactctgggaaccgaaacatacaggccttccagcgcttcccagtgtgtggctgggatcgcctgcgcagagatccctgtaaaccagtggccagaactgattccacaactggtggctaatgttaccaatcctaactcgaccgagcatatgaaagaaagcacccttgaggctatcggctatatttgccaggacatagacccagaacaactgcaagacaaatcgaacgagatactgaccgccatcattcaggggatgcgcaaggaagaacctagcaataacgtgaagctagcagctaccaacgccctccttaactctctagaattcaccaaggctaacttcgacaaggaaagtgagagacacttcataatgcaggttgtctgcgaggctacgcagtgcccagacactagggtaagagtggcggccctccagaatctggtgaaaatcatgtcgttatactatcagtacatggaaacatatatgggaccagccctttttgctatcacgatcgaggcaatgaagtcagatatagacgaagtggcgttacaagggatagagttctggagtaatgtgtgcgacgaggagatggatttggccatcgaggcatccgaggccgcagagcaaggccggcccccggagcacaccagtaagttttacgccaagggcgccctacagtacctggttccgatcctgacccagacactcaccaagcaggacgagaatgacgatgacgacgattggaacccttgcaaggctgccggggtctgcctgatgcttctggctacgtgctgtgaggacgacatcgttccgcacgtgttaccattcattaaggagcacatcaaaaatccggactggcgataccgcgacgcagccgtcatggcgtttgggtgtattttagaaggccccgagccctcgcagttaaagcctcttgtgatacaggcgatgccaaccctgatcgaattgatgaaggatccctcggtggtagtgcgggataccgcggcctggaccgtgggccgcatttgtgaacttctccccgaagctgctataaatgatgtgtacctggcccccttgttacagtgccttatagaaggcttgagtgctgaacccagggtggccagcaatgtttgttgggcatttagcagtctggccgaggccgcgtatgaggccgccgatgtggccgatgatcaggaagagccagccacatattgtctgtcttccagttttgagctgattgtccagaagctattggagactactgaccgtccagacggccaccagaataacctcaggagcagcgcatacgagtctctgatggagatcgtaaaaaactccgccaaggactgctacccggctgtccagaaaacgaccctcgtcatcatggaacgcctgcagcaagtactccagatggagtctcacattcaatcaacctctgatcggattcaattcaatgatcttcagtctctgctctgtgctacactgcagaatgtgctcagaaaagtgcagcaccaggatgcccttcagatctccgacgtcgtgatggcctcccttctccggatgttccaaagcactgccggctccggtggggtgcaagaggatgctctcatggccgtctccactctggtcgaagtcctggggggcgagtttctgaaatatatggaggcatttaagccctttctcggcattggactgaagaactatgcagagtatcaggtatgtctagcggccgtgggtctggtcggggatctatgccgtgcccttcagagtaatattatccccttttgcgatgaggtgatgcagctcctgttagagaatctcggcaacgagaatgtccatcgcagtgttaagccccagatccttagcgtgttcggcgatatcgcactggctatcggcggggagtttaagaagtatctcgaggtcgtacttaataccttgcaacaggcctcacaggctcaagtcgacaagtctgactatgatatggtagactacttaaatgagttaagggagagttgtcttgaagcttatacaggcatagtgcagggattaaagggtgaccaggagaacgttcatccggatgtcatgcttgtgcaacccagagtggagtttatcttgtccttcatcgatcatatcgccggcgacgaagaccacactgatggtgtggtggcctgcgctgccggcctgattggggatctgtgtacagcctttggcaaggacgtgctgaaactcgtggaggctagacccatgattcatgagctcctcactgaaggcagaaggtctaagactaacaaagccaagaccttggctacttgggccacaaaagagctgcgaaaattgaagaaccaggcctag

SEQ ID NO: 127015 - DNA, 4195 bp, Artificial Sequence
  derived and/or modified sequence
ctccctcgctccctccctgcgcgccgcctctcactcacagcctcccttccttctttctccctccgcctcccgagcaccagcgcgctctgagctgcccccagggtccctcccccgccgccagcagcccatttggagggaggaagtaagggaagaggagaggaaggggagccggaccgactacccagacagagccggtgaatgggtttgtggtgacccccgccccccaccccaccctcccttcccacccgacccccaacccccatccccagttcgagccgccgcccgaaaggccgggccgtcgtcttaggaggagtcgccgccgccgccacctccgccatggagctgatcaccattctcgagaagaccgtgtctcccgatcggctggagctggaagcggcgcagaagttcctggagcgtgcggccgtggagaacctgcccactttccttgtggaactgtccagagtgctggcaaatccaggaaacagtcaggttgccagagttgcagctggtctacaaatcaagaactctttgacatctaaagatccagatatcaaggcacaatatcagcagaggtggcttgctattgatgctaatgctcgacgagaagtcaagaactatgttttgcagacattgggtacagaaacttaccggcctagttctgcctcacagtgtgtggctggtattgcttgtgcagagatcccagtaaaccagtggccagaactcattcctcagctggtggccaatgtcacaaaccccaacagcacagagcacatgaaggagtcgacattggaagccatcggttatatttgccaagatatagacccagagcagctacaagataaatccaatgagattctgactgccataatccaggggatgaggaaagaagagcctagtaataatgtgaagctagctgctacgaatgcactcctgaactcattggagttcaccaaagcaaactttgataaagagtctgaaaggcactttattatgcaggtggtctgtgaagccacacagtgtccagatacgagggtacgagtggctgctttacagaatctggtgaagataatgtccttatattatcagtacatggagacatatatgggtcctgctctttttgcaatcacaatcgaagcaatgaaaagtgacattgatgaggtggctttacaagggatagaattctggtccaatgtctgtgatgaggaaatggatttggccattgaagcttcagaggcagcagaacaaggacggccccctgagcacaccagcaagttttatgcgaagggagcactacagtatctggttccaatcctcacacagacactaactaaacaggacgaaaatgatgatgacgatgactggaacccctgcaaagcagcaggggtgtgcctcatgcttctggccacctgctgtgaagatgacattgtcccacatgtcctccccttcattaaagaacacatcaagaacccagattggcggtaccgggatgcagcagtgatggcttttggttgtatcttggaaggaccagagcccagtcagctcaaaccactagttatacaggctatgcccaccctaatagaattaatgaaagaccccagtgtagttgttcgagatacagctgcatggactgtaggcagaatttgtgagctgcttcctgaagctgccatcaatgatgtctacttggctcccctgctacagtgtctgattgagggtctcagtgctgaacccagagtggcttcaaatgtgtgctgggctttctccagtctggctgaagctgcttatgaagctgcagacgttgctgatgatcaggaagaaccagctacttactgcttatcttcttcatttgaactcatagttcagaagctcctagagactacagacagacctgatggacaccagaacaacctgaggagttctgcatatgaatctctgatggaaattgtgaaaaacagtgccaaggattgttatcctgctgtccagaaaacgactttggtcatcatggaacgactgcaacaggttcttcagatggagtcacatatccagagcacatccgatagaatccagttcaatgaccttcagtctttactctgtgcaactcttcagaatgttcttcggaaagtgcaacatcaagatgctttgcagatctctgatgtggttatggcctccctgttaaggatgttccaaagcacagctgggtctgggggagtacaagaggatgccctgatggcagttagcacactggtggaagtgttgggtggtgaattcctcaagtacatggaggcctttaaacccttcctgggcattggattaaaaaattatgctgaataccaggtttgtttggcagctgtgggcttagtgggagacttgtgccgtgccctgcaatccaacatcatacctttctgtgacgaggtgatgcagctgcttctggaaaatttggggaatgagaacgtccacaggtctgtgaagccgcagattctgtcagtgtttggtgatattgcccttgctattggaggagagtttaaaaaatacttagaggttgtattgaatactcttcagcaggcctcccaagcccaggtggacaagtcagactatgacatggtggattatctgaatgagctaagggaaagctgcttggaagcctatactggaatcgtccagggattaaagggggatcaggagaacgtacacccggatgtgatgctggtacaacccagagtagaatttattctgtctttcattgaccacattgctggagatgaggatcacacagatggagtagtagcttgtgctgctggactaataggggacttatgtacagcatttgggaaggatgtactgaaattagtagaagctaggccaatgatccatgaattgttaactgaagggcggagatcgaagactaacaaagcaaaaacccttgctacatgggcaacaaaagaactgaggaaactgaagaaccaagcttgatctgttaccattgggatgataacctgaggacccccactggaaatctcccatcttttgaaaaacctggaagtgaggagtgtgcacggatgctgaatgtttgggaatgagaggatgagtgagtgaggcttgaaaacacaccacattgaaaatcctgccacagcagcagccgcagccgccaacagcagcgctgttagtgagctaagtaagcactgacttcgtagaaaaccataacatcggccatcttggaaaagagaaaaacaatggagttacttatttaaaaaaaaagaaagaaagttatctcttcccaggagaggctagaagtagcttttctgtcttttggccagtgccgagtggaatgcctggtttgggggaggaggagggactgggttcagctgtggtgctttgttgtaaaaggcagcctggcctttgctactgaggagaaagatggagcctgggtctcaagcccaccttcgctgtacctttgccacatggtactgtatgcttgccagctagaaggagggtcagggattttttacagtctgagaatgagtgtgtgtgagtgaggcggtatccacattttcaacttcaagtcattgcagtttctttttcccagaaaacaaggggttagatgttgcatttcataaaactaaccgaagttttgtttactgatgcagcacaagagatgtaaaaaaaaaaaaaaaaaaaaaaaaaaaaacacacacacagaggaaagacgctctttaggttttgttttgttttttttttttggttttgttttttgttttttttactctagggaaaacactgacgaatggtcagagctcctatcctgatcttttcatcaaggcgcctttcctaataatatggttcaactgtgaatgtagaagtgggggggaggggggagaaaaagaaaactctggcgttagaggatatagaaaaatataagtacaattgttacaaataacgcagacttcaaaaacaaaaaaatcacaacccaaacaaaccaaaatttaaatgatcagaattggcagcacaaagaaaacgccctctcctgacttgtattgtggcagtctgaacgcccccagaaaattgtgccaaagagtttagaaaaataaatatacaataaaagtaaacacatacacacaaaacagcaaacttcaggtaactattttggattgcaaacaggataaattaaatgttcaaacaatctgataaaataaccatttgg

SEQ ID NO: 127016 - DNA, 3168 bp, Artificial Sequence
  derived and/or modified sequence
gttgccgggcacctcccgccttcccgcgccccgaccccgaactcctctccttagttctcccgggcaccctatcctatcaacgcctactatcccagccaatcgcgcaggatccgagtcgtgcctccggtccaccctcctcccagcgctcagccggtctgagctcaaggcctttaccaagcccacccaatcaacggcgggctctctcctaccccatcccaatctccctcccctcggccaatccgcgcgctccattccgctgcccgcccagccaacccgggccttgaaaccagcaggcgaatgggcgcgagacggcccttcgacgctgagcgcctggccagttagggattccgcgtggccaggacaacggccaatcgtcgtggagcgcggcgcctccgcggagagcccactttccttgtggaactgtccagagtgctggcaaatccaggaaacagtcaggttgccagagttgcagctggtctacaaatcaagaactctttgacatctaaagatccagatatcaaggcacaatatcagcagaggtggcttgctattgatgctaatgctcgacgagaagtcaagaactatgttttgcagacattgggtacagaaacttaccggcctagttctgcctcacagtgtgtggctggtattgcttgtgcagagatcccagtaaaccagtggccagaactcattcctcagctggtggccaatgtcacaaaccccaacagcacagagcacatgaaggagtcgacattggaagccatcggttatatttgccaagatatagacccagagcagctacaagataaatccaatgagattctgactgccataatccaggggatgaggaaagaagagcctagtaataatgtgaagctagctgctacgaatgcactcctgaactcattggagttcaccaaagcaaactttgataaagagtctgaaaggcactttattatgcaggtggtctgtgaagccacacagtgtccagatacgagggtacgagtggctgctttacagaatctggtgaagataatgtccttatattatcagtacatggagacatatatgggtcctgctctttttgcaatcacaatcgaagcaatgaaaagtgacattgatgaggtggctttacaagggatagaattctggtccaatgtctgtgatgaggaaatggatttggccattgaagcttcagaggcagcagaacaaggacggccccctgagcacaccagcaagttttatgcgaagggagcactacagtatctggttccaatcctcacacagacactaactaaacaggacgaaaatgatgatgacgatgactggaacccctgcaaagcagcaggggtgtgcctcatgcttctggccacctgctgtgaagatgacattgtcccacatgtcctccccttcattaaagaacacatcaagaacccagattggcggtaccgggatgcagcagtgatggcttttggttgtatcttggaaggaccagagcccagtcagctcaaaccactagttatacaggctatgcccaccctaatagaattaatgaaagaccccagtgtagttgttcgagatacagctgcatggactgtaggcagaatttgtgagctgcttcctgaagctgccatcaatgatgtctacttggctcccctgctacagtgtctgattgagggtctcagtgctgaacccagagtggcttcaaatgtgtgctgggctttctccagtctggctgaagctgcttatgaagctgcagacgttgctgatgatcaggaagaaccagctacttactgcttatcttcttcatttgaactcatagttcagaagctcctagagactacagacagacctgatggacaccagaacaacctgaggagttctgcatatgaatctctgatggaaattgtgaaaaacagtgccaaggattgttatcctgctgtccagaaaacgactttggtcatcatggaacgactgcaacaggttcttcagatggagtcacatatccagagcacatccgatagaatccagttcaatgaccttcagtctttactctgtgcaactcttcagaatgttcttcggaaagtgcaacatcaagatgctttgcagatctctgatgtggttatggcctccctgttaaggatgttccaaagcacagctgggtctgggggagtacaagaggatgccctgatggcagttagcacactggtggaagtgttgggtggtgaattcctcaagtacatggaggcctttaaacccttcctgggcattggattaaaaaattatgctgaataccaggtttgtttggcagctgtgggcttagtgggagacttgtgccgtgccctgcaatccaacatcatacctttctgtgacgaggtgatgcagctgcttctggaaaatttggggaatgagaacgtccacaggtctgtgaagccgcagattctgtcagtgtttggtgatattgcccttgctattggaggagagtttaaaaaatacttagaggttgtattgaatactcttcagcaggcctcccaagcccaggtggacaagtcagactatgacatggtggattatctgaatgagctaagggaaagctgcttggaagcctatactggaatcgtccagggattaaagggggatcaggagaacgtacacccggatgtgatgctggtacaacccagagtagaatttattctgtctttcattgaccacattgctggagatgaggatcacacagatggagtagtagcttgtgctgctggactaataggggacttatgtacagcatttgggaaggatgtactgaaattagtagaagctaggccaatgatccatgaattgttaactgaagggcggagatcgaagactaacaaagcaaaaacccttgctacatgggcaacaaaagaactgaggaaactgaagaaccaagcttgatctgttaccattgggatgataacctgaggacccccactggaaatctcccatcttttgaaaaacctggaagtgaggagtgtgcacggatgctgaatgtttgggaatgagaggatgagtgagtgaggcttgaaaacacaccacattgaaaatcctgccacagcagcagccgcagccgccaacagcagcgctgttagtgagctaagtaagcactgacttcataaaataaccatttgg

SEQ ID NO: 127017 - DNA, 2989 bp, Artificial Sequence
  derived and/or modified sequence
atttaaggggtccggagaaaatgaagctaagtccgctagagactggtcctttgtataaaaatgtgggatggattggttgaaacagcctagatgccagttaagtttctctttggtgtccatctcctgttgggggatggggtcagagggaaggattggatgatgcttgacatctttgagaaagcccactttccttgtggaactgtccagagtgctggcaaatccaggaaacagtcaggttgccagagttgcagctggtctacaaatcaagaactctttgacatctaaagatccagatatcaaggcacaatatcagcagaggtggcttgctattgatgctaatgctcgacgagaagtcaagaactatgttttgcagacattgggtacagaaacttaccggcctagttctgcctcacagtgtgtggctggtattgcttgtgcagagatcccagtaaaccagtggccagaactcattcctcagctggtggccaatgtcacaaaccccaacagcacagagcacatgaaggagtcgacattggaagccatcggttatatttgccaagatatagacccagagcagctacaagataaatccaatgagattctgactgccataatccaggggatgaggaaagaagagcctagtaataatgtgaagctagctgctacgaatgcactcctgaactcattggagttcaccaaagcaaactttgataaagagtctgaaaggcactttattatgcaggtggtctgtgaagccacacagtgtccagatacgagggtacgagtggctgctttacagaatctggtgaagataatgtccttatattatcagtacatggagacatatatgggtcctgctctttttgcaatcacaatcgaagcaatgaaaagtgacattgatgaggtggctttacaagggatagaattctggtccaatgtctgtgatgaggaaatggatttggccattgaagcttcagaggcagcagaacaaggacggccccctgagcacaccagcaagttttatgcgaagggagcactacagtatctggttccaatcctcacacagacactaactaaacaggacgaaaatgatgatgacgatgactggaacccctgcaaagcagcaggggtgtgcctcatgcttctggccacctgctgtgaagatgacattgtcccacatgtcctccccttcattaaagaacacatcaagaacccagattggcggtaccgggatgcagcagtgatggcttttggttgtatcttggaaggaccagagcccagtcagctcaaaccactagttatacaggctatgcccaccctaatagaattaatgaaagaccccagtgtagttgttcgagatacagctgcatggactgtaggcagaatttgtgagctgcttcctgaagctgccatcaatgatgtctacttggctcccctgctacagtgtctgattgagggtctcagtgctgaacccagagtggcttcaaatgtgtgctgggctttctccagtctggctgaagctgcttatgaagctgcagacgttgctgatgatcaggaagaaccagctacttactgcttatcttcttcatttgaactcatagttcagaagctcctagagactacagacagacctgatggacaccagaacaacctgaggagttctgcatatgaatctctgatggaaattgtgaaaaacagtgccaaggattgttatcctgctgtccagaaaacgactttggtcatcatggaacgactgcaacaggttcttcagatggagtcacatatccagagcacatccgatagaatccagttcaatgaccttcagtctttactctgtgcaactcttcagaatgttcttcggaaagtgcaacatcaagatgctttgcagatctctgatgtggttatggcctccctgttaaggatgttccaaagcacagctgggtctgggggagtacaagaggatgccctgatggcagttagcacactggtggaagtgttgggtggtgaattcctcaagtacatggaggcctttaaacccttcctgggcattggattaaaaaattatgctgaataccaggtttgtttggcagctgtgggcttagtgggagacttgtgccgtgccctgcaatccaacatcatacctttctgtgacgaggtgatgcagctgcttctggaaaatttggggaatgagaacgtccacaggtctgtgaagccgcagattctgtcagtgtttggtgatattgcccttgctattggaggagagtttaaaaaatacttagaggttgtattgaatactcttcagcaggcctcccaagcccaggtggacaagtcagactatgacatggtggattatctgaatgagctaagggaaagctgcttggaagcctatactggaatcgtccagggattaaagggggatcaggagaacgtacacccggatgtgatgctggtacaacccagagtagaatttattctgtctttcattgaccacattgctggagatgaggatcacacagatggagtagtagcttgtgctgctggactaataggggacttatgtacagcatttgggaaggatgtactgaaattagtagaagctaggccaatgatccatgaattgttaactgaagggcggagatcgaagactaacaaagcaaaaacccttgctacatgggcaacaaaagaactgaggaaactgaagaaccaagcttgatctgttaccattgggatgataacctgaggacccccactggaaatctcccatcttttgaaaaacctggaagtgaggagtgtgcacggatgctgaatgtttgggaatgagaggatgagtgagtgaggcttgaaaacacaccacattgaaaatcctgccacagcagcagccgcagccgccaacagcagcgctgttagtgagctaagtaagcactgacttcgtagaaaaccataacatcggccatcttggaaaagagaaaaacaatggagttacttattt

SEQ ID NO: 127018 - DNA, 2631 bp, Artificial Sequence
  derived and/or modified sequence
atggagctgatcaccatcctggagaagacagtgtccccagaccggctggagctggaggccgcccagaagttcctggagagagctgctgtggagaacctgcccaccttcctggtggagctgagccgggtgctggccaaccctggcaacagccaggtggcccgggtggccgccggcctgcagatcaagaacagcctgaccagcaaggaccctgacatcaaggcccagtaccagcagcgctggctggccattgatgccaatgcccggcgggaggtgaagaactacgtgctgcagaccctgggcacagagacctaccggcccagcagcgccagccagtgtgtggccggcatcgcctgtgccgagatccctgtgaaccagtggccagagctgatcccccagctggtggccaacgtgaccaaccccaacagcacagagcacatgaaggagagcaccctggaggccatcggctacatctgccaggacattgatcctgagcagctgcaggacaagagcaatgagatcctgacagccatcatccagggcatgaggaaggaggagcccagcaacaacgtgaagctggccgccaccaatgccctgctgaacagcctggagttcaccaaggccaactttgacaaggagagcgagcggcacttcatcatgcaggtggtgtgtgaggccacccagtgcccagacaccagggtgcgggtggccgccctgcagaacctggtgaagatcatgagcctgtactaccagtacatggagacctacatgggccctgccctgtttgccatcaccatcgaggccatgaagagtgacattgatgaggtggccctgcagggcatcgagttctggagcaatgtgtgtgatgaggagatggacctggccatcgaggccagcgaggccgctgagcagggccggcccccagagcacaccagcaagttctacgccaagggggccctgcagtacctggtgcccatcctgacccagaccctgaccaagcaggatgaaaatgatgatgatgatgactggaacccctgcaaggccgccggcgtgtgcctgatgctgctggccacctgctgtgaagatgacatcgtgccccacgtgctgcccttcatcaaggagcacatcaagaacccagactggagatacagagatgctgctgtgatggccttcggctgcatcctggagggccctgagcccagccagctgaagcccctggtgatccaggccatgcccaccctcatcgagctgatgaaggaccccagcgtggtggtgcgggacacagctgcctggacagtgggccgcatctgtgagctgctgcctgaggccgccatcaatgatgtgtacctggcccccctgctgcagtgcctgattgagggcctgtctgctgagccccgggtggccagcaatgtgtgctgggccttcagcagcctggccgaggccgcctatgaggccgcagatgtggctgatgaccaggaggagcccgccacctactgcctgagcagcagctttgagctgattgtgcagaagctgctggagaccacagacagaccagatggccaccagaacaacctgcggagcagcgcctatgagagcctgatggagatcgtgaagaacagcgccaaggactgctacccagctgtgcagaagaccaccctggtgatcatggagcggctgcagcaggtgctgcagatggagagccacatccagagcaccagtgaccgcatccagttcaatgacctgcagagcctgctgtgtgccaccctgcagaatgtgctgaggaaggtgcagcaccaggatgccctgcagatcagtgatgtggtgatggccagcctgctgaggatgttccagagcacagctggcagcggaggagtgcaggaggatgccctgatggctgtgtccaccctggtggaggtgctgggcggggagttcctgaagtacatggaggccttcaagcccttcctgggcatcggcctgaagaactatgcagagtaccaggtgtgcctggccgctgtgggcctggtgggggacctgtgccgggccctgcagagcaacatcatccccttctgtgatgaggtgatgcagctgctgctggagaacctgggcaatgaaaatgtgcacaggtctgtgaagccccagatcctgtctgtgtttggagacatcgccctggccatcggcggggagttcaagaagtacctggaggtggtgctgaacaccctgcagcaggccagccaggcccaggtggacaagagtgactatgacatggtggactacctgaatgagctgcgggagagctgcctggaggcctacacaggcatcgtgcagggcctgaagggggaccaggagaatgtgcacccagatgtgatgctggtgcagccccgggtggagttcatcctgtccttcatcgaccacatcgctggagatgaggaccacacagatggagtggtggcctgtgccgccggcctcatcggggacctgtgcacagccttcggcaaggatgtgctgaagctggtggaggcccggcccatgatccacgagctgctgacagagggcagaagaagcaagaccaacaaggccaagaccctggccacctgggccaccaaggagctgaggaagctgaagaaccaggcctag

SEQ ID NO: 127019 - DNA, 2631 bp, Artificial Sequence
  derived and/or modified sequence
atggagctgatcaccatcctggagaagaccgtgagccccgaccggcttgaactcgaggcagcccagaaattcctggaacgcgccgctgtggagaacttacctacctttctggtcgagctcagtagagtacttgccaatcctggcaattcacaagtggctcgtgtagctgcaggcctgcagatcaagaactctctgacgtccaaagatcccgatatcaaggcccagtaccagcagagatggctcgccattgacgccaacgcccgaagggaagtcaagaattatgtgctgcagacactcggcactgagacttacagaccatccagcgcttcccagtgcgtagcagggatcgcatgtgctgagattccagtgaaccaatggccagagctaattcctcagctggtggccaacgtcactaatcctaatagcacagaacacatgaaggagtcaactctggaagctattgggtatatttgccaggatatcgatcctgaacagctccaggacaagtctaacgaaatcctgacagccatcatccaggggatgcgtaaagaagaacccagcaataatgtcaaactggcagcaacgaacgccctgcttaactccctggaattcacgaaggccaatttcgacaaagagtcagagcggcacttcattatgcaggtggtgtgcgaggccacacagtgccctgacacccgcgtaagggtggccgctctccagaacctggtcaagataatgtccctgtattaccagtatatggagacatatatgggccctgccttgtttgccataacaatcgaggccatgaagagcgacatcgacgaagtcgccctgcagggaattgagttctggtcaaatgtatgtgatgaggaaatggacttggccatcgaggcttctgaagcagccgaacaaggccgtccaccagagcacacatccaagttttatgctaagggggccctgcagtatctggtgcctatcctgactcaaactctgacgaaacaagatgaaaacgatgatgatgacgattggaacccttgtaaagccgccggggtgtgcttgatgcttttggccacatgttgtgaggatgatattgtaccgcacgttctgccttttattaaggagcatattaaaaaccctgattggcgttatcgtgacgccgccgtgatggccttcggctgtatactggaaggtccagagcctagtcaactcaaacctctcgttatacaggcgatgccaacccttatcgaactgatgaaagatccgtccgtggtggtccgagacacagcagcatggaccgtgggccgcatctgcgagcttctgcctgaggccgctatcaacgatgtctatctcgccccactgctgcagtgcctgatcgagggactaagtgccgaaccccgagtcgcaagtaatgtgtgttgggctttttcatctctggctgaagctgcctatgaggccgccgatgtagccgacgaccaagaggagcccgctacatactgtttaagctcctcctttgaactgattgtgcaaaagctcctggagaccaccgaccgccctgacggacaccaaaacaatttaaggtcctctgcctatgagtccctcatggaaattgtgaaaaattccgcaaaggactgctatccggctgtgcagaaaactaccctggtcatcatggagaggcttcaacaagttctgcagatggagagtcacatccagtctacttccgacaggattcagttcaatgacctacagtcgctactgtgtgcaaccctgcaaaatgtgcttcgaaaagtacagcaccaggacgcattacaaatcagcgatgtagttatggccagcttgctgagaatgttccagtcaactgcaggctctgggggagtccaagaagacgccctaatggcagtgagtaccctagtggaggtgctaggtggggaattccttaaatacatggaagccttcaaaccgtttcttggcatcggcctgaaaaattatgctgaataccaggtgtgccttgctgcagtcggtctggtcggagacttgtgtagggccttgcagtccaatataatccccttctgcgatgaagtcatgcagctgctgctagaaaatctgggcaatgaaaacgtgcatcgctccgtcaaaccacaaattctttccgtattcggtgatattgccctcgcaattgggggggaattcaagaagtatctggaggtagttctcaacacactgcagcaagcctcacaggcccaggttgacaagtctgattatgacatggtggactatctgaacgagctccgtgaatcatgtcttgaggcatatactgggatcgtgcagggcctgaaaggcgatcaggagaacgttcacccagacgtgatgctggtgcaacctagagtagaattcatcctaagtttcatcgaccacatcgcaggagacgaggaccacaccgacggggtcgtggcatgtgccgccggattgatcggcgacctgtgcactgcctttggtaaagacgtgttgaagttggtcgaggctcggccaatgatccacgagctcttgacagaaggtaggagaagtaaaaccaacaaggccaaaaccctagctacctgggccaccaaggagctgcgcaaactgaagaatcaggcatag

SEQ ID NO: 127020 - DNA, 2631 bp, Artificial Sequence
  derived and/or modified sequence
atggagctgattactattctcgagaagaccgtgtcacctgacaggctggaacttgaggcggctcagaagttcctcgaaagggcggcagtggaaaacctgcctacatttctggtggagctctcccgcgttctcgctaatccgggaaattctcaagtcgccagagtagcagccggattgcaaatcaagaattctttgacttctaaagacccggacattaaggctcagtaccaacagagatggttggctatagatgccaacgccaggcgcgaagtcaaaaactacgtccttcagacactaggtaccgaaacctatcgtccaagctccgcaagccagtgtgtagctggcattgcctgtgccgagatcccagtaaaccagtggccggaactcatcccccaattagtggccaatgttactaatcctaactcgacggaacacatgaaggagagcactctggaagccatcggatatatatgccaggacattgacccagagcagctgcaggacaagtcgaatgagattcttacagccatcattcagggcatgaggaaagaggaaccgtccaacaacgtcaagcttgctgctacgaatgcacttcttaactctctcgaattcaccaaggctaacttcgacaaagagagcgagagacatttcatcatgcaggtggtgtgtgaggcaactcagtgcccggatacccgagtccgggtggccgcactgcaaaacttggtcaaaataatgagtctatactaccagtacatggaaacttacatgggacctgctctgttcgccattaccattgaggcgatgaagtccgacatcgatgaggttgcgctgcagggaattgagttttggtcaaacgtctgcgatgaagaaatggacttagctatcgaagcatccgaggccgctgaacaggggcgtcctccagaacatacatccaaattctacgctaaaggcgcactgcagtatttggtgcccatcctgacccagaccctcacgaagcaagacgagaacgatgatgatgatgactggaatccatgtaaagccgctggagtgtgcctgatgcttttagctacttgttgcgaggacgacatcgtgcctcatgtcttgccttttatcaaagagcacattaaaaaccctgactggcggtatagggacgctgctgtcatggctttcgggtgtattctggaaggtccggagccgtctcaactgaagcctctggtcattcaagccatgcccacactcattgaattaatgaaagacccttcagtggtagtcagagatacagcagcctggaccgtcggacgaatatgtgaactgttgcctgaggccgcaattaacgacgtctacttggccccactcctgcagtgtctcatcgaaggcctttcagcggagccccgagttgccagtaacgtgtgctgggctttcagttccctggcagaggccgcatatgaggcagcggatgttgccgacgatcaagaagagccagctacttattgcttaagttcctccttcgaactgatcgtgcagaagctacttgagacgacagacagacccgatggacaccagaacaacctgaggagctccgcttacgagtccctcatggagatcgttaagaattcagcaaaggattgctacccagcggtgcagaagaccaccctcgtgattatggagagattgcagcaggtactgcagatggaatcacacatacaatccacgtctgacagaatccagtttaatgacttgcagtcactgctgtgtgccacactgcagaacgtgttgaggaaggtgcagcaccaggacgcccttcagatcagcgatgtggtgatggctagtctgctccgaatgtttcaaagcaccgctggctccggcggagtccaagaggatgcgctcatggcagtatctacactcgtcgaggtgctgggaggagagttcttgaagtacatggaagcgttcaagccgttcctgggcatcggcctgaagaactacgctgaataccaagtatgcctggcggcagtggggctcgttggagatctttgtagggcactccagtcgaatatcattcctttctgtgatgaggtgatgcagctgctgttagagaatctcggcaatgagaatgtccataggtccgtgaaacctcaaatcctgagtgtttttggcgacatcgccttagcgatcgggggagagttcaaaaaatacctggaagtcgtgctgaatacgctgcagcaagcatcccaggcacaggttgataagagcgactacgatatggtcgactacctgaatgaattgagggaatcctgcttggaagcatacacaggtattgtacagggactcaagggagaccaggagaacgtgcatccggacgtgatgctggttcagcccagagtggaattcattctatccttcatcgatcacatagccggagacgaagaccacaccgatggcgtggtggcctgtgccgcaggattgattggtgatctgtgtaccgccttcggtaaagatgtgttgaagctggtggaagccaggccaatgatccacgagctgctcaccgagggacggagatctaagactaacaaggcaaagacattggcaacctgggcgactaaagaactgaggaaattaaagaatcaagcctag

SEQ ID NO: 127021 - DNA, 2631 bp, Artificial Sequence
  derived and/or modified sequence
atggagctgatcaccatcctggagaagaccgtgagccccgacagactggagctggaggccgcccagaagttcctggagagagccgccgtggagaacctgcccaccttcctggtggagctgagcagagtgctggccaaccccggcaacagccaggtggccagagtggccgccggcctgcagatcaagaacagcctgaccagcaaggaccccgacatcaaggcccagtaccagcagagatggctggccatcgacgccaacgccagaagagaggtgaagaactacgtgctgcagaccctgggcaccgagacctacagacccagcagcgccagccagtgcgtggccggcatcgcctgcgccgagatccccgtgaaccagtggcccgagctgatcccccagctggtggccaacgtgaccaaccccaacagcaccgagcacatgaaggagagcaccctggaggccatcggctacatctgccaggacatcgaccccgagcagctgcaggacaagagcaacgagatcctgaccgccatcatccagggcatgagaaaggaggagcccagcaacaacgtgaagctggccgccaccaacgccctgctgaacagcctggagttcaccaaggccaacttcgacaaggagagcgagagacacttcatcatgcaggtggtgtgcgaggccacccagtgccccgacaccagagtgagagtggccgccctgcagaacctggtgaagatcatgagcctgtactaccagtacatggagacctacatgggccccgccctgttcgccatcaccatcgaggccatgaagagcgacatcgacgaggtggccctgcagggcatcgagttctggagcaacgtgtgcgacgaggagatggacctggccatcgaggccagcgaggccgccgagcagggcagaccccccgagcacaccagcaagttctacgccaagggcgccctgcagtacctggtgcccatcctgacccagaccctgaccaagcaggacgagaacgacgacgacgacgactggaacccctgcaaggccgccggcgtgtgcctgatgctgctggccacctgctgcgaggacgacatcgtgccccacgtgctgcccttcatcaaggagcacatcaagaaccccgactggagatacagagacgccgccgtgatggccttcggctgcatcctggagggccccgagcccagccagctgaagcccctggtgatccaggccatgcccaccctgatcgagctgatgaaggaccccagcgtggtggtgagagacaccgccgcctggaccgtgggcagaatctgcgagctgctgcccgaggccgccatcaacgacgtgtacctggcccccctgctgcagtgcctgatcgagggcctgagcgccgagcccagagtggccagcaacgtgtgctgggccttcagcagcctggccgaggccgcctacgaggccgccgacgtggccgacgaccaggaggagcccgccacctactgcctgagcagcagcttcgagctgatcgtgcagaagctgctggagaccaccgacagacccgacggccaccagaacaacctgagaagcagcgcctacgagagcctgatggagatcgtgaagaacagcgccaaggactgctaccccgccgtgcagaagaccaccctggtgatcatggagagactgcagcaggtgctgcagatggagagccacatccagagcaccagcgacagaatccagttcaacgacctgcagagcctgctgtgcgccaccctgcagaacgtgctgagaaaggtgcagcaccaggacgccctgcagatcagcgacgtggtgatggccagcctgctgagaatgttccagagcaccgccggcagcggcggcgtgcaggaggacgccctgatggccgtgagcaccctggtggaggtgctgggcggcgagttcctgaagtacatggaggccttcaagcccttcctgggcatcggcctgaagaactacgccgagtaccaggtgtgcctggccgccgtgggcctggtgggcgacctgtgcagagccctgcagagcaacatcatccccttctgcgacgaggtgatgcagctgctgctggagaacctgggcaacgagaacgtgcacagaagcgtgaagccccagatcctgagcgtgttcggcgacatcgccctggccatcggcggcgagttcaagaagtacctggaggtggtgctgaacaccctgcagcaggccagccaggcccaggtggacaagagcgactacgacatggtggactacctgaacgagctgagagagagctgcctggaggcctacaccggcatcgtgcagggcctgaagggcgaccaggagaacgtgcaccccgacgtgatgctggtgcagcccagagtggagttcatcctgagcttcatcgaccacatcgccggcgacgaggaccacaccgacggcgtggtggcctgcgccgccggcctgatcggcgacctgtgcaccgccttcggcaaggacgtgctgaagctggtggaggccagacccatgatccacgagctgctgaccgagggcagaagaagcaagaccaacaaggccaagaccctggccacctgggccaccaaggagctgagaaagctgaagaaccaggcctag

SEQ ID NO: 127022 - protein, 521 aa, Artificial Sequence
  derived and/or modified sequence
MAENPSLENHRIKSFKNKGRDVETMRRHRNEVTVELRKNKRDEHLLKKRNVPQEESLEDSDVDADFKAQNVTLEAILQNATSDNPVVQLSAVQAARKLLSSDRNPPIDDLIKSGILPILVKCLERDDNPSLQFEAAWALTNIASGTSAQTQAVVQSNAVPLFLRLLRSPHQNVCEQAVWALGNIIGDGPQCRDYVISLGVVKPLLSFISPSIPITFLRNVTWVIVNLCRNKDPPPPMETVQEILPALCVLIYHTDINILVDTVWALSYLTDGGNEQIQMVIDSGVVPFLVPLLSHQEVKVQTAALRAVGNIVTGTDEQTQVVLNCDVLSHFPNLLSHPKEKINKEAVWFLSNITAGNQQQVQAVIDAGLIPMIIHQLAKGDFGTQKEAAWAISNLTISGRKDQVEYLVQQNVIPPFCNLLSVKDSQVVQVVLDGLKNILIMAGDEASTIAEIIEECGGLEKIEVLQQHENEDIYKLAFEIIDQYFSGDDIDEDPCLIPEATQGGTYNFDPTANLQTKEFNF

SEQ ID NO: 127023 - DNA, 1566 bp, Artificial Sequence
  derived and/or modified sequence
atggcagagaacccttctctagagaatcaccgaatcaagtcatttaagaacaaaggcagggatgtcgagacaatgagacgtcaccggaacgaggtgaccgttgagctgcgaaagaacaagagggatgagcatctgttgaagaagcgaaatgtgcctcaggaggagtctctggaggactcagacgtggacgctgactttaaagcccaaaatgttactttggaagcgatccttcagaatgccacaagtgacaaccctgtggtgcaactcagtgcagtgcaggctgccagaaagctgctgtcgagtgatcggaacccccccattgatgacctgatcaagtctggaattctcccaatcttagtcaaatgcctcgaaagggatgacaacccctcattgcaatttgaggccgcgtgggctttgaccaatattgcctccggtacctctgcccagacgcaggccgtggtacaatctaacgcagtaccgctgttcttacgcctcctaaggagcccccaccagaatgtctgcgagcaggccgtatgggctctgggcaacatcatcggtgacggaccccagtgtcgagattacgtgatttctctgggggtcgtcaagccgctcctctcttttatatccccttctatcccaattaccttcttgaggaatgtgacatgggtcatcgtgaacctatgtagaaacaaggacccccccccgcctatggaaactgtgcaggaaatactccccgcactttgcgtgcttatttatcatacagatatcaacattttagtggatacagtgtgggcccttagttatctaacggatggggggaatgagcagatacagatggtcatcgattcgggcgtggtgccgtttctagtgccgctgttgagccaccaggaggtcaaggtgcaaacagcggcacttagagccgtcggaaacattgttaccggcacagatgagcagacccaggttgtgctcaactgtgacgtgctctctcactttcccaatctactgagccatcccaaggagaaaataaacaaggaggccgtgtggttccttagcaatatcaccgccggtaaccagcagcaggttcaggctgtgattgatgccggactgattcccatgatcattcaccaactagcaaagggggacttcggcactcagaaggaagctgcatgggctatatcaaacctgaccatctcaggtcggaaagaccaggtggagtatcttgtccaacaaaacgtcatccctccgttctgtaatttactgtccgttaaggactcacaggttgtccaggttgtgctcgatgggttgaaaaatatcctaataatggctggtgatgaggcctctacaattgctgagataatcgaggagtgcggcggcctcgagaagattgaggtgctacaacagcacgagaatgaggatatctacaagcttgcttttgaaatcattgaccaatacttctctggcgacgacatcgatgaggatccatgtctcattcctgaggcgacacagggcggcacatacaactttgatcctacagccaacttgcagaccaaggagttcaatttttag

SEQ ID NO: 127024 - DNA, 4470 bp, Artificial Sequence
  derived and/or modified sequence
gccccgcgcctgaggggcagtaaaagtcgccaggtccggctccatttctggcacaaaacttgcagcaccgaggggttgtggagagcccttgcaggggaagagggcagggtcatcccgagaaccaacgggcacgtatagcccggcgaacgcccaagccggtcaccgcccccggtcacgtgtcgccagcctccgcggccgcgcgccgctctcagcaccgttcccgccccacccggcccggcagtcggcccgcgcctcccccggcgctactgccacctcgcgctcggaggcgtcacagaacgtgctcttctctcccctcccccctcccgctctccccctcctccccctcccgctccaagattcgccgccgccgccgccgcagccgcaggagtagccgccgccggagccgcgcgcagccatggccgagaaccccagcttggagaaccaccgcatcaagagcttcaagaacaagggccgcgatgtggaaacaatgcgaagacatagaaatgaagtgacagtggaactgcggaagaacaaaagagatgaacacttattgaaaaagagaaatgttccccaagaagaaagtctagaagattcagatgttgatgctgattttaaagcacaaaatgtaaccctagaagctatattgcagaatgccacaagtgataacccagtggtccaattgagtgctgtccaggcagcaagaaaactgttatccagtgacagaaatccaccgattgatgacttaataaaatctgggattttaccaattctagtcaaatgtctagaaagggatgataatccttcattacagtttgaagctgcttgggcattaactaacatagcatcaggaacttctgcacagactcaagctgttgtgcagtctaatgcagtacctctttttctgagacttcttcgttcaccacatcagaatgtttgtgaacaagcagtatgggctttgggaaacattataggtgatggtcctcaatgtagagattatgtcatatcactgggagttgtcaaacctcttctgtccttcatcagtccctccatccccatcaccttccttcggaacgtcacatgggtcattgtcaatctctgcaggaataaggatcccccgccgcctatggagacagttcaggagattttgccagctttatgtgtcctcatataccatacagatataaacattcttgtagacactgtttgggctctgtcatacttgacagatggaggtaatgaacagatacagatggttattgattcaggagttgtgccctttcttgtgccccttctgagccatcaggaagtcaaagttcaaacagcagccctcagagcagttggcaacatagtgactggcaccgacgagcagacccaggttgttctcaattgtgatgtcctgtcacacttcccaaatctcttatcacacccaaaagagaagataaataaggaagcagtgtggttcctttccaacataacagcaggcaaccagcaacaagttcaagctgtaatagatgctggattaattcctatgataattcatcagcttgctaagggggactttggaacacaaaaagaagctgcttgggcaatcagcaacttaacaataagtggcagaaaagatcaggttgagtaccttgtacagcagaatgtaataccaccgttctgtaatttactgtcagtgaaagattctcaagtggttcaggtggttctagatggtctaaaaaacattctgataatggccggtgatgaagcaagcacaatagctgaaataatagaggaatgtggaggtttggagaaaattgaagttttacagcaacatgaaaatgaagacatatataaattagcatttgaaatcatagatcagtatttctctggtgatgatattgatgaagatccctgcctcattcctgaagcaacacaaggaggtacctacaattttgatccaacagccaaccttcaaacaaaagaatttaatttttaaattcagttgagtgcagcatctttcccacattcaatatgaagcaccaccagatggctaccaaatgataagaacaacagcaacaaaaggctccaaaacacacatgcctctttgttttgatgcttctaaagcaagccatgtctcagtcactttgcagttgccaaaagtcactatcacatggactgtaaatgcatatgcatgatttcctaaactgttttagaactctccttaacaatctcaactaccctatttttccctgttccctggtgccacaggctgacaactgcagtctccagtttagaataaatattccatagtggtgacatgtcagctgcccactgatactcctttggaaaatggtgcgctgtggatcaagacactttggtatgatgcatatacaagttggaagactaaagaggtgcagtgtgatctgagcctccatcattgtcctccacaaacatattttcatattctttatgtggaagaatagattttaaagtacaagccaaatgattttcattggtggaactgacacaaaaaaagtaacttaaaaacaagaaacttggttattgaataaacagataagtttaaaaaaaaaaaaaaactacttcatctaccagtaattgatgtgtttattatctgcctcagaagccagggttggaggaagaactttagatatggatattaatgcttttgccattatacctaatttttgagaacagcaagccctatttgaccactctcttcagcctgtgtgttcctgctgttttgaagtaatcaaatgctgtgcatggtattttacctgagctgcaacctgttatggacttgaacttctgtttaagttgaaagcaagagtccctgagtataaaggaaaaacagcaaaacaaaaagcaaacaaaaaaaaactgcaaaagtctaaaatacccattggtgatgttttttaaaaaaatcttgctttcagctttcaggagttaatattctttgttttaatttgataattggatatggttgatttatattgggtttaaactgtggagctttcatgtttactgtaatttagtcttaaaatattttttacttagtaaccagtgcttttgataatgtggttggcaacaaaccagcaactatttagaagtgtcataagagttcattctttgagtattgggaaagttaattcagatcctactcaaaaagcatcttcacatattaaaagattcagacagggatctgtgtagaggagtaatttgcagttatttaacataaacctgatttgcagtgatctctaagtaattctgcaaaatccggtattactatgtcaagttattgcttttggtaaattgtctgacccagttattaatgaaagaatatggatttaaaaatttttaaactaaataatttgtgctgtcacagaaatggtattgttgctcttgtttactgggtataatttcccaatgcattgatgtgaagggatagaaaatctaaactaatttagttatccattggggggtgtatttactgtgatgaagatgagacagatgccatcagagctttgtgaatcagctggggtgttttcactgataaacaacacatagcaggtgtgcattcattacaaatatatgtatctgccaaggtggagccactttaaagagtgagttttgtcttgtatctaaagtggatacaagcgtatgtttaaactgcaagatttttacttgctagagaatctgttttaatatagtggtttggcctctgattatttataggttttataaattttagaatcaatttctctttaaggtggctcagatttttcaactcttgtgcacataaaattgagttgaagttcattgtgcctttttttctttatccaaattttgagttaaagcttcatatggtaactgcatcctgttcggacactatagtctaaatttttgaaactgtgtggtgttcgctaaaagtaggaataacaacgtaaaagctaattaaggtcacaaacttcggtgaaacccttaaaagtccaaatcttcttgatattgtgaaccgtaccccttccagtttagtttcttctggactttccttacttaactgacagttaccttttaaaatttgcacacattatgattaaaattgggcctctactgtgatgattcctatttcctctcatgttttaaagtgcaaactaacatttaagtgaacattagcatcaagtagtgcagacacttgtatgcatttccttgattcaatttgtgaccttaccagttttgaattggaattgcaccatttcgtagataaaggaaactaagtatattgctgcacttttaagttttcaaaacagtgtttaaaaattgcattgttatttttttttaaactcagtttaaaaagactaaaacgttctttcaaaagaggcatctaaatgtgttcctaattttgtatatgggcttaggttttgtaaccaataaaaaaagctgctatcaaatatgataaaacattgaaaa

SEQ ID NO: 127025 - DNA, 1566 bp, Artificial Sequence
  derived and/or modified sequence
atggccgagaaccccagcctggagaaccaccgcatcaagagcttcaagaacaagggcagagatgtggagaccatgaggaggcacagaaatgaggtgacagtggagctgaggaagaacaagagagatgagcacctgctgaagaagagaaatgtgccccaggaggagagcctggaggacagtgatgtggatgctgacttcaaggcccagaatgtgaccctggaggccatcctgcagaatgccaccagtgacaaccctgtggtgcagctgtctgctgtgcaggccgccaggaagctgctgagcagtgacagaaatccacccattgatgacctgatcaagagcggcatcctgcccatcctggtgaagtgcctggagagagatgacaaccccagcctgcagtttgaagctgcctgggccctgaccaacatcgccagcggcaccagcgcccagacccaggccgtggtgcagagcaatgctgtgcccctcttcctgcggctgctgcggagcccccaccagaatgtgtgtgagcaggccgtgtgggccctgggcaacatcattggagatggcccccagtgccgggactatgtgatcagcctgggcgtggtgaagcccctgctgtccttcatcagccccagcatccccatcaccttcctgagaaatgtgacctgggtgattgtgaacctgtgcaggaacaaggaccccccaccacccatggagaccgtgcaggagatcctgcctgccctgtgtgtgctgatctaccacacagacatcaacatcctggtggacacagtgtgggccctgagctacctgacagatggcggcaatgagcagatccagatggtgattgattctggagtggtgcccttcctggtgcccctgctgagccaccaggaggtgaaggtgcagacagctgccctgcgggctgtgggcaacatcgtgactggaacagatgagcagacccaggtggtgctgaactgtgatgtgctgagccacttccccaacctgctgagccaccccaaggagaagatcaacaaggaggccgtgtggttcctgagcaacatcacagctggcaaccagcagcaggtgcaggccgtgattgatgctggcctcatccccatgatcatccaccagctggccaagggggactttggcacccagaaggaggccgcctgggccatcagcaacctgaccatcagcggcaggaaggaccaggtggagtacctggtgcagcagaatgtcatcccccccttctgcaacctgctgtctgtgaaggacagccaggtggtgcaggtggtgctggatggcctgaagaacatcctgatcatggctggagatgaggccagcaccatcgccgagatcattgaagaatgtggcggcctggagaagattgaggtgctgcagcagcatgaaaatgaagacatctacaagctggcctttgagatcatcgaccagtacttctctggagatgacattgatgaggacccctgcctgatccctgaggccacccagggcggcacctacaactttgaccccacagccaacctgcagaccaaggagttcaacttctag

SEQ ID NO: 127026 - DNA, 1566 bp, Artificial Sequence
  derived and/or modified sequence
atggccgagaaccccagcctggagaaccaccggatcaagagcttcaagaataagggcagggacgtggagaccatgaggcgtcacagaaatgaggttaccgtggaactcagaaaaaacaagcgtgacgaacacctgcttaaaaaacgtaatgtgccccaagaggaatccttggaggacagcgatgtggacgcagactttaaagcccagaacgtgactctggaagcaatattacaaaatgcaacttccgataatccagtagttcagctttccgccgtgcaggccgcaagaaagctgctgtcaagcgataggaatccacccattgacgatctgatcaaatccggaatcctgccaatcctggttaagtgcctggaacgtgatgataaccccagcctacagttcgaagccgcctgggcgttaaccaacatcgcctctggcaccagcgctcaaacgcaagccgtggtccaaagcaacgccgtaccgctgtttttgcgcctactccggtcccctcatcagaatgtttgtgaacaggcggtctgggcactaggaaatattataggtgatggcccccagtgtcgggattatgtcataagcctgggcgtggtgaaacccttgttgagttttatcagcccttcaatccccatcacatttcttaggaacgtaacttgggtcatcgtcaatctatgtaggaataaagaccccccgcccccaatggaaaccgtccaggaaatccttcctgcactgtgcgtgctcatctatcacacagacatcaatattttagtcgacacggtatgggccttgagctatctgacagatggtggaaacgagcaaatccagatggtgatcgacagtggggtggtgccttttttggtgcccctcctgtcacatcaggaggtaaaggttcaaaccgccgcactccgcgcggtcggtaacatcgtaacggggaccgatgagcagacacaggtggtgctgaattgcgatgtgctgtctcacttccccaatctcctgagtcacccaaaagagaagatcaacaaggaagcggtatggttcctgtcaaatatcacagccggcaatcagcagcaggtgcaggccgtgatcgatgcaggcctgatcccgatgatcatacatcaactcgcgaagggcgacttcggcacgcagaaggaggctgcctgggcaatcagcaaccttacaatctcaggacgcaaagaccaggttgagtatttggtccagcaaaacgtcatccctcctttttgtaacctactctccgtgaaggatagccaggtggtacaggtagttctggatggtttaaagaatatcctgatcatggccggcgacgaagcatccacaattgcggaaataatcgaggagtgcggcggactggaaaagatcgaggtgctgcagcaacatgaaaacgaggacatctacaagctggcctttgaaatcatcgaccaatattttagtggcgatgatattgatgaagatccgtgcctcatccccgaggccactcaaggtggcacatacaactttgacccaactgccaaccttcagaccaaggagttcaacttctag

SEQ ID NO: 127027 - DNA, 1566 bp, Artificial Sequence
  derived and/or modified sequence
atggccgaaaatcctagcctcgaaaaccacagaatcaagagctttaagaacaaaggaagagatgtggagacaatgagacgtcaccgtaatgaggttacagtcgagctgaggaaaaacaaacgggatgaacatctcttgaagaaaaggaatgtcccacaagaggaatccctcgaagacagtgatgtagacgcagacttcaaggcccagaacgtgacgttagaggccattttgcaaaatgctactagcgataaccccgttgtccagttgtcggccgtgcaggcggctcggaaactgctgtcatcagaccgcaaccccccaattgacgatttgattaagtccggaattttgccgattctggtaaaatgtctagagcgagatgataatccctccctacagtttgaagctgcctgggcactgaccaacatcgcgagcggtactagcgcgcagacacaggcggtggtgcagagtaacgctgttcctcttttcctgcgacttctacgtagcccacaccagaacgtttgcgaacaggcagtatgggcgttgggcaacatcattggagacggtcctcagtgccgagactacgtcattagcctcggcgtggtaaagcctctgttatcatttatatcgccgtccattcccatcacctttctacggaacgttacatgggtgatcgttaacctctgtcggaacaaggacccacctccgccaatggaaacagtacaggaaatcctaccagcactgtgcgtgcttatctaccatacggatattaacatcttagtcgacactgtctgggcccttagctatctgactgacggaggaaacgagcagattcaaatggttattgactccggcgtcgtgccttttctggtacccctcctgtctcaccaagaagtgaaggtgcagacggcggctcttcgcgcagtcgggaacatcgtcaccgggactgatgagcagacgcaggtggtcctcaactgcgacgtgcttagccattttcccaacctcctgtctcacccaaaggaaaaaattaacaaggaggcagtgtggtttttgagcaacatcacagccggtaatcagcagcaggtgcaagccgtgatcgatgccggactaattccgatgattatccaccagctggcaaagggcgatttcggcactcagaaggaagccgcatgggccatctctaaccttactatctccggacgcaaagaccaggtcgaatatctggtgcaacagaacgtcatcccacctttttgtaatcttctctccgtcaaggattcccaggtcgtgcaggtcgtgctggatggcctaaaaaatatcctgatcatggcaggcgacgaagcctccacgattgccgagattatagaggaatgtggcggactcgagaaaatcgaagtcctgcaacagcacgaaaatgaggatatttataaacttgcctttgaaatcatcgatcagtatttctccggcgacgacatcgatgaggatccttgtttgatcccagaggcgacacaaggaggaacatataactttgatcctacggccaacctgcaaactaaagagtttaacttttag

SEQ ID NO: 127028 - DNA, 1566 bp, Artificial Sequence
  derived and/or modified sequence
atggccgagaaccccagcctggagaaccacagaatcaagagcttcaagaacaagggcagagacgtggagaccatgagaagacacagaaacgaggtgaccgtggagctgagaaagaacaagagagacgagcacctgctgaagaagagaaacgtgccccaggaggagagcctggaggacagcgacgtggacgccgacttcaaggcccagaacgtgaccctggaggccatcctgcagaacgccaccagcgacaaccccgtggtgcagctgagcgccgtgcaggccgccagaaagctgctgagcagcgacagaaacccccccatcgacgacctgatcaagagcggcatcctgcccatcctggtgaagtgcctggagagagacgacaaccccagcctgcagttcgaggccgcctgggccctgaccaacatcgccagcggcaccagcgcccagacccaggccgtggtgcagagcaacgccgtgcccctgttcctgagactgctgagaagcccccaccagaacgtgtgcgagcaggccgtgtgggccctgggcaacatcatcggcgacggcccccagtgcagagactacgtgatcagcctgggcgtggtgaagcccctgctgagcttcatcagccccagcatccccatcaccttcctgagaaacgtgacctgggtgatcgtgaacctgtgcagaaacaaggacccccccccccccatggagaccgtgcaggagatcctgcccgccctgtgcgtgctgatctaccacaccgacatcaacatcctggtggacaccgtgtgggccctgagctacctgaccgacggcggcaacgagcagatccagatggtgatcgacagcggcgtggtgcccttcctggtgcccctgctgagccaccaggaggtgaaggtgcagaccgccgccctgagagccgtgggcaacatcgtgaccggcaccgacgagcagacccaggtggtgctgaactgcgacgtgctgagccacttccccaacctgctgagccaccccaaggagaagatcaacaaggaggccgtgtggttcctgagcaacatcaccgccggcaaccagcagcaggtgcaggccgtgatcgacgccggcctgatccccatgatcatccaccagctggccaagggcgacttcggcacccagaaggaggccgcctgggccatcagcaacctgaccatcagcggcagaaaggaccaggtggagtacctggtgcagcagaacgtgatcccccccttctgcaacctgctgagcgtgaaggacagccaggtggtgcaggtggtgctggacggcctgaagaacatcctgatcatggccggcgacgaggccagcaccatcgccgagatcatcgaggagtgcggcggcctggagaagatcgaggtgctgcagcagcacgagaacgaggacatctacaagctggccttcgagatcatcgaccagtacttcagcggcgacgacatcgacgaggacccctgcctgatccccgaggccacccagggcggcacctacaacttcgaccccaccgccaacctgcagaccaaggagttcaacttctag

SEQ ID NO: 127029 - protein, 521 aa, Artificial Sequence
  derived and/or modified sequence
MADNEKLDNQRLKNFKNKGRDLETMRRQRNEVVVELRKNKRDEHLLKRRNVPHEDICEDSDIDGDYRVQNTSLEAIVQNASSDNQGIQLSAVQAARKLLSSDRNPPIDDLIKSGILPILVHCLERDDNPSLQFEAAWALTNIASGTSEQTQAVVQSNAVPLFLRLLHSPHQNVCEQAVWALGNIIGDGPQCRDYVISLGVVKPLLSFISPSIPITFLRNVTWVMVNLCRHKDPPPPMETIQEILPALCVLIHHTDVNILVDTVWALSYLTDAGNEQIQMVIDSGIVPHLVPLLSHQEVKVQTAALRAVGNIVTGTDEQTQVVLNCDALSHFPALLTHPKEKINKEAVWFLSNITAGNQQQVQAVIDANLVPMIIHLLDKGDFGTQKEAAWAISNLTISGRKDQVAYLIQQNVIPPFCNLLTVKDAQVVQVVLDGLSNILKMAEDEAETIGNLIEECGGLEKIEQLQNHENEDIYKLAYEIIDQFFSSDDIDEDPSLVPEAIQGGTFGFNSSANVPTEGFQF

SEQ ID NO: 127030 - DNA, 1566 bp, Artificial Sequence
  derived and/or modified sequence
atggcagataatgagaaactggataaccagcgcttgaagaatttcaagaataaaggaagggatttagagacgatgagacgccagcgaaacgaggtcgtggtggagttgcgaaagaacaagagagacgagcatctcttaaaaaggcggaacgttcctcacgaggatatttgtgaagacagcgacatcgacggggactatagagtccagaacacctccctcgaagctatcgtccagaatgctagtagtgacaaccaggggattcagctgtctgctgtgcaagccgcaagaaagttgctgtcctctgaccggaatccacctatcgatgatctcataaagagcggtatcctgcccatcctggttcactgtctggaaagagatgataaccccagcctgcagttcgaagcagcgtgggcattgacgaatattgctagcggcacaagtgagcagacccaagccgtagttcagtctaatgctgtgcctctttttttgcggctgctgcacagtcctcatcaaaacgtctgcgagcaggctgtgtgggccctgggcaacatcattggagatggtccccaatgcagagattatgttatatccctcggcgtagttaagccactgctgagctttatcagcccttctataccaattacgtttctgaggaacgtaacctgggtcatggtgaatctgtgccgccacaaagaccccccccctccaatggaaaccatccaggagattttgccggccctctgcgtcctcatccaccacacagacgtgaacatattagttgacacggtttgggccctgagctatcttactgacgcagggaatgagcagatccagatggtgatcgattcaggcatagtgcctcatctggtgcccctgcttagccatcaggaggtgaaggtgcagacagcagccctgagggccgtagggaacattgtgactgggaccgatgaacagacacaggtggttcttaattgtgatgccctttcacactttcccgcattactgacacaccctaaggaaaaaattaacaaggaagcagtgtggttcctgagcaacatcactgccggaaaccagcagcaagtccaggcagtaattgatgctaacttggtccctatgataatccatctcctggacaaaggagactttggtacccagaaggaagccgcatgggccatttcgaacctgacaataagcggcaggaaggatcaagtggcctacctgatccagcaaaacgtcatccccccattttgcaatctgttaacagtcaaagacgctcaggtggtacaagttgtcctggatggcctgagcaacatcctgaaaatggccgaagacgaagcagagaccatcggtaatctcatcgaggagtgtgggggcctggagaaaattgaacagctccagaatcacgaaaatgaagacatctataaattggcctacgagattattgaccagttttttagttctgatgatatcgatgaggaccctagcctcgtacccgaggccatccagggaggaacctttggctttaattcatcagctaacgttccaactgagggtttccagttctag

SEQ ID NO: 127031 - DNA, 8981 bp, Artificial Sequence
  derived and/or modified sequence
gcagcgccggggccctcagatcgaggctgcctccccctctcagccggcagcacattccgtcgccttgccgccgcccggccccacagttgtctttgccggagctgcagtcgcgctggggttagggcgggggggcgggcggggagaggagaaggccgcggcggaggcaggtgagaggaggaaggaagcggcggcgcggcgggcacagcagctcaggcggcggcccggttcctgggagtgtcggtgcggcgcgttggttggggcggatcccgcggggcccgggcgggggaaggagtcaccggcccggccatggcggacaacgagaaactggacaaccaacggctcaagaatttcaagaacaaaggccgcgacttggagactatgagaagacaacgaaatgaagttgtagttgaattaaggaagaataaaagagatgaacatctcttaaagagaaggaatgtaccacatgaagatatctgtgaagactctgatatagatggtgattatagagtgcaaaatacctctctagaagctattgttcaaaatgcttcaagtgataaccaaggaattcaattaagtgcagttcaagctgctaggaagcttttgtccagtgatcgaaatccaccaattgatgacttaataaaatctggaatattgcccattttagtccattgtcttgaaagagatgacaatccttctttacagtttgaagctgcatgggctttgacaaacattgcatctggaacttctgaacaaactcaagcagtagttcagtccaatgctgtgccacttttcctgaggcttctccattcaccccatcagaatgtctgtgagcaagcagtgtgggcattgggaaatatcataggtgatgggccccagtgtagagattatgtcataagtcttggagttgtgaaacctttactttccttcataagtccatctattcctataacattcttaagaaatgttacttgggttatggtcaacttatgtcgccacaaagacccaccaccaccaatggaaaccattcaggagattcttccagccctttgtgttttaattcatcacacagatgtaaatatactggtagacacagtctgggccctctcttaccttactgatgctggcaatgaacaaatacagatggtaatagactctggaatagttcctcatttggttcctctgctcagccaccaggaagttaaagttcagactgctgcacttagagctgtgggcaacattgttactggaactgatgagcaaacacaagtagttttgaactgtgatgctctttcacacttcccagcactcctgacacatcccaaagagaaaattaataaagaagcagtgtggttcctctccaacatcactgcaggaaatcagcagcaggtacaggcagtaattgatgccaatcttgtaccaatgataatacaccttttggataagggggattttggcactcaaaaagaagctgcttgggccataagtaacttaacaattagtggaaggaaagatcaagtggcttaccttatccaacaaaatgttatcccacctttttgcaacttgctgactgtaaaagatgcacaagttgtgcaagtagtactcgatggactaagtaatatattaaaaatggctgaagatgaggcagaaaccataggcaatcttatagaagaatgtggagggctggagaaaattgaacaacttcaaaatcatgaaaatgaagacatctacaaattggcctatgagatcattgatcagttcttctcttcagatgatattgatgaagaccctagccttgttccagaggcaattcaaggcggaacatttggtttcaattcatctgccaatgtaccaacagaagggttccagttttagaaagatgttgtggaagttaggtacaatgcagcactgagatatatatatatatatgtgtgtgtgtatatatatatatatatacatatatataaaaaggtttgatccatcaagcttggctcatgggatctgctgctgcattaaatcgggaaagaaaatgtgaagatttcatttggaatcacagaaaatgcccaaatgaggtcaagatggcgagtgggtgcgagtgagaatgagtggcaaaatgtaatgaaaactttacatgaatgcttatttaggttgttcaaagtaaaaagggctacaggtcacagatcgtcagtgcctgagaaagaacattgacttactctatatcaattgaggggaaagtgcagtaccgtcatcttcaagccttgtaagcataaaagagaataggctgcccatataagtcaaaggaaaatgagcccaggccttgctatgaagcagtgtgtgaatggacaatgttgaatgaatgtctggctcagtgatggagagccaggttcatctttgaaatctagggctcttcactcatgaagcagactcctagtcctggagtgactgtgtacgagagcgtggttgtggtgctgtatgtgaacgcatgcaagcttgattcaccttcagggggctgataacctagtaaatcatcaaaatgagatcataagtgttaatgtacactggacatgaaaacaaagactggtttagcagcagacattggtttactctgcagcctgtgttttctgtttccccctttcccacctccttccccccacccaatccttttttttttcttttttgcttttcttttctttttttttagtttttatttactttacctagtatgcctttttttagttgcttctcaagtcagaaaacttttcaggaaggtttccctgtgcatttgcaccagatgaatgtttgatgctatgaaaagctttccatatcatcaaaactaatttgtgtagatttttgcatgaaaaaaatcataaatttccctcaaaatagactgtgttgcagtacacaagttgccataatagtataaaacagtaaaatgtgcttaaaaggccatccttttcattttcagagataacataaagatctttgcatgaggtaaatctacagcatagttcatttttagattttgttgagtcctgtaaagaagaagaagaaaaaagtttcagttgtggtagaataccgtgctgtgtttaaatgttacttgttttcaaactttgttttctatgaaaatgatatggaaacttctaaaatggaatttggtgcatatgtactgctgaataaagaccgatgaagaggtttgagtagatgtacaaatcaagtaatggtttgaacacctttaataatatgcctaatctgttcaattgttttagaatctttttatcttagatgtaggcagccatgaacaatctattttgagccactttagggagaaaactttgtatttttaaaacttgcataaaagttatgcaagtggtttttataaattggaataatacctcagttttgaggttatgcacactaaattaaatgtgacataaattaatttgtacaaaaagaactctttataaggtggctcattgtaggaaatcctgtgccttcccctttgagcacaagtgttgcatgaacaacagtttgctataagaaacataccagattagccaccattagcatctatatctactttgtgtttaaaaatcaactggtaattctgaaacactgtagaatggataaaaattattttgtgatcataactctttgttgaactagagtatttttgcagcattccttgtcatcagaaacatggttaaagtttaaaactagaagcagcagaaaactagcttgtaaaatttatccaagtagagtgcaggctaggctgtcttggggaaataaacattaaaacttaaagcaatgttttacatggggtgtgtgtgtgtggtgtgtggatttttttttttttataaagttagagtataattcaatggcttacattagcttcctgtctttttacctagaaccagcataataagaaatttctttggttctgtcatttcagtatggacatattaatattttagcccactgagtttgtccagttgacaccatcagtgcttcagttttctctctatccaaagcaaggttttaactttccttcattctccagtaaaacagaccgagacaacttgaactatattttgagtattgctatatcttcaacatatagctccaaatgatggattgtatacaaagcatagtacagaaggtttcagtaattggaaggtgaacacagcaatgctttacataatttgtgttttttagtaaaaaatattggattcaaagtaagccaatgagcttgtatacaaattttatatacaaattattgtatagaacagtgatatggaaaataggtaagggtgatattaatatctctgggtataaggactaccttatcgtttaaatattttatttccatctatagcctaatatagaacattgattttctagtagaaattctgggaagggcttttctgtctctgaaattgattcagtacagttgacagttcatcacggttacctggttaaacactttttttttttttttaattctccagtgatctaggaaattgtttcatttttaacacaggcttatttctgatggggatgggggcatagaataatatgcctaataagctaaacgttcttaacgtttcatgtcttaaactgtctttttgaacattgagaccacctcaagtgctgtaaaaataagaatgttatattaggggtgtgtgagacgccctagtctaaaatctatctttaaatatatttcctttgtaattttcaaagacttcagtaattgtgtgttatggtggaaataatactttccattggtccacattgctctggaccaaacctggagcatttctataattagagctatctatgaatcattaaaaatggatctagaataattttggggagagggagtgtatcatttagtttaggcttacctcagcagcacttcatagggtgaggagttgtttgtttctttaaaggtataactgcattgtaaaatgactgggtttattgtaacagtaatttatgggggcaccctttttggattctccattgcctcagtttcctcaaggaaaaagttacagagattaagctaaattttgaatttagagaataactgctgtgtaattttggtataattaccataaatttagtgtcttaaaacacaacatacattatttcacaatttctgtaggtcaagagtgtagttaggttttctgctcagggtctcacaaggctgcaataaaggtgtcagccagagctgcagtcttatctgaagctagggggtcctcttttatgcacatatggcaaaatccattgcctagcaactgaagaaatcatgggaacttcttcaaggccagcaagagaatctctgatctcagggaaggccttaagcgcttttttaaaggtctcacctgattagatcaggccacctacccaccagggtgatctcccttttgattaacccaaagccaaactgatgaggtaccttcattacccctgcaaaatcccttcacctttgccctgcattgtagtccaatcacaggggtgatacgcatcatattcaaagatcctgttcacagtcaagggagggggttatatggagtatgtataccagggaatcttgggagccatcttaagagttcttcctatgacaaggactcaactatttagaactggaacaatttacaagtgatagccttatatagttatcatagcaagcttatttggggatcaaggttgcctctgagaacctaatgaaaactggaccagcttccccaaaaagtgtatatacatggtagtttttcatacagttttaggggattcataagagtccatgaattacagtctgtcccaacccttccctttagatgatgagttgttgaggtgacttgcccaaggtcacacagctactaagggccaaataaagcccacatctcaactcccatactgcccagggcttctaattactattctaaaggtaatctaaattcatttaaatttgtgaaccaatgcaaaaaaatgtgaatgtagctttttggatattttttttgtttactaaggaatgggtaacattgttatagaagcttgcctaagagttttgaaattagttgacctttttgagtttccaaaattgaatcttccattgtagctattaaagtgaactataaataggccaactttaattgttaactcctcgggtttggtggattatctaccatttatatataaaatttcagttagaatccaccattggcgttttgaaggccaagatagctgagtatcttatcctttttgtaacttcttgattattttacttattggcaaaattcattaactgtcagccaataatttaatattatgggaggaaaaaattttgcccagatatctgaggcaatactcccaaacactaacaaactgatgcctaacaaacttgacattttgaacacttaaagttttccctaaactttttaataagcacattaataaagtatgcttttaaatatatatgtacaataatttttaaaagttgctgcaagatgccttcaaatcaatatgcacgttggtggcattagtgcagtcttctatttttatttttttgagacacagtctcgctctgtggcccaggctggagtgtagtggcgcaatctcggctcactgcaacctctgcctcaagggttcaagcaattctgcctcagcctcctgagtagctgggattacaggagtacgctaccacgcctggctaatttttgtatttttagtagaaatggggtttcaccgtattggccaggctggtattggaatcctgaccgcaaatgatctgcccacctcggcttcccaaagtgctgggattacaggcgtgagccactgcgcccaaccagccttaattcttaataaaggaagttgaaaaataatgaacattggtaaaactattctagtgtgatcagaagcaaatttggactgtagtgtcaaattgataaaaaactaagcacaccaatcatgtataagaaaagtagatttaacatttttttccctaaacacttaacccagaagttaacaataatcttgaaaattccttttaaatccaggccctttaggtgatggcagtttgactcaggatgtccaagtccagtgtattttcaataaaattgacttgacagctactgctctgggtgtaagagcagttgactgtgaggaaaagtaaatggttctacagattctttatgatctacctcccaccagaggactgcagtactcccttgttatttatattttctgccccaatttttgccttctccacaaattttataccttttgtagctgcctactccagattacttcacctttccagactatcagttcttccacttttattcttcataaagaaaattccaataacctgtttcacttaggtttttctattactcttcaagcatgaatcctaatttccctgactatatcttacctctgatctccataactgatggattcctatcctagactatgttactctaatattacccaagattttctccagcctgtttttactcttactttgaaacagctgtttaaaatgactcgtaatctgcttaaatctacatgctttttgtggttctcaatccagttacctaccttccagataattccctcactgtcctgtcctctccattcctctgatgtttaagccctgtgagccacctttcccccatcctttgtgcatagttaccattttactctttcttgttgcccaggcaggaatgcagtggtgccatcttggctcactgcaacctccacctcctaggttcaagcgattctcctgcctcagcctcctgagtagctgggaccacaagcgtgcaccaccacgcccggctaatttttgtatttttagtagagatggggtttcaccacgttggccaggctggtctcgaactcctgacctcagatgatccaccctccttggcctcccaaagtgctgggattgcaggcgtgagccaccgcctggccaccattttactctttttaggtacagtaatctaatatccaaagtcttggactcagctaaagagggtatttaccttaaaaaaaaaaaaaaaaagactccatcttttgattcataattgtggtgggggcggggaatcaagacaaccttagtcactttggtattaccataattcttgtcttttcagggttgtcctgttcagctgcataaaacatcatgtattctaggtatttcctaccttcacttacatttttacttgccgatgtgctgccttcataaatgggtatattccgccacacatctagtaagcccccaatgcagtacacaatgtgtatcactgataaaactcgcacttctgccatgtcagtattatattcagttgagtggtctttagcatagtggcagtcctagtcatcctaaccttttagttaaggtaaaattacatatgtttatagaactcatatagacaagctagtttttaaaatcttccttttaaccagtttaggatgatctaggatagctaagttacctacatggtgactgttcggtctaattcagaaacagaagtactaaaagaatactaaaaagtttttacccattatctctatccctgttttctttttgcaattctcagctgcagggagcaagaaaatacacagcagataggaaatgtttgtttgcatcctggctttctcaaccgcactttacgtccttgaatattctagatatttactccttcaagaagtcaggagtatatccaggcctacctatcatccttgccatccccattaaccctcatttttcagtatgtgttttacatttatggttatttttcagtctatagtatctgttcactcattgctctatcacatctgagtttctccgtctttctttccactagattgtaagctccttaagggcaaggtcggcatataagcaaagttctgtaaacaccgtgaaggtaccatgagttctatgggtactcaataaatgcttgtgataatgatgcaatttctca

SEQ ID NO: 127032 - DNA, 1566 bp, Artificial Sequence
  derived and/or modified sequence
atggctgacaatgagaagctggacaaccagaggctgaagaacttcaagaacaagggccgggacctggagaccatgaggcggcagagaaatgaggtggtggtggagctgaggaagaacaagagagatgagcacctgctgaagagaagaaatgtgccccatgaggacatctgtgaggacagcgacattgatggagactacagagtgcagaacaccagcctggaggccatcgtgcagaatgccagcagtgacaaccagggcatccagctgtctgctgtgcaggccgccaggaagctgctgagcagtgacagaaatccacccattgatgacctgatcaagagcggcatcctgcccatcctggtgcactgcctggagagagatgacaaccccagcctgcagtttgaagctgcctgggccctgaccaacatcgccagcggcaccagcgagcagacccaggccgtggtgcagagcaatgctgtgcccctcttcctgcggctgctgcacagcccccaccagaatgtgtgtgagcaggccgtgtgggccctgggcaacatcattggagatggcccccagtgccgggactatgtgatcagcctgggcgtggtgaagcccctgctgtccttcatcagccccagcatccccatcaccttcctgagaaatgtgacctgggtgatggtgaacctgtgccgccacaaggaccccccaccacccatggagaccatccaggagatcctgcctgccctgtgtgtgctgatccaccacacagatgtgaacatcctggtggacacagtgtgggccctgagctacctgacagatgctggaaatgagcagatccagatggtgattgattctggaattgtgccccacctggtgcccctgctgagccaccaggaggtgaaggtgcagacagctgccctgcgggctgtgggcaacatcgtgactggaacagatgagcagacccaggtggtgctgaactgtgatgccctgagccacttccctgccctgctgacccaccccaaggagaagatcaacaaggaggccgtgtggttcctgagcaacatcacagctggcaaccagcagcaggtgcaggccgtgattgatgccaacctggtgcccatgatcatccacctgctggacaagggggactttggcacccagaaggaggccgcctgggccatcagcaacctgaccatcagcggcaggaaggaccaggtggcctacctgatccagcagaatgtcatcccccccttctgcaacctgctgactgtgaaggatgcccaggtggtgcaggtggtgctggatggcctgagcaacatcctgaagatggctgaagatgaggccgagaccatcggcaacctgattgaagaatgtggcggcctggagaagattgagcagctgcagaaccatgaaaatgaagacatctacaagctggcctatgagatcatcgaccagttcttcagcagtgatgacattgatgaggaccccagcctggtgcctgaggccatccagggcggcaccttcggcttcaacagcagcgccaacgtgcccacagagggcttccagttctag

SEQ ID NO: 127033 - DNA, 1566 bp, Artificial Sequence
  derived and/or modified sequence
atggccgacaacgagaagctggacaaccagcggctgaagaacttcaagaataagggacgggacctcgagacgatgaggagacagcgcaacgaggttgttgtggagctgcgtaaaaacaagagggatgagcatctgctgaagagaaggaatgtaccacatgaggatatatgcgaggactccgacattgacggcgactaccgggttcaaaataccagtctggaggcaatagttcaaaatgccagcagtgacaaccagggcatccagctctccgccgtgcaggcagccagaaagttgctgtcctccgataggaaccctcctatagatgacctgattaaaagcggtattcttcctatactcgtgcattgcctggaaagagatgacaatccaagcttacaatttgaagccgcttgggccctcaccaacatcgccagcggtactagcgagcagactcaagccgtcgtacagagcaacgcggtaccccttttcctcagactgctgcactccccacaccagaacgtgtgtgaacaggctgtatgggcattgggcaatatcatcggcgatgggccacagtgtagggattacgtgatcagcctgggagtggtgaaacctctcctgtctttcatttccccctctattcctataaccttcctgagaaatgtgacctgggtgatggttaatctgtgccggcacaaagacccgccaccaccaatggagacgattcaggagatcctcccagcactctgcgtcttgatacaccataccgatgttaacatcctggttgatactgtttgggccttgtcctatctgaccgacgctggcaacgagcagatccagatggtaatcgattccggcattgtaccccacctggtgcctctgctttctcaccaggaagtgaaagttcagactgccgctttacgggccgtgggaaacattgttactggcaccgatgaacagactcaggtggtcctaaattgcgatgccctatcccactttccggccctgctcacccatccgaaagaaaagatcaataaggaagctgtctggttcctgagtaatatcacagcaggtaatcaacagcaagtgcaggccgtgattgatgccaatctggttcccatgatcatccacctgctggacaagggggacttcggaacgcagaaagaagccgcctgggccatttccaatctgacaatctctggccgcaaggaccaagtggcttatctgattcagcagaacgtgatacctccattctgcaatttgttaaccgtcaaagatgcgcaagtcgttcaggtggttctggatggcctctcaaatatcttgaagatggctgaggatgaagctgagaccattggtaatctcattgaggagtgcgggggcctcgaaaagattgagcagctgcaaaaccacgagaacgaagatatctataaactagcatacgagatcatcgaccaattcttctcaagcgatgacattgacgaggacccatctctggtccccgaggctatacaggggggcacattcggattcaatagttctgctaatgtccctactgagggattccaattttag

SEQ ID NO: 127034 - DNA, 1566 bp, Artificial Sequence
  derived and/or modified sequence
atggccgacaacgagaaactagataatcagcgcctcaaaaacttcaagaacaaagggagagacctggagaccatgcgcaggcagcggaacgaagtggtggtggagctgcgaaagaataagagggatgaacacctgctgaagcgacgcaacgttccacatgaagatatctgcgaagacagtgacattgatggcgattatcgtgtgcagaacacatcattggaggctatcgtgcagaatgcatcctcggacaaccaaggaatacagctcagtgccgtgcaggccgcaaggaagctcctcagcagtgacagaaaccctcctatcgacgaccttataaaatctggaattttgcccattttggtccattgcttagagagggatgacaatcccagtctacagttcgaggccgcttgggccctcacgaatatcgctagcggcacttcggaacagacccaggctgtagttcagagcaacgccgtgcctctcttcctccggttactgcacagcccccatcagaacgtctgtgagcaggccgtttgggcactcggcaacattataggcgacggcccacaatgcagggactacgttatttcactaggtgtcgtgaaacccctgctttcttttatctcgccctccatcccaatcacattcctgcgcaatgtgacctgggtgatggtgaacctgtgtaggcacaaggacccccctccccctatggagactattcaggagatcctgccggcattatgcgtgctgatacaccacacagacgtcaatatattggtggacaccgtgtgggcgttgagttacttaaccgacgctggaaatgagcagatccagatggtcatagattcagggatcgtaccccatcttgtgccacttctgtcccaccaggaagtcaaagtccaaacggccgctctacgtgctgtaggcaacatagtaactggaacagatgagcagactcaggtagtgctgaactgcgacgccctgtcccatttcccagcacttctcacacacccaaaggagaagatcaataaagaggccgtgtggtttctctcgaatataacagcaggtaatcagcagcaagttcaggccgttatcgatgccaatctcgttcccatgataatacatctactggataagggagactttgggacacagaaagaggccgcttgggcaatttcgaaccttactatctctgggagaaaggatcaggtggcatatttgatccagcagaatgtgattcctcctttttgtaatctgctgaccgtgaaagacgcacaggtggtgcaggtggtgttggacggcctgagcaatatactgaaaatggcagaagatgaggccgagaccatcgggaatctgatagaagagtgcggcggtctggagaaaatagaacagttgcagaatcacgaaaatgaggacatttacaaactggcctatgagattatcgaccagttcttcagcagtgacgacatagacgaggacccgagcctggtgcccgaagctatccagggcggaacctttggctttaactctagtgctaacgtgcctaccgaggggtttcaattttag

SEQ ID NO: 127035 - DNA, 1566 bp, Artificial Sequence
  derived and/or modified sequence
atggccgacaacgagaagctggacaaccagagactgaagaacttcaagaacaagggcagagacctggagaccatgagaagacagagaaacgaggtggtggtggagctgagaaagaacaagagagacgagcacctgctgaagagaagaaacgtgccccacgaggacatctgcgaggacagcgacatcgacggcgactacagagtgcagaacaccagcctggaggccatcgtgcagaacgccagcagcgacaaccagggcatccagctgagcgccgtgcaggccgccagaaagctgctgagcagcgacagaaacccccccatcgacgacctgatcaagagcggcatcctgcccatcctggtgcactgcctggagagagacgacaaccccagcctgcagttcgaggccgcctgggccctgaccaacatcgccagcggcaccagcgagcagacccaggccgtggtgcagagcaacgccgtgcccctgttcctgagactgctgcacagcccccaccagaacgtgtgcgagcaggccgtgtgggccctgggcaacatcatcggcgacggcccccagtgcagagactacgtgatcagcctgggcgtggtgaagcccctgctgagcttcatcagccccagcatccccatcaccttcctgagaaacgtgacctgggtgatggtgaacctgtgcagacacaaggacccccccccccccatggagaccatccaggagatcctgcccgccctgtgcgtgctgatccaccacaccgacgtgaacatcctggtggacaccgtgtgggccctgagctacctgaccgacgccggcaacgagcagatccagatggtgatcgacagcggcatcgtgccccacctggtgcccctgctgagccaccaggaggtgaaggtgcagaccgccgccctgagagccgtgggcaacatcgtgaccggcaccgacgagcagacccaggtggtgctgaactgcgacgccctgagccacttccccgccctgctgacccaccccaaggagaagatcaacaaggaggccgtgtggttcctgagcaacatcaccgccggcaaccagcagcaggtgcaggccgtgatcgacgccaacctggtgcccatgatcatccacctgctggacaagggcgacttcggcacccagaaggaggccgcctgggccatcagcaacctgaccatcagcggcagaaaggaccaggtggcctacctgatccagcagaacgtgatcccccccttctgcaacctgctgaccgtgaaggacgcccaggtggtgcaggtggtgctggacggcctgagcaacatcctgaagatggccgaggacgaggccgagaccatcggcaacctgatcgaggagtgcggcggcctggagaagatcgagcagctgcagaaccacgagaacgaggacatctacaagctggcctacgagatcatcgaccagttcttcagcagcgacgacatcgacgaggaccccagcctggtgcccgaggccatccagggcggcaccttcggcttcaacagcagcgccaacgtgcccaccgagggcttccagttctag

SEQ ID NO: 127036 - protein, 898 aa, Artificial Sequence
  derived and/or modified sequence
MVWDRQTKMEYEWKPDEQGLQQILQLLKESQSPDTTIQRTVQQKLEQLNQYPDFNNYLIFVLTKLKSEDEPTRSLSGLILKNNVKAHFQNFPNGVTDFIKSECLNNIGDSSPLIRATVGILITTIASKGELQNWPDLLPKLCSLLDSEDYNTCEGAFGALQKICEDSAEILDSDVLDRPLNIMIPKFLQFFKHSSPKIRSHAVACVNQFIISRTQALMLHIDSFIENLFALAGDEEPEVRKNVCRALVMLLEVRMDRLLPHMHNIVEYMLQRTQDQDENVALEACEFWLTLAEQPICKDVLVRHLPKLIPVLVNGMKYSDIDIILLKGDVEEDETIPDSEQDIRPRFHRSRTVAQQHDEDGIEEEDDDDDEIDDDDTISDWNLRKCSAAALDVLANVYRDELLPHILPLLKELLFHHEWVVKESGILVLGAIAEGCMQGMIPYLPELIPHLIQCLSDKKALVRSITCWTLSRYAHWVVSQPPDTYLKPLMTELLKRILDSNKRVQEAACSAFATLEEEACTELVPYLAYILDTLVFAFSKYQHKNLLILYDAIGTLADSVGHHLNKPEYIQMLMPPLIQKWNMLKDEDKDLFPLLECLSSVATALQSGFLPYCEPVYQRCVNLVQKTLAQAMLNNAQPDQYEAPDKDFMIVALDLLSGLAEGLGGNIEQLVARSNILTLMYQCMQDKMPEVRQSSFALLGDLTKACFQHVKPCIADFMPILGTNLNPEFISVCNNATWAIGEISIQMGIEMQPYIPMVLHQLVEIINRPNTPKTLLENTAITIGRLGYVCPQEVAPMLQQFIRPWCTSLRNIRDNEEKDSAFRGICTMISVNPSGVIQDFIFFCDAVASWINPKDDLRDMFCKILHGFKNQVGDENWRRFSDQFPLPLKERLAAFYGV

SEQ ID NO: 127037 - protein, 848 aa, Artificial Sequence
  derived and/or modified sequence
MVWDRQTKMEYEWKPDEQGLQQILQLLKESQSPDTTIQRTVQQKLEQLNQYPDFNNYLIFVLTKLKSEGILITTIASKGELQNWPDLLPKLCSLLDSEDYNTCEGAFGALQKICEDSAEILDSDVLDRPLNIMIPKFLQFFKHSSPKIRSHAVACVNQFIISRTQALMLHIDSFIENLFALAGDEEPEVRKNVCRALVMLLEVRMDRLLPHMHNIVEYMLQRTQDQDENVALEACEFWLTLAEQPICKDVLVRHLPKLIPVLVNGMKYSDIDIILLKGDVEEDETIPDSEQDIRPRFHRSRTVAQQHDEDGIEEEDDDDDEIDDDDTISDWNLRKCSAAALDVLANVYRDELLPHILPLLKELLFHHEWVVKESGILVLGAIAEGCMQGMIPYLPELIPHLIQCLSDKKALVRSITCWTLSRYAHWVVSQPPDTYLKPLMTELLKRILDSNKRVQEAACSAFATLEEEACTELVPYLAYILDTLVFAFSKYQHKNLLILYDAIGTLADSVGHHLNKPEYIQMLMPPLIQKWNMLKDEDKDLFPLLECLSSVATALQSGFLPYCEPVYQRCVNLVQKTLAQAMLNNAQPDQYEAPDKDFMIVALDLLSGLAEGLGGNIEQLVARSNILTLMYQCMQDKMPEVRQSSFALLGDLTKACFQHVKPCIADFMPILGTNLNPEFISVCNNATWAIGEISIQMGIEMQPYIPMVLHQLVEIINRPNTPKTLLENTAITIGRLGYVCPQEVAPMLQQFIRPWCTSLRNIRDNEEKDSAFRGICTMISVNPSGVIQDFIFFCDAVASWINPKDDLRDMFCKILHGFKNQVGDENWRRFSDQFPLPLKERLAAFYGV

SEQ ID NO: 127038 - DNA, 80 bp, Artificial Sequence
  derived and/or modified sequence
taaacgttagacctaaaaccataaaaaccctagaagaaaacctaggcattaccattcaggacataggcatgggcaaggac

SEQ ID NO: 127039 - DNA, 87 bp, Artificial Sequence
  derived and/or modified sequence
aaagacttaaacgttagacctaaaaccataaaaaccctagaggaaaacctaggcattaccattcaggacttaggcatgggcaaggac

SEQ ID NO: 127040 - DNA, 2697 bp, Artificial Sequence
  derived and/or modified sequence
atggtgtgggacagacagaccaagatggagtacgagtggaagcccgacgagcagggcctgcagcagatcctgcagctgctgaaggagagccagagccccgacaccaccatccagagaaccgtgcagcagaagctggagcagctgaaccagtaccccgacttcaacaactacctgatcttcgtgctgaccaagctgaagagcgaggacgagcccaccagaagcctgagcggcctgatcctgaagaacaacgtgaaggcccacttccagaacttccccaacggcgtgaccgacttcatcaagagcgagtgcctgaacaacatcggcgacagcagccccctgatcagagccaccgtgggcatcctgatcaccaccatcgccagcaagggcgagctgcagaactggcccgacctgctgcccaagctgtgcagcctgctggacagcgaggactacaacacctgcgagggcgccttcggcgccctgcagaagatctgcgaggacagcgccgagatcctggacagcgacgtgctggacagacccctgaacatcatgatccccaagttcctgcagttcttcaagcacagcagccccaagatcagaagccacgccgtggcctgcgtgaaccagttcatcatcagcagaacccaggccctgatgctgcacatcgacagcttcatcgagaacctgttcgccctggccggcgacgaggagcccgaggtgagaaagaacgtgtgcagagccctggtgatgctgctggaggtgagaatggacagactgctgccccacatgcacaacatcgtggagtacatgctgcagagaacccaggaccaggacgagaacgtggccctggaggcctgcgagttctggctgaccctggccgagcagcccatctgcaaggacgtgctggtgagacacctgcccaagctgatccccgtgctggtgaacggcatgaagtacagcgacatcgacatcatcctgctgaagggcgacgtggaggaggacgagaccatccccgacagcgagcaggacatcagacccagattccacagaagcagaaccgtggcccagcagcacgacgaggacggcatcgaggaggaggacgacgacgacgacgagatcgacgacgacgacaccatcagcgactggaacctgagaaagtgcagcgccgccgccctggacgtgctggccaacgtgtacagagacgagctgctgccccacatcctgcccctgctgaaggagctgctgttccaccacgagtgggtggtgaaggagagcggcatcctggtgctgggcgccatcgccgagggctgcatgcagggcatgatcccctacctgcccgagctgatcccccacctgatccagtgcctgagcgacaagaaggccctggtgagaagcatcacctgctggaccctgagcagatacgcccactgggtggtgagccagccccccgacacctacctgaagcccctgatgaccgagctgctgaagagaatcctggacagcaacaagagagtgcaggaggccgcctgcagcgccttcgccaccctggaggaggaggcctgcaccgagctggtgccctacctggcctacatcctggacaccctggtgttcgccttcagcaagtaccagcacaagaacctgctgatcctgtacgacgccatcggcaccctggccgacagcgtgggccaccacctgaacaagcccgagtacatccagatgctgatgccccccctgatccagaagtggaacatgctgaaggacgaggacaaggacctgttccccctgctggagtgcctgagcagcgtggccaccgccctgcagagcggcttcctgccctactgcgagcccgtgtaccagagatgcgtgaacctggtgcagaagaccctggcccaggccatgctgaacaacgcccagcccgaccagtacgaggcccccgacaaggacttcatgatcgtggccctggacctgctgagcggcctggccgagggcctgggcggcaacatcgagcagctggtggccagaagcaacatcctgaccctgatgtaccagtgcatgcaggacaagatgcccgaggtgagacagagcagcttcgccctgctgggcgacctgaccaaggcctgcttccagcacgtgaagccctgcatcgccgacttcatgcccatcctgggcaccaacctgaaccccgagttcatcagcgtgtgcaacaacgccacctgggccatcggcgagatcagcatccagatgggcatcgagatgcagccctacatccccatggtgctgcaccagctggtggagatcatcaacagacccaacacccccaagaccctgctggagaacaccgccatcaccatcggcagactgggctacgtgtgcccccaggaggtggcccccatgctgcagcagttcatcagaccctggtgcaccagcctgagaaacatcagagacaacgaggagaaggacagcgccttcagaggcatctgcaccatgatcagcgtgaaccccagcggcgtgatccaggacttcatcttcttctgcgacgccgtggccagctggatcaaccccaaggacgacctgagagacatgttctgcaagatcctgcacggcttcaagaaccaggtgggcgacgagaactggagaagattcagcgaccagttccccctgcccctgaaggagagactggccgccttctacggcgtgtag

SEQ ID NO: 127041 - DNA, 2547 bp, Artificial Sequence
  derived and/or modified sequence
atggtgtgggacagacagaccaagatggagtacgagtggaagcccgacgagcagggcctgcagcagatcctgcagctgctgaaggagagccagagccccgacaccaccatccagagaaccgtgcagcagaagctggagcagctgaaccagtaccccgacttcaacaactacctgatcttcgtgctgaccaagctgaagagcgagggcatcctgatcaccaccatcgccagcaagggcgagctgcagaactggcccgacctgctgcccaagctgtgcagcctgctggacagcgaggactacaacacctgcgagggcgccttcggcgccctgcagaagatctgcgaggacagcgccgagatcctggacagcgacgtgctggacagacccctgaacatcatgatccccaagttcctgcagttcttcaagcacagcagccccaagatcagaagccacgccgtggcctgcgtgaaccagttcatcatcagcagaacccaggccctgatgctgcacatcgacagcttcatcgagaacctgttcgccctggccggcgacgaggagcccgaggtgagaaagaacgtgtgcagagccctggtgatgctgctggaggtgagaatggacagactgctgccccacatgcacaacatcgtggagtacatgctgcagagaacccaggaccaggacgagaacgtggccctggaggcctgcgagttctggctgaccctggccgagcagcccatctgcaaggacgtgctggtgagacacctgcccaagctgatccccgtgctggtgaacggcatgaagtacagcgacatcgacatcatcctgctgaagggcgacgtggaggaggacgagaccatccccgacagcgagcaggacatcagacccagattccacagaagcagaaccgtggcccagcagcacgacgaggacggcatcgaggaggaggacgacgacgacgacgagatcgacgacgacgacaccatcagcgactggaacctgagaaagtgcagcgccgccgccctggacgtgctggccaacgtgtacagagacgagctgctgccccacatcctgcccctgctgaaggagctgctgttccaccacgagtgggtggtgaaggagagcggcatcctggtgctgggcgccatcgccgagggctgcatgcagggcatgatcccctacctgcccgagctgatcccccacctgatccagtgcctgagcgacaagaaggccctggtgagaagcatcacctgctggaccctgagcagatacgcccactgggtggtgagccagccccccgacacctacctgaagcccctgatgaccgagctgctgaagagaatcctggacagcaacaagagagtgcaggaggccgcctgcagcgccttcgccaccctggaggaggaggcctgcaccgagctggtgccctacctggcctacatcctggacaccctggtgttcgccttcagcaagtaccagcacaagaacctgctgatcctgtacgacgccatcggcaccctggccgacagcgtgggccaccacctgaacaagcccgagtacatccagatgctgatgccccccctgatccagaagtggaacatgctgaaggacgaggacaaggacctgttccccctgctggagtgcctgagcagcgtggccaccgccctgcagagcggcttcctgccctactgcgagcccgtgtaccagagatgcgtgaacctggtgcagaagaccctggcccaggccatgctgaacaacgcccagcccgaccagtacgaggcccccgacaaggacttcatgatcgtggccctggacctgctgagcggcctggccgagggcctgggcggcaacatcgagcagctggtggccagaagcaacatcctgaccctgatgtaccagtgcatgcaggacaagatgcccgaggtgagacagagcagcttcgccctgctgggcgacctgaccaaggcctgcttccagcacgtgaagccctgcatcgccgacttcatgcccatcctgggcaccaacctgaaccccgagttcatcagcgtgtgcaacaacgccacctgggccatcggcgagatcagcatccagatgggcatcgagatgcagccctacatccccatggtgctgcaccagctggtggagatcatcaacagacccaacacccccaagaccctgctggagaacaccgccatcaccatcggcagactgggctacgtgtgcccccaggaggtggcccccatgctgcagcagttcatcagaccctggtgcaccagcctgagaaacatcagagacaacgaggagaaggacagcgccttcagaggcatctgcaccatgatcagcgtgaaccccagcggcgtgatccaggacttcatcttcttctgcgacgccgtggccagctggatcaaccccaaggacgacctgagagacatgttctgcaagatcctgcacggcttcaagaaccaggtgggcgacgagaactggagaagattcagcgaccagttccccctgcccctgaaggagagactggccgccttctacggcgtgtag

SEQ ID NO: 127042 - DNA, 2697 bp, Artificial Sequence
  derived and/or modified sequence
atggtgtgggatcggcagactaagatggagtacgagtggaagccggatgagcaaggacttcagcagattcttcaactgcttaaggagtctcagtccccagacactacaatacagagaacagtacagcagaagttagaacagctgaaccaataccctgacttcaacaactacctaatctttgtactgacaaaacttaaaagcgaggacgagccgaccaggagcctaagcggattgatcctcaaaaataacgtgaaagcacacttccagaactttcccaacggtgtgacagactttatcaagtccgagtgcctaaataatatcggcgatagtagccccctgattagagctacagtcggcatcttaatcactactatcgctagtaagggcgagcttcaaaactggccagacctgcttcctaaactttgctcccttctggactccgaggattacaacacatgcgaaggcgctttcggcgcgctgcagaaaatctgcgaagactcagcagaaattctcgactctgacgttttggaccggcctctgaatatcatgattcctaagttcttgcagttcttcaagcactcctcccctaagattagaagccacgcagtggcctgtgttaatcaatttatcatctcgcgcacccaggccctcatgctgcatatcgacagtttcatagaaaatttgtttgctctggcaggcgacgaggaaccggaggtgagaaagaatgtttgtcgcgccctggtgatgttactggaggttcggatggaccggctgttgccccacatgcataatatagtggagtacatgctgcaaagaacacaagatcaagatgaaaacgtggcactagaggcttgtgagttctggctcaccctggctgagcaacccatttgtaaagacgtactggttcgccatttacccaagctgataccagtgctcgtcaacggaatgaagtactctgatatagatatcatcttgctgaaaggcgacgtagaagaggatgaaactatacctgactccgaacaggacattcgcccaagattccaccgcagcaggacggtcgcacagcagcacgatgaagacggtatagaggaggaggacgacgacgacgacgaaatagatgatgacgacactatcagtgattggaatctcagaaagtgcagtgcggcagccctggacgtgctggccaacgtctatcgcgatgagttactgcctcacattcttccgcttctcaaggagttactattccatcatgagtgggtcgtcaaggaatcagggatcttagtccttggagcgattgctgaaggttgcatgcaggggatgattccttacctacctgagctaatcccccatctcatacagtgcctgtccgacaagaaggcactcgtgcgaagtattacatgttggaccctttcacgttatgcgcactgggtggtttcccagccaccagatacctatctcaagccgttgatgaccgagctgctcaagagaattctggatagcaacaaacgagttcaagaagctgcgtgtagcgcatttgctacattggaagaggaggcctgtacagagctcgtgccctacctggcctacatattagatacgctggttttcgcgttctccaagtatcagcacaagaacctactcattttgtatgacgccattgggaccctggccgatagtgtgggccaccacctgaataagccagaatacatacagatgctaatgccacccctgattcaaaaatggaacatgctgaaagacgaggataaagacctcttccccctgctggagtgtctttccagcgtggccactgccttgcagagcggctttctgccttactgcgagcctgtgtaccagcgttgtgtcaatctcgtgcagaagactcttgcccaggccatgctgaacaacgcgcaaccagatcaatacgaagcccctgataaagatttcatgattgtggccctagacctcctgagcggattggcagagggcctcggaggcaacatcgagcaactggtggcaagaagtaatattctgacacttatgtaccagtgtatgcaagataagatgccggaggtgcgccaatcatcattcgccctgctgggggacctcaccaaggcttgttttcagcacgtcaaaccctgcattgctgacttcatgcccatcctgggcacgaatctgaaccccgagttcatctcagtgtgcaataatgctacttgggctatcggagaaatctcaattcaaatgggtattgaaatgcagccgtatatccctatggtgctgcatcagctggtagaaataatcaaccgtcccaatactcctaaaacgctgctcgaaaacacggccattaccattggacgactaggatacgtgtgtccccaggaggtcgccccgatgctgcagcaattcataaggccttggtgcacctccctgcgtaacattagggacaatgaagaaaaggattccgccttccgggggatctgcacaatgatatctgtgaaccccagcggggtcattcaggatttcatcttcttttgcgacgcggtcgcctcttggatcaaccccaaagacgacctgagagacatgttctgcaaaatactgcacggatttaagaatcaggtcggggacgaaaattggcgccggttctccgatcaatttcctttgccactcaaagagcgactcgccgcattttatggtgtgtag

SEQ ID NO: 127043 - DNA, 2547 bp, Artificial Sequence
  derived and/or modified sequence
atggtctgggaccggcagacaaagatggagtacgaatggaagccagacgaacaaggcctccagcagatactccaactgcttaaggaaagtcagtcgcccgacactaccatacagcggaccgtccagcagaagttggagcagctgaaccagtatccggacttcaataactacctgatctttgtcctcaccaagctgaagtccgaaggtatcctcattaccactatagcctccaagggagaattacagaattggcccgatctgctccccaaattatgctccctgctggacagtgaagactataatacttgcgaaggtgcttttggcgcgcttcagaaaatttgcgaagacagcgctgagatactcgactcggatgtcctggaccgcccccttaatattatgattcctaagttcctccaattttttaagcattctagcccaaagatccggtcgcacgctgtcgcttgcgttaatcagtttattatttcccggacacaagccctaatgctgcatatcgactccttcattgagaatcttttcgcccttgctggggatgaagaacccgaagtgcgaaagaatgtttgtcgggccctggtcatgctgttagaagtccgcatggataggctcctgccccatatgcacaatatcgttgagtacatgttgcaacggacccaggaccaggacgaaaatgtggcactggaagcatgtgaattctggctgacccttgccgagcagcccatctgcaaagacgtactcgtgcgccacttgccgaaattgataccggtcctggtgaacggaatgaagtactccgatatcgacatcatcctcctgaaaggagacgttgaagaagacgaaaccattccagactccgagcaggatattcggcctcgctttcaccgatcgagaacggtagcacagcagcatgacgaagatggaatcgaggaagaggatgacgacgacgatgagatagatgacgatgacacgatatccgattggaatttgcgcaagtgttctgccgcggccctagatgtgctggctaacgtgtaccgcgacgagctattgccccacatcctgcctttgctcaaggaactgctcttccatcacgagtgggtggtgaaagagtctggcatcttggtcctgggcgctattgccgagggttgtatgcagggcatgataccatacctgcctgagctgattcctcacttgattcaatgtctctccgacaaaaaagccctggtgcggtcgattacatgctggaccctatctcgctatgcccattgggtagtctctcaacctccagatacatacttaaagcctctgatgactgagttactcaagcggatattggactctaataaaagggtgcaggaagcggcgtgtagcgcctttgcaacacttgaggaagaggcatgcactgaattggtcccctacctggcttacatcctcgacaccctggttttcgcatttagtaaatatcagcataagaatctgctgatcctgtacgacgccattggcactttggctgactcagtgggccatcatttgaacaagcctgaatacatccaaatgctaatgcctcccctgatccaaaagtggaacatgcttaaggacgaagacaaagatttgtttccactgctggagtgtctctcctccgtcgctacggccttacagagtggattccttccatactgtgagccagtgtaccagagatgcgtgaacctggtacagaagacacttgcacaagcgatgctgaacaacgcccagcctgatcagtatgaggccccagataaggatttcatgattgtggccttggatctactctcaggtctagccgaagggctgggcgggaacatcgagcaactggtggcccgtagcaacattctgacactgatgtatcagtgcatgcaggataaaatgcctgaggtaaggcaatctagttttgcattgctcggcgatttgacaaaggcctgcttccaacacgtgaagccttgtatagctgatttcatgcccatcttaggaactaacctgaacccggagtttatctccgtgtgtaataatgctacctgggccatcggggagattagcatacagatggggatcgagatgcagccctacattcccatggtgctgcatcagctcgtcgagatcataaacaggcctaacaccccaaagactctgctggagaacaccgccatcaccattgggagattgggctacgtgtgtccacaggaggtcgccccgatgttacaacagtttatccggccttggtgcacaagtttaagaaatattcgagataacgaagaaaaggactccgccttccgcggaatttgcaccatgatctctgtgaacccaagtggggtgatccaggattttattttcttttgtgatgccgttgcctcttggattaaccccaaggatgatttgcgtgacatgttctgtaaaattctccacggattcaaaaaccaggtaggcgacgagaattggcggcggttcagcgatcagttccccttgcctcttaaagaacgcctggccgcgttttatggagtgtag

SEQ ID NO: 127044 - DNA, 2697 bp, Artificial Sequence
  derived and/or modified sequence
atggtgtgggaccggcagaccaagatggagtatgagtggaagccagatgagcagggcctgcagcagatcctgcagctgctgaaggagagccagagcccagacaccaccatccagaggacagtgcagcagaagctggagcagctgaaccagtacccagacttcaacaactacctgatctttgtgctgaccaagctgaagtcagaagatgagcccaccaggagcctgagcggcctcatcctgaagaacaacgtgaaggcccacttccagaacttccccaatggagtgacagacttcatcaagtctgagtgcctgaacaacattggagacagcagccccctcatccgggccaccgtgggcatcctgatcaccaccatcgccagcaagggggagctgcagaactggccagacctgctgcccaagctgtgcagcctgctggacagcgaggactacaacacctgtgagggcgcctttggagccctgcagaagatctgtgaagattctgctgagatcctggacagtgatgtgctggaccggcccctgaacatcatgatccccaagttcctgcagttcttcaagcacagcagccccaagatccgcagccatgctgtggcctgtgtgaaccagttcatcatcagcaggacccaggccctgatgctgcacatcgacagcttcatcgagaacctgtttgccctggccggagatgaggagcctgaggtgaggaagaatgtgtgccgggccctggtgatgctgctggaggtgaggatggaccggctgctgccccacatgcacaacatcgtggagtacatgctgcagaggacccaggaccaggatgaaaatgtggccctggaggcctgtgagttctggctgaccctggccgagcagcccatctgcaaggatgtgctggtgcgccacctgcccaagctgatccctgtgctggtgaatggcatgaagtacagcgacatcgacatcatcctgctgaagggagatgtggaggaggatgagaccatcccagattctgagcaggacatccggccccgcttccacaggagcaggacagtggcccagcagcatgatgaagatggcatcgaggaggaggatgatgatgatgatgaaattgatgatgatgacaccatcagtgactggaacctgaggaaatgttctgctgctgccctggatgtgctggccaacgtgtacagagatgagctgctgccccacatcctgcccctgctgaaggagctgctcttccaccacgagtgggtggtgaaggagagcggcatcctggtgctgggcgccatcgccgagggctgcatgcagggcatgatcccctacctgcctgagctgatcccccacctgatccagtgcctgagtgacaagaaggccctggtgcgcagcatcacctgctggaccctgagccgctatgcccactgggtggtgtcccagcccccagacacctacctgaagcccctgatgacagagctgctgaagaggatcctggacagcaacaagagggtgcaggaggccgcctgcagcgcctttgccaccctggaggaggaggcctgcacagagctggtgccctacctggcctacatcctggacaccctggtgtttgccttcagcaagtaccagcacaagaacctgctgatcctgtatgatgccatcggcaccctggccgacagcgtgggccaccacctgaacaagccagagtacatccagatgctgatgcctcctctcatccagaagtggaacatgctgaaggatgaggacaaggacctcttccccctgctggagtgcctgagctctgtggccacagccctgcagagcggcttcctgccctactgtgagcctgtgtaccagagatgtgtgaacctggtgcagaagaccctggcccaggccatgctgaacaatgcccagcctgaccagtatgaggccccagacaaggacttcatgattgtggccctggacctgctgagcggcctggccgagggcctgggcggcaacatcgagcagctggtggcccggagcaacatcctgaccctgatgtaccagtgcatgcaggacaagatgcctgaggtgcggcagagcagctttgccctgctgggggacctgaccaaggcctgcttccagcacgtgaagccctgcatcgctgacttcatgcccatcctgggcaccaacctgaaccctgagttcatctctgtgtgcaacaatgccacctgggccatcggggagatcagcatccagatgggcatcgagatgcagccctacatccccatggtgctgcaccagctggtggagatcatcaaccggcccaacacccccaagaccctgctggagaacacagccatcaccatcggccgcctgggctacgtgtgcccccaggaggtggcccccatgctgcagcagttcatccggccctggtgcaccagcctgaggaacatccgggacaatgaggagaaggacagcgccttccggggcatctgcaccatgatctctgtgaaccccagcggggtcatccaggacttcatcttcttctgtgatgctgtggcctcctggatcaaccccaaggatgacctgcgggacatgttctgcaagatcctgcacggcttcaagaaccaggtgggagatgagaactggaggcgcttcagtgaccagttccccctgcccctgaaggagcggctggccgccttctacggcgtgtag

SEQ ID NO: 127045 - DNA, 2547 bp, Artificial Sequence
  derived and/or modified sequence
atggtgtgggaccggcagaccaagatggagtatgagtggaagccagatgagcagggcctgcagcagatcctgcagctgctgaaggagagccagagcccagacaccaccatccagaggacagtgcagcagaagctggagcagctgaaccagtacccagacttcaacaactacctgatctttgtgctgaccaagctgaagtctgagggcatcctgatcaccaccatcgccagcaagggggagctgcagaactggccagacctgctgcccaagctgtgcagcctgctggacagcgaggactacaacacctgtgagggcgcctttggagccctgcagaagatctgtgaagattctgctgagatcctggacagtgatgtgctggaccggcccctgaacatcatgatccccaagttcctgcagttcttcaagcacagcagccccaagatccgcagccatgctgtggcctgtgtgaaccagttcatcatcagcaggacccaggccctgatgctgcacatcgacagcttcatcgagaacctgtttgccctggccggagatgaggagcctgaggtgaggaagaatgtgtgccgggccctggtgatgctgctggaggtgaggatggaccggctgctgccccacatgcacaacatcgtggagtacatgctgcagaggacccaggaccaggatgaaaatgtggccctggaggcctgtgagttctggctgaccctggccgagcagcccatctgcaaggatgtgctggtgcgccacctgcccaagctgatccctgtgctggtgaatggcatgaagtacagcgacatcgacatcatcctgctgaagggagatgtggaggaggatgagaccatcccagattctgagcaggacatccggccccgcttccacaggagcaggacagtggcccagcagcatgatgaagatggcatcgaggaggaggatgatgatgatgatgaaattgatgatgatgacaccatcagtgactggaacctgaggaaatgttctgctgctgccctggatgtgctggccaacgtgtacagagatgagctgctgccccacatcctgcccctgctgaaggagctgctcttccaccacgagtgggtggtgaaggagagcggcatcctggtgctgggcgccatcgccgagggctgcatgcagggcatgatcccctacctgcctgagctgatcccccacctgatccagtgcctgagtgacaagaaggccctggtgcgcagcatcacctgctggaccctgagccgctatgcccactgggtggtgtcccagcccccagacacctacctgaagcccctgatgacagagctgctgaagaggatcctggacagcaacaagagggtgcaggaggccgcctgcagcgcctttgccaccctggaggaggaggcctgcacagagctggtgccctacctggcctacatcctggacaccctggtgtttgccttcagcaagtaccagcacaagaacctgctgatcctgtatgatgccatcggcaccctggccgacagcgtgggccaccacctgaacaagccagagtacatccagatgctgatgcctcctctcatccagaagtggaacatgctgaaggatgaggacaaggacctcttccccctgctggagtgcctgagctctgtggccacagccctgcagagcggcttcctgccctactgtgagcctgtgtaccagagatgtgtgaacctggtgcagaagaccctggcccaggccatgctgaacaatgcccagcctgaccagtatgaggccccagacaaggacttcatgattgtggccctggacctgctgagcggcctggccgagggcctgggcggcaacatcgagcagctggtggcccggagcaacatcctgaccctgatgtaccagtgcatgcaggacaagatgcctgaggtgcggcagagcagctttgccctgctgggggacctgaccaaggcctgcttccagcacgtgaagccctgcatcgctgacttcatgcccatcctgggcaccaacctgaaccctgagttcatctctgtgtgcaacaatgccacctgggccatcggggagatcagcatccagatgggcatcgagatgcagccctacatccccatggtgctgcaccagctggtggagatcatcaaccggcccaacacccccaagaccctgctggagaacacagccatcaccatcggccgcctgggctacgtgtgcccccaggaggtggcccccatgctgcagcagttcatccggccctggtgcaccagcctgaggaacatccgggacaatgaggagaaggacagcgccttccggggcatctgcaccatgatctctgtgaaccccagcggggtcatccaggacttcatcttcttctgtgatgctgtggcctcctggatcaaccccaaggatgacctgcgggacatgttctgcaagatcctgcacggcttcaagaaccaggtgggagatgagaactggaggcgcttcagtgaccagttccccctgcccctgaaggagcggctggccgccttctacggcgtgtag

SEQ ID NO: 127046 - DNA, 2697 bp, Artificial Sequence
  derived and/or modified sequence
atggtgtgggaccggcagaccaagatggagtacgagtggaagcccgatgaacagggtctgcagcagattctgcagttgttgaaggaatcccagagtccagacactacaattcagcgaaccgtgcagcagaagctcgaacagctgaatcagtaccccgattttaataactatctcatatttgtcctgaccaagctgaaatccgaggatgagccaacccgctcgctcagtgggcttatactgaagaacaacgtgaaggcccatttccagaacttccctaacggtgtaactgacttcatcaagtcagaatgtctgaacaatattggcgattccagccctctcattcgagctacagtgggcatattgattaccaccatcgcttcgaagggcgaattgcaaaactggcccgacttgttacccaagctgtgcagcctcctagacagtgaagactataatacttgtgaaggggcattcggggccctgcagaagatttgcgaagattcagccgagatcttagattctgacgttctggacaggcccctgaacattatgattccaaagttcctgcagttttttaaacactcctcccccaaaatccggtctcacgccgtcgcctgcgtgaaccagtttattatctcaagaacccaggctcttatgctccacatagacagctttattgaaaatctctttgccctggctggcgacgaagaacccgaggttcgcaaaaatgtttgcagggcgctggtgatgctcctggaagtccgcatggacagactcctccctcatatgcacaacattgttgagtatatgctccagagaacgcaagaccaagatgagaatgtcgccctcgaagcgtgcgaattttggctgactcttgctgagcagcccatctgcaaagacgtcctggtgcggcatttgccaaaactcatcccagttcttgtaaatggcatgaagtatagcgacatcgacattattctcttaaaaggggacgtggaggaggatgaaacaattccagactctgagcaggatatccgccccagatttcacagatcacgaaccgtggcccagcagcatgatgaagacggcattgaggaagaagatgatgacgacgacgaaatcgatgatgatgacaccatatcagattggaaccttcgaaagtgctccgcggccgccttagatgtgctagctaatgtgtacagggacgagcttttgccgcacatcctgcctcttcttaaagaactgctcttccaccacgaatgggtggtaaaggagagcggaatcctggtactgggggctatcgcggagggatgcatgcagggaatgattccctatctacccgagctgattccccatctgatacagtgcctttccgacaagaaggccctggtgagatcaatcacatgctggactctctcacgctatgcccattgggtcgtctcccaacctccggatacgtatctcaagcccctgatgacagagttattaaaacggatattggactctaataagcgggtacaggaagctgcgtgttctgccttcgctaccctagaggaggaggcatgcacagaattggtcccgtatttggcctacatactagatacattagtgttcgcgttttccaaataccagcataaaaacctgctcatcttatatgatgctattggcacgctggctgactcggttggccatcacctcaataagccggagtacattcagatgctgatgccccctcttatacagaagtggaatatgctaaaagatgaggataaagatcttttcccactgctggagtgtctctcctctgtggccactgctctccagagcgggttcctgccctattgtgagcccgtgtatcagaggtgcgtgaacttagtccagaagaccctcgcccaggctatgcttaacaatgctcaaccagaccagtacgaggcccctgataaagattttatgattgttgccctggacctcctgtctggcttggccgaggggcttgggggcaacattgagcagttggtggcacgcagtaacattttgacgcttatgtatcagtgtatgcaagacaagatgccagaggtgcgccagagtagtttcgctctgttgggagacctcacaaaggcatgtttccagcatgtgaaaccctgtatagccgattttatgccgatcctgggaacaaacctgaatcccgagttcatttccgtctgcaataatgcgacctgggctattggcgagatctcaattcagatgggaatagaaatgcagccatacatacctatggtgctccaccagttggtcgagattatcaaccgtccaaataccccgaagactcttctggagaatacggcgattacgatcggccgtcttgggtacgtatgtccgcaagaagtggctcccatgctgcagcagttcattaggccgtggtgtactagtctgcgaaacatcagagataatgaggagaaggactcagccttccgaggaatttgcaccatgattagcgtgaatcccagcggggtcatacaggacttcatctttttttgtgacgccgtcgcttcatggattaatccgaaggatgatctgagggacatgttttgcaaaattctccacgggttcaagaaccaagtgggtgatgaaaactggcgccgattttctgaccagtttccgttgcccttaaaagagcggctggctgctttttacggggtatag

SEQ ID NO: 127047 - DNA, 2547 bp, Artificial Sequence
  derived and/or modified sequence
atggtgtgggaccggcagaccaagatggagtacgagtggaagcccgacgagcagggcttgcaacagattttgcaactgctgaaggaatcccaaagtcccgatacgacaattcagcgaaccgtacagcagaaactggaacagctcaatcagtaccctgactttaataactacttgatttttgtcttgactaaacttaaatccgaaggaatcttaatcacaactatagcaagcaagggagagctgcagaattggccagaccttcttccgaaactttgttcccttttggattctgaggattacaacacatgtgaaggggccttcggagcacttcagaagatttgtgaggattcagctgagattctcgactctgacgtcttagaccgcccactgaacatcatgatacccaaatttttacagtttttcaaacattcatcacccaagattcggagccacgctgtggcctgcgtgaatcagttcataatatcccgcacgcaggcactaatgctccacattgactcattcattgaaaacctctttgctcttgcaggggacgaggaacctgaggttaggaagaacgtttgccgagcactcgtcatgctcctcgaggttaggatggatcgtctgttgccccacatgcacaacatcgttgaatacatgcttcagcgaactcaggatcaggacgaaaatgtggcccttgaggcttgtgagttttggttgacccttgctgaacaacccatctgcaaggacgtgctcgtccggcacctcccgaaattaattcctgtcttggtcaacggtatgaaatattcagacatcgatattatcctgcttaaaggtgatgtggaggaggacgagacaatacccgactccgagcaggacatacgccctcgcttccacaggagcagaacagtggctcaacagcatgatgaggatgggattgaagaagaggatgatgatgatgatgagattgacgatgatgacaccatttcagattggaatcttcgtaagtgttccgctgccgcattggatgtgcttgctaacgtgtatagggacgagttactaccgcacattctgccgctgctgaaagaattactgttccaccacgagtgggtagttaaggagagcggcatcttggtgctcggagctatcgccgagggctgcatgcagggcatgattccgtacctcccagaacttattccccatctgattcaatgcctatcagataaaaaagcactggtacgtagtatcacctgctggaccctgtcccgctacgcacactgggtcgtatcacagcctcccgacacatatcttaagccactcatgaccgaattattaaaaagaattctcgacagcaataaacgggttcaggaagctgcatgttcagcgttcgctacgctggaagaggaagcatgcactgagctcgtgccatatttggcttatattctggatactttggttttcgccttttctaagtaccaacataaaaatctgctgattctgtacgatgccatcgggaccctggcagattccgtgggacaccacctgaataaaccagagtatattcaaatgctaatgccccctctgatccagaagtggaatatgctcaaggacgaggacaaagatctgtttcctctccttgaatgtctgtcttctgttgctaccgcgttgcaatccggcttcctcccctactgcgaacctgtctatcaacgttgtgttaatcttgtacagaaaaccctggcccaggccatgctcaacaacgcccagcccgaccagtacgaggcccccgacaaggactttatgatcgtggcactggaccttctgagtggactagcagaggggctggggggcaacattgagcagcttgtcgcacggtcaaacatcttaacgcttatgtatcagtgcatgcaggacaaaatgccagaggtgcggcaatcctctttcgcactcctaggtgatctcaccaaagcatgcttccagcacgttaaaccctgcattgccgactttatgcccattctgggtacaaacctgaaccctgaattcattagcgtctgcaataacgccacttgggccataggcgagatttccattcagatgggtattgagatgcagccctacattcctatggtcctgcatcagctggtagagatcattaaccgccctaatacccctaaaaccttgctggaaaacacggccatcaccatcgggagactgggctacgtttgcccccaggaagttgcccccatgctgcagcagttcattagaccttggtgcacttcactgagaaacataagggataacgaagaaaaagatagtgccttcagaggcatctgcacgatgatctccgttaacccttcgggagtgatccaggactttatctttttttgcgatgcagtagcttcttggattaatcccaaggacgatcttagggacatgttctgtaaaatcctccatgggtttaaaaaccaagtaggcgatgagaactggcgaagatttagcgatcagtttcctctaccactgaaagaaaggctggcagctttttacggcgtttag

SEQ ID NO: 127048 - DNA, 2697 bp, Artificial Sequence
  derived and/or modified sequence
atggtgtgggaccggcaaaccaagatggaatacgagtggaaaccagacgaacagggcctgcagcagattctgcaattgttaaaggagtctcagtctcctgataccaccatccaacggactgtccaacaaaaactggagcagctcaaccagtatcccgatttcaacaactacttaatttttgtgctgaccaaacttaaaagcgaggatgaacctacccgctcgttgagtggactaatcttaaaaaacaatgtcaaagcacacttccagaattttccaaacggcgttacagactttattaagtctgaatgtctgaataacattggtgattcctcacccctaataagagcgactgtgggcatcctgatcactacgatcgcatctaagggagaactccagaactggcctgatttactacccaagctgtgctcattactggacagcgaagattataatacctgcgaaggcgctttcggagcactccagaagatctgcgaggattccgccgaaatcctggatagcgacgtgctcgacagacccctgaatataatgattccaaaattcctgcaattcttcaagcactcttcccccaagattcggagccatgctgtggcatgtgtgaaccaatttattattagccgtacgcaggcactgatgctgcatatcgactcgttcatcgaaaacctcttcgcgctagcgggtgatgaggaacccgaggtacgaaaaaatgtttgccgggcattggtgatgttactagaggtgagaatggataggctgttaccgcacatgcataacattgtcgagtatatgctgcaacggacccaggaccaggatgagaacgttgccctcgaggcttgcgaattctggctcaccctcgcagagcagcccatctgcaaggacgtcctggtgagacatctgccgaaactgattcccgttctggtaaacggaatgaaatatagcgacatcgacataatccttctcaagggagacgtagaagaggacgaaacaatccccgattccgagcaggatatccgacccagattccaccgctctagaaccgtggctcagcaacacgacgaagacgggatcgaagaagaagatgatgacgacgacgagatagacgacgatgataccatctcagattggaacctgaggaagtgctcagccgctgccctggacgtgctggcgaacgtgtatagggatgaactgctgcctcacatcttgcccctgctcaaagagttactgttccatcacgagtgggttgtgaaagagtccggcattctcgtcctgggggctatcgccgaaggatgtatgcagggaatgatcccatacttgcccgaactcatcccccacctaatacagtgtctttctgataagaaagctctggtccggtcaattacttgttggaccctttctcggtacgcgcattgggttgtgagtcaacccccagacacatacttaaagccgctcatgaccgagctacttaaacgaatactggacagcaacaagagggtgcaggaggccgcatgttcggccttcgccaccctggaggaggaggcctgcaccgaactcgtaccctatttggcttacattctggatacccttgtgttcgctttcagtaaataccagcacaagaacctgctcatactgtacgatgccattggcacattagccgattcagtgggtcatcacctgaacaagccggaatatatccagatgctaatgccaccattaattcaaaaatggaacatgcttaaggatgaggacaaggaccttttcccactgctggaatgtctatcttcggtcgcgactgcgttacagtcaggcttcctgccatattgcgaaccagtttatcagagatgcgttaatttggtccagaagacactggcccaggcaatgcttaataatgctcagccagaccaatatgaggctcctgacaaagatttcatgatcgttgccctcgacctcctatctggcctggcagagggattgggcggaaatatagaacagttagtagccagatctaacatattgacgttgatgtaccagtgtatgcaggataaaatgcccgaggttcggcagagttccttcgcactcttaggggacctaaccaaggcctgcttccagcatgtcaaaccatgcatcgcagactttatgccaatcttgggtaccaatctaaatcctgaatttattagtgtctgtaataacgccacctgggccatcggcgaaatttcgattcagatgggaatcgaaatgcagccctacattcccatggtgctgcaccaactagtcgagattatcaacagaccaaacacacctaaaacgcttctagaaaatactgccatcactatagggagactcggttatgtgtgccctcaggaagtggcaccaatgctccagcagttcatcagaccctggtgcacatcacttcgaaacatccgggataatgaagaaaaagatagtgcctttcgtggaatctgtaccatgatttcagtgaacccatcaggtgtgatacaggacttcattttcttctgcgacgcggttgcatcttggatcaatccaaaggatgaccttagggatatgttttgtaagatcctgcacggatttaagaatcaagttggcgacgagaactggcgcagatttagcgatcagttccctcttcctctcaaagaacgtctcgctgccttctatggcgtgtag

SEQ ID NO: 127049 - DNA, 2547 bp, Artificial Sequence
  derived and/or modified sequence
atggtgtgggataggcagacaaagatggaatacgaatggaagccagatgagcagggattgcagcaaattctgcagctcctgaaggaatcacagtcccctgacaccaccatccagcgcaccgtccagcaaaagctggagcagcttaaccagtatcccgattttaataattatctgatctttgtgctcaccaagctgaagtccgaaggaatcctaattacaactatcgcctcgaagggagagctgcaaaattggccggacctgctgcctaaactttgtagcttactcgactcagaagattataatacgtgcgagggcgcattcggagccctgcagaaaatctgtgaagacagcgctgagattttggattccgacgtactggacagacccctgaacatcatgatcccgaagtttctgcaattcttcaagcattcatcacctaagattagaagtcatgccgtggcttgtgttaaccagtttatcataagcagaacccaggccctgatgctgcacatcgatagctttattgagaacttatttgctctggcaggcgacgaggaacctgaagttcgcaagaacgtgtgtagagctttggtcatgctgttagaggtccgtatggatagactcctgccacatatgcataacatcgtggagtacatgctgcagagaactcaggatcaagacgagaacgtggccctcgaggcttgtgaattttggttaactctcgccgagcagccaatctgcaaagacgttctggtccgccatctgcccaagctgatacctgttctggtgaatggtatgaagtactcagatatcgacattatcctgctgaaaggggatgtggaagaggatgaaacaatccccgattccgagcaagacatccgtccaaggtttcacagaagcaggacagtagcccagcagcacgatgaggatggaatagaggaggaagacgatgacgacgatgagatagacgacgacgataccatatccgactggaacttgagaaagtgctcagccgcagcgcttgatgttttagctaatgtctatagggacgaactactgcctcacatcctcccgcttcttaaagagttactctttcaccatgaatgggttgtaaaagaatccgggatcctggttctaggcgctatcgccgaaggctgcatgcagggaatgataccttacctacccgaattgattcctcatctgattcagtgcctttcggacaaaaaggcactggtcaggtccataacctgctggacactcagcagatacgcgcactgggtggtttcacaacccccagatacatacctcaaacctttgatgaccgagctgctaaagcggatcctggactccaataagcgggtccaagaggcagcgtgttcggcttttgctacactggaggaagaggcttgcactgaactagttccatacttagcttacattttggacaccctggtttttgcattctccaaatatcagcataagaacctgttgattctctacgatgccatcggcaccttagcagactcagtcggacatcatctgaataagcctgagtacattcagatgcttatgcctccgctgattcagaaatggaacatgcttaaggatgaagacaaggacctgttccctttgctggagtgcctatcctcggtcgcaactgccctgcagagtggttttctgccctattgtgagcccgtgtaccaacggtgcgtaaatcttgtgcagaaaacccttgcccaagcaatgcttaataacgctcagccagatcaatacgaagccccagacaaagacttcatgattgttgctctggatctgctttccggactggccgaggggctggggggaaacattgagcagcttgtggccaggtccaatattcttaccctcatgtatcagtgcatgcaagacaaaatgccggaggtgcgccagtcttcttttgcgctgctgggcgatctgaccaaggcctgtttccagcacgttaagccctgcattgccgactttatgccaatcttgggcactaacttgaaccccgagttcatctctgtctgtaataatgcgacatgggccatcggtgagataagtatccaaatgggcattgagatgcagccatacatccctatggtactgcatcagctggtggagattataaaccgaccaaatacaccaaagaccctcctggaaaacacagctatcaccatcgggaggttgggttatgtttgcccgcaagaggtggcgccaatgttgcagcaattcattcggccatggtgcacaagcctcagaaacattagggataatgaagagaaagattctgctttcagaggcatttgcacaatgatttctgttaacccctcaggtgtgattcaggatttcatcttcttttgtgatgccgtggcctcctggatcaatcccaaagatgacctgcgagacatgttttgcaaaatcttacatggctttaagaaccaagtgggcgatgaaaattggcgcaggttcagcgaccaattccctctgcccctcaaggaaaggctggccgctttttatggtgtgtag

SEQ ID NO: 127050 - DNA, 11183 bp, Artificial Sequence
  derived and/or modified sequence
acagtctgggcaaccacaccggcgggccgttttgctcacagccccaccgcgccgggcagcgtctgcagctgctgcgtgcgagacccagaggctccggtcagcgcgccggccgcagggagtgcgagcacttgtgagccccgcgccgggccggtgaagtctggtgctgccgagcccgcttagaaagcacggccgcgcgctgtcggacgcaggcccacaggcccagccgacccaggcagcaattttcctagccccgccgccgttgccaaggcgaccgccgccgaatgttcccgccgcgggctccgccccccggccaatcggaccggcgctcggtgaagcccagattctctttgttccgcagccatttcaggccccggacaggaggcagtgccgcttcggccgaaggcccgagcgcccgaggcgtctgggatggtgtgggaccggcaaaccaagatggagtatgagtggaaacctgacgagcaagggcttcagcaaatcctgcagctgttgaaggagtcccagtccccagacaccaccatccagagaaccgtgcaacaaaaactggaacaacttaatcagtatccagactttaacaactacttgatttttgttcttacaaaattaaaatctgaagatgaacccacaagatcattgagtggtcttatcttgaagaataatgtgaaagcacactttcagaacttcccaaatggtgtaacagactttattaaaagtgaatgtttaaataatattggtgactcctctcctctgattagagccactgttggtattttgatcacaactatagcctccaagggagaattgcagaattggcctgacctcttaccaaaactctgtagcctgttggattctgaagattataatacctgtgagggagcatttggtgcccttcagaagatttgtgaagattctgctgagattttagacagtgatgttttagatcgtcctctcaacatcatgattcccaaatttttacagttcttcaagcatagtagtccaaaaataaggtctcacgctgttgcatgtgtcaatcagtttatcatcagtaggactcaagctctaatgttgcacattgattcttttattgagaatctctttgcattagctggtgatgaagaaccagaggtacggaaaaatgtgtgccgagcacttgtgatgttgctcgaagttcgaatggatcgcctgcttcctcacatgcataatatagttgagtacatgctacagaggactcaagatcaagatgaaaatgtggctttagaagcctgtgaattttggctaactttagctgaacagccaatatgcaaagatgtactcgtaaggcatcttcctaagttgattcctgtgttagtgaatggcatgaagtactcagacatagatattatcctacttaagggtgatgttgaagaagacgaaacgattcctgatagtgaacaggatatacggccacgttttcaccgatcgaggacggtggctcagcagcatgatgaagatggaattgaagaggaagatgatgatgatgatgaaattgatgatgatgatacaatttctgactggaatctaagaaaatgttctgctgctgccctggatgttcttgcaaatgtgtatcgtgatgaactgctgccacatattttgccccttttgaaagaattactttttcatcatgaatgggttgttaaagaatcaggcattttggttttaggagcaattgctgaaggttgcatgcagggcatgattccatacttgcctgagcttattcctcaccttattcagtgcctctctgataaaaaggctcttgtgcgttccataacatgctggactcttagccgctatgcacactgggtggtcagccagccgccagacacgtacctgaagccattaatgacagaattgctaaagcgcatcctggacagcaacaagagagtacaagaagctgcctgcagtgcctttgctaccctagaagaggaggcttgtacagaacttgttccttaccttgcttatatacttgataccctggtctttgcatttagtaaataccagcataagaacctgctcattctttacgatgccataggaacattagcagattcagtaggacatcatttaaacaaaccagaatatattcagatgctaatgcctccactgatccagaaatggaacatgttaaaggatgaagataaagatctcttccctttacttgagtgcctatcttcagttgccacagcactgcagtctggattccttccgtactgtgaacctgtgtatcagcgttgtgtaaacctagtacagaagactcttgcacaagccatgctaaacaatgctcaaccagatcaatatgaagctccagataaagattttatgatagtggctcttgatttactgagtggcctggctgaaggacttggaggcaacattgaacagctggtagcccgaagtaacatcctgacactaatgtatcagtgcatgcaggataaaatgccagaagttcgacagagttcttttgccctgttaggtgacctcacaaaagcttgctttcagcatgttaagccttgtatagctgatttcatgccaatattgggaaccaacctaaatccagaattcatttcagtctgcaacaatgccacatgggcaattggagaaatctccattcaaatgggtatagagatgcagccttatattcctatggtgttgcaccagcttgtagaaatcattaacagacccaacacaccaaagacgttgttagagaatacagcaataacaattggtcgtcttggttacgtttgtcctcaagaggtggcccccatgctacagcagtttataagaccctggtgcacctctctgagaaacataagagacaatgaggaaaaggattcagcattccgtggaatttgtaccatgatcagtgtgaatcccagtggcgtaatccaagattttatatttttttgtgatgccgttgcatcatggattaacccaaaagatgatctcagagacatgttctgtaagatccttcatggatttaaaaatcaagttggcgatgaaaattggaggcgtttctctgaccagtttcctcttcccttaaaagagcgtcttgcagctttttatggtgtttaatctaatacacttaagctgcagtcccaaaattaggggtccttcagtcttggagactataagggagcctctgcacccagggaaaatgttaccctttacaggggggaagggtaaaccagtagggaatacagtacaatcccaaccctactgggaggggcgggagggaggtgttgccgtcactgtattaagtcgatgttgggaaacgttttaacatctggagcctttgtgggtggaaatatgtctccagttacaactccgcagtggatgtgaagaagcaaaaaaaaaaaaatctattcagtctactcacaaaacagtacattgtggaatattatggggaattgtaccaaaacaagaaccatataaatgatgcctagggacaagaaagaggaacaattctatagcgcacaataaaggaaacctaagaatgggagttacaaatagtaaagaagctttttttttttttttaatttaaagtttttttatgtaagttttcccacatgatggggccttgttttgcatgttgatgaagaactacacaaagaaaactaatatagttaaaagtcagcttgccttcccgtagtagaagcaggttcttggaagttacaatttaaggtaccccaaaaaagttggaaataaaacaaaacaaacataaacaatgaagcaccctgtgaaatgccaaatgagtcactccttttaccttttttggggtgggcagggagggaggaataaatggggttgggcatatcaaactaaagatgacatcttaattttgcattgaacattaatgtagcggatataatttgatgattatacttcattagatttaatttctaggccaagatgttactttttaaagtgcagtttaaggttcaggcatgcattctggctcatagtggttgaaagtaatttaaattagtgggaaagtagcatgcttgcatcacatagagtgagattggtattcatttacctatgttgcgccagtttgtgttgcagtttaccaattcaatatagccctgcatttaaagttcctttttaagatttgtggattttatttttattaagaacatagatatataaagtactgtagtttacaggtaggccttgaaatatcttttttaggatctgttaggaataagattgatattgtattgtgtgtaacctgcacaatgtggaaagctgatatacctgtgcaaaatctttgcctctgtgctgtcagtgtgatgtgctttctgcatggttatatactactagtgattttatcaaaacttctaaaatttaaattacgtggtaaaagatctgtaaaaggctgcataaatgttagttggcacataaagacaattgtagaagttgaaaaatgattgctatatttcaatgtttattcccactcaacatactgccttctaagcttccctttttttgttcaaagcatgatcttaaagatatgtttaagttaatggatgtaatgcagggttcctacactgtattttggcgcatgttggtggccctctgtgccctagatatatgcacacagggtgcaagttaaaagctacagagtgaaagttggtttggatcctcttcatttcatttgtttagcttttctgttatttttctctacttacatgtattcctgtgaataaatccttgttaagttaaccctttacttttccttccatgtgtattttcttatatactgtgaatgtgaaaacctaactggtacacttgatcttgtgttcatatgaaagtgcaagtctttattaatttggattgcctgaacagtgtatcccatgatgatgaaggaaaatggagagatttttctttttaactctgctggtcagagatgaagccacgcctttccatttttcaatgctgcatatttaatctgcaacaaaaatgttaagccataacagcctttttatattttagtttgtcacctttgcattgcagaataaatactgaataaccatttttataagcagttgctcctctttgcatggttctattctctaaaagtgttgaatgatacagccattgcactgaagtttgagctgtgtgcgtgtgaatttatactgtttcaaaaatttcaaatgcatggtagcatgtagaaaggtttttgttactatgtgtgtgtgtgtgttttgttttgttttgttctgttttttaacgttctttcacctttcctctactttggctttgcaaatttcagtctgtagagcctgaaattaaattattttatagtgcctgatatttttaatattataagttggattcaaagggtatacagcattttgttttctagtaccattgcttcactgggagctcaaaatttgcctccctgttagtctttaataactgagtagagtagcttttttattcttagattatagtgatattctgtagtgcttcaaatacttagaattctaatatgagagatagtttaatattctggaatagagagtattttaaattgaaatgaccaaattcgatttaaaacaaacacataacaatcttcagtaaagttatttgaacctgtggttgacaattctgtattgactaaaggcaatattgtcacctgtctcattaaaaattagtttccagttaggcagatgaataacactattaaaaatgcacccagttttgtagtcacttgactttttttttttatttaaatgaaatttaatttgaaaatagaaaataaaattaggtaaatatgactggcaacctgaatttgagttgggattctttgtgtatttttcccccttgaggttattgtttcttcctaatttatatttcagatacatagtgtagaacaggaatttgcagaagccatttaagttatcttttgaggtaagctctgatttagcatttattctgataaaatctaatacatcatgggatatatataaagcaacttaattcttgtggtgtagtcttaatagttttgaatgttgactgaatgtctataaaattgtgagtttgtctttgttacattccagtgtttctgcctcttggcatgcttaaagcacggcttacttcatctgctccttacacactaaaatgctgttagtgtgctcaactacagaaatagccgctgctaagtgatgtagattttctacttgaatatttttatgttgtaggaacctcaggaggtcagtgtttactgttttatatatgccttctttttcctgtttgagcttctctctttgaaggattctaacagaacaaagctgctgatcaacctaagttggaaacagaaagtgtaattaatataacttaaatgcatgtttggcagttccatgttacagtccattagcgagtgaacttagtgccacaggtattcatttattcaggaaagaattttgctttttgtattgtctaatctcttcaatgacttcatactgtgtaaaaaaaaatcactttttaatattttttggttggttatttcccaaataatcaacatgtaaataatcttttaagagccagttctgatgctttacattattgctacttgattttgttatgcaagttagatttcagaagaatagattttaaaacacttaaccaagccattacatcttaaaaacaaaacaagtagcatacattttgtaattaacattgataaacactgtgatttttttggttaagactttttcattgatctgaattgcttaaattgcatatattgtaaaataggatcagatgtatattttaaactaatttcaatggattttcctcttgaaatgctttgtctactcagttataaaatattcagatacaagttttatctcaggtgaatactcttgtattgtttttgctttggtgacatgcttataaagggtcatcctagttacattctttgttttttaagtgtatttcattgagaatctttccatttagtctgatttttttcctaatattctagcaggctggggtggtataaagccctcctgacaagccttttgcctacaggtttacctgaaaatgagctacatatggtcgtcattttcttcaaactctcaaaataggaaagtggaaatttttctcccctatataaaattattctgcctagcagaaatgccagaaataaattaattgcatcttagtctaaatttaagtcctttgccatgaggaaaaagtggttttttgcttcatatggtaaatctatattattcatattgaatgtattaacagataatggtgcaaaagcattcttcccaggggaagagtgtatcatgcataactgcaatttaagtccttcctttgataatacttcaaaacatacacagctttgcttactgaattatttttgcaaataatacaaggaggggaaactaacttgctactagtgttgttaatgaagtataggccttggaacatttaagaaaactggtcttcagatagttaagggcttgggataatttaagtgaaaagtgagatcagtaatgagctgtgttgttaacaatattatctggtaataataccatgcaatatagcgttgtataccaacttagtgcattttatactgtattaaatatggagatacttctaatgcctctctaaaattaaattttacataaaagttagttttattcacctttaggctttccaagtgaattgtgactaattttttcaatcttacatagatctttcacccattagcattacttacgtagataattctttatgcctagttattatacatattaatttttaaggtatacatttaaattacacaattgttcattgtggtttgtatcccagaatgtgttgtgttttttaaaagatgcataatagctgaatgtatgcatgactttgaaagaagttaaaatggtgattttttttcacctcttgtacattttaaaaccaggccaaatctatttgccaagcagtgtatcactaataagaaaagcagtttttccttttattgcagtttttgtttatctgccatagaatttccttatactgtggcttggtattattcaagattagctatttcgctggtattacatctttttaaaagcctattataacatggttagcctataaggcagtgttggtccccttctaatattggcctcataaaggggttccactgtactttccgcatattactgtgttgttgttttcctttgtggatatataagcaaattgagcttgggtgatttttatggagacaataattagacaatactgtataattagttttacttaatagattatcatcttgtgagaagagatgtttaaacgtggtaaatcacttcatattacaaaacagttttacacttaatatgttaacattgggtgcaataatttagtagcattagctttagttacaaatataactggatctttctgctgacaacttaggttgtatgagttatgcttaaaagctttaaatctgatgtttcctgtacctgccacactatgttagaatgtgtccttcaaacatatcctcctgcaacttctcaaactgtactaaattgatatttcttgaagtctaactctgtgctaacagatctccattttaaatagaatacggttttaatttttgataagctgctgaattttaaagagagttttttggggccaccaaatattttggatcatgcagagaatatatattgtactgtagtaattttgtatttacatttgtatgatgtgacataatagatgtgaatgttaatcactgcttgactatgttaataaagttgtttaactatagatgttgcactctgatttttaatgaaaggaaatgagttttctttttccctcttaccccattttggatctagataagccttatgttttttgggatttttttccttgtttttagtttgaggttttgttttgttttttccttagcttacacattagtacacttttgttgttgaacatcatttatttcttaaaacaagtgttttcttatttgtatagtatagtaaaaacctgtttttccacattttaacttaactccttgatgtgttttaaacagttgattataggttctgctgtttgaggataggggacatactattctgtaaaaggaattaaaggcgaaattgtgaatataaaaagttgatgtaaggagagattgcatgagtgtgtatgaatgtatgtcctattaaggcttcctctttatccttcaaacagttaagatttgtaatttggggaattaacatttataagagtaattttttcttcaggttgtaaggcattaatatagttgcatgttactaattaaatgtattaacacatttcagggagtatgtgtgcataactgtcatggttttttttgttttttgtcttgtttttgagatggagtcttgctctgttgcccaggctggagtgcagtggcacagtcttgtctcactgcaacctctgcctcccgggttcaaacgactctcctgcctcagcttcccaagtagttgggattaaggcatgtgccgtcacacccggctaacttttatattttcagtaaagatgggggttcaccatgttggccaggctagtctcgaactcctggcctcaggtgatccacctgtctcggcctctcaaagtgttgggattacagctgtgagccaccatgcctggccttgtcatacagccttttgagatttagaacaggaaagagcctaaaattaaatcagtacaattccaaaacttttaagagaggtgaggcttgggtttctttttctttgttacctggccaagaaaatatttgagaagagagagttctcttgtgttaacaagaaaataaaattgaaacttggacatcatgttctaaaacacagcctcaagagtttaatattccagaattttaggacttaggttgtggggaaaagataattaaagtcatcctaattcttgttcaagattaggaaccaaaagtcttttctaagtcgtcaatattttagtgatactaaagccctatccattttatgcaaatgatctttttcttctcagttcaggtgatgaaaccatcgtaatgataaatgagtaaggctggcttaacaattcttggactggcgggcattcttgtaatgagttcataatcagtatgactccacaatttcacgtgattctttaagaatgattggaaaagtggcagcaggaactacagagctaacttgaatttcctttgtgttctatacagttgaatatggaattaccaaagctctgtcattttaaaaattctttatttctgagttgttaatttgatgtaaaagtgtaagaacccccgaaacatctccattattcagatagacacaaataatgtacacatcacaattagtatatattttttttaattgagaggactctggctctgtctcccagtcttcagtggcacgatatctgctccctgcaacttccgcctcctaggttcaagcaattctcccatctcagcctcccaagtagctgggattacaggcgcacgccaccaggcctggctaatttttttttttttttttttttttttttttttttaggagagagtttggccgtgttggccaggctggtctcgaactcctgacctcgagtgaacacctcgagtggtacgcccacctttgcctcccaaattgctgggattacagttgtgagccaccgcccctggcgacaatttgtaaatttaacgcaatttctaaaccattggcaagaacaatacagagaagagttgttatactgagaccctttaggtttttgtaccagtcaattcttacatgcatgttatggcagtctcactctgatgatttaaatcttaagtattcttttcaagctttgtgttacttcttgaagaacttgaaacaattttaagaaagacaagtgaacagttaaatgaattgtaatacaactacctagtgataactgctgttaatatcctgtgcacatatataaatatatggtgaatttgtgtttttagttatatccagaattgtttgttaatatacatggacatacctacatattattctataagcaatttatgcaactgtcttactgttgttggacattcagaagttttttctaatttttcactcttagaaataaagttttagtgagagtcgcaa

SEQ ID NO: 127051 - DNA, 8409 bp, Artificial Sequence
  derived and/or modified sequence
gaatgttcccgccgcgggctccgccccccggccaatcggaccggcgctcggtgaagcccagattctctttgttccgcagccatttcaggccccggacaggaggcagtgccgcttcggccgaaggcccgagcgcccgaggcgtctgggatggtgtgggaccggcaaaccaagatggagtatgagtggaaacctgacgagcaagggcttcagcaaatcctgcagctgttgaaggagtcccagtccccagacaccaccatccagagaaccgtgcaacaaaaactggaacaacttaatcagtatccagactttaacaactacttgatttttgttcttacaaaattaaaatctgaaggtattttgatcacaactatagcctccaagggagaattgcagaattggcctgacctcttaccaaaactctgtagcctgttggattctgaagattataatacctgtgagggagcatttggtgcccttcagaagatttgtgaagattctgctgagattttagacagtgatgttttagatcgtcctctcaacatcatgattcccaaatttttacagttcttcaagcatagtagtccaaaaataaggtctcacgctgttgcatgtgtcaatcagtttatcatcagtaggactcaagctctaatgttgcacattgattcttttattgagaatctctttgcattagctggtgatgaagaaccagaggtacggaaaaatgtgtgccgagcacttgtgatgttgctcgaagttcgaatggatcgcctgcttcctcacatgcataatatagttgagtacatgctacagaggactcaagatcaagatgaaaatgtggctttagaagcctgtgaattttggctaactttagctgaacagccaatatgcaaagatgtactcgtaaggcatcttcctaagttgattcctgtgttagtgaatggcatgaagtactcagacatagatattatcctacttaagggtgatgttgaagaagacgaaacgattcctgatagtgaacaggatatacggccacgttttcaccgatcgaggacggtggctcagcagcatgatgaagatggaattgaagaggaagatgatgatgatgatgaaattgatgatgatgatacaatttctgactggaatctaagaaaatgttctgctgctgccctggatgttcttgcaaatgtgtatcgtgatgaactgctgccacatattttgccccttttgaaagaattactttttcatcatgaatgggttgttaaagaatcaggcattttggttttaggagcaattgctgaaggttgcatgcagggcatgattccatacttgcctgagcttattcctcaccttattcagtgcctctctgataaaaaggctcttgtgcgttccataacatgctggactcttagccgctatgcacactgggtggtcagccagccgccagacacgtacctgaagccattaatgacagaattgctaaagcgcatcctggacagcaacaagagagtacaagaagctgcctgcagtgcctttgctaccctagaagaggaggcttgtacagaacttgttccttaccttgcttatatacttgataccctggtctttgcatttagtaaataccagcataagaacctgctcattctttacgatgccataggaacattagcagattcagtaggacatcatttaaacaaaccagaatatattcagatgctaatgcctccactgatccagaaatggaacatgttaaaggatgaagataaagatctcttccctttacttgagtgcctatcttcagttgccacagcactgcagtctggattccttccgtactgtgaacctgtgtatcagcgttgtgtaaacctagtacagaagactcttgcacaagccatgctaaacaatgctcaaccagatcaatatgaagctccagataaagattttatgatagtggctcttgatttactgagtggcctggctgaaggacttggaggcaacattgaacagctggtagcccgaagtaacatcctgacactaatgtatcagtgcatgcaggataaaatgccagaagttcgacagagttcttttgccctgttaggtgacctcacaaaagcttgctttcagcatgttaagccttgtatagctgatttcatgccaatattgggaaccaacctaaatccagaattcatttcagtctgcaacaatgccacatgggcaattggagaaatctccattcaaatgggtatagagatgcagccttatattcctatggtgttgcaccagcttgtagaaatcattaacagacccaacacaccaaagacgttgttagagaatacagcaataacaattggtcgtcttggttacgtttgtcctcaagaggtggcccccatgctacagcagtttataagaccctggtgcacctctctgagaaacataagagacaatgaggaaaaggattcagcattccgtggaatttgtaccatgatcagtgtgaatcccagtggcgtaatccaagattttatatttttttgtgatgccgttgcatcatggattaacccaaaagatgatctcagagacatgttctgtaagatccttcatggatttaaaaatcaagttggcgatgaaaattggaggcgtttctctgaccagtttcctcttcccttaaaagagcgtcttgcagctttttatggtgtttaatctaatacacttaagctgcagtcccaaaattaggggtccttcagtcttggagactataagggagcctctgcacccagggaaaatgttaccctttacaggggggaagggtaaaccagtagggaatacagtacaatcccaaccctactgggaggggcgggagggaggtgttgccgtcactgtattaagtcgatgttgggaaacgttttaacatctggagcctttgtgggtggaaatatgtctccagttacaactccgcagtggatgtgaagaagcaaaaaaaaaaaaatctattcagtctactcacaaaacagtacattgtggaatattatggggaattgtaccaaaacaagaaccatataaatgatgcctagggacaagaaagaggaacaattctatagcgcacaataaaggaaacctaagaatgggagttacaaatagtaaagaagctttttttttttttttaatttaaagtttttttatgtaagttttcccacatgatggggccttgttttgcatgttgatgaagaactacacaaagaaaactaatatagttaaaagtcagcttgccttcccgtagtagaagcaggttcttggaagttacaatttaaggtaccccaaaaaagttggaaataaaacaaaacaaacataaacaatgaagcaccctgtgaaatgccaaatgagtcactccttttaccttttttggggtgggcagggagggaggaataaatggggttgggcatatcaaactaaagatgacatcttaattttgcattgaacattaatgtagcggatataatttgatgattatacttcattagatttaatttctaggccaagatgttactttttaaagtgcagtttaaggttcaggcatgcattctggctcatagtggttgaaagtaatttaaattagtgggaaagtagcatgcttgcatcacatagagtgagattggtattcatttacctatgttgcgccagtttgtgttgcagtttaccaattcaatatagccctgcatttaaagttcctttttaagatttgtggattttatttttattaagaacatagatatataaagtactgtagtttacaggtaggccttgaaatatcttttttaggatctgttaggaataagattgatattgtattgtgtgtaacctgcacaatgtggaaagctgatatacctgtgcaaaatctttgcctctgtgctgtcagtgtgatgtgctttctgcatggttatatactactagtgattttatcaaaacttctaaaatttaaattacgtggtaaaagatctgtaaaaggctgcataaatgttagttggcacataaagacaattgtagaagttgaaaaatgattgctatatttcaatgtttattcccactcaacatactgccttctaagcttccctttttttgttcaaagcatgatcttaaagatatgtttaagttaatggatgtaatgcagggttcctacactgtattttggcgcatgttggtggccctctgtgccctagatatatgcacacagggtgcaagttaaaagctacagagtgaaagttggtttggatcctcttcatttcatttgtttagcttttctgttatttttctctacttacatgtattcctgtgaataaatccttgttaagttaaccctttacttttccttccatgtgtattttcttatatactgtgaatgtgaaaacctaactggtacacttgatcttgtgttcatatgaaagtgcaagtctttattaatttggattgcctgaacagtgtatcccatgatgatgaaggaaaatggagagatttttctttttaactctgctggtcagagatgaagccacgcctttccatttttcaatgctgcatatttaatctgcaacaaaaatgttaagccataacagcctttttatattttagtttgtcacctttgcattgcagaataaatactgaataaccatttttataagcagttgctcctctttgcatggttctattctctaaaagtgttgaatgatacagccattgcactgaagtttgagctgtgtgcgtgtgaatttatactgtttcaaaaatttcaaatgcatggtagcatgtagaaaggtttttgttactatgtgtgtgtgtgtgttttgttttgttttgttctgttttttaacgttctttcacctttcctctactttggctttgcaaatttcagtctgtagagcctgaaattaaattattttatagtgcctgatatttttaatattataagttggattcaaagggtatacagcattttgttttctagtaccattgcttcactgggagctcaaaatttgcctccctgttagtctttaataactgagtagagtagcttttttattcttagattatagtgatattctgtagtgcttcaaatacttagaattctaatatgagagatagtttaatattctggaatagagagtattttaaattgaaatgaccaaattcgatttaaaacaaacacataacaatcttcagtaaagttatttgaacctgtggttgacaattctgtattgactaaaggcaatattgtcacctgtctcattaaaaattagtttccagttaggcagatgaataacactattaaaaatgcacccagttttgtagtcacttgactttttttttttatttaaatgaaatttaatttgaaaatagaaaataaaattaggtaaatatgactggcaacctgaatttgagttgggattctttgtgtatttttcccccttgaggttattgtttcttcctaatttatatttcagatacatagtgtagaacaggaatttgcagaagccatttaagttatcttttgaggtaagctctgatttagcatttattctgataaaatctaatacatcatgggatatatataaagcaacttaattcttgtggtgtagtcttaatagttttgaatgttgactgaatgtctataaaattgtgagtttgtctttgttacattccagtgtttctgcctcttggcatgcttaaagcacggcttacttcatctgctccttacacactaaaatgctgttagtgtgctcaactacagaaatagccgctgctaagtgatgtagattttctacttgaatatttttatgttgtaggaacctcaggaggtcagtgtttactgttttatatatgccttctttttcctgtttgagcttctctctttgaaggattctaacagaacaaagctgctgatcaacctaagttggaaacagaaagtgtaattaatataacttaaatgcatgtttggcagttccatgttacagtccattagcgagtgaacttagtgccacaggtattcatttattcaggaaagaattttgctttttgtattgtctaatctcttcaatgacttcatactgtgtaaaaaaaaatcactttttaatattttttggttggttatttcccaaataatcaacatgtaaataatcttttaagagccagttctgatgctttacattattgctacttgattttgttatgcaagttagatttcagaagaatagattttaaaacacttaaccaagccattacatcttaaaaacaaaacaagtagcatacattttgtaattaacattgataaacactgtgatttttttggttaagactttttcattgatctgaattgcttaaattgcatatattgtaaaataggatcagatgtatattttaaactaatttcaatggattttcctcttgaaatgctttgtctactcagttataaaatattcagatacaagttttatctcaggtgaatactcttgtattgtttttgctttggtgacatgcttataaagggtcatcctagttacattctttgttttttaagtgtatttcattgagaatctttccatttagtctgatttttttcctaatattctagcaggctggggtggtataaagccctcctgacaagccttttgcctacaggtttacctgaaaatgagctacatatggtcgtcattttcttcaaactctcaaaataggaaagtggaaatttttctcccctatataaaattattctgcctagcagaaatgccagaaataaattaattgcatcttagtctaaatttaagtcctttgccatgaggaaaaagtggttttttgcttcatatggtaaatctatattattcatattgaatgtattaacagataatggtgcaaaagcattcttcccaggggaagagtgtatcatgcataactgcaatttaagtccttcctttgataatacttcaaaacatacacagctttgcttactgaattatttttgcaaataatacaaggaggggaaactaacttgctactagtgttgttaatgaagtataggccttggaacatttaagaaaactggtcttcagatagttaagggcttgggataatttaagtgaaaagtgagatcagtaatgagctgtgttgttaacaatattatctggtaataataccatgcaatatagcgttgtataccaacttagtgcattttatactgtattaaatatggagatacttctaatgcctctctaaaattaaattttacataaaagttagttttattcacctttaggctttccaagtgaattgtgactaattttttcaatcttacatagatctttcacccattagcattacttacgtagataattctttatgcctagttattatacatattaatttttaaggtatacatttaaattacacaattgttcattgtggtttgtatcccagaatgtgttgtgttttttaaaagatgcataatagctgaatgtatgcatgactttgaaagaagttaaaatggtgattttttttcacctcttgtacattttaaaaccaggccaaatctatttgccaagcagtgtatcactaataagaaaagcagtttttccttttattgcagtttttgtttatctgccatagaatttccttatactgtggcttggtattattcaagattagctatttcgctggtattacatctttttaaaagcctattataacatggttagcctataaggcagtgttggtccccttctaatattggcctcataaaggggttccactgtactttccgcatattactgtgttgttgttttcctttgtggatatataagcaaattgagcttgggtgatttttatggagacaataattagacaatactgtataattagttttacttaatagattatcatcttgtgagaagagatgtttaaacgtggtaaatcacttcatattacaaaacagttttacacttaatatgttaacattgggtgcaataatttagtagcattagctttagttacaaatataactggatctttctgctgacaacttaggttgtatgagttatgcttaaaagctttaaatctgatgtttcctgtacctgccacactatgttagaatgtgtccttcaaacatatcctcctgcaacttctcaaactgtactaaattgatatttcttgaagtctaactctgtgctaacagatctccattttaaatagaatacggttttaatttttgataagctgctgaattttaaagagagttttttggggccaccaaatattttggatcatgcagagaatatatattgtactgtagtaattttgtatttacatttgtatgatgtgacataatagatgtgaatgttaatcactgcttgactatgttaataaagttgtttaactata

SEQ ID NO: 127052 - DNA, 3028 bp, Artificial Sequence
  derived and/or modified sequence
gccgggctgccaggagcagttccgccgggtttcactgtccgtgacttccttcggggcacctcaggcagcaaaccaagatggagtatgagtggaaacctgacgagcaagggcttcagcaaatcctgcagctgttgaaggagtcccagtccccagacaccaccatccagagaaccgtgcaacaaaaactggaacaacttaatcagtatccagactttaacaactacttgatttttgttcttacaaaattaaaatctgaagatgaacccacaagatcattgagtggtcttatcttgaagaataatgtgaaagcacactttcagaacttcccaaatggtgtaacagactttattaaaagtgaatgtttaaataatattggtgactcctctcctctgattagagccactgttggtattttgatcacaactatagcctccaagggagaattgcagaattggcctgacctcttaccaaaactctgtagcctgttggattctgaagattataatacctgtgagggagcatttggtgcccttcagaagatttgtgaagattctgctgagattttagacagtgatgttttagatcgtcctctcaacatcatgattcccaaatttttacagttcttcaagcatagtagtccaaaaataaggtctcacgctgttgcatgtgtcaatcagtttatcatcagtaggactcaagctctaatgttgcacattgattcttttattgagaatctctttgcattagctggtgatgaagaaccagaggtacggaaaaatgtgtgccgagcacttgtgatgttgctcgaagttcgaatggatcgcctgcttcctcacatgcataatatagttgagtacatgctacagaggactcaagatcaagatgaaaatgtggctttagaagcctgtgaattttggctaactttagctgaacagccaatatgcaaagatgtactcgtaaggcatcttcctaagttgattcctgtgttagtgaatggcatgaagtactcagacatagatattatcctacttaagggtgatgttgaagaagacgaaacgattcctgatagtgaacaggatatacggccacgttttcaccgatcgaggacggtggctcagcagcatgatgaagatggaattgaagaggaagatgatgatgatgatgaaattgatgatgatgatacaatttctgactggaatctaagaaaatgttctgctgctgccctggatgttcttgcaaatgtgtatcgtgatgaactgctgccacatattttgccccttttgaaagaattactttttcatcatgaatgggttgttaaagaatcaggcattttggttttaggagcaattgctgaaggttgcatgcagggcatgattccatacttgcctgagcttattcctcaccttattcagtgcctctctgataaaaaggctcttgtgcgttccataacatgctggactcttagccgctatgcacactgggtggtcagccagccgccagacacgtacctgaagccattaatgacagaattgctaaagcgcatcctggacagcaacaagagagtacaagaagctgcctgcagtgcctttgctaccctagaagaggaggcttgtacagaacttgttccttaccttgcttatatacttgataccctggtctttgcatttagtaaataccagcataagaacctgctcattctttacgatgccataggaacattagcagattcagtaggacatcatttaaacaaaccagaatatattcagatgctaatgcctccactgatccagaaatggaacatgttaaaggatgaagataaagatctcttccctttacttgagtgcctatcttcagttgccacagcactgcagtctggattccttccgtactgtgaacctgtgtatcagcgttgtgtaaacctagtacagaagactcttgcacaagccatgctaaacaatgctcaaccagatcaatatgaagctccagataaagattttatgatagtggctcttgatttactgagtggcctggctgaaggacttggaggcaacattgaacagctggtagcccgaagtaacatcctgacactaatgtatcagtgcatgcaggataaaatgccagaagttcgacagagttcttttgccctgttaggtgacctcacaaaagcttgctttcagcatgttaagccttgtatagctgatttcatgccaatattgggaaccaacctaaatccagaattcatttcagtctgcaacaatgccacatgggcaattggagaaatctccattcaaatgggtatagagatgcagccttatattcctatggtgttgcaccagcttgtagaaatcattaacagacccaacacaccaaagacgttgttagagaatacagcaataacaattggtcgtcttggttacgtttgtcctcaagaggtggcccccatgctacagcagtttataagaccctggtgcacctctctgagaaacataagagacaatgaggaaaaggattcagcattccgtggaatttgtaccatgatcagtgtgaatcccagtggcgtaatccaagattttatatttttttgtgatgccgttgcatcatggattaacccaaaagatgatctcagagacatgttctgtaagatccttcatggatttaaaaatcaagttggcgatgaaaattggaggcgtttctctgaccagtttcctcttcccttaaaagagcgtcttgcagctttttatggtgtttaatctaatacacttaagctgcagtcccaaaattaggggtccttcagtcttggagactataagggagcctctgcacccagggaaaatgttaccctttacaggggggaagggtaaaccagtagggaatacagtacaatcccaaccctactgggaggggcgggagggaggtgttgccgtcactgtattaagtcgatgttgggaaacgttttaacatctggagcctttgtgggtggaaatatgtctccagttacaactccgcagtggatgtgaagaagcaaaaa

SEQ ID NO: 127053 - protein, 594 aa, Artificial Sequence
  derived and/or modified sequence
MTSVGVFSDMLNGCGKDGLVPRAKPRDVSDFSLYAPATKPCCSRTYKRRRLRAPALTGLGPVTSLIAPSSLSAAMIARQQCVRGGPRGFSCGSAIVGGGKRGAFSSVSMSGGAGRCSSGGFGSRSLYNLRGNKSISMSVAGSRQGACFGGAGGFGTGGFGGGFGGSFSGKGGPGFPVCPAGGIQEVTINQSLLTPLHVEIDPEIQKVRTEEREQIKLLNNKFASFIDKVQFLEQQNKVLETKWNLLQQQTTTTSSKNLEPLFETYLSVLRKQLDTLGNDKGRLQSELKTMQDSVEDFKTKYEEEINKRTAAENDFVVLKKDVDAAYLNKVELEAKVDSLNDEINFLKVLYDAELSQMQTHVSDTSVVLSMDNNRNLDLDSIIAEVRAQYEEIAQRSKAEAEALYQTKVQQLQISVDQHGDNLKNTKSEIAELNRMIQRLRAEIENIKKQCQTLQVSVADAEQRGENALKDAHSKRVELEAALQQAKEELARMLREYQELMSVKLALDIEIATYRKLLEGEEYRMSGECQSAVSISVVSGSTSTGGISGGLGSGSGFGLSSGFGSGSGSGFGFGGSVSGSSSSKIISTTTLNKRR

SEQ ID NO: 127054 - protein, 500 aa, Artificial Sequence
  derived and/or modified sequence
MIARQQCVRGGPRGFSCGSAIVGGGKRGAFSSVSMSGGAGRCSSGGFGSKGACFGGAGGFGTGGFGGGFGGSFSGKGGPGFPVCPAGGIQEVTINQSLLTPLHVEIDPEIQKVRTEEREQIKLLNNKFASFIDKVQFLEQQNKVLETKWNLLQQQTTTTSSKNLEPLFETYLSVLRKQLDTLGNDKGRLQSELKTMQDSVEDFKTKYEEEINKRTAAENDFVVLKKDVDAAYLNKVELEAKVDSLNDEINFLKVLYDAELSQMQTHVSDTSVVLSMDNNRNLDLDSIIAEVRAQYEEIAQRSKAEAEALYQTKVQQLQISVDQHGDNLKNTKSEIAELNRMIQRLRAEIENIKKQCQTLQVSVADAEQRGENALKDAHSKRVELEAALQQAKEELARMLREYQELMSVKLALDIEIATYRKLLEGEEYRMSGECQSAVSISVVSGSTSTGGISGGLGSGSGFGLSSGFGSGSGSGFGFGGSVSGSSSSKIISTTTLNKRR

SEQ ID NO: 127055 - protein, 520 aa, Artificial Sequence
  derived and/or modified sequence
MIARQQCVRGGPRGFSCGSAIVGGGKRGAFSSVSMSGGAGRCSSGGFGSRSLYNLRGNKSISMSVAGSRQGACFGGAGGFGTGGFGGGFGGSFSGKGGPGFPVCPAGGIQEVTINQSLLTPLHVEIDPEIQKVRTEEREQIKLLNNKFASFIDKVQFLEQQNKVLETKWNLLQQQTTTTSSKNLEPLFETYLSVLRKQLDTLGNDKGRLQSELKTMQDSVEDFKTKYEEEINKRTAAENDFVVLKKDVDAAYLNKVELEAKVDSLNDEINFLKVLYDAELSQMQTHVSDTSVVLSMDNNRNLDLDSIIAEVRAQYEEIAQRSKAEAEALYQTKVQQLQISVDQHGDNLKNTKSEIAELNRMIQRLRAEIENIKKQCQTLQVSVADAEQRGENALKDAHSKRVELEAALQQAKEELARMLREYQELMSVKLALDIEIATYRKLLEGEEYRMSGECQSAVSISVVSGSTSTGGISGGLGSGSGFGLSSGFGSGSGSGFGFGGSVSGSSSSKIISTTTLNKRR

SEQ ID NO: 127056 - DNA, 1785 bp, Artificial Sequence
  derived and/or modified sequence
atgacgtcagtgggagtgttttccgatatgcttaacggttgtggaaaagatgggctcgtgccacgggctaagcctcgagatgtaagcgatttcagtttgtacgcacctgccactaaaccatgctgtagcagaacctacaagcggcggcgactgcgggccccggcactgacaggactcggtcccgttacatctctgattgcaccctcgagtctgtctgccgccatgattgcccggcaacagtgtgtacgcggaggaccacgaggattcagttgcggctctgccatcgttggaggaggtaaaagaggcgcctttagctccgtctcgatgtcgggcggcgccggccgttgttccagcggcgggttcggctctcgctctctgtacaaccttcgggggaataaatccatatctatgtccgttgctgggagccgacagggcgcgtgctttgggggggctggcggcttcgggaccggcggattcggaggcggattcgggggcagttttagcggaaaaggtggccctggcttccccgtctgtccagccggcggaattcaggaggtgaccattaaccagtctttactgacgccacttcacgtggaaattgaccctgaaatccagaaggttcgcactgaagagagagagcagattaagctgcttaataataagttcgcgagctttatcgacaaagttcagtttcttgaacaacagaataaagttctggagactaagtggaatttgctccagcaacagaccactacaaccagttccaaaaacctcgagccactgttcgagacgtatctgtcggtactgagaaagcagctggatactctggggaatgacaagggtcggttgcagtcagaattgaaaacaatgcaagacagcgtggaagactttaaaactaaatatgaagaagaaattaacaaaaggaccgctgccgagaacgacttcgtggtgctgaagaaggatgtggatgctgcctacctgaacaaagttgaactggaagccaaagtggattctctaaacgatgagataaatttcctgaaggttttgtacgacgctgagctgtcacagatgcagacacacgtgagtgacacaagtgtcgttttatccatggataataaccgcaatcttgatcttgacagtatcattgcggaagtgcgcgcccaatatgaggaaatagcccagcggagtaaggctgaggccgaagcactctaccaaacaaaggtgcagcagctgcagatcagtgtggatcagcatggagacaacctcaagaatactaagtctgagattgcagagctaaacaggatgatacaaaggcttcgggccgagatagagaatatcaaaaagcaatgtcagaccctgcaggtgtctgtcgctgacgctgagcaaagaggagagaacgcgctgaaggatgcccatagcaaaagggtggagctcgaagccgcccttcagcaagcaaaagaggagttggctcgcatgttacgtgaataccaggaactgatgagtgttaagctcgctctcgacatcgaaatcgccacctaccggaagctgcttgagggagaagagtatcgaatgtccggcgagtgccagagtgctgtgtctatcagcgtggtctccggctcaaccagtacaggggggatctcaggcggacttggctccggctccggatttggcctcagctctgggttcgggtcgggctcgggctctggcttcggtttcggcggctctgtgtcggggagcagttccagcaagatcatttccacaacaacactaaacaaacgtcgttag

SEQ ID NO: 127057 - DNA, 1503 bp, Artificial Sequence
  derived and/or modified sequence
atgatagcccggcagcaatgtgttcggggcggcccgaggggcttctcgtgtggcagcgcaatagtcggaggtggtaaacgcggtgccttcagcagtgtgtctatgagtgggggcgccgggcgctgttcctccggcggtttcggttcaaaaggagcctgctttggaggagccggagggttcggcactggcgggttcggcggaggctttggggggagcttttcaggtaaaggggggcccggattccctgtatgccccgctggcggtatacaggaagtcaccatcaaccagtcacttttgacccccttacacgtggagattgatcccgagatccagaaagtccggacagaggagcgcgagcagatcaaactgctgaacaacaaattcgcctcatttattgacaaggtacagttccttgagcagcaaaataaagtcctggagactaaatggaatctcctgcaacagcaaacaaccaccactagttctaagaatttagagcctctgttcgagacctatttgagtgttctaaggaaacagttggacactctgggtaacgataagggcagactgcagtctgagctgaagaccatgcaggacagcgtggaggatttcaagaccaaatacgaggaggagatcaacaagcggaccgccgccgagaatgactttgtcgtgcttaagaaggacgtcgacgccgcttatctgaacaaggttgagctggaggcgaaggtcgactcactcaatgatgagattaattttcttaaggtactttacgatgccgaactgagtcagatgcaaacccacgtgtctgacaccagtgtggtactttctatggacaacaatcgcaacctggacctggattcaatcattgctgaggtaagggctcagtatgaggaaattgcgcagcgatctaaggctgaggccgaggccctgtaccaaacgaaggtccaacaactgcagatctccgttgatcagcacggcgacaacctcaagaatacaaaaagcgagatcgccgaactgaaccgcatgatacagcggctacgggcggaaatagaaaacataaagaagcagtgtcagacccttcaggtgagcgtggccgacgcggagcagcgtggagagaatgcacttaaagacgcccattccaagagggtcgaactggaggccgcacttcagcaggccaaggaggaacttgcccgcatgctacgtgagtaccaggagcttatgtctgtaaaattagccttggatatcgaaatcgctacctacagaaaactcctggagggagaagagtacagaatgagcggagagtgccagtccgccgtaagcatctctgtcgtcagtgggagtacctctactggtggcatcagcggaggactgggctcaggtagtggctttggcctgtctagtggcttcggctcaggatccgggtcaggcttcgggttcggaggctcagtgtccggcagctccagttcgaaaatcataagcacaactacactaaacaagcgacgctag

SEQ ID NO: 127058 - DNA, 1563 bp, Artificial Sequence
  derived and/or modified sequence
atgatcgcccgccagcagtgcgtacgcggtggcccccgaggcttttcttgtggatctgccatcgttggcggcggcaaaaggggcgcttttagttccgtcagtatgtccggaggcgccgggaggtgctccagcggaggattcggctcacgctccttatacaatctcagaggcaacaagtctatatccatgtccgtggctggttctcgccaaggagcgtgctttggcggagctggtggattcggcaccggaggttttgggggtggcttcgggggttcattttcaggcaaggggggtccaggttttcccgtttgtcctgccggcggcatccaggaagtgactattaatcagagcctgctgaccccactccacgtggaaattgatcccgagattcaaaaagtgcgcacggaagagcgagaacagattaaattactgaataacaagttcgccagttttatcgacaaagtccagtttctagagcagcagaataaggtgctcgagactaaatggaatctactccagcagcagacaacaaccacctcctctaaaaacctggagccactatttgaaacctacctgagtgtgctcagaaagcagctggacacactggggaatgacaaagggagactacagtccgagctgaagactatgcaggacagtgtggaagattttaaaacaaaatatgaagaggaaattaacaaaagaactgccgccgagaatgacttcgtcgttttgaaaaaggacgttgatgctgcatatctaaacaaagtggagctggaggccaaggtggattccctgaatgatgagatcaacttcctgaaggtgctgtatgatgctgaactttctcagatgcagacccatgtgagcgacacaagcgtggtcctttctatggataacaaccggaatttggatctggacagtattattgccgaggtgagggcacagtacgaagaaattgcccagcgctccaaggcagaagctgaggctctgtaccaaaccaaggtacagcagttgcagattagcgtggaccagcacggggataacttgaaaaacacaaaaagtgagatcgcagagctgaacaggatgatacaacgcttgcgcgccgagattgagaacattaagaagcagtgtcagacactgcaggtctccgtggcagatgccgagcagcgcggtgaaaatgccctgaaggatgctcattccaagcgtgtcgaacttgaagccgccctgcaacaggctaaggaggagttggccaggatgctgagggagtatcaagaactgatgtcagtcaaactggctctagatattgaaatagctacctatagaaaactcctggagggagaggagtaccggatgtctggcgagtgtcagagcgccgtgagtattagcgtcgtcagcgggtccacctctacaggcggcatttccggaggcctggggagcggatctggcttcggactgagtagcgggttcgggagtggaagcggatccggcttcggctttggagggtctgtttcagggtcttctagttcaaagatcattagcactacaacccttaataagaggagatag

SEQ ID NO: 127059 - DNA, 2576 bp, Artificial Sequence
  derived and/or modified sequence
gacttgctccggtttgcagagctaggaggtggcaggctgtgcgctcaaactcaggctgtctaactccacattctgtggggtgagaggatgggtgatggggtgtcttttctggaggagggaggtgctgtgagcctagcgagatggaggtacagtgggtgtgggcctggagcgctgggcccaggcaggggcttctgattaggaagccctggggcaccagttcaggttctcccagagagtagtgtgatgggatccagtaacctgtgccctccagatgacttctgtaggtgtgtttagtgacatgctcaacgggtgcgggaaggatgggcttgtgccaagggccaagcccagagatgtttcagatttttccctttatgcccctgcaaccaagccctgctgctccaggacatataagagacgaaggctgagggctccagcactcaccggcctgggccctgtcacttctctgatagctcccagctcgctctctgcagccatgattgccagacagcagtgtgtccgaggcgggccccggggcttcagctgtggctcggccattgtaggcggtggcaagagaggtgccttcagctcagtctccatgtctggaggtgctggccgatgctcttctgggggatttggcagcagaagcctctacaacctcagggggaacaaaagcatctccatgagtgtggctgggtcacgacaaggtgcctgctttgggggtgctggaggctttggcactggtggctttggtggtggatttgggggctccttcagtggtaagggtggccctggcttccccgtctgccccgctgggggaattcaggaggtcaccatcaaccagagcttgctcacccccctccacgtggagattgaccctgagatccagaaagtccggacggaagagcgcgaacagatcaagctcctcaacaacaagtttgcctccttcatcgacaaggtgcagttcttagagcaacagaataaggtcctggagaccaaatggaacctgctccagcagcagacgaccaccacctccagcaaaaaccttgagcccctctttgagacctacctcagtgtcctgaggaagcagctagataccttgggcaatgacaaagggcgcctgcagtctgagctgaagaccatgcaggacagcgtggaggacttcaagactaagtatgaagaggagatcaacaaacgcacagcagccgagaatgactttgtggtcctaaagaaggacgtggatgctgcctacctgaacaaggtggagttggaggccaaggtggacagtcttaatgacgagatcaacttcctgaaggtcctctatgatgcggagctgtcccagatgcagacccatgtcagcgacacgtccgtggtcctttccatggacaacaaccgcaacctggacctggacagcattattgccgaggtccgtgcccagtacgaggagattgcccagaggagcaaggctgaggctgaagccctgtaccagaccaaggtccagcagctccagatctcggttgaccaacatggtgacaacctgaagaacaccaagagtgaaattgcagagctcaacaggatgatccagaggctgcgggcagagatcgagaacatcaagaagcagtgccagactcttcaggtatccgtggctgatgcagagcagcgaggtgagaatgcccttaaagatgcccacagcaagcgcgtagagctggaggctgccctgcagcaggccaaggaggagctggcacgaatgctgcgtgagtaccaggagctcatgagtgtgaagctggccttggacatcgagatcgccacctaccgcaaactgctggagggcgaggagtacagaatgtctggagaatgccagagtgccgtgagcatctctgtggtcagcggtagcaccagcactggaggcatcagcggaggattaggaagtggctccgggtttggcctgagtagtggctttggctccggctctggaagtggctttgggtttggtggcagtgtctctggcagttccagcagcaagatcatctctaccaccaccctgaacaagagacgatagaggagacgaggtccctgcagctcactgtgtccagctgggcccagcactggtgtctctgtgcttccttcacttcacctccatcctctgtctctggggctcatcttactagtatcccctccactatcccatgggctctctctgccccaggatgatcttctgtgctgggacagggactctgcctcttggagtttggtagctacttcttgatttgggcctggtgacccacctggaatgggaaggatgtcagctgacctctcacctcccatggacagagaagaaaatgaccaggagtgtcatctccagaattattggggtcacatatgtcccttcccagtccaatgccatctcccactagatcctgtattatccatctacatcagaaccaaactacttctccaacacccggcagcacttggccctgcaagcttaggatgagaaccacttagtgtcccattctactcctctcattccctcttatccatctgcaggtgaatcttcaataaaatgcttttgtcattca

SEQ ID NO: 127060 - DNA, 2023 bp, Artificial Sequence
  derived and/or modified sequence
atgattgccagacagcagtgtgtccgaggcgggccccggggcttcagctgtggctcggccattgtaggcggtggcaagagaggtgccttcagctcagtctccatgtctggaggtgctggccgatgctcttctgggggatttggcagcaaaggtgcctgctttgggggtgctggaggctttggcactggtggctttggtggtggatttgggggctccttcagtggtaagggtggccctggcttccccgtctgccccgctgggggaattcaggaggtcaccatcaaccagagcttgctcacccccctccacgtggagattgaccctgagatccagaaagtccggacggaagagcgcgaacagatcaagctcctcaacaacaagtttgcctccttcatcgacaaggtgcagttcttagagcaacagaataaggtcctggagaccaaatggaacctgctccagcagcagacgaccaccacctccagcaaaaaccttgagcccctctttgagacctacctcagtgtcctgaggaagcagctagataccttgggcaatgacaaagggcgcctgcagtctgagctgaagaccatgcaggacagcgtggaggacttcaagactaagtatgaagaggagatcaacaaacgcacagcagccgagaatgactttgtggtcctaaagaaggacgtggatgctgcctacctgaacaaggtggagttggaggccaaggtggacagtcttaatgacgagatcaacttcctgaaggtcctctatgatgcggagctgtcccagatgcagacccatgtcagcgacacgtccgtggtcctttccatggacaacaaccgcaacctggacctggacagcattattgccgaggtccgtgcccagtacgaggagattgcccagaggagcaaggctgaggctgaagccctgtaccagaccaaggtccagcagctccagatctcggttgaccaacatggtgacaacctgaagaacaccaagagtgaaattgcagagctcaacaggatgatccagaggctgcgggcagagatcgagaacatcaagaagcagtgccagactcttcaggtatccgtggctgatgcagagcagcgaggtgagaatgcccttaaagatgcccacagcaagcgcgtagagctggaggctgccctgcagcaggccaaggaggagctggcacgaatgctgcgtgagtaccaggagctcatgagtgtgaagctggccttggacatcgagatcgccacctaccgcaaactgctggagggcgaggagtacagaatgtctggagaatgccagagtgccgtgagcatctctgtggtcagcggtagcaccagcactggaggcatcagcggaggattaggaagtggctccgggtttggcctgagtagtggctttggctccggctctggaagtggctttgggtttggtggcagtgtctctggcagttccagcagcaagatcatctctaccaccaccctgaacaagagacgatagaggagacgaggtccctgcagctcactgtgtccagctgggcccagcactggtgtctctgtgcttccttcacttcacctccatcctctgtctctggggctcatcttactagtatcccctccactatcccatgggctctctctgccccaggatgatcttctgtgctgggacagggactctgcctcttggagtttggtagctacttcttgatttgggcctggtgacccacctggaatgggaaggatgtcagctgacctctcacctcccatggacagagaagaaaatgaccaggagtgtcatctccagaattattggggtcacatatgtcccttcccagtccaatgccatctcccactagatcctgtattatccatctacatcagaaccaaactacttctccaacacccggcagcacttggccctgcaagcttaggatgagaaccacttagtgtcccattctactcctctcattccctcttatccatctgcaggtgaatcttcaataaaatgcttttgtcattca

SEQ ID NO: 127061 - DNA, 1785 bp, Artificial Sequence
  derived and/or modified sequence
atgacctctgtgggcgtcttcagtgacatgctgaatggctgtgggaaggatggcctggtgccccgggccaagcccagagatgtgtctgacttcagcctgtatgccccagccaccaagccctgctgcagcaggacctacaagagaagaaggctgcgggccccagccctgaccggcctgggccctgtgaccagcctcatcgcccccagcagcctgtctgctgccatgattgcccggcagcagtgtgtgcggggcggcccccggggcttcagctgtggcagcgccatcgtgggcggcggcaagagaggagccttcagctctgtgtccatgtctgggggcgccggccgctgcagcagcggcggcttcggcagccgcagcctgtacaacctgcggggcaacaagagcatctccatgtctgtggccggcagccggcagggcgcctgcttcggcggggccggcggcttcggcaccggcggctttggaggcggctttggaggcagcttcagcggcaagggcggccctggcttccctgtgtgcccagctgggggcatccaggaggtgaccatcaaccagagcctgctgacccccctgcacgtggagattgatcctgagatccagaaggtgaggacagaggagcgggagcagatcaagctgctgaacaacaagtttgccagcttcatcgacaaggtgcagttcctggagcagcagaacaaggtgctggagaccaagtggaacctgctgcagcagcagaccaccaccaccagcagcaagaacctggagcccctgtttgagacctacctgtctgtgctgaggaagcagctggacaccctgggcaatgacaagggccgcctgcagagcgagctgaagaccatgcaggacagcgtggaggacttcaagaccaagtatgaggaggagatcaacaagaggacagctgctgaaaatgactttgtggtgctgaagaaggatgtggatgctgcctacctgaacaaggtggagctggaggccaaggtggacagcctgaatgatgagatcaacttcctgaaggtgctgtatgatgctgagctgagccagatgcagacccacgtgtctgacacctctgtggtgctgtccatggacaacaacagaaacctggacctggacagcatcatcgccgaggtgcgggcccagtatgaggagatcgcccagaggagcaaggccgaggccgaggccctgtaccagaccaaggtgcagcagctgcagatctctgtggaccagcacggggacaacctgaagaacaccaagtcagaaattgctgagctgaacaggatgatccagaggctgcgggcagaaattgagaacatcaagaagcagtgccagaccctgcaggtgtctgtggctgatgctgagcagagaggagaaaatgccctgaaggatgcccacagcaagagggtggagctggaggccgccctgcagcaggccaaggaggagctggccaggatgctgcgggagtaccaggagctgatgtctgtgaagctggccctggacatcgagatcgccacctacaggaagctgctggagggggaggagtacaggatgtctggagagtgccagagcgctgtgtccatctctgtggtgtctggcagcaccagcactggaggcatcagcggcggcctgggcagcggcagcggcttcggcctgagcagcggcttcggcagcggcagcggcagcggcttcggctttggaggctctgtgtctggcagcagcagcagcaagatcatcagcaccaccaccctgaacaagagaagatag

SEQ ID NO: 127062 - DNA, 1503 bp, Artificial Sequence
  derived and/or modified sequence
atgattgcccggcagcagtgtgtgcggggcggcccccggggcttcagctgtggcagcgccatcgtgggcggcggcaagagaggagccttcagctctgtgtccatgtctgggggcgccggccgctgcagcagcggcggcttcggcagcaagggggcctgcttcggcggggccggcggcttcggcaccggcggctttggaggcggctttggaggcagcttcagcggcaagggcggccctggcttccctgtgtgcccagctgggggcatccaggaggtgaccatcaaccagagcctgctgacccccctgcacgtggagattgatcctgagatccagaaggtgaggacagaggagcgggagcagatcaagctgctgaacaacaagtttgccagcttcatcgacaaggtgcagttcctggagcagcagaacaaggtgctggagaccaagtggaacctgctgcagcagcagaccaccaccaccagcagcaagaacctggagcccctgtttgagacctacctgtctgtgctgaggaagcagctggacaccctgggcaatgacaagggccgcctgcagagcgagctgaagaccatgcaggacagcgtggaggacttcaagaccaagtatgaggaggagatcaacaagaggacagctgctgaaaatgactttgtggtgctgaagaaggatgtggatgctgcctacctgaacaaggtggagctggaggccaaggtggacagcctgaatgatgagatcaacttcctgaaggtgctgtatgatgctgagctgagccagatgcagacccacgtgtctgacacctctgtggtgctgtccatggacaacaacagaaacctggacctggacagcatcatcgccgaggtgcgggcccagtatgaggagatcgcccagaggagcaaggccgaggccgaggccctgtaccagaccaaggtgcagcagctgcagatctctgtggaccagcacggggacaacctgaagaacaccaagtcagaaattgctgagctgaacaggatgatccagaggctgcgggcagaaattgagaacatcaagaagcagtgccagaccctgcaggtgtctgtggctgatgctgagcagagaggagaaaatgccctgaaggatgcccacagcaagagggtggagctggaggccgccctgcagcaggccaaggaggagctggccaggatgctgcgggagtaccaggagctgatgtctgtgaagctggccctggacatcgagatcgccacctacaggaagctgctggagggggaggagtacaggatgtctggagagtgccagagcgctgtgtccatctctgtggtgtctggcagcaccagcactggaggcatcagcggcggcctgggcagcggcagcggcttcggcctgagcagcggcttcggcagcggcagcggcagcggcttcggctttggaggctctgtgtctggcagcagcagcagcaagatcatcagcaccaccaccctgaacaagagaagatag

SEQ ID NO: 127063 - DNA, 1563 bp, Artificial Sequence
  derived and/or modified sequence
atgattgcccggcagcagtgtgtgcggggcggcccccggggcttcagctgtggcagcgccatcgtgggcggcggcaagagaggagccttcagctctgtgtccatgtctgggggcgccggccgctgcagcagcggcggcttcggcagccgcagcctgtacaacctgcggggcaacaagagcatctccatgtctgtggccggcagccggcagggcgcctgcttcggcggggccggcggcttcggcaccggcggctttggaggcggctttggaggcagcttcagcggcaagggcggccctggcttccctgtgtgcccagctgggggcatccaggaggtgaccatcaaccagagcctgctgacccccctgcacgtggagattgatcctgagatccagaaggtgaggacagaggagcgggagcagatcaagctgctgaacaacaagtttgccagcttcatcgacaaggtgcagttcctggagcagcagaacaaggtgctggagaccaagtggaacctgctgcagcagcagaccaccaccaccagcagcaagaacctggagcccctgtttgagacctacctgtctgtgctgaggaagcagctggacaccctgggcaatgacaagggccgcctgcagagcgagctgaagaccatgcaggacagcgtggaggacttcaagaccaagtatgaggaggagatcaacaagaggacagctgctgaaaatgactttgtggtgctgaagaaggatgtggatgctgcctacctgaacaaggtggagctggaggccaaggtggacagcctgaatgatgagatcaacttcctgaaggtgctgtatgatgctgagctgagccagatgcagacccacgtgtctgacacctctgtggtgctgtccatggacaacaacagaaacctggacctggacagcatcatcgccgaggtgcgggcccagtatgaggagatcgcccagaggagcaaggccgaggccgaggccctgtaccagaccaaggtgcagcagctgcagatctctgtggaccagcacggggacaacctgaagaacaccaagtcagaaattgctgagctgaacaggatgatccagaggctgcgggcagaaattgagaacatcaagaagcagtgccagaccctgcaggtgtctgtggctgatgctgagcagagaggagaaaatgccctgaaggatgcccacagcaagagggtggagctggaggccgccctgcagcaggccaaggaggagctggccaggatgctgcgggagtaccaggagctgatgtctgtgaagctggccctggacatcgagatcgccacctacaggaagctgctggagggggaggagtacaggatgtctggagagtgccagagcgctgtgtccatctctgtggtgtctggcagcaccagcactggaggcatcagcggcggcctgggcagcggcagcggcttcggcctgagcagcggcttcggcagcggcagcggcagcggcttcggctttggaggctctgtgtctggcagcagcagcagcaagatcatcagcaccaccaccctgaacaagagaagatag

SEQ ID NO: 127064 - DNA, 1785 bp, Artificial Sequence
  derived and/or modified sequence
atgaccagcgtgggcgtgttcagcgacatgctgaacggctgcggcaaggacgggctggtgcctcgagccaagccacgtgatgttagtgacttctcactgtacgcccctgccaccaaaccgtgctgctcgcgtacttataagaggcgcaggctgagagctccagccctaacaggtctcggcccagtcacctcactgatcgccccctcatctctctctgccgccatgatagctcgacagcaatgtgtacggggaggtccgcgaggcttttcctgtggatcagctattgtgggcggggggaagagaggcgccttctctagtgtctccatgagtggcggggccggcaggtgttcgagtggtggctttgggtcccgctccttgtacaatcttaggggtaacaaatccatcagtatgtccgtggcaggcagtagacagggagcctgtttcggcggagctggaggttttgggacaggtggctttggcggtggctttggagggagcttcagcgggaagggcggcccaggctttcccgtttgcccagcaggggggatccaggaggtgaccattaatcagtctctgttgacacccctgcacgtggagatcgacccagaaattcagaaggtaagaaccgaggagagagaacagataaagctgctcaataataaatttgccagtttcatcgataaagtgcagtttttggaacagcagaacaaagtgttagagactaagtggaatctgctgcagcagcaaactaccactacctcctcaaagaatttagagcccctattcgaaacctacctcagtgtgcttcgcaagcagttagatacgctggggaatgacaaggggagactgcagtctgagctgaagacgatgcaggactctgtagaggacttcaagacaaagtacgaagaggaaattaataaaaggaccgcagccgaaaacgactttgtcgtcctgaaaaaggacgtagacgccgcgtatctgaacaaggtcgagctcgaagcgaaagtggactccctcaacgacgaaatcaattttctgaaagtgttgtacgacgcagagctgtcccagatgcagacacatgtttccgacacctccgtcgtgctgagcatggataataataggaacctggacctggattccatcatcgccgaggtacgtgcccagtacgaggagattgcacagcgcagtaaggcagaggccgaagctctgtatcaaacaaaggtacaacaactccagataagtgtggatcaacacggagataatctgaaaaacactaagtcggaaatcgccgaactcaaccgcatgattcaacggctccgcgcggagatcgagaacattaaaaagcagtgtcagacccttcaggtttctgtggccgatgcagaacagaggggagagaatgcactgaaggacgctcattcaaagcgcgtcgagctcgaggctgcacttcaacaggcaaaagaagaacttgcacggatgctgcgtgagtaccaagagctgatgtccgtcaaacttgccctcgatatcgaaatcgcaacgtaccgcaaactgttggagggggaggaataccgtatgtctggagagtgccagtcagccgtgtctataagcgtagtgtctggatcaacttccaccggcggaatatctggtggtttgggctctggttcagggtttgggctgtcatcaggcttcggtagcggctccggttcagggtttggattcggggggtctgtaagcgggtcatccagtagcaaaattatttcaacaacgacgcttaacaagagaaggtag

SEQ ID NO: 127065 - DNA, 1503 bp, Artificial Sequence
  derived and/or modified sequence
atgatcgcccggcagcagtgcgtgcggggcggcccccggggcttcagttgcggctctgcaatagtcggaggtgggaagcgcggggcattctcttcagtatctatgagtggtggagctggtcggtgttcttcagggggcttcggctcaaaaggagcctgtttcggcggtgccggagggttcgggactggcggattcggggggggcttcggagggtccttctcaggcaaagggggtcccgggtttcctgtctgtcccgccggcggcatccaggaggtgactatcaatcagtctttattgaccccactgcacgtggaaattgatcccgaaatccagaaagtgcgcacagaggaacgtgaacagattaagctgttgaacaataagttcgcatccttcatagataaagtccaatttctggaacaacagaacaaagtcttggagactaagtggaacctgctccagcagcaaaccaccaccacctcaagtaagaatctggaaccactgttcgagacctaccttagcgtcctgcgtaaacagctggacacactaggcaatgataagggtaggttacagtctgagctgaagactatgcaagactctgtggaagacttcaagacgaaatacgaagaggaaatcaacaagcgcacagccgctgaaaacgactttgtggttctgaagaaggatgtcgatgcagcatatctcaataaggtcgagcttgaggctaaggtggattctctgaacgatgagataaacttcctgaaggtgctatatgacgctgaactgtcccagatgcagacccacgtgtctgacacatccgtggttctttcaatggataataaccgcaatctcgacctggactccatcattgcagaagttcgtgcgcagtacgaagagatcgcacaaagatccaaggctgaggccgaggcgctataccagacaaaggtccaacaattgcagatctccgtggaccagcatggagacaatctaaagaacacgaaatctgagatagcggaattgaaccggatgattcagaggctgcgagccgagatcgaaaatatcaaaaaacagtgtcaaactctgcaggtgtccgttgcggatgccgaacagagaggcgaaaatgcccttaaggacgcacacagtaagagggtcgaactcgaggccgcactgcagcaggctaaagaagagctcgctcgcatgcttcgggagtaccaggaactgatgtccgttaagctcgcactagacattgagatcgcaacctatagaaaactcctggaaggggaagagtatagaatgagcggcgagtgtcagtctgctgtctctatctctgtggtgagcggctcaaccagcaccggaggtatctctggtggcttaggctcaggatccggctttggactgtcaagtggctttgggagcggctccggcagtggttttgggttcggcggctcagtcagcggcagttcatcatctaagattatctctaccaccacgctcaataagcgaagatag

SEQ ID NO: 127066 - DNA, 1563 bp, Artificial Sequence
  derived and/or modified sequence
atgatcgcccggcagcagtgcgtgcggggcggcccccggggcttcagctgtggatctgccattgttggaggcggcaagaggggtgctttttcgtcagtctcgatgagtggtggagcaggacgctgtagcagtggagggtttgggtcaaggagcctatataacctgcgcggtaataagagtatctcgatgagcgtagccgggtcccggcagggggcatgttttgggggagccggaggtttcggcactggaggattcggagggggttttggaggctccttttccgggaaaggtggacctgggttcccggtgtgtccggccgggggcatccaggaagttacaatcaatcagtccctgctcactcccctccacgtcgaaatcgaccctgaaatccagaaggtgcgtactgaggagagagagcaaattaaactcctgaataataagtttgcctcctttatcgacaaggtgcagttcctagaacagcagaacaaagtcctggagaccaagtggaatctgctccaacagcaaacaaccaccacaagctccaagaacttggaaccattgttcgaaacgtacctctccgttctgcggaagcaactggatacccttggaaacgacaaagggcggctgcagtccgagctgaaaaccatgcaggactccgtggaggatttcaaaaccaagtatgaggaggaaatcaacaaacgcaccgccgcggagaacgactttgtcgtgctcaagaaggacgtggatgccgcatatctgaataaggtggagctggaggcaaaggtcgatagtctaaatgacgaaataaactttctgaaagttctttacgacgccgaactgtctcagatgcagactcacgtctccgatacttctgtggtactttcaatggacaacaacagaaatctggatctggacagtataattgcggaagtccgggcccagtacgaagagattgcacagcgcagcaaggccgaagccgaagctctctaccagacaaaagtccaacagctccagatctctgtagaccagcacggggacaaccttaagaatactaagtccgaaatcgcggaactgaatcgtatgattcagagacttcgggcagagatcgagaacattaaaaaacagtgtcagactctgcaggtgtctgtcgcggatgcagagcagaggggggagaatgctctcaaagacgcacatagcaaaagggtcgagctggaagctgcacttcagcaagctaaagaagagttggctcggatgcttcgcgaatatcaagagctgatgagcgtgaagcttgctctcgacatagagatcgccacttaccgtaagctgctagaaggtgaggaatatagaatgtctggagaatgccagtctgctgtgtcaataagtgtagtcagcggcagtaccagtacaggcggaataagtgggggtctaggaagcggctcaggatttggattgagttccggcttcgggagcggatctggcagtggattcggtttcggaggatctgtttctggctctagctcttctaaaatcatttccaccacaacattgaacaaacgccgatag

SEQ ID NO: 127067 - DNA, 1785 bp, Artificial Sequence
  derived and/or modified sequence
atgactagcgtcggtgtcttcagtgatatgctcaatggctgtggcaaggacggtctggttcctcgggctaagccaagagacgtcagcgatttttccctttacgcccctgcaaccaaaccatgttgtagtcggacatataaacgaaggcgcctcagagctccagccctcacgggcctcggaccagttacgtctctgattgctccctcctccctgtcggcagcaatgatcgctaggcaacagtgtgtgaggggtgggccacgcggatttagttgcggatctgccattgtcggtggcggaaagcggggtgcttttagttccgtgtcaatgagcggaggcgcaggtcgatgcagctcaggcggtttcggatcacgcagcctatataacctgagaggcaacaagagtatctctatgagcgtggcgggttcacggcagggcgcttgtttcggcggagcgggagggttcggcacaggtgggtttggcggaggcttcggtggttcttttagtggcaagggagggcctggctttcccgtgtgcccagccggaggcatacaggaagtgacaatcaatcaaagtttactcacgccactgcacgttgagattgatccagagattcagaaggtcaggaccgaggagagggaacagatcaagctgcttaacaacaagtttgccagctttattgacaaagtacagttcctcgaacagcagaataaagtattggagaccaagtggaaccttctgcagcagcaaactaccaccacctcctcgaagaacttagagcccctgttcgaaacctacctgagcgttctgagaaagcagctggatacgttaggcaacgataagggtagattgcaaagcgagctgaagacgatgcaggattccgtggaggatttcaaaaccaaatatgaggaagaaatcaataaacgcacagcagcagaaaacgactttgtggtcttaaagaaggacgtcgatgccgcttaccttaacaaggtcgagctcgaggctaaggttgatagtttgaacgatgagattaattttctgaaggtgctctacgatgcagagctgtcccagatgcagacacatgtctcggatacaagcgtggtgctgtctatggataataatcgcaacctggatttggactcgattatcgccgaggttagagctcagtatgaggaaatcgcccaacgctccaaagccgaggccgaggccttgtaccagacaaaagtccagcagctgcagatttctgtggatcaacatggagacaatttgaagaacaccaagtctgaaattgcagagctaaacagaatgatccagcggctgcgagcagaaatcgaaaacatcaaaaaacagtgccagactttacaggtgtcggtggcagatgctgagcagcgcggtgaaaatgcactgaaggatgcccatagtaaaagagtcgagttagaagcagctctgcaacaggccaaagaagaattggccaggatgttgcgtgagtaccaggaactaatgagcgtgaaactggctctcgatatcgagattgctacttaccggaagctgctcgagggcgaagagtacaggatgtccggagagtgtcagagcgccgtaagcatctccgtggttagtggatctacgagcactggcggaatttccgggggactcggctccggttcaggcttcggactctcaagcggttttggatcaggttctggatccggctttgggtttggaggatctgtgagcggatccagttcttctaagatcatctctaccaccaccttgaacaagaggcgctag

SEQ ID NO: 127068 - DNA, 1503 bp, Artificial Sequence
  derived and/or modified sequence
atgatagccaggcagcagtgtgttagagggggtccccgaggcttcagttgtgggagtgctatcgtgggcggaggtaagagaggcgctttctcctccgtgtccatgagtggcggtgccggacgatgctcttcaggtgggtttgggtcaaagggagcctgcttcggaggcgcagggggttttggaacagggggattcgggggaggtttcggcggttcattctccggcaaaggtggccctggctttcctgtgtgcccggctggaggtattcaggaggttacaatcaatcagtcgttattgacaccacttcatgttgagatcgaccccgagatccaaaaggtgagaacagaagagcgagagcagattaagttgctcaacaacaaattcgcttcgttcatagacaaggttcagttcctggagcagcagaacaaggtgctcgaaacgaaatggaatctcctccaacagcagaccaccacaacctccagcaaaaacctcgaacccttatttgaaacctacctgtccgtactgagaaaacagttggataccctgggcaacgacaaaggtcgcctccagtcggagttaaaaacaatgcaggatagtgttgaggattttaagactaaatacgaggaggagattaacaagcggactgctgccgagaacgacttcgtagtcttaaaaaaggatgtggatgccgcttacctgaacaaagtggaacttgaggctaaagtcgatagcttgaatgacgaaataaacttcctgaaggttttgtatgatgctgagctctcccagatgcaaacacatgtgtctgacacttcggtggtgttgtcaatggataacaacaggaacctcgacctggactctatcatcgcagaagttagagcgcagtacgaagaaatagctcagaggagcaaagctgaggctgaggccctttaccagactaaagtgcagcagctccaaatttctgtggatcagcacggggataatctgaaaaatacaaaatctgaaatcgcagagctcaataggatgatacagcgcctcagagcagagatcgaaaacatcaaaaagcagtgccagaccctgcaggtgagcgttgccgatgccgaacaacgcggagaaaatgctctgaaggacgcccattccaaacgtgtagaactggaagcggcactgcagcaagctaaggaagagcttgccagaatgttgcgcgaatatcaggagctaatgtctgttaagctcgccctcgacattgagatcgctacatataggaagctgctggagggcgaagaataccgaatgtctggcgaatgccagtctgcggtgtcaatcagcgtagtttccggttccacctccacaggcggtattagtggaggcctcggctccggatctggatttggtttgagcagcgggtttggatcaggtagcggctccggcttcggctttggaggctcagtgtccggcagctccagcagcaagattatcagcaccaccacccttaacaaacgacgctag

SEQ ID NO: 127069 - DNA, 1563 bp, Artificial Sequence
  derived and/or modified sequence
atgattgcgcgtcaacagtgtgttagggggggaccgcgagggtttagctgtggctcagcaattgttggtggagggaaacgtggggcatttagtagtgtgtcgatgtccgggggagccggaagatgctcttcgggcggattcggcagtaggtccctgtacaaccttagaggcaacaagtctatttcaatgagtgtcgccggtagtcgccaaggtgcttgctttggaggagcgggaggattcggcaccggcggattcggaggtggttttggcggatcattctccgggaagggcggtcccggattcccagtatgtccagctggcggaatacaggaagttactattaatcagagtttacttacacccctccacgtagagatcgatcctgaaattcagaaggttaggaccgaagaaagagagcaaattaagctactgaataataaatttgctagcttcatcgacaaggtgcagtttcttgagcagcagaacaaggtgctggaaacgaagtggaacctgttacaacaacagactacaactacctcctcaaaaaacctggaacccttgtttgaaacctacctttcagtactcagaaagcaacttgatacattgggcaatgacaaaggacgcctccagtcagaactgaaaacaatgcaggactcagtcgaggactttaaaaccaagtatgaagaggagatcaacaaacggaccgccgcagaaaacgactttgtagtgttaaagaaggatgtggacgccgcttacctgaataaagtagagctcgaagctaaagtagactctctcaatgacgagatcaattttctgaaggtgttgtatgacgctgaactgagtcagatgcagacccatgtgtccgacacatctgttgtgttgtccatggacaataacaggaaccttgacttggattcaattatagcagaggttagagcacagtatgaggaaatagcacagcgatccaaggccgaagcagaagccctttaccagaccaaggtgcagcagcttcagataagtgtcgatcagcatggcgataacctgaaaaatactaaaagcgagatagctgaattaaatagaatgatccagcgtttaagggccgagattgaaaacatcaaaaagcagtgtcagaccctgcaggtgtccgtcgccgacgccgaacagagaggagaaaatgccttgaaggatgcccatagcaagcgggtggagctcgaagccgctctccagcaggccaaagaagaactggccagaatgttgcgggaataccaggagctaatgagtgtgaagctcgcacttgacatagagattgctacatataggaagttgctggagggcgaggaatatcgaatgtcgggggaatgccagtcggccgtaagcatttctgtcgtaagcggatccactagtacagggggtatcagcggcggactggggagcgggtcgggtttcggcttaagtagcggcttcggatcaggatctggctcaggctttggcttcgggggttctgtgtccgggtcttcctcgtcaaagattatatccacaaccaccctgaacaaaagaaggtag

SEQ ID NO: 127070 - DNA, 1785 bp, Artificial Sequence
  derived and/or modified sequence
atgaccagcgtgggcgtgttcagcgacatgctgaacggctgcggcaaggacggcctggtgcccagagccaagcccagagacgtgagcgacttcagcctgtacgcccccgccaccaagccctgctgcagcagaacctacaagagaagaagactgagagcccccgccctgaccggcctgggccccgtgaccagcctgatcgcccccagcagcctgagcgccgccatgatcgccagacagcagtgcgtgagaggcggccccagaggcttcagctgcggcagcgccatcgtgggcggcggcaagagaggcgccttcagcagcgtgagcatgagcggcggcgccggcagatgcagcagcggcggcttcggcagcagaagcctgtacaacctgagaggcaacaagagcatcagcatgagcgtggccggcagcagacagggcgcctgcttcggcggcgccggcggcttcggcaccggcggcttcggcggcggcttcggcggcagcttcagcggcaagggcggccccggcttccccgtgtgccccgccggcggcatccaggaggtgaccatcaaccagagcctgctgacccccctgcacgtggagatcgaccccgagatccagaaggtgagaaccgaggagagagagcagatcaagctgctgaacaacaagttcgccagcttcatcgacaaggtgcagttcctggagcagcagaacaaggtgctggagaccaagtggaacctgctgcagcagcagaccaccaccaccagcagcaagaacctggagcccctgttcgagacctacctgagcgtgctgagaaagcagctggacaccctgggcaacgacaagggcagactgcagagcgagctgaagaccatgcaggacagcgtggaggacttcaagaccaagtacgaggaggagatcaacaagagaaccgccgccgagaacgacttcgtggtgctgaagaaggacgtggacgccgcctacctgaacaaggtggagctggaggccaaggtggacagcctgaacgacgagatcaacttcctgaaggtgctgtacgacgccgagctgagccagatgcagacccacgtgagcgacaccagcgtggtgctgagcatggacaacaacagaaacctggacctggacagcatcatcgccgaggtgagagcccagtacgaggagatcgcccagagaagcaaggccgaggccgaggccctgtaccagaccaaggtgcagcagctgcagatcagcgtggaccagcacggcgacaacctgaagaacaccaagagcgagatcgccgagctgaacagaatgatccagagactgagagccgagatcgagaacatcaagaagcagtgccagaccctgcaggtgagcgtggccgacgccgagcagagaggcgagaacgccctgaaggacgcccacagcaagagagtggagctggaggccgccctgcagcaggccaaggaggagctggccagaatgctgagagagtaccaggagctgatgagcgtgaagctggccctggacatcgagatcgccacctacagaaagctgctggagggcgaggagtacagaatgagcggcgagtgccagagcgccgtgagcatcagcgtggtgagcggcagcaccagcaccggcggcatcagcggcggcctgggcagcggcagcggcttcggcctgagcagcggcttcggcagcggcagcggcagcggcttcggcttcggcggcagcgtgagcggcagcagcagcagcaagatcatcagcaccaccaccctgaacaagagaagatag

SEQ ID NO: 127071 - DNA, 1503 bp, Artificial Sequence
  derived and/or modified sequence
atgatcgccagacagcagtgcgtgagaggcggccccagaggcttcagctgcggcagcgccatcgtgggcggcggcaagagaggcgccttcagcagcgtgagcatgagcggcggcgccggcagatgcagcagcggcggcttcggcagcaagggcgcctgcttcggcggcgccggcggcttcggcaccggcggcttcggcggcggcttcggcggcagcttcagcggcaagggcggccccggcttccccgtgtgccccgccggcggcatccaggaggtgaccatcaaccagagcctgctgacccccctgcacgtggagatcgaccccgagatccagaaggtgagaaccgaggagagagagcagatcaagctgctgaacaacaagttcgccagcttcatcgacaaggtgcagttcctggagcagcagaacaaggtgctggagaccaagtggaacctgctgcagcagcagaccaccaccaccagcagcaagaacctggagcccctgttcgagacctacctgagcgtgctgagaaagcagctggacaccctgggcaacgacaagggcagactgcagagcgagctgaagaccatgcaggacagcgtggaggacttcaagaccaagtacgaggaggagatcaacaagagaaccgccgccgagaacgacttcgtggtgctgaagaaggacgtggacgccgcctacctgaacaaggtggagctggaggccaaggtggacagcctgaacgacgagatcaacttcctgaaggtgctgtacgacgccgagctgagccagatgcagacccacgtgagcgacaccagcgtggtgctgagcatggacaacaacagaaacctggacctggacagcatcatcgccgaggtgagagcccagtacgaggagatcgcccagagaagcaaggccgaggccgaggccctgtaccagaccaaggtgcagcagctgcagatcagcgtggaccagcacggcgacaacctgaagaacaccaagagcgagatcgccgagctgaacagaatgatccagagactgagagccgagatcgagaacatcaagaagcagtgccagaccctgcaggtgagcgtggccgacgccgagcagagaggcgagaacgccctgaaggacgcccacagcaagagagtggagctggaggccgccctgcagcaggccaaggaggagctggccagaatgctgagagagtaccaggagctgatgagcgtgaagctggccctggacatcgagatcgccacctacagaaagctgctggagggcgaggagtacagaatgagcggcgagtgccagagcgccgtgagcatcagcgtggtgagcggcagcaccagcaccggcggcatcagcggcggcctgggcagcggcagcggcttcggcctgagcagcggcttcggcagcggcagcggcagcggcttcggcttcggcggcagcgtgagcggcagcagcagcagcaagatcatcagcaccaccaccctgaacaagagaagatag

SEQ ID NO: 127072 - DNA, 1563 bp, Artificial Sequence
  derived and/or modified sequence
atgatcgccagacagcagtgcgtgagaggcggccccagaggcttcagctgcggcagcgccatcgtgggcggcggcaagagaggcgccttcagcagcgtgagcatgagcggcggcgccggcagatgcagcagcggcggcttcggcagcagaagcctgtacaacctgagaggcaacaagagcatcagcatgagcgtggccggcagcagacagggcgcctgcttcggcggcgccggcggcttcggcaccggcggcttcggcggcggcttcggcggcagcttcagcggcaagggcggccccggcttccccgtgtgccccgccggcggcatccaggaggtgaccatcaaccagagcctgctgacccccctgcacgtggagatcgaccccgagatccagaaggtgagaaccgaggagagagagcagatcaagctgctgaacaacaagttcgccagcttcatcgacaaggtgcagttcctggagcagcagaacaaggtgctggagaccaagtggaacctgctgcagcagcagaccaccaccaccagcagcaagaacctggagcccctgttcgagacctacctgagcgtgctgagaaagcagctggacaccctgggcaacgacaagggcagactgcagagcgagctgaagaccatgcaggacagcgtggaggacttcaagaccaagtacgaggaggagatcaacaagagaaccgccgccgagaacgacttcgtggtgctgaagaaggacgtggacgccgcctacctgaacaaggtggagctggaggccaaggtggacagcctgaacgacgagatcaacttcctgaaggtgctgtacgacgccgagctgagccagatgcagacccacgtgagcgacaccagcgtggtgctgagcatggacaacaacagaaacctggacctggacagcatcatcgccgaggtgagagcccagtacgaggagatcgcccagagaagcaaggccgaggccgaggccctgtaccagaccaaggtgcagcagctgcagatcagcgtggaccagcacggcgacaacctgaagaacaccaagagcgagatcgccgagctgaacagaatgatccagagactgagagccgagatcgagaacatcaagaagcagtgccagaccctgcaggtgagcgtggccgacgccgagcagagaggcgagaacgccctgaaggacgcccacagcaagagagtggagctggaggccgccctgcagcaggccaaggaggagctggccagaatgctgagagagtaccaggagctgatgagcgtgaagctggccctggacatcgagatcgccacctacagaaagctgctggagggcgaggagtacagaatgagcggcgagtgccagagcgccgtgagcatcagcgtggtgagcggcagcaccagcaccggcggcatcagcggcggcctgggcagcggcagcggcttcggcctgagcagcggcttcggcagcggcagcggcagcggcttcggcttcggcggcagcgtgagcggcagcagcagcagcaagatcatcagcaccaccaccctgaacaagagaagatag

SEQ ID NO: 127073 - protein, 483 aa, Artificial Sequence
  derived and/or modified sequence
MSIRVTQKSYKVSTSGPRAFSSRSYTSGPGSRISSSSFSRVGSSNFRGGLGGGYGGASGMGGITAVTVNQSLLSPLVLEVDPNIQAVRTQEKEQIKTLNNKFASFIDKVRFLEQQNKMLETKWSLLQQQKTARSNMDNMFESYINNLRRQLETLGQEKLKLEAELGNMQGLVEDFKNKYEDEINKRTEMENEFVLIKKDVDEAYMNKVELESRLEGLTDEINFLRQLYEEEIRELQSQISDTSVVLSMDNSRSLDMDSIIAEVKAQYEDIANRSRAEAESMYQIKYEELQSLAGKHGDDLRRTKTEISEMNRNISRLQAEIEGLKGQRASLEAAIADAEQRGELAIKDANAKLSELEAALQRAKQDMARQLREYQELMNVKLALDIEIATYRKLLEGEESRLESGMQNMSIHTKTTSGYAGGLSSAYGGLTSPGLSYSLGSSFGSGAGSSSFSRTSSSRAVVVKKIETRDGKLVSESSDVLPK

SEQ ID NO: 127074 - protein, 273 aa, Artificial Sequence
  derived and/or modified sequence
MSIRVTQKSYKVSTSGPRAFSSRSYTSGPGSRISSSSFSRVGSSNFRGGLGGGYGGASGMGGITAVTVNQSLLSPLVLEVDPNIQAVRTQEKEQIKTLNNKFASFIDKVRFLEQQNKMLETKWSLLQQQKTARSNMDNMFESYINNLRRQLETLGQEKLKLEAELGNMQGLVEDFKNKYEDEINKRTEMENEFVLIKKDVDEAYMNKVELESRLEGLTDEINFLRQLYEEEIRELQSQISDTSVVLSMDNSRSLDMDSIIAEVKAQYEDIANR

SEQ ID NO: 127075 - protein, 177 aa, Artificial Sequence
  derived and/or modified sequence
MSIRVTQKSYKVSTSGPRAFSSRSYTSGPGSRISSSSFSRVGSSNFRGGLGGGYGGASGMGGITAVTVNQSLLSPLVLEVDPNIQAVRTQEKEQIKTLNNKFASFIDKVRFLEQQNKMLETKWSLLQQQKTARSNMDNMFESYINNLRRQLETLGQEKLKLEAELGNMQGLVEDFKN

SEQ ID NO: 127076 - DNA, 1452 bp, Artificial Sequence
  derived and/or modified sequence
atgagcatcagagtgacccagaagagctacaaggtgagcaccagcggccccagagccttcagcagcagaagctacaccagcggccccggcagcagaatcagcagcagcagcttcagcagagtgggcagcagcaacttcagaggcggcctgggcggcggctacggcggcgccagcggcatgggcggcatcaccgccgtgaccgtgaaccagagcctgctgagccccctggtgctggaggtggaccccaacatccaggccgtgagaacccaggagaaggagcagatcaagaccctgaacaacaagttcgccagcttcatcgacaaggtgagattcctggagcagcagaacaagatgctggagaccaagtggagcctgctgcagcagcagaagaccgccagaagcaacatggacaacatgttcgagagctacatcaacaacctgagaagacagctggagaccctgggccaggagaagctgaagctggaggccgagctgggcaacatgcagggcctggtggaggacttcaagaacaagtacgaggacgagatcaacaagagaaccgagatggagaacgagttcgtgctgatcaagaaggacgtggacgaggcctacatgaacaaggtggagctggagagcagactggagggcctgaccgacgagatcaacttcctgagacagctgtacgaggaggagatcagagagctgcagagccagatcagcgacaccagcgtggtgctgagcatggacaacagcagaagcctggacatggacagcatcatcgccgaggtgaaggcccagtacgaggacatcgccaacagaagcagagccgaggccgagagcatgtaccagatcaagtacgaggagctgcagagcctggccggcaagcacggcgacgacctgagaagaaccaagaccgagatcagcgagatgaacagaaacatcagcagactgcaggccgagatcgagggcctgaagggccagagagccagcctggaggccgccatcgccgacgccgagcagagaggcgagctggccatcaaggacgccaacgccaagctgagcgagctggaggccgccctgcagagagccaagcaggacatggccagacagctgagagagtaccaggagctgatgaacgtgaagctggccctggacatcgagatcgccacctacagaaagctgctggagggcgaggagagcagactggagagcggcatgcagaacatgagcatccacaccaagaccaccagcggctacgccggcggcctgagcagcgcctacggcggcctgaccagccccggcctgagctacagcctgggcagcagcttcggcagcggcgccggcagcagcagcttcagcagaaccagcagcagcagagccgtggtggtgaagaagatcgagaccagagacggcaagctggtgagcgagagcagcgacgtgctgcccaagtag

SEQ ID NO: 127077 - DNA, 822 bp, Artificial Sequence
  derived and/or modified sequence
atgagcatcagagtgacccagaagagctacaaggtgagcaccagcggccccagagccttcagcagcagaagctacaccagcggccccggcagcagaatcagcagcagcagcttcagcagagtgggcagcagcaacttcagaggcggcctgggcggcggctacggcggcgccagcggcatgggcggcatcaccgccgtgaccgtgaaccagagcctgctgagccccctggtgctggaggtggaccccaacatccaggccgtgagaacccaggagaaggagcagatcaagaccctgaacaacaagttcgccagcttcatcgacaaggtgagattcctggagcagcagaacaagatgctggagaccaagtggagcctgctgcagcagcagaagaccgccagaagcaacatggacaacatgttcgagagctacatcaacaacctgagaagacagctggagaccctgggccaggagaagctgaagctggaggccgagctgggcaacatgcagggcctggtggaggacttcaagaacaagtacgaggacgagatcaacaagagaaccgagatggagaacgagttcgtgctgatcaagaaggacgtggacgaggcctacatgaacaaggtggagctggagagcagactggagggcctgaccgacgagatcaacttcctgagacagctgtacgaggaggagatcagagagctgcagagccagatcagcgacaccagcgtggtgctgagcatggacaacagcagaagcctggacatggacagcatcatcgccgaggtgaaggcccagtacgaggacatcgccaacagatag

SEQ ID NO: 127078 - DNA, 534 bp, Artificial Sequence
  derived and/or modified sequence
atgagcatcagagtgacccagaagagctacaaggtgagcaccagcggccccagagccttcagcagcagaagctacaccagcggccccggcagcagaatcagcagcagcagcttcagcagagtgggcagcagcaacttcagaggcggcctgggcggcggctacggcggcgccagcggcatgggcggcatcaccgccgtgaccgtgaaccagagcctgctgagccccctggtgctggaggtggaccccaacatccaggccgtgagaacccaggagaaggagcagatcaagaccctgaacaacaagttcgccagcttcatcgacaaggtgagattcctggagcagcagaacaagatgctggagaccaagtggagcctgctgcagcagcagaagaccgccagaagcaacatggacaacatgttcgagagctacatcaacaacctgagaagacagctggagaccctgggccaggagaagctgaagctggaggccgagctgggcaacatgcagggcctggtggaggacttcaagaactag

SEQ ID NO: 127079 - DNA, 1452 bp, Artificial Sequence
  derived and/or modified sequence
atgtctatccgggtcacccaaaaatcttataaggtgtccactagtgggcctcgcgccttttcaagtaggtcgtacacctctggacccggttctaggatatcttcatcaagtttcagtcgcgtgggtagctctaacttccggggtggactgggcggaggctacgggggagcttctggcatgggcgggatcaccgcagtgaccgtgaatcagtccttgctcagcccactggttttagaagtggacccgaatattcaggccgtccggacacaggagaaagaacaaattaagacgctgaacaacaagttcgcctcattcatcgataaagtacggttcctggagcagcagaacaagatgctagagaccaaatggagtctgctccagcaacagaaaaccgcaagatccaacatggataatatgttcgaatcctacatcaataacttgagaagacagttggagaccctcggacaggagaaattaaaattagaggcggagctggggaatatgcaaggcttagtggaagattttaaaaataagtacgaggacgagatcaacaagcggaccgaaatggaaaatgagttcgtcttgatcaaaaaggacgtggatgaggcctatatgaacaaagtggagcttgaatcgagattggaagggttaacagatgaaatcaatttcctgcgccaactctatgaagaggagattcgggagctacagagccaaatatctgacacttccgttgttctatcaatggataactctaggagcctcgacatggattctataatcgctgaggtgaaagcccagtacgaagatattgccaatcgctcacgtgccgaggcagagagtatgtaccaaattaaatacgaggagctgcagagcctggccgggaaacacggcgacgatcttcgccggactaagactgaaatttctgaaatgaatcgaaacatatctagactccaggccgaaattgaagggctgaagggccagagggcaagcttggaggccgccatcgctgatgcagagcagcgcggggaactcgcgattaaagatgcaaacgccaaactgtccgagctagaggcagctttgcagcgggccaagcaagacatggctaggcagctgagggaataccaagaactcatgaatgtgaaacttgccctcgacattgagattgctacttatagaaagttgctcgagggcgaagagtcgaggcttgaaagcggcatgcagaatatgtccatccatactaaaactacaagcggctatgccggcggactatcatctgcttatggaggcctgacaagccctggcctgtcgtactccctgggaagctccttcgggagtggcgcggggagttctagcttttcccgaacgagttcctcacgtgccgtggtagtgaagaagatagagacgcgggatggcaaattggtgtccgagagtagcgacgtgctccctaagtag

SEQ ID NO: 127080 - DNA, 822 bp, Artificial Sequence
  derived and/or modified sequence
atgtcgatccgagtcacacagaagtcctataaggtctccacctcaggcccccgcgcgttctcatctcggtcctacactagcggcccaggctcgagaatctcctcatcatctttttccagggttggtagtagcaatttcaggggaggtctcgggggaggctacggcggtgcctcaggcatgggtgggatcactgcagtaaccgtaaatcagagccttctgtcaccacttgtactcgaagttgacccaaatattcaggccgttcgcactcaggagaaggagcagattaaaactttgaacaacaagtttgccagttttatcgacaaagttcgctttctagaacagcagaataagatgctggaaaccaagtggtcactccttcagcaacagaaaaccgccaggagcaacatggacaatatgtttgaaagctatataaacaatctgagacgtcagctcgaaacgctcgggcaggagaagctaaaattggaagcagagctgggcaacatgcaggggctggtggaagattttaaaaacaagtacgaggacgaaattaataaacggacagagatggaaaacgagttcgtccttataaaaaaagacgttgacgaagcttacatgaacaaggtggagttagagagccggctcgaaggtcttactgacgaaattaactttctgagacagctgtatgaggaagaaatccgcgagctgcaatctcagatcagcgatacctcagtagtcctgtccatggataactcccgctccctggacatggacagcataatagccgaggttaaggctcagtatgaggacatcgccaaccggtag

SEQ ID NO: 127081 - DNA, 1452 bp, Artificial Sequence
  derived and/or modified sequence
atgagtattcgcgtcactcagaaaagctataaagtctcgacttctggacctcgggcattcagttcgcgctcctacacatccggcccaggcagccgcatcagcagttcctcttttagccgggttggctcttctaatttcagggggggactcggcggtggctatggaggcgcgagcggtatgggcggcattacagccgttactgtgaatcagagtctgcttagccccctggttcttgaggtagaccctaacattcaggctgtgagaacccaggagaaggagcagattaaaacacttaataataagtttgcttccttcatcgacaaagtcagatttcttgaacagcagaacaaaatgctggagaccaaatggagcctcctgcaacaacagaagactgctagaagcaatatggataacatgttcgagtcctatatcaataatctccgcaggcaactggaaacgctcggccaggagaaactcaagctcgaggccgagctggggaatatgcaagggcttgtggaggacttcaagaacaagtatgaggacgagatcaataagcgcacagaaatggagaatgaatttgtgctgatcaaaaaggacgtggacgaagcctatatgaataaagtcgaactggagtctaggctggaaggtcttaccgatgagatcaattttctccgacagctctacgaggaggagattcgggagcttcagtcgcagatctccgatactagcgtggtccttagtatggataattcaagatccctggacatggactcaatcattgctgaggtcaaggcccagtatgaggacatagctaatagatctcgggccgaagcagagagcatgtatcaaattaagtatgaagagctgcagagtctggcaggaaagcacggggatgatctgagaagaaccaaaacagagatttctgagatgaatcgcaacataagccgactgcaggctgagatagaaggtcttaaggggcagagagcctccttggaggcagcaattgctgatgccgagcagcgtggggaacttgcaatcaaggacgcaaatgcaaaactctccgaattagaggccgctttacagcgcgccaaacaagacatggctagacagttacgcgagtaccaggagttgatgaacgtgaagctggccttagacatcgaaattgccacttacagaaaactgcttgaaggagaagaatctcgcctggaatccggcatgcagaatatgtctatacatacaaaaactacaagcggatatgccgggggcttatcaagcgcttacggcggcctgacatcacccgggctcagttactctcttggctcgtcatttggttcaggagccggcagctcctccttttccaggacctcctcctcccgcgccgtcgtcgtgaaaaagattgaaacgcgggacggcaaactcgtgagcgaaagcagtgatgtgttgccaaaatag

SEQ ID NO: 127082 - DNA, 534 bp, Artificial Sequence
  derived and/or modified sequence
atgtcaatcagagtgactcagaaatcctacaaggtgagtacctccggccctcgggcttttagttctaggtcttacacctccggccccgggtctcggataagctcttcaagcttctcacgggtgggcagttcaaactttagaggagggttgggtggcggatacggaggtgccagtggtatgggcgggatcacggcagtcaccgtgaaccagtctctcctctccccactcgtactcgaggtagaccctaatattcaagctgtaagaacccaagaaaaggaacaaatcaagaccctcaataacaaatttgcatctttcatcgataaggtccggtttctcgagcaacagaataaaatgctggaaactaaatggtctctcctccaacagcagaaaactgctcggtcaaatatggataacatgtttgagagctacataaataacctcaggagacagctggagacactcggccaggaaaaactcaagctcgaagcagaactggggaatatgcagggtctcgtggaagactttaagaactag

SEQ ID NO: 127083 - DNA, 1452 bp, Artificial Sequence
  derived and/or modified sequence
atgagtatccgtgttactcaaaaatcatacaaagtgtccacttcagggcccagggctttttccagcaggtcttatactagtggtcctggaagtcggattagtagtagcagcttttcacgagtgggtagctctaactttcgcggtggactaggtggcggctatggtggggcttccggaatgggagggattaccgcggtcactgtgaatcaaagcctgttgtccccgctcgtgctggaggtggatcctaatattcaggccgttagaacccaggaaaaagaacagattaaaacactaaataacaagtttgctagcttcattgataaagttcggttcttagagcagcaaaataagatgctggagacgaagtggagtttgctgcaacaacagaagaccgcacggtctaacatggataatatgttcgaatcctacattaataacctgcggcgccagttggagacgctggggcaagagaaattgaaactggaggccgagctcggaaatatgcagggattggtggaagactttaagaacaaatacgaggacgaaattaataaaagaaccgagatggagaacgagtttgtgctgatcaaaaaggatgtggacgaggcatacatgaataaagtggagctcgagtcacgattggaagggctgacggacgaaattaattttttgaggcagctttatgaagaggaaatcagagaacttcaaagccagatatctgacacgagtgtagtcctgtccatggacaatagtcgctccctggacatggactccattatagctgaggtcaaagctcagtatgaagacatagcgaacaggagccgcgccgaggcagagagcatgtaccaaattaaatatgaggagcttcagtcactggccgggaaacacggcgatgatctgcgacgcactaaaacagaaataagtgagatgaacaggaacataagccggctgcaggctgagattgagggcttgaaagggcagcgggctagcctggaagcggcgatagccgatgctgagcaaaggggtgagctggccatcaaagatgccaacgccaaactctctgagctggaagctgctctccagcgtgcgaaacaggatatggcgcgacaacttcgcgaatatcaggagctgatgaacgtgaagctggcactcgacatcgagatcgctacatatcgaaagttgttggagggcgaggagagccgcctggaatcggggatgcagaacatgagtattcataccaagaccacgtccggctacgccggtggactgagctctgcctacgggggcctaacatctcccggtttgagctatagcctaggtagcagctttggcagtggcgcgggcagtagcagtttcagtcggacaagctccagtagagcggtggtcgtgaagaagatcgaaacaagagacggtaaactagtgtcagaatctagcgatgtgctgcctaaatag

SEQ ID NO: 127084 - DNA, 1452 bp, Artificial Sequence
  derived and/or modified sequence
atgagcatccgggtgacccagaagagctacaaggtgtccaccagcggcccccgggccttcagcagccgcagctacaccagcggccctggcagccgcatcagcagcagcagcttcagccgggtgggcagcagcaacttccggggcggcctgggcggcggctacggcggggccagcggcatgggcggcatcacagctgtgacagtgaaccagagcctgctgagccccctggtgctggaggtggaccccaacatccaggccgtgaggacccaggagaaggagcagatcaagaccctgaacaacaagtttgccagcttcatcgacaaggtgcgcttcctggagcagcagaacaagatgctggagaccaagtggagcctgctgcagcagcagaagacagcccggagcaacatggacaacatgtttgagagctacatcaacaacctgcggcggcagctggagaccctgggccaggagaagctgaagctggaggccgagctgggcaacatgcagggcctggtggaggacttcaagaacaagtatgaagatgagatcaacaagaggacagagatggagaatgaatttgtgctgatcaagaaggatgtggatgaggcctacatgaacaaggtggagctggagagccggctggagggcctgacagatgagatcaacttcctgcggcagctgtatgaggaggagatccgggagctgcagagccagatcagtgacacctctgtggtgctgtccatggacaacagccgcagcctggacatggacagcatcatcgccgaggtgaaggcccagtatgaggacatcgccaacagaagcagagctgaggccgagagcatgtaccagatcaagtatgaggagctgcagagcctggccggcaagcatggagatgacctgcggaggaccaagacagagatcagcgagatgaacagaaacatcagccggctgcaggccgagattgagggcctgaagggccagagggccagcctggaggccgccatcgcagatgctgagcagagaggagagctggccatcaaggatgccaatgccaagctgtctgagctggaggccgccctgcagagggccaagcaggacatggcccggcagctgcgggagtaccaggagctgatgaatgtgaagctggccctggacatcgagatcgccacctacaggaagctgctggagggggaggagagccggctggagagcggcatgcagaacatgagcatccacaccaagaccaccagcggctacgccggcggcctgagcagcgcctatggaggcctgaccagccctggcctgagctacagcctgggcagcagctttggaagtggagctggcagcagcagcttcagcaggaccagcagcagcagagctgtggtggtgaagaagattgagaccagagatggcaagctggtgtctgagagcagtgatgtgctgcccaagtag

SEQ ID NO: 127085 - DNA, 822 bp, Artificial Sequence
  derived and/or modified sequence
atgagcatccgggtgacccagaagagctacaaggtgtccaccagcggcccccgggccttcagcagccgcagctacaccagcggccctggcagccgcatcagcagcagcagcttcagccgggtgggcagcagcaacttccggggcggcctgggcggcggctacggcggggccagcggcatgggcggcatcacagctgtgacagtgaaccagagcctgctgagccccctggtgctggaggtggaccccaacatccaggccgtgaggacccaggagaaggagcagatcaagaccctgaacaacaagtttgccagcttcatcgacaaggtgcgcttcctggagcagcagaacaagatgctggagaccaagtggagcctgctgcagcagcagaagacagcccggagcaacatggacaacatgtttgagagctacatcaacaacctgcggcggcagctggagaccctgggccaggagaagctgaagctggaggccgagctgggcaacatgcagggcctggtggaggacttcaagaacaagtatgaagatgagatcaacaagaggacagagatggagaatgaatttgtgctgatcaagaaggatgtggatgaggcctacatgaacaaggtggagctggagagccggctggagggcctgacagatgagatcaacttcctgcggcagctgtatgaggaggagatccgggagctgcagagccagatcagtgacacctctgtggtgctgtccatggacaacagccgcagcctggacatggacagcatcatcgccgaggtgaaggcccagtatgaggacatcgccaacagatag

SEQ ID NO: 127086 - DNA, 534 bp, Artificial Sequence
  derived and/or modified sequence
atgagcatccgggtgacccagaagagctacaaggtgtccaccagcggcccccgggccttcagcagccgcagctacaccagcggccctggcagccgcatcagcagcagcagcttcagccgggtgggcagcagcaacttccggggcggcctgggcggcggctacggcggggccagcggcatgggcggcatcacagctgtgacagtgaaccagagcctgctgagccccctggtgctggaggtggaccccaacatccaggccgtgaggacccaggagaaggagcagatcaagaccctgaacaacaagtttgccagcttcatcgacaaggtgcgcttcctggagcagcagaacaagatgctggagaccaagtggagcctgctgcagcagcagaagacagcccggagcaacatggacaacatgtttgagagctacatcaacaacctgcggcggcagctggagaccctgggccaggagaagctgaagctggaggccgagctgggcaacatgcagggcctggtggaggacttcaagaactag

SEQ ID NO: 127087 - DNA, 1452 bp, Artificial Sequence
  derived and/or modified sequence
atgagcatccgggtgacccagaagagctacaaggtgagcaccagcgggcctcgtgccttctcctcccgatcatacaccagcgggcccggaagcagaatttcaagttcatcatttagtcgcgtggggtcatcaaatttcaggggcgggctggggggcggatatgggggggcctctgggatggggggcataaccgccgtgaccgtgaatcagtctctgttatccccactggtcttagaagttgatcctaacatacaagccgtgcggacacaggagaaggagcagatcaaaacactcaacaataaatttgcttccttcattgacaaagttcgctttttggagcagcagaataaaatgctggagacaaaatggagtctactccagcaacagaagaccgcgaggtcaaatatggacaatatgttcgagtcatacatcaacaatctgagacggcagctagagacactcgggcaggagaagttgaaattagaagccgagctgggaaatatgcagggcctggttgaggatttcaaaaacaagtacgaagatgagattaacaagagaactgaaatggaaaacgagttcgttttgatcaaaaaggatgttgatgaggcctacatgaacaaggtcgagctggagagtcgactcgagggactaacggacgagattaatttcctacgacagttgtacgaagaggagatccgggaactgcagagtcagattagcgacacctcagttgtgttaagtatggacaactccagaagcttagatatggacagtatcatcgctgaggtaaaagcccagtatgaggatatcgctaataggtcacgcgcggaggctgagagcatgtatcagatcaagtatgaggagctgcagtctctcgcaggaaaacacggggatgacctgagacgcacaaaaacagaaatatcagaaatgaaccgaaacattagtcgcttgcaagcagagattgaagggctgaaggggcaaagggcaagtttggaggccgccatcgccgacgcggaacagcgcggtgagctcgcaatcaaggatgctaatgctaagctgagtgaactagaagccgctctacagcgggctaagcaagacatggctcgccagttgcgcgaatatcaagaacttatgaacgtgaagctcgcattggatatcgagatcgctacttataggaaactgctggagggggaagagagtcgcctcgaatccgggatgcagaacatgtctattcatacaaaaactaccagtggatatgctggaggcctgtcttctgcttatggcggcttgacgtcccccggattatcttattcacttggttcttcatttggctccggagcagggagctcttcatttagcagaacttcttcctctagagcagtcgtggtaaaaaagatcgaaacccgtgacggcaaactggtctctgagagctcagacgtgcttccgaagtag

SEQ ID NO: 127088 - DNA, 822 bp, Artificial Sequence
  derived and/or modified sequence
atgagcatccgggtgacccagaagagctacaaggtgagcaccagcggacccagggccttctcatccagatcatacacctccggtcccggatcccggatttctagcagcagtttttccagggtcggttcgtccaatttcagaggaggcctcggcgggggatatgggggcgcttctgggatgggcggaatcacagccgtgaccgttaaccagtccctgctgtccccgctagtcctcgaagtcgatcctaatattcaggcggttaggacacaggagaaggaacagataaagaccctgaataacaaatttgcctcctttattgataaagtgaggttcctcgagcagcagaataaaatgctggagaccaaatggtccctactgcaacagcaaaaaaccgcccgtagcaacatggacaatatgtttgagtcttacataaacaatttacggcgccagctggagaccttgggccaggagaaacttaaactggaggcagagctcggcaatatgcaagggctcgtagaggattttaaaaataaatacgaggacgagatcaataagcggacagaaatggagaatgaattcgtgctgattaagaaagacgtggacgaggcatacatgaataaggttgagctggaatcccgactggaaggactgactgatgagattaatttcctccggcagctgtacgaggaagaaatcagagagctccagagccaaatttcggacacaagcgtcgtgctgtcgatggataatagtagatctctggatatggactcaatcatcgctgaggttaaagcacaatacgaagacatcgcaaacaggtag

SEQ ID NO: 127089 - DNA, 1452 bp, Artificial Sequence
  derived and/or modified sequence
atgagcatccgggtgacccagaagagctacaaggtgagcaccagcggccctcgcgcgttcagctccaggtcttacacctcaggcccaggaagccgaatttcgtcctcctccttctcccgggtaggctcttcaaatttcaggggtggcctcggtggcggctacggcggcgcgtcgggtatgggagggattaccgccgtgacagtgaatcagtctcttctttcacctttagtgctggaggttgatcctaacattcaggcagtgcgaactcaggagaaggagcagataaaaacactcaacaacaagttcgccagtttcattgataaggtcagatttctggagcaacaaaacaagatgcttgaaacaaaatggtcactcctccagcagcaaaagacagcaagaagcaatatggacaacatgtttgaatcctacatcaataatttacgccgccagttggagactctggggcaagagaaattgaaactcgaggcggagctggggaacatgcagggtctagtggaggactttaaaaataagtatgaggatgaaattaataagcgaaccgaaatggaaaacgaattcgttctgatcaagaaagacgtggatgaagcatatatgaataaggtggagctggaatcacggctcgaaggtttaacagacgagattaattttctgcggcagctgtacgaggaggagattcgcgagttgcagtcgcagattagcgataccagcgttgtattgtcaatggacaacagtcgcagcctcgacatggactctattattgctgaggtcaaagctcagtacgaagacatcgctaatcgctcccgtgccgaagccgagtctatgtaccagatcaaatacgaagagttacagtcattggctgggaagcacggtgacgatttgcgccgtactaagactgaaatctcagagatgaaccggaatatttcacgtctccaagctgaaattgagggcctaaaggggcagagagccagccttgaagccgcaatagcagatgccgagcagcgcggtgaactagccattaaggacgcgaacgcaaaactatcagaattagaagccgctctccagcgggcaaagcaggacatggccaggcagcttcgcgagtatcaagagctgatgaatgtcaagctggccctggatatcgagatcgctacatacaggaaacttctggagggcgaagagtcccggttggaaagcgggatgcagaatatgtccatccacacaaagaccacctctggctacgctggagggctctctagcgcttacggcggtctgacctcgcctggactgagctactcactcgggtcctcctttggttccggcgctggtagttcaagcttttcccgcacctcatcatctcgcgcggtggtggtcaaaaagatagaaacgagggacggcaagttggttagtgagtcaagcgacgtcctccctaagtag

SEQ ID NO: 127090 - DNA, 534 bp, Artificial Sequence
  derived and/or modified sequence
atgagcatccgggtgacccagaagagctacaaggtgagcaccagcggcccaagagcatttagtagccgcagttatacaagtggtcccgggtcccgcatcagtagtagtagcttttcgcgggtgggcagtagtaatttcagagggggactgggcggggggtatggtggtgcttccggaatgggggggattaccgctgtcacagtcaaccagagtctgctgtctcccttggtgttagaggtagaccccaacatccaggccgtgcggacgcaggaaaaggagcagattaagaccctgaacaataaattcgccagtttcatcgacaaagtcagatttctcgagcagcaaaataaaatgcttgagacaaagtggagtcttctccagcagcagaagactgccaggagcaacatggataatatgttcgagagctatataaacaacctgagaaggcagctggagactctcggtcaggagaaactgaaactcgaggccgagcttggcaacatgcagggactcgttgaggatttcaagaattag

SEQ ID NO: 127091 - DNA, 1452 bp, Artificial Sequence
  derived and/or modified sequence
atgagcatccgggtgacccagaagagctacaaggtgagcaccagcggcccccgcgccttcagctctcggtcatatacctctggtccgggtagccggatcagctctagttccttttccagggtggggtccagtaacttccgggggggactagggggcggatatggcggcgcgagtgggatgggcgggattactgcagtgaccgtcaatcagtcgctgctctcccccctggtgttagaggtagatcctaatatacaagccgtaagaactcaagagaaagagcagattaaaacactgaataataagtttgctagcttcatcgacaaggtccgcttcctggagcaacagaacaaaatgctggagacaaaatggtccttgttgcagcagcagaagaccgctaggtctaacatggataacatgttcgagtcgtatattaacaacctcaggaggcagctggaaacactggggcaggagaaacttaagctggaggcagagctgggcaacatgcaggggttggtggaggattttaagaataaatacgaggatgagattaataagaggaccgaaatggagaacgaattcgtgctgattaaaaaagatgttgacgaggcttacatgaacaaggtcgaactggaatcccgcctcgaaggccttactgacgagataaatttcctccggcagctctatgaagaggagattagggaactacagtcacagatctccgacacatccgtggtgctgtccatggataattctagaagcctggatatggactccatcatcgcagaggtgaaggcccagtatgaggatatcgccaaccgtagccgggcagaggctgaatctatgtaccagatcaaatacgaggagctacaaagtctagcagggaagcacggtgatgacctgcgtaggacgaagactgagatctcggagatgaataggaatatcagccgcctccaggctgagatagagggattaaaaggacagagggccagcctggaggcagccattgctgatgccgaacagaggggtgaactggcaatcaaagacgctaatgcgaagctgtcagaactcgaggccgccttgcagcgcgctaaacaggacatggcccgccagttgcgtgagtatcaggaattgatgaacgtgaagctggctttggacatcgagattgcaacttaccgcaaacttctagagggcgaagaatctagacttgaatcaggcatgcagaatatgagtatccacaccaaaaccacttctggatatgcaggtgggctgagtagtgcctacggaggccttacctcaccaggcctgagttattccctcggatccagctttgggagcggtgccggatcgtctagttttagtaggactagctcatcacgcgcggtggtggtgaagaagatcgaaaccagggacggcaagctggtttccgaatcctcagacgtgctccctaagtag

SEQ ID NO: 127092 - DNA, 1452 bp, Artificial Sequence
  derived and/or modified sequence
atgtccatccgggtgacacaaaaatcttacaaagtctccacctccggacctcgcgctttctcctcaagaagctatacaagcggccctgggtcgcggatttcctcctcatcattttccagagtcggctccagtaatttcaggggcggactaggagggggttacgggggagcctcaggaatgggcggaatcacagctgtaacagtgaatcagtccctcctctcaccactggtgttagaagtagacccaaatatccaggctgtgcggacacaggagaaggagcagattaagacgctcaataataagttcgcctcattcatcgataaggtgcggttcttggagcagcagaataaaatgcttgagaccaaatggagcctgctccagcagcagaaaacagctaggagcaatatggataatatgtttgaatcatatatcaataacctccgtagacagctggagaccctgggccaggaaaagctgaaactggaggccgagttagggaatatgcaaggtctcgtggaggactttaaaaacaagtacgaggatgaaatcaacaagcgaacagaaatggaaaacgagttcgtgctgataaagaaagacgtagacgaagcttatatgaataaagtggagctcgagtctcgcctagaaggcctgacagatgagataaattttctgcgtcagctgtacgaagaggaaataagagagttgcagtcccaaatcagcgacacttccgtggttttatcaatggataatagccggagcctggacatggactccattatcgcagaggtgaaagctcagtatgaagacatcgctaaccgaagtcgagctgaagcagaaagcatgtatcagatcaagtatgaggaactacaaagcctcgcaggcaagcatggggatgatctcagaaggaccaaaaccgaaatatcggaaatgaataggaatattagcagacttcaagctgagatcgaaggcctgaagggccagagggcatccctggaggcagcaatcgcagatgctgagcagcgcggtgagctcgccatcaaagacgccaacgctaaactgtctgagctggaagcagccctgcagcgtgctaagcaggatatggcccgacaactccgggaataccaggaattgatgaatgtgaaactggcactagatattgagatcgctacctacaggaagttgttggagggggaggaatccagacttgagagcggtatgcagaatatgtccattcacactaagaccacttccggatacgccggaggcctgagctccgcttacgggggtcttacaagccccggtctgagctactccctgggctcaagttttggctctggcgcaggctcttctagtttctcaaggactagctcatcgagggctgtggtggtaaagaaaattgagaccagagacgggaaattagtgtccgagtccagcgacgttctgccaaagtag

SEQ ID NO: 127093 - DNA, 822 bp, Artificial Sequence
  derived and/or modified sequence
atgtctataagggtgacacaaaagagctataaagtcagcacgagcggtcccagagccttctcttccaggtcatacacttctggaccgggttcgaggattagttcatcctcttttagtagagttggaagcagtaattttcgtgggggtttaggtggtggctacggtggggcttccggcatgggcggaattaccgctgttactgtgaaccaatcactcctcagcccactggtgctggaggttgacccaaatattcaggccgtaagaacacaggaaaaggaacaaatcaagaccttgaataataagtttgcctcattcatagataaagtgaggtttctcgaacagcagaacaagatgctcgaaacaaagtggtctctgctgcaacagcagaaaacggcacgtagcaatatggataatatgttcgagtcatacatcaacaatctgcgcaggcagcttgaaacgctgggacaggagaagctgaagctcgaagccgaattgggtaatatgcagggcttggtggaggactttaagaataagtatgaagatgagattaacaagcgaaccgagatggagaatgagtttgtgcttatcaagaaagacgtggacgaggcgtatatgaataaagtcgagctagaaagtcgcctcgagggcctgaccgatgagattaacttcttgcggcaactgtatgaggaggagattcgcgagctgcagtcacagatatccgacacttccgtagtgctgtccatggataattcacggtcgctagacatggacagcatcatcgccgaggttaaggctcaatatgaagatatcgcaaaccggtag

SEQ ID NO: 127094 - DNA, 1452 bp, Artificial Sequence
  derived and/or modified sequence
atgtcgatccgcgtgacccaaaagtcatataaggtcagtacttccgggcctagggcctttagcagccgctcatacacatccggcccagggtccagaatcagtagttcatcgtttagtcgtgtgggaagcagcaatttcagaggcggattggggggtgggtatggcggtgcttctggtatgggcggtattaccgccgttacagtgaatcagtctctcctctctcctttggtcctggaagtggaccccaatatccaggcagtacggactcaggagaaggagcagatcaaaactctgaataacaaattcgccagcttcatcgataaagttagatttttagaacagcagaacaaaatgctggagacaaaatggtcactgctccagcagcagaagacggcccgaagcaacatggataatatgtttgaatcttacatcaacaacttgcggagacaactagaaaccctgggccaagagaaactcaagctcgaggctgaattgggcaatatgcaggggctggtggaggactttaaaaacaagtatgaggacgaaataaataaaaggaccgaaatggagaatgagttcgtgctgatcaagaaagatgtagacgaagcttacatgaacaaggttgaactagagtcccgcctcgaaggcctgactgatgagattaattttctacgtcagctgtacgaggaagagatacgggaacttcaatcccagatcagcgatacctctgtggtactttctatggataatagccggagcctcgatatggacagcattatagccgaagtgaaggcacagtacgaggacatagctaaccgatcacgcgctgaggctgagagtatgtatcagatcaagtatgaagaactccagagcctggcaggcaaacatggagacgatctgcgtaggacaaaaaccgagatctctgagatgaaccggaatatctcccggctacaagcagaaattgaaggacttaaggggcaacgtgcttctcttgaggccgctattgctgatgccgaacaacgcggagagctcgccattaaggacgccaatgcaaagctgagcgaattggaggccgcattacagcgcgctaagcaggatatggcacggcagctccgcgagtaccaagaactgatgaacgttaaattggctcttgatatcgagattgctacatacaggaaattgctcgaaggcgaagaatctcgtctcgaaagtggtatgcagaatatgtctatccacaccaagactacaagcggctatgcagggggactgtcgagcgcctacggtggcctcacttcacctggattatcctactccttgggtagtagcttcgggtccggtgcaggttcaagtagttttagtaggacgtcatcctcccgggctgtggtggtgaagaagatagagacacgcgacggaaagctcgtgtctgaatcttccgacgttctgcccaaatag

SEQ ID NO: 127095 - DNA, 534 bp, Artificial Sequence
  derived and/or modified sequence
atgagtatccgggtgacgcagaagtcctacaaggtcagcacctccggccctagggctttctcctccaggtcctatacctctggtcccggatctagaatctcttcatccagcttttcccgggtgggcagctcgaacttccgaggtggtctaggtggcggttatggaggcgcttccggtatgggcggtatcacagctgtgacagtgaatcagtccctgttgagccccctggtgcttgaagtggaccccaatatacaagccgtgcgtacccaggagaaggaacaaattaagaccttgaacaataagttcgcctctttcattgataaagtgcggtttctggaacaacagaacaagatgttggaaacgaaatggtcgcttctccagcagcagaagaccgcacgatcgaatatggacaatatgttcgaaagctacatcaacaaccttcgtcgtcaactggagacactgggccaggagaagctgaagcttgaagccgaactggggaatatgcaagggctcgtggaagacttcaagaactag

SEQ ID NO: 127096 - DNA, 1452 bp, Artificial Sequence
  derived and/or modified sequence
atgtccatccgagtgacccagaagtcctacaaggtatcaacgtctggccctcgtgcatttagctcaagatcttatacttccggtccaggctcccgcataagctctagttccttctcccgtgtgggatcatctaacttccggggtggtctaggaggcggatacggaggcgcttcaggaatggggggaatcactgcagtgaccgttaatcagtctctgctctcacccctggtgctggaggtggaccccaacattcaggccgtgcgcacacaggagaaagaacaaatcaaaactctgaataacaagttcgccagtttcattgataaagtcagattccttgagcaacagaacaagatgcttgaaaccaaatggtccctgctgcagcagcagaaaacagccaggtctaatatggacaacatgttcgagagctatatcaacaatctgcggaggcagctcgagactcttggacaagagaagctgaagctcgaggctgaactcggaaatatgcaggggttggttgaggactttaaaaacaagtacgaggatgagatcaataagcggactgagatggagaacgagtttgtcctgattaaaaaggacgtggacgaggcttatatgaacaaagtcgagttagagtctcgcctggagggcctcactgatgaaatcaacttcctccgacagctttatgaagaggagattcgcgaactccagagccagatcagcgatacaagcgtcgtattgagtatggataattcgcggagtttggacatggattcaattatagccgaggtaaaggcacaatacgaagatatcgcgaataggagtcgcgcagaggcagagagcatgtatcagattaaatatgaggaacttcagagcctggcaggcaaacacggtgatgacctcagacgcactaaaacagagattagcgagatgaataggaacattagtcgcttgcaggctgagatcgaagggttgaaagggcagagggccagcttggaagccgcaatcgccgatgctgaacaacggggagagcttgccatcaaggacgctaatgcaaaactcagcgaactggaagccgcactgcaacgtgccaagcaagacatggctcggcaactgcgtgaatatcaagaattgatgaacgtgaagctggcactggacattgaaattgcgacataccgtaagttgttggaaggggaggaatctaggctcgagagcggaatgcagaacatgtctattcacactaagaccacttccggctatgcaggtgggctgagttcggcctatggtggtctgaccagccctggcttgagttattccttgggctcaagctttggctccggcgcaggatcctctagtttctcccgaacctcctcatctcgggcagttgtggtgaagaagatcgaaacccgcgacggcaagctggttagcgagtcctccgacgtcctgcctaagtag

SEQ ID NO: 127097 - protein, 355 aa, Artificial Sequence
  derived and/or modified sequence
MSLRLQSSSASYGGGFGGGSCQLGGGRGVSTCSTRFVSGGSAGGYGGGVSCGFGGGAGSGFGGGLGGGFGGGFAGGFVDFGACDGGLLTGNEKITMQNLNDRLASYLEKVRALEEANADLEVKIRDWHLKQSPASPERDYSPYYKTIEELRDKILTATIENNRVILEIDNARLAADDFRLKYENELALRQSVEADINGLRRVLDELTLSKTDLEMQIESLNEELAYMKKNHEEEMKEFSNQVVGQVNVEMDATPGIDLTRVLAEMREQYEAMAERNRRDAEEWFHTKSAELNKEVSTNTAMIQTSKTEITELRRTLQGLEIELQSQLSMKAGLENTAADPGTHQQHRGPAERAPQ

SEQ ID NO: 127098 - protein, 420 aa, Artificial Sequence
  derived and/or modified sequence
MSLRLQSSSASYGGGFGGGSCQLGGGRGVSTCSTRFVSGGSAGGYGGGVSCGFGGGAGSGFGGGYGGGLGGGYGGGLGGGFGGGFAGGFVDFGACDGGLLTGNEKITMQNLNDRLASYLEKVRALEEANADLEVKIRDWHLKQSPASPERDYSPYYKTIEELRDKILTATIENNRVILEIDNARLAADDFRLKYENELALRQSVEADINGLRRVLDELTLSKTDLEMQIESLNEELAYMKKNHEEEMKEFSNQVVGQVNVEMDATPGIDLTRVLAEMREQYEAMAERNRRDAEEWFHTKSAELNKEVSTNTAMIQTSKTEITELRRTLQGLEIELQSQLSMKAGLENTVAETECRYALQLQQIQGLISSIEAQLSELRSEMECQNQEYKMLLDIKTRLEQEIATYRSLLEGQDAKKRQPP

SEQ ID NO: 127099 - DNA, 1068 bp, Artificial Sequence
  derived and/or modified sequence
atgtctctccggctgcagagctcatcagcttcctacgggggcggcttcggcgggggcagctgtcagctgggcggaggacgcggggtttccacttgctcaaccagattcgttagcggcgggagcgcaggaggctacgggggcggggtgtcatgtgggtttggaggaggggctggctctggttttggagggggactgggaggtggttttggagggggttttgccggtggttttgttgactttggagcatgcgacggtggactactgacagggaacgagaagattacaatgcagaatcttaacgacagactagccagctacttggaaaaagtgagggcactggaagaagcaaatgctgatctggaagtgaaaattagggattggcacttaaaacagtccccggcctccccagagcgagactactcaccttattacaagaccattgaggagcttcgtgataagatccttaccgccaccattgagaataaccgcgttatcttggaaatcgacaatgccaggctagcggctgatgacttcaggctgaagtacgagaatgaactggcactgcgccagagtgtggaagccgacattaatggtcttagacgagtgctggatgaattgacactaagcaagaccgatctcgagatgcagatagagtccttaaacgaggaactggcctacatgaagaagaaccatgaggaagaaatgaaggaattttctaatcaagttgtggggcaagtgaatgtcgagatggacgctaccccgggtattgatctgacccgcgtccttgctgaaatgcgagaacagtacgaggccatggccgaacgcaaccggcgggacgctgaagaatggtttcatactaagtctgcagaactcaataaggaggtgagtacaaatactgctatgatccagaccagtaagacagagataaccgaactaaggcggacgctacagggcctggagatagagctgcagtcccagctgtccatgaaggccggcttagaaaatactgccgccgatcctgggacccatcagcagcaccgtgggccagctgaaagagccccacagtag

SEQ ID NO: 127100 - DNA, 1263 bp, Artificial Sequence
  derived and/or modified sequence
atgtctttgagattacagtcaagttccgcatcttatggtggaggctttggtggcggatcctgccagctcgggggtgggagaggtgtgagcacatgcagcactaggttcgtgagtggtggcagtgccggcgggtacggcggcggggtaagctgtggatttgggggtggggccggaagcgggtttggcggtggatatggcggggggctgggaggaggatatggtgggggcctaggcggaggctttgggggcggattcgcagggggcttcgttgatttcggcgcatgtgacggaggtttgttgacgggaaacgagaagattaccatgcagaacctgaatgatcgactggcatcatatctggagaaggtcagagccttggaagaggccaatgcagaccttgaagtgaaaattagagactggcatctgaagcagagcccggcatcacccgagagagactactccccatattataagactatcgaagaactgagagataaaatcttgaccgccactattgaaaacaacagagtgatccttgaaatcgacaacgcccggctggctgctgacgacttccggttgaaatacgagaacgaactcgccttgcgccagtcagtagaggcagatatcaacggactgcggcgagtgcttgacgaacttacattgtcaaaaactgatctcgagatgcaaattgaatccctgaatgaggagctggcttacatgaagaaaaatcacgaagaagagatgaaggagttctccaatcaggtggtcggacaggttaatgtcgaaatggacgcaacacccgggatcgacctgaccagggtgctcgccgaaatgcgcgaacagtatgaagcaatggcggagcgcaacagaagagacgcagaagagtggtttcatacgaaaagcgcggaactgaacaaggaggtatctacaaacacggctatgattcaaactagcaagacagaaataaccgagctgaggagaactctgcagggcctcgagatagaactccagtcccagctcagcatgaaggccgggctcgagaacacagtggcggaaacggagtgcaggtatgctctccagttacagcagatccaggggcttatcagttctatagaggctcagctgtcagagctacgcagcgaaatggagtgccaaaaccaggaatataaaatgctcctggacatcaaaacccgtctggagcaagaaatcgctacatataggtctctcctcgagggccaggacgcaaagaagaggcagccaccttag

SEQ ID NO: 127101 - DNA, 1068 bp, Artificial Sequence
  derived and/or modified sequence
atgagcctccgcctgcagagctcctctgccagctatggaggtggtttcgggggtggctcttgccagctgggaggaggccgtggtgtctctacctgttcaactcggtttgtgtccgggggatcagctgggggctatggaggcggcgtgagctgtggttttggtggaggggctggtagtggctttggaggtggccttggaggtggctttggtgggggttttgctggtggctttgttgactttggtgcttgtgatggcggcctcctcactggcaatgagaagatcaccatgcagaacctcaacgaccgcctggcttcctacctggagaaggtgcgcgccctggaggaggccaacgctgacctggaggtgaagatccgtgactggcacctgaagcagagcccagctagccctgagcgggactacagcccctactacaagaccattgaagagctccgggacaagatcctgaccgccaccattgaaaacaaccgggtcatcctggagattgacaatgccaggctggctgcggacgacttcaggctcaagtatgagaatgagctggccctgcgccagagcgtggaggccgacatcaacggcctgcgccgggtgctggatgagctcactctgtctaagactgacctggagatgcagatcgagagcctgaatgaagagctagcctacatgaagaagaaccatgaagaggagatgaaggaatttagcaaccaggtggtcggccaggtcaacgtggagatggatgccaccccaggcattgacctgacccgcgtgctggcagagatgagggagcagtacgaggccatggcagagaggaaccgccgggatgctgaggaatggttccacaccaagagtgcagagctgaacaaggaggtgtctaccaacactgccatgattcagaccagcaagacagagatcacggagctcaggcgcacgctccaaggcctggagattgagctgcagtcccagctgagcatgaaagcggggctggagaacactgcagcagatccagggactcatcagcagcatcgaggcccagctgagcgagctccgcagtga

SEQ ID NO: 127102 - DNA, 1673 bp, Artificial Sequence
  derived and/or modified sequence
ggccaagcaagcttctatctgcacctgctctcaatcctgctctcaccatgagcctccgcctgcagagctcctctgccagctatggaggtggtttcgggggtggctcttgccagctgggaggaggccgtggtgtctctacctgttcaactcggtttgtgtccgggggatcagctgggggctatggaggcggcgtgagctgtggttttggtggaggggctggtagtggctttggaggtggctatggaggtggccttggaggtggctatggaggtggccttggaggtggctttggtgggggttttgctggtggctttgttgactttggtgcttgtgatggcggcctcctcactggcaatgagaagatcaccatgcagaacctcaacgaccgcctggcttcctacctggagaaggtgcgcgccctggaggaggccaacgctgacctggaggtgaagatccgtgactggcacctgaagcagagcccagctagccctgagcgggactacagcccctactacaagaccattgaagagctccgggacaagatcctgaccgccaccattgaaaacaaccgggtcatcctggagattgacaatgccaggctggctgcggacgacttcaggctcaagtatgagaatgagctggccctgcgccagagcgtggaggccgacatcaacggcctgcgccgggtgctggatgagctcactctgtctaagactgacctggagatgcagatcgagagcctgaatgaagagctagcctacatgaagaagaaccatgaagaggagatgaaggaatttagcaaccaggtggtcggccaggtcaacgtggagatggatgccaccccaggcattgacctgacccgcgtgctggcagagatgagggagcagtacgaggccatggcagagaggaaccgccgggatgctgaggaatggttccacaccaagagtgcagagctgaacaaggaggtgtctaccaacactgccatgattcagaccagcaagacagagatcacggagctcaggcgcacgctccaaggcctggagattgagctgcagtcccagctgagcatgaaagcggggctggagaacacggtggcagagacggagtgccgctatgccctgcagctgcagcagatccagggactcatcagcagcatcgaggcccagctgagcgagctccgcagtgagatggagtgccagaaccaagagtacaagatgctgctggacatcaagacacgtctggagcaggagatcgccacctaccgcagcctgctcgagggccaggacgccaagaagcgtcagcccccgtagcacctctgttaccacgacttctagtgcctctgttaccaccacctctaatgcctctggtcgccgcacttctgatgtccgtaggccttaaatctgcctggcgtcccctccctctgtcttcagcacccagaggaggagagagccggcagttccctgcaggagagaggaggggctgctggacccaaggctcagtccctctgctctcaggaccccctgtcctgactctctcctgatggtgggccctctgtgctcttctcttccggtcggatctctctcctctctgacctggatacgctttggtttctcaacttctctaccccaaagaaaagattattcaataaagtttcctgcctttctgcaaacata

SEQ ID NO: 127103 - DNA, 1068 bp, Artificial Sequence
  derived and/or modified sequence
atgagcctgcggctgcagagcagcagcgccagctatggaggcggctttggaggcggcagctgccagctgggcggcggccggggcgtgtccacctgcagcaccaggtttgtgtctgggggcagcgctgggggctatggaggcggcgtgtcctgtggctttggaggaggagctggcagcggctttggaggcggcctgggcggcggctttggaggcggctttgctgggggctttgtggactttggagcctgtgatggcggcctgctgactggaaatgagaagatcaccatgcagaacctgaatgaccggctggccagctacctggagaaggtgcgggccctggaggaggccaatgctgacctggaggtgaagatccgggactggcacctgaagcagagccctgccagccctgagcgggactacagcccctactacaagaccatcgaggagctgcgggacaagatcctgacagccaccatcgagaacaacagagtcatcctggagattgacaatgcccggctggccgcagatgacttccggctgaagtatgaaaatgagctggccctgcggcagagcgtggaggccgacatcaatggcctgcggcgggtgctggatgagctgaccctgagcaagacagacctggagatgcagatcgagagcctgaatgaggagctggcctacatgaagaagaaccacgaggaggagatgaaggagttcagcaaccaggtggtgggccaggtgaatgtggagatggatgccaccccaggcatcgacctgaccagggtgctggccgagatgagggagcagtatgaggccatggccgagaggaacagaagagatgctgaggagtggttccacaccaagtctgctgagctgaacaaggaggtgtccaccaacacagccatgatccagaccagcaagacagagatcacagagctgcggaggaccctgcagggcctggagattgagctgcagagccagctgtccatgaaggccggcctggagaacacagctgctgaccccggcacccaccagcagcaccggggccctgctgagcgggccccccagtag

SEQ ID NO: 127104 - DNA, 1263 bp, Artificial Sequence
  derived and/or modified sequence
atgagcctgcggctgcagagcagcagcgccagctatggaggcggctttggaggcggcagctgccagctgggcggcggccggggcgtgtccacctgcagcaccaggtttgtgtctgggggcagcgctgggggctatggaggcggcgtgtcctgtggctttggaggaggagctggcagcggctttggaggcggctatggaggcggcctgggcggcggctatggaggcggcctgggcggcggctttggaggcggctttgctgggggctttgtggactttggagcctgtgatggcggcctgctgactggaaatgagaagatcaccatgcagaacctgaatgaccggctggccagctacctggagaaggtgcgggccctggaggaggccaatgctgacctggaggtgaagatccgggactggcacctgaagcagagccctgccagccctgagcgggactacagcccctactacaagaccatcgaggagctgcgggacaagatcctgacagccaccatcgagaacaacagagtcatcctggagattgacaatgcccggctggccgcagatgacttccggctgaagtatgaaaatgagctggccctgcggcagagcgtggaggccgacatcaatggcctgcggcgggtgctggatgagctgaccctgagcaagacagacctggagatgcagatcgagagcctgaatgaggagctggcctacatgaagaagaaccacgaggaggagatgaaggagttcagcaaccaggtggtgggccaggtgaatgtggagatggatgccaccccaggcatcgacctgaccagggtgctggccgagatgagggagcagtatgaggccatggccgagaggaacagaagagatgctgaggagtggttccacaccaagtctgctgagctgaacaaggaggtgtccaccaacacagccatgatccagaccagcaagacagagatcacagagctgcggaggaccctgcagggcctggagattgagctgcagagccagctgtccatgaaggccggcctggagaacacagtggccgagacagaatgtagatatgccctgcagctgcagcagatccagggcctcatcagcagcattgaggcccagctgtctgagctgcggtctgagatggagtgccagaaccaggagtacaagatgctgctggacatcaagacccggctggagcaggagatcgccacctaccgcagcctgctggagggccaggatgccaagaagaggcagcccccatag

SEQ ID NO: 127105 - DNA, 1068 bp, Artificial Sequence
  derived and/or modified sequence
atgagcctgcggctgcagagcagcagcgccagctacggcggcggcttcggcggtggctcctgtcagttagggggcggacggggcgttagtacttgctcgactcgcttcgtgtccggcggatctgccggtggttacgggggaggcgtttcttgcggcttcggcggcggagccgggtcaggctttggcgggggactcgggggaggttttggagggggattcgctggaggctttgtggattttggggcctgtgatggcggcttgctgaccggcaacgaaaagattactatgcagaatctgaacgatcggctggcatcatacctggagaaagtgcgcgctctggaggaggcaaatgccgatctggaagtgaagattcgcgactggcaccttaaacagtcgcccgcttcaccagaacgagattactccccctactacaaaactattgaggagctccgggacaagatactaactgcgactatcgagaataacagagtgattctggaaatcgacaacgctcgtctggcagcagatgacttccggctgaagtacgagaacgagctcgccctccggcagtcagtcgaggccgatattaatggcctgcggcgcgtcttggatgaactgacgctaagcaagaccgaccttgagatgcagattgaatctctgaacgaggagttggcatacatgaagaaaaaccacgaggaggagatgaaagaattctcaaatcaggtggtgggacaggtgaatgtagagatggatgcaacccctgggatcgatctgactagagtcctagccgagatgcgcgagcaatatgaagcgatggcagaacggaatcggcgggatgccgaggagtggtttcacaccaagtccgccgagctgaacaaagaggtttcgaccaatactgcaatgattcagacttcaaagactgaaattacagaacttagacggacactgcagggcctagaaatagagctccagagccagctatcaatgaaagcgggtcttgaaaacactgccgctgacccaggcacccaccagcagcaccgcgggcctgcagagcgggcaccccagtag

SEQ ID NO: 127106 - DNA, 1263 bp, Artificial Sequence
  derived and/or modified sequence
atgagcctgcggctgcagagcagcagcgccagctacggcggcggcttcggtggcgggtcctgtcaactggggggtgggaggggggtgtcaacgtgtagcactagattcgtcagcggcggaagtgctggcggctatggaggaggggtgtcttgcggcttcggcgggggggccgggtccggtttcggcggagggtacggaggggggctgggcggtggctacgggggtggattaggtggcgggtttgggggcggcttcgctggagggttcgtcgacttcggagcttgcgacggtggcctactgaccggaaatgagaagataaccatgcagaatctgaatgataggctggcttcataccttgagaaagttagggctctagaagaggctaacgctgatcttgaggtgaaaatcagagattggcatctaaagcagagcccagcatccccagagcgcgactactcaccttattataaaaccatcgaagagctgagggacaagatcctcactgcaaccatagaaaacaatagggttattctcgagatagataacgcaagactcgcagccgacgacttcaggttgaaatacgaaaacgagctcgcactgagacaatctgtggaagcggacatcaatggtctgcgcagagtgctggacgagctgaccctcagtaaaacggatctcgaaatgcagatcgagagcttgaatgaggagctcgcctacatgaaaaagaaccatgaagaggaaatgaaagaattctcaaatcaggtagtgggtcaagtgaacgtagagatggacgctacaccagggatcgatcttactcgcgtgctggctgagatgcgcgaacaatacgaggctatggcagaacgcaacagacgggatgctgaagaatggtttcatactaaatcagctgaactgaacaaggaggtgagcaccaacaccgccatgattcagacttctaaaacagagatcaccgagcttcggaggactctccaggggttggaaattgagctgcagtcccaactgtcgatgaaggcaggtttagaaaacaccgttgctgagacggaatgtcgatatgctctgcaactgcaacaaatccagggactgatatcatcaatcgaagcacagctgtcagagttacgaagtgaaatggaatgccagaaccaggaatacaagatgttgttggatatcaaaacgaggctggagcaagaaattgctacctatcgctccttactggaaggccaagacgccaaaaagagacagcctccctag

SEQ ID NO: 127107 - DNA, 1068 bp, Artificial Sequence
  derived and/or modified sequence
atgtctctgcgccttcagagctcgtctgcgtcatacgggggagggtttggaggaggctcttgccagctgggaggcggtcgtggagtgtcaacctgcagcacgaggtttgtgtctggagggagcgccggtggatatgggggtggggtttcatgcgggttcggcggtggggcaggatcaggattcgggggtgggttggggggtggctttggtggcggatttgctggaggtttcgtggactttggagcttgcgatgggggattactcaccggcaacgagaagatcacaatgcagaacctgaatgacagactggcgagctacctcgagaaagtccgggctttggaagaagctaatgctgacctggaagtgaaaatccgagactggcacttgaagcaatccccagcaagtccagaaagagactacagtccctactataaaaccatcgaggaattacgggacaagattctcacagccacaatagagaacaatcgagttatcctggagattgacaacgctcgtctggcggcagacgacttccgactcaagtatgagaacgagttagccctcagacagagtgtggaggccgacatcaatggcctcagacgagtgctggacgagctgacactctctaagacagatctggaaatgcagattgagagcctgaatgaggagttggcctatatgaaaaaaaatcatgaggaggagatgaaagaattctctaatcaggtggtagggcaagtgaacgtagaaatggatgccaccccaggcattgacctcactcgggtgctggctgagatgagggagcagtacgaggcaatggccgagagaaatagaagagacgccgaagagtggttccataccaagtccgccgagctaaataaggaggtgtctacgaacacagctatgatacagacatcgaaaactgagattaccgagctgaggaggacactacagggactcgaaattgaacttcagtcgcagttatctatgaaggcgggacttgaaaacacagccgcagaccccggaacacaccagcagcaccgtggtcccgctgagcgtgcaccccagtag

SEQ ID NO: 127108 - DNA, 1263 bp, Artificial Sequence
  derived and/or modified sequence
atgagtctgcggcttcaatccagcagtgcctcttacggaggcggatttggtggcggaagttgccaactgggcggaggccgtggggtgagcacttgttctaccaggttcgtcagcggagggagcgctggtggctacggcggaggcgtgtcttgcgggtttgggggaggggctgggagcggcttcgggggtggttatgggggaggcctggggggagggtatggaggcggactcgggggaggattcggcggtggatttgccggagggttcgtcgactttggagcctgcgatggcggtcttctaacaggaaacgagaaaattaccatgcagaacctcaatgaccgacttgctagttatttagaaaaggtccgggctctggaagaagccaatgctgacctggaagtgaagatcagggattggcacctgaagcaaagtccggctagcccagaaagagactactccccatactacaagaccatcgaagagcttcgagacaaaatcctcacagcaactatcgagaataacagggtcatcctggagatcgacaacgcgaggctggcagccgacgatttccgactgaaatacgagaatgagcttgcgcttcgacagtcagtggaggcggacatcaacgggctgcggagagtacttgatgagttaaccctgtccaagacagatctggaaatgcagattgaatcactcaatgaggaactggcgtatatgaaaaagaaccatgaggaggagatgaaagagttctcaaaccaggtggtgggccaggtgaacgttgaaatggatgccactccgggaatcgacctcacccgcgtgctggcagagatgagagagcagtacgaagccatggcagagagaaatcgtcgggacgctgaggaatggttccatactaaatcagccgagctcaacaaagaggtttcaaccaacactgcaatgattcagactagcaaaaccgaaatcaccgaattgcggagaacattacagggcctggagatcgagttgcaaagccagctcagcatgaaagctggcttggagaacaccgtcgctgagactgagtgccggtatgcattgcagcttcagcaaattcagggcttaatatcttctatcgaggcccagctcagtgagctcagatcagagatggaatgccagaaccaggaatacaagatgctgcttgatattaaaaccaggctggaacaggaaatagccacctacagaagtctccttgaaggacaggacgctaagaagaggcaacctccatag

SEQ ID NO: 127109 - DNA, 1068 bp, Artificial Sequence
  derived and/or modified sequence
atgagtctccgtcttcagtctagctccgctagctatgggggtgggtttggaggcggcagctgccaacttggagggggaagaggcgtgtccacctgcagcacaagattcgtttctggtgggtctgccggcggctatggtggcggagtatcatgcgggtttggcggcggagctggaagcggattcggtggcgggctgggggggggttttggtggagggtttgcaggtggatttgtggacttcggagcctgcgatgggggtcttttaactggcaatgaaaaaatcacaatgcagaatcttaatgaccggctggccagttatttggagaaagtgcgggcgctcgaagaggccaacgctgacctcgaagtgaaaattagagattggcacctgaaacagagcccagcttccccggaaagggattatagtccatactacaagacaatagaagagctcagggataagatactcaccgctaccattgagaataaccgagtgatcctcgagattgataatgcaaggctcgctgccgatgattttcgactgaaatatgaaaatgagttggcccttaggcaatctgttgaggcagacatcaacgggctccggagggtgcttgatgaactaacactgtctaaaaccgacttggagatgcagatcgagtccctcaacgaggagctggcgtatatgaaaaaaaaccacgaggaggaaatgaaagaattcagcaaccaggtcgtgggtcaagtgaatgtggaaatggatgcgacacccgggatcgatctaacacgggtgttggccgagatgcgcgagcagtacgaagccatggccgagcgcaataggagagatgccgaagagtggttccacaccaagtcagccgaactgaataaagaagtctctactaatactgctatgatccagacatccaagaccgagattactgaactgagacgcaccttacagggcttagagattgaattgcagtcacagcttagtatgaaagcaggactggaaaacaccgcagcagaccctgggacccatcaacagcatagaggtccagctgagcgggcgcctcagtag

SEQ ID NO: 127110 - DNA, 1068 bp, Artificial Sequence
  derived and/or modified sequence
atgagtctgcgactgcaatcttctagcgcgtcttacggtggcggcttcggcgggggtagctgtcagctaggtggaggtagaggtgtgagcacttgctctaccaggtttgtgagcggcggatcagcaggcgggtatggaggtggggtgtcatgcggatttggcggtggagcaggctcagggtttgggggaggactggggggaggtttcggaggaggctttgccggaggctttgtggactttggagcgtgtgacggtggcttgctgacagggaatgaaaaaatcacaatgcaaaatttaaatgatcgcctggcatcatacctggagaaagtccgggcccttgaggaagccaacgccgatttggaagtcaagatacgtgactggcacttgaaacagtcccccgcctccccagagcgagactattcaccttactataaaacgattgaggagttgagagataaaatactgacagccaccatagagaataatcgcgtgatcctggagatcgataacgctaggctggctgctgacgactttagactgaaatacgaaaatgagcttgcactgagacaaagcgttgaggccgacataaacggactgcgtagagtcctggatgagttgaccctgagcaaaaccgatcttgaaatgcagattgaatctttgaatgaggagctcgcgtatatgaaaaagaatcatgaagaagagatgaaggaatttagcaatcaggtggtgggacaagtgaacgttgaaatggatgccaccccgggaatcgacttgactcgcgtgctcgcagagatgcgagagcagtatgaagcaatggcagaacgcaataggagggacgcggaggaatggttccataccaagagcgccgaactgaacaaggaggttagcaccaataccgcaatgatacaaacgagtaagaccgagatcaccgaactaagacgaacacttcaagggcttgaaatcgaactgcagtctcagctgtctatgaaagcaggattagaaaacaccgcggctgacccaggcacccaccagcagcaccggggcccggctgaaagagctcctcagtag

SEQ ID NO: 127111 - DNA, 1068 bp, Artificial Sequence
  derived and/or modified sequence
atgagcctgagactgcagagcagcagcgccagctacggcggcggcttcggcggcggcagctgccagctgggcggcggcagaggcgtgagcacctgcagcaccagattcgtgagcggcggcagcgccggcggctacggcggcggcgtgagctgcggcttcggcggcggcgccggcagcggcttcggcggcggcctgggcggcggcttcggcggcggcttcgccggcggcttcgtggacttcggcgcctgcgacggcggcctgctgaccggcaacgagaagatcaccatgcagaacctgaacgacagactggccagctacctggagaaggtgagagccctggaggaggccaacgccgacctggaggtgaagatcagagactggcacctgaagcagagccccgccagccccgagagagactacagcccctactacaagaccatcgaggagctgagagacaagatcctgaccgccaccatcgagaacaacagagtgatcctggagatcgacaacgccagactggccgccgacgacttcagactgaagtacgagaacgagctggccctgagacagagcgtggaggccgacatcaacggcctgagaagagtgctggacgagctgaccctgagcaagaccgacctggagatgcagatcgagagcctgaacgaggagctggcctacatgaagaagaaccacgaggaggagatgaaggagttcagcaaccaggtggtgggccaggtgaacgtggagatggacgccacccccggcatcgacctgaccagagtgctggccgagatgagagagcagtacgaggccatggccgagagaaacagaagagacgccgaggagtggttccacaccaagagcgccgagctgaacaaggaggtgagcaccaacaccgccatgatccagaccagcaagaccgagatcaccgagctgagaagaaccctgcagggcctggagatcgagctgcagagccagctgagcatgaaggccggcctggagaacaccgccgccgaccccggcacccaccagcagcacagaggccccgccgagagagccccccagtag

SEQ ID NO: 127112 - DNA, 1263 bp, Artificial Sequence
  derived and/or modified sequence
atgagcctgagactgcagagcagcagcgccagctacggcggcggcttcggcggcggcagctgccagctgggcggcggcagaggcgtgagcacctgcagcaccagattcgtgagcggcggcagcgccggcggctacggcggcggcgtgagctgcggcttcggcggcggcgccggcagcggcttcggcggcggctacggcggcggcctgggcggcggctacggcggcggcctgggcggcggcttcggcggcggcttcgccggcggcttcgtggacttcggcgcctgcgacggcggcctgctgaccggcaacgagaagatcaccatgcagaacctgaacgacagactggccagctacctggagaaggtgagagccctggaggaggccaacgccgacctggaggtgaagatcagagactggcacctgaagcagagccccgccagccccgagagagactacagcccctactacaagaccatcgaggagctgagagacaagatcctgaccgccaccatcgagaacaacagagtgatcctggagatcgacaacgccagactggccgccgacgacttcagactgaagtacgagaacgagctggccctgagacagagcgtggaggccgacatcaacggcctgagaagagtgctggacgagctgaccctgagcaagaccgacctggagatgcagatcgagagcctgaacgaggagctggcctacatgaagaagaaccacgaggaggagatgaaggagttcagcaaccaggtggtgggccaggtgaacgtggagatggacgccacccccggcatcgacctgaccagagtgctggccgagatgagagagcagtacgaggccatggccgagagaaacagaagagacgccgaggagtggttccacaccaagagcgccgagctgaacaaggaggtgagcaccaacaccgccatgatccagaccagcaagaccgagatcaccgagctgagaagaaccctgcagggcctggagatcgagctgcagagccagctgagcatgaaggccggcctggagaacaccgtggccgagaccgagtgcagatacgccctgcagctgcagcagatccagggcctgatcagcagcatcgaggcccagctgagcgagctgagaagcgagatggagtgccagaaccaggagtacaagatgctgctggacatcaagaccagactggagcaggagatcgccacctacagaagcctgctggagggccaggacgccaagaagagacagcccccctag

SEQ ID NO: 127113 - protein, 251 aa, Artificial Sequence
  derived and/or modified sequence
MTGTRSRPQPAQNATTANTSRPLKSSGTRYENELALRQGVEADINGLRRVLDELTLARTDLEMQIEGLNEELAYLKKNHEEEMKEFSSQLAGQVNVEMDAAPGVDLTRVLAEMREQYEAMAEKNRRDVEAWFFSKTEELNKEVASNTEMIQTSKTEITDLRRTMQELEIELQSQLSMKAGLENSLAETECRYATQLQQIQGLIGGLEAQLSELRCEMEAQNQEYKMLLDIKTRLEQEIATYRSLLEGQDAK

SEQ ID NO: 127114 - protein, 220 aa, Artificial Sequence
  derived and/or modified sequence
MTGTRSRPQPAQNATTANTSRPLKSSGTRYENELALRQGVEADINGLRRVLDELTLARTDLEMQIEGLNEELAYLKKNHEEEMKEFSSQLAGQVNVEMDAAPGVDLTRVLAEMREQYEAMAEKNRRDVEAWFFSKTEELNKEVASNTEMIQTSKTEITDLRRTMQELEIELQSQLSMKAGLENSLAETECRYATQLQQIQGLIGGLEAQLSELRCEMEAQ

SEQ ID NO: 127115 - protein, 400 aa, Artificial Sequence
  derived and/or modified sequence
MTSYSYRQSSATSSFGGLGGGSVRFGPGVAFRAPSIHGGSGGRGVSVSSARFVSSSSSGAYGGGYGGVLTASDGLLAGNEKLTMQNLNDRLASYLDKVRALEAANGELEVKIRDWYQKQGPGPSRDYSHYYTTIQDLRDKILGATIENSRIVLQIDNARLAADDFRTKFETEQALRMSVEADINGLRRVLDELTLARTDLEMQIEGLKEELAYLKKNHEEEISTLRGQVGGQVSVEVDSAPGTDLAKILSDMRSQYEVMAEQNRKDAEAWFTSRTEELNREVAGHTEQLQMSRSEVTDLRRTLQGLEIELQSQLSMKAALEDTLAETEARFGAQLAHIQALISGIEAQLGDVRADSERQNQEYQRLMDIKSRLEQEIATYRSLLEGQEDHYNNLSASKVL

SEQ ID NO: 127116 - protein, 196 aa, Artificial Sequence
  derived and/or modified sequence
MTSYSYRQSSATSSFGGLGGGSVRFGPGVAFRAPSIHGGSGGRGVSVSSARFVSSSSSGAYGGGYGGVLTASDGLLAGNEKLTMQNLNDRLASYLDKVRALEAANGELEILGATIENSRIVLQIDNARLAADDFRTKFETEQALRMSVEADINGLRRVLDELTLARTDLEMQIEGLKEELAYLKKNHEEEISTLRG

SEQ ID NO: 127117 - DNA, 1203 bp, Artificial Sequence
  derived and/or modified sequence
atgaccagctacagctacagacagagcagcgccaccagcagcttcggcggcctgggcggcggcagcgtgagattcggccccggcgtggccttcagagcccccagcatccacggcggcagcggcggcagaggcgtgagcgtgagcagcgccagattcgtgagcagcagcagcagcggcgcctacggcggcggctacggcggcgtgctgaccgccagcgacggcctgctggccggcaacgagaagctgaccatgcagaacctgaacgacagactggccagctacctggacaaggtgagagccctggaggccgccaacggcgagctggaggtgaagatcagagactggtaccagaagcagggccccggccccagcagagactacagccactactacaccaccatccaggacctgagagacaagatcctgggcgccaccatcgagaacagcagaatcgtgctgcagatcgacaacgccagactggccgccgacgacttcagaaccaagttcgagaccgagcaggccctgagaatgagcgtggaggccgacatcaacggcctgagaagagtgctggacgagctgaccctggccagaaccgacctggagatgcagatcgagggcctgaaggaggagctggcctacctgaagaagaaccacgaggaggagatcagcaccctgagaggccaggtgggcggccaggtgagcgtggaggtggacagcgcccccggcaccgacctggccaagatcctgagcgacatgagaagccagtacgaggtgatggccgagcagaacagaaaggacgccgaggcctggttcaccagcagaaccgaggagctgaacagagaggtggccggccacaccgagcagctgcagatgagcagaagcgaggtgaccgacctgagaagaaccctgcagggcctggagatcgagctgcagagccagctgagcatgaaggccgccctggaggacaccctggccgagaccgaggccagattcggcgcccagctggcccacatccaggccctgatcagcggcatcgaggcccagctgggcgacgtgagagccgacagcgagagacagaaccaggagtaccagagactgatggacatcaagagcagactggagcaggagatcgccacctacagaagcctgctggagggccaggaggaccactacaacaacctgagcgccagcaaggtgctgtag

SEQ ID NO: 127118 - DNA, 591 bp, Artificial Sequence
  derived and/or modified sequence
atgaccagctacagctacagacagagcagcgccaccagcagcttcggcggcctgggcggcggcagcgtgagattcggccccggcgtggccttcagagcccccagcatccacggcggcagcggcggcagaggcgtgagcgtgagcagcgccagattcgtgagcagcagcagcagcggcgcctacggcggcggctacggcggcgtgctgaccgccagcgacggcctgctggccggcaacgagaagctgaccatgcagaacctgaacgacagactggccagctacctggacaaggtgagagccctggaggccgccaacggcgagctggagatcctgggcgccaccatcgagaacagcagaatcgtgctgcagatcgacaacgccagactggccgccgacgacttcagaaccaagttcgagaccgagcaggccctgagaatgagcgtggaggccgacatcaacggcctgagaagagtgctggacgagctgaccctggccagaaccgacctggagatgcagatcgagggcctgaaggaggagctggcctacctgaagaagaaccacgaggaggagatcagcaccctgagaggctag

SEQ ID NO: 127119 - DNA, 1203 bp, Artificial Sequence
  derived and/or modified sequence
atgaccagctattcttaccggcagtcctcagctaccagttctttcggcggcttagggggcggatctgtccggtttggaccaggggtggccttccgggccccttccattcacggaggtagtggggggaggggcgtctctgtgagtagcgcccgatttgtttctagttcctcctccggggcgtatggcggcggatatgggggcgtcctgaccgcctctgacggcttacttgccggaaacgagaagctgaccatgcagaacttaaatgaccggttggctagctatttagacaaggtgcgcgccctcgaagccgcaaatggagagctggaggtgaaaattcgcgattggtaccaaaaacagggacctgggcccagtcgggactacagtcactactatacgactatccaggatctgcgggataaaattcttggtgccaccattgagaactcccgcattgttctgcagatcgataacgcccggctggcagccgatgacttcagaacaaaatttgagacagagcaggccttgcggatgtcagtcgaggccgatataaatggtctgcgccgtgtgcttgacgaattgacattagccagaaccgacctggaaatgcagattgagggtttgaaggaggaactggcctatctgaaaaagaatcacgaggaggaaatctcaacgctgcgggggcaggtcggtggtcaggtaagtgttgaggtagattctgcacccggcaccgacctcgcaaagattctgtctgacatgcgctcccagtacgaagtaatggcagaacagaatcgcaaggatgccgaggcatggtttacttctcgcacagaggaacttaaccgagaggtcgctggtcacactgagcaactccagatgtctcgctccgaggtgactgatcttcgtagaactctgcagggcctggagattgagctgcagagccagttgtcaatgaaggctgctctggaggacaccttggcagagacggaagcacggttcggagcccaactggcccatatccaggccctgattagtgggatagaagcccagctcggcgacgtgcgagcagactccgagagacagaaccaggagtaccaaagactgatggatatcaagtcacggctcgagcaggagattgcgacttatcggagtctcctggaaggccaggaagaccactacaataatctgtctgcctccaaagttttgtag

SEQ ID NO: 127120 - DNA, 591 bp, Artificial Sequence
  derived and/or modified sequence
atgacatcctactcttacagacaatcctccgccacctcttccttcggcggattggggggcgggtcagtgagattcgggcccggagtcgcattcagggcccctagtatccacgggggcagcggcggtcgcggcgtgtcagtaagctcagctcgcttcgtgtccagttcctcttctggtgcgtacgggggtggctatggaggggtcctgactgcttctgacggtttgctggctgggaacgaaaagctgacaatgcagaatcttaacgaccggctcgcatcctacctggacaaagtaagggctttggaggctgctaatggtgaactggagattttaggggccaccatcgaaaacagccgcattgtgttgcagatcgataatgcccgcctagctgccgacgacttccgcacaaaattcgagacagagcaagcactccgcatgtctgtggaagccgacataaacggcttgagaagggtcctggacgagctgaccttggcccggactgatctggagatgcagatcgagggacttaaagaagagctagcttacctcaagaaaaatcacgaagaagaaatctctaccctgcgcgggtag

SEQ ID NO: 127121 - DNA, 1203 bp, Artificial Sequence
  derived and/or modified sequence
atgaccagctacagctaccggcagagcagcgccaccagcagctttggaggcctgggcggcggctctgtgcgctttggacctggggtggccttccgggcccccagcatccatggaggcagcggcggccggggcgtgtctgtgtcctctgccaggtttgtgagcagcagcagcagcggggcctatggaggcggctatggaggagtgctgacagccagtgatggcctgctggccggaaatgagaagctgaccatgcagaacctgaatgaccggctggccagctacctggacaaggtgcgggccctggaggccgccaatggagagctggaggtgaagatccgggactggtaccagaagcagggccctggccccagccgggactacagccactactacaccaccatccaggacctgcgggacaagatcctgggcgccaccatcgagaacagcagaattgtgctgcagattgacaatgcccggctggccgcagatgacttccgcaccaagtttgaaacagagcaggccctgaggatgtctgtggaggccgacatcaatggcctgcggcgggtgctggatgagctgaccctggccaggacagacctggagatgcagatcgagggcctgaaggaggagctggcctacctgaagaagaaccacgaggaggagatcagcaccctgcggggccaggtgggcggccaggtgtctgtggaggtggacagcgcccctggaacagacctggccaagatcctgagtgacatgaggagccagtatgaggtgatggccgagcagaacaggaaggatgctgaggcctggttcaccagcaggacagaggagctgaaccgggaggtggccggccacacagagcagctgcagatgagccgctctgaggtgacagacctgcggaggaccctgcagggcctggagattgagctgcagagccagctgtccatgaaggccgccctggaggacaccctggccgagacagaggccaggtttggagcccagctggcccacatccaggccctgatctctggaattgaggcccagctgggagatgtgcgggctgacagcgagcggcagaaccaggagtaccagaggctgatggacatcaagagccggctggagcaggagatcgccacctaccgcagcctgctggagggccaggaggaccactacaacaacctgagcgccagcaaggtgctgtag

SEQ ID NO: 127122 - DNA, 591 bp, Artificial Sequence
  derived and/or modified sequence
atgaccagctacagctaccggcagagcagcgccaccagcagctttggaggcctgggcggcggctctgtgcgctttggacctggggtggccttccgggcccccagcatccatggaggcagcggcggccggggcgtgtctgtgtcctctgccaggtttgtgagcagcagcagcagcggggcctatggaggcggctatggaggagtgctgacagccagtgatggcctgctggccggaaatgagaagctgaccatgcagaacctgaatgaccggctggccagctacctggacaaggtgcgggccctggaggccgccaatggagagctggagatcctgggcgccaccatcgagaacagccgcatcgtgctgcagattgacaatgcccggctggccgcagatgacttccgcaccaagtttgaaacagagcaggccctgaggatgtctgtggaggccgacatcaatggcctgcggcgggtgctggatgagctgaccctggccaggacagacctggagatgcagatcgagggcctgaaggaggagctggcctacctgaagaagaaccacgaggaggagatcagcaccctgcggggctag

SEQ ID NO: 127123 - DNA, 1390 bp, Artificial Sequence
  derived and/or modified sequence
gctcctcccgcgaatcgcagcttctgagaccagggttgctccgtccgtgctccgcctcgccatgacttcctacagctatcgccagtcgtcggccacgtcgtccttcggaggcctgggcggcggctccgtgcgttttgggccgggggtcgcctttcgcgcgcccagcattcacgggggctccggcggccgcggcgtatccgtgtcctccgcccgctttgtgtcctcgtcctcctcgggggcctacggcggcggctacggcggcgtcctgaccgcgtccgacgggctgctggcgggcaacgagaagctaaccatgcagaacctcaacgaccgcctggcctcctacctggacaaggtgcgcgccctggaggcggccaacggcgagctagaggtgaagatccgcgactggtaccagaagcaggggcctgggccctcccgcgactacagccactactacacgaccatccaggacctgcgggacaagattcttggtgccaccattgagaactccaggattgtcctgcagatcgacaatgcccgtctggctgcagatgacttccgaaccaagtttgagacggaacaggctctgcgcatgagcgtggaggccgacatcaacggcctgcgcagggtgctggatgagctgaccctggccaggaccgacctggagatgcagatcgaaggcctgaaggaagagctggcctacctgaagaagaaccatgaggaggaaatcagtacgctgaggggccaagtgggaggccaggtcagtgtggaggtggattccgctccgggcaccgatctcgccaagatcctgagtgacatgcgaagccaatatgaggtcatggccgagcagaaccggaaggatgctgaagcctggttcaccagccggactgaagaattgaaccgggaggtcgctggccacacggagcagctccagatgagcaggtccgaggttactgacctgcggcgcacccttcagggtcttgagattgagctgcagtcacagctgagcatgaaagctgccttggaagacacactggcagaaacggaggcgcgctttggagcccagctggcgcatatccaggcgctgatcagcggtattgaagcccagctgggcgatgtgcgagctgatagtgagcggcagaatcaggagtaccagcggctcatggacatcaagtcgcggctggagcaggagattgccacctaccgcagcctgctcgagggacaggaagatcactacaacaatttgtctgcctccaaggtcctctgaggcagcaggctctggggcttctgctgtcctttggagggtgtcttctgggtagagggatgggaaggaagggacccttacccccggctcttctcctgacctgccaataaaaatttatggtccaaggga

SEQ ID NO: 127124 - DNA, 641 bp, Artificial Sequence
  derived and/or modified sequence
gcgaatcgcagcttctgagaccagggttgctccgtccgtgctccgcctcgccatgacttcctacagctatcgccagtcgtcggccacgtcgtccttcggaggcctgggcggcggctccgtgcgttttgggccgggggtcgcctttcgcgcgcccagcattcacgggggctccggcggccgcggcgtatccgtgtcctccgcccgctttgtgtcctcgtcctcctcgggggcctacggcggcggctacggcggcgtcctgaccgcgtccgacgggctgctggcgggcaacgagaagctaaccatgcagaacctcaacgaccgcctggcctcctacctggacaaggtgcgcgccctggaggcggccaacggcgagctagagattcttggtgccaccattgagaactccaggattgtcctgcagatcgacaatgcccgtctggctgcagatgacttccgaaccaagtttgagacggaacaggctctgcgcatgagcgtggaggccgacatcaacggcctgcgcagggtgctggatgagctgaccctggccaggaccgacctggagatgcagatcgaaggcctgaaggaagagctggcctacctgaagaagaaccatgaggaggaaatcagtacgctgaggggcc

SEQ ID NO: 127125 - DNA, 1203 bp, Artificial Sequence
  derived and/or modified sequence
atgaccagctacagctaccggcagagcagcgccaccagcagcttcggtgggttagggggaggctccgtaagatttggccctggggtggcatttagggccccctccattcatgggggtagtggggggaggggcgtctcagtgagttccgccagattcgtgagctcttcgtcgtcaggcgcatacggcggcggttatggtggggtgctgaccgctagtgatgggttactggccggcaatgagaaactgaccatgcagaatttaaacgataggctcgcctcatacttggataaggtgagggccctagaggccgccaatggagaactggaagtcaaaattcgcgattggtaccagaagcagggccccggtccatccagggactacagtcactactataccaccatccaagaccttagagataaaattctgggggctacaatcgaaaactcgcggattgtattacagatagacaacgctcgccttgctgccgatgacttcagaaccaagttcgaaactgagcaggcactgcgaatgtcggttgaggctgacattaatggacttagaagagtccttgacgagttaactctcgcccgcaccgacttagagatgcagatcgaaggacttaaggaggaactcgcctacctgaaaaaaaatcacgaggaggagatatcaacactccgcggacaggtgggcggccaggtatcagtggaagtcgacagcgcgccgggaaccgacctagccaaaatcttgtctgatatgagatctcagtacgaggtcatggcagaacagaaccgcaaggacgccgaagcatggttcaccagccgcaccgaggaactcaaccgcgaagtcgcggggcatactgaacaactgcaaatgagtaggtcagaagtcacggatctccgcaggaccttacaggggctggagatcgagctgcagagccagctgtcgatgaaggccgctctggaggacaccctggctgaaaccgaagcgaggtttggtgcccaactggcacatatacaggcccttatttccggaatcgaggcgcagcttggcgacgtgagagcggattccgagcgccagaatcaggaataccagcggctcatggacatcaagagcaggctggagcaagagatcgccacatatcggagccttctagagggccaggaggaccattacaacaatctgtcggcgagcaaagttctctag

SEQ ID NO: 127126 - DNA, 591 bp, Artificial Sequence
  derived and/or modified sequence
atgaccagctacagctaccggcagagcagcgccaccagcagcttcggcggccttggtggggggtcagtgcgattcggtcctggtgtggctttcagagcacccagcattcatggtggtagcgggggcagaggcgtttcagtgtcctccgcacgttttgtgtcatccagctccagcggagcctacggcggaggctacggcggtgtgctgacagcctctgatggcctcctagcaggaaacgaaaaactgacaatgcaaaatctgaatgaccggcttgccagctatctggataaggttcgcgccctggaggcagctaacggcgaactggaaatcctgggcgctaccatcgaaaactcgagaatcgttctgcagattgataatgcccgactggctgccgacgactttcggacgaaatttgagaccgagcaggccctgcgtatgtcggtagaggccgatattaacggactccggagagtgctggatgagcttacccttgctcggaccgatctagagatgcagattgaaggactcaaggaggaactcgcttacttaaagaaaaaccacgaggaggagatctctacactaaggggatag

SEQ ID NO: 127127 - DNA, 1203 bp, Artificial Sequence
  derived and/or modified sequence
atgacctcttacagttaccgacagtcttctgcgactagctcctttggaggactcggcggaggatctgtcaggttcggacctggcgtagcatttagggccccatccattcatggtggtagcggtggaaggggcgtctctgtaagcagcgccagatttgtgtcctcctcatctagcggagcctatgggggtggctacggtggtgtgctgactgcatctgatgggctcctggcaggtaacgaaaagctgaccatgcagaacctcaatgaccggttggcaagctatttggacaaagtgcgcgctcttgaggcggctaatggagaactggaagtgaaaatccgtgactggtaccagaagcaggggcctgggccttccagagattatagtcactactacactaccattcaggatttgagggacaagatacttggtgcaacaatcgaaaacagtaggatagtgctgcaaattgataacgccaggcttgcggcagacgatttccgtactaagtttgagacggagcaggctctgcgcatgagtgtcgaggcggacattaatggattgagacgagtcttagatgaactcaccctggcccgtacagacctggaaatgcagatagaaggcttgaaggaggaactggcgtacctaaaaaagaatcatgaggaagagatctcaactcttagaggccaagttggcggacaggtgtccgttgaagtcgactccgcaccaggtactgatctcgccaaaatactgtcagatatgcgaagtcagtatgaggttatggcggagcaaaacaggaaggacgcagaggcctggtttacctctcggacagaggagttgaatcgggaggtggccggtcatacagaacagctgcagatgagcagaagcgaagttaccgacctcagaaggactctgcagggcttagagatcgagcttcaatctcagctatctatgaaagccgctctggaggatacgctggctgagaccgaagcacgctttggcgctcaactggcgcatatccaagccctgatcagcggcatcgaggctcagctcggcgacgtacgagctgatagcgagaggcaaaaccaggaataccagagattaatggacattaaatcgcgactagagcaggagatcgccacctatcgctcactcctcgaaggccaagaagatcactataacaacctgtcggccagtaaggtcctctag

SEQ ID NO: 127128 - DNA, 591 bp, Artificial Sequence
  derived and/or modified sequence
atgacatcatatagctaccgtcagtccagcgctacgtcgtctttcggtggcctggggggaggttcagtgagatttggacccggtgtagcctttcgagccccttctatacacggcggtagtggtggccgaggggtctccgtgtcttccgctagatttgtaagctcatcaagctctggggcatacggtggaggctacggcggagttctcaccgctagcgatggactgctggccggaaatgagaaattgacaatgcagaatctgaacgacagactcgcctcttatttggacaaagttcgagccctggaggctgctaacggtgagctcgagatcttaggcgctaccattgagaatagccgcattgtgctgcagatagacaatgccagactggccgcagacgatttccgaacaaagttcgagaccgaacaagcgttgcgcatgagtgtagaggcggacatcaacggcctgagaagggttctggacgaattgaccctcgcccgtactgatctggaaatgcaaattgaaggtctcaaggaggagctggcgtacctgaagaaaaatcatgaggaggaaataagtacccttcgaggctag

SEQ ID NO: 127129 - protein, 416 aa, Artificial Sequence [sequence omitted]

SEQ ID NO: 127130 - DNA, 1251 bp, Artificial Sequence
  derived and/or modified sequence
atgccttataacttctgtcttccctccctgagttgtcgaactagttgcagcagccggccatgtgtccctccttcatgccattcttgtactctgcctggcgcctgcaatattcccgccaatgtgtccaattgtaattggttctgtgaagggagctttaatggctccgagaaagagacaatgcagttcctgaatgataggctcgcttcttacctcgagaaagtcagacagcttgagcgcgataacgccgaattagaaaacctgattcgagaacgatcacagcagcaagagcctctgctgtgcccatcataccagagttattttaaaaccatcgaagagctccagcagaagatcctctgcaccaagtctgaaaatgcccgcctggttgtacagattgacaatgcgaagctggccgccgacgatttccgcactaagtatcagacagagctaagtctacgacagctggtggaatccgatatcaatgggctaaggagaatcctcgacgaactgacactgtgtaaatccgatctggaagcccaggtggaatccctgaaggaggagctgctttgcctaaagagcaaccatgagcaagaagtcaacaccttgcgatgccaactgggggatagactcaacgtcgaggttgatgctgcgcccactgtggatctgaacagggtcttaaacgaaacccgaagccaatatgaagctctggttgagactaaccgcagggaagtggagcagtggtttactactcagacagaagaactgaacaaacaagtggtatcctcaagcgagcagcttcagtcttaccaggccgaaattatcgaactgagacggaccgtaaacgccctggagatagagttacaggcccaacataatttgcgtgactctctggagaacacactcaccgaaagtgaagccaggtacagctctcaactgtctcaagttcagtcacttatcactaatgtagaatctcagctggctgaaatccgatccgatctggaaagacagaaccaagaatatcaagtgcttctggacgtgcgcgcccgcctagagtgcgaaatcaatacatataggagcctcttagaatcagaggattgcaatctgccgtccaatccttgcgctaccactaacgcgtgctccaagccgataggaccctgtctgagcaatccatgcaccagttgtgttcctccagccccttgtactccatgcgcgccaagacctagatgcgggccatgcaatagcttcgtgaggtag

SEQ ID NO: 127131 - DNA, 1596 bp, Artificial Sequence
  derived and/or modified sequence
gagaatttagactctgtcttcagccaggcactccctccctccctcccagcactatgccctacaacttctgcctgcccagcctgagctgccgcaccagctgctcctcccggccctgcgtgccccccagctgccacagctgcaccctgcccggggcctgcaacatccccgccaatgtgagcaactgcaactggttctgcgagggctccttcaatggtagcgagaaggagactatgcagttcctgaacgaccgcctggccagctacctggagaaagtgcgtcagctggagcgggacaacgcggagctggagaacctcatccgggagcggtctcagcagcaggagcccttgctgtgccccagttaccagtcctattttaagaccattgaggagctccagcagaagatcctgtgtaccaagtctgagaatgccaggcttgtggtgcagatcgacaacgccaagctggctgcggatgatttcagaaccaagtaccagaccgagctgtccctgcggcagctggtggagtcggacatcaacggtctgcgcaggatcctggatgagctgaccctgtgcaagtccgacctggaggcccaggtggagtccctgaaggaggagctgctctgcctcaagagcaaccatgagcaggaggtcaataccctgcgctgccagcttggagaccgcctcaatgtggaggtggatgctgctcccactgtggacctgaatcgggtgctgaacgagaccaggagtcagtatgaggccctggtggaaaccaaccgcagggaagtggagcaatggttcaccacgcagaccgaggagctgaacaagcaggtggtatccagctcagagcagctgcagtcctaccaggcggagatcatcgagctgagacgcacagtcaacgccctggagatcgagctgcaggcccagcacaacctgcgagactctctggaaaacacgctgacagagagtgaggcccgctacagctcccagctgtcccaggtgcagagcctgatcaccaacgtggagtcccagctggcggagatccgcagtgacctggagcggcagaaccaggagtaccaggtgctgctggatgtgcgtgcccggctggagtgtgagatcaacacataccggagcctgctggagagcgaggactgcaatctgcccagcaatccctgtgccacgaccaacgcgtgcagcaagcccatcggaccctgtctctccaatccctgtacctcttgtgtccctcctgccccctgcacaccctgtgccccacgcccccgctgtgggccctgcaattccttcgtgcgctagaacctagggaatgccagaggagcaaggatgcagggcccaggactccagagctgtgacctggctctggttcaacaaaaggggcctgaaaacatcatttgcatggctggagttgcccgcgtaaggcagccaagaaactcacccaaagcctgtagcctccccaactactccagactgtcctgctcaccctttccttcctgggggtctgttccttcctatgctcacccagagaactctctgatgtgccagtgggcctcccttttaacctcctaataaatatcatttccttggcaaa

SEQ ID NO: 127132 - DNA, 1251 bp, Artificial Sequence
  derived and/or modified sequence
atgccctacaacttctgcctgcccagcctgagctgcaggaccagctgcagcagccggccctgtgtgccccccagctgccacagctgcaccctgcccggggcctgcaacatcccagccaacgtgagcaactgcaactggttctgtgagggcagcttcaatggaagtgagaaggagaccatgcagttcctgaatgaccggctggccagctacctggagaaggtgcggcagctggagcgggacaatgctgagctggagaacctgatccgggagaggagccagcagcaggagcccctgctgtgccccagctaccagagctacttcaagaccatcgaggagctgcagcagaagatcctgtgcaccaagtcagaaaatgcccggctggtggtgcagattgacaatgccaagctggccgcagatgacttccgcaccaagtaccagacagagctgagcctgcggcagctggtggagagtgacatcaatggcctgcggcgcatcctggatgagctgaccctgtgcaagagtgacctggaggcccaggtggagagcctgaaggaggagctgctgtgcctgaagagcaaccacgagcaggaggtgaacaccctgcgctgccagctgggggaccggctgaatgtggaggtggatgctgcccccaccgtggacctgaacagagtgctgaatgagaccaggagccagtatgaggccctggtggagaccaacagaagagaggtggagcagtggttcaccacccagacagaggagctgaacaagcaggtggtgagcagcagcgagcagctgcagagctaccaggccgagatcatcgagctgcggaggacagtgaatgccctggagattgagctgcaggcccagcacaacctgcgggacagcctggagaacaccctgacagaaagtgaggcccgctacagcagccagctgagccaggtgcagagcctcatcaccaacgtggagagccagctggccgagatccgcagtgacctggagcggcagaaccaggagtaccaggtgctgctggatgtgcgggcccggctggagtgtgagatcaacacctaccgcagcctgctggagagcgaggactgcaacctgcccagcaacccctgtgccaccaccaatgcctgcagcaagcccatcggcccctgcctgagcaacccctgcaccagctgtgtgcccccagccccctgcaccccctgtgccccccggccccgctgtggcccctgcaacagctttgtgaggtag

SEQ ID NO: 127133 - DNA, 1251 bp, Artificial Sequence
  derived and/or modified sequence
atgccctacaacttctgcctgcccagcctgagctgccggaccagctgctctagtagaccctgcgtgcccccaagttgtcacagttgtaccctgccaggcgcctgtaatatccctgccaatgtcagtaactgtaactggttctgtgagggatcttttaacggatccgagaaggagaccatgcagtttctcaacgacagactcgcctcctacctagaaaaggtgcgtcaattggagagggataacgctgaactggagaatttaattcgagaaagatctcaacagcaagaacccttattatgcccctcgtaccagagctacttcaagacaattgaagagctccagcagaaaatcctgtgtacaaagtcagagaatgctcggctggtcgtacagattgataatgctaagctggcagctgatgattttcggaccaaataccagaccgaactgagcctgcggcaacttgtggagagcgacatcaatggattacggaggattcttgatgagttgaccctttgcaaatccgatttagaggcacaggttgagtctctgaaggaggaactgctgtgcttaaagtccaaccatgaacaggaagtgaataccctgcggtgtcagctgggcgataggctgaatgttgaagtggacgctgctcccacagtagaccttaaccgggtactgaacgagactagaagccagtatgaagcactggtggagaccaaccgccgtgaggttgagcaatggttcactactcagactgaagagttaaataagcaagtggtgagcagcagtgagcagctgcagtcgtaccaagctgaaatcattgaactcaggagaaccgtgaatgcccttgaaattgaactgcaggctcagcacaatctccgtgatagtctggaaaacactttgaccgagtccgaggccaggtattcgtctcaactgagccaagtgcagagcttgatcacaaacgttgagagccaactcgccgagatacgatcagatttggagaggcaaaatcaagaataccaggtcctgctggacgtccgagccagactagagtgcgaaatcaacacatacagaagtctccttgaaagtgaggactgtaacctccctagtaacccatgcgcaactaccaacgcctgctctaagccaattggcccttgtctctccaatccctgcacgagctgcgtgccaccagctccctgtacgccttgcgccccaagaccaaggtgcggcccttgcaactcctttgttaggtag

SEQ ID NO: 127134 - DNA, 1251 bp, Artificial Sequence
  derived and/or modified sequence
atgccctacaacttttgtcttccatcccttagctgtcgaacatcgtgcagctcccggccttgcgtaccgcctagttgtcatagctgcactctaccaggcgcttgcaacatacctgccaatgtgtctaattgtaattggttttgcgagggtagcttcaatggatccgaaaaagagactatgcaatttttgaatgacaggctggcaagttacctcgagaaggttagacagctagagcgggacaatgcggagctagaaaacctgatccgtgagagaagccagcagcaggagccactcctctgtccctcataccagagctatttcaagactattgaggaattgcagcagaaaattctctgtactaagagtgaaaacgccaggctcgtcgtccagatcgataatgcaaagttagctgccgatgatttccggaccaaatatcaaacagaactgagcctgcggcagctcgtcgagtcagatatcaatggtcttcggaggatattggatgaacttacactatgcaagtcagatctagaggcccaagttgaatctctgaaggaggagctgttatgcctgaagtccaaccacgagcaggaagtgaatactctccgctgccagctgggggacaggctcaatgtcgaggtcgacgccgcaccaacagtggacctaaatagagttcttaatgaaacccgtagtcagtacgaagccttggttgaaacaaatagaagagaagtcgagcagtggttcacaactcagaccgaggaactaaataagcaagtagtgtcatccagtgagcagctgcagtcctatcaagcagaaattattgagttacgtcggacagtcaatgccctcgagatcgaactgcaggcccagcataacctgcgggattcacttgaaaatacgcttacggaaagcgaggctcgttacagtagccagctgtcgcaggtacaatcactcataaccaatgtcgagtcccagctggctgaaattaggtccgacctagaacgccaaaatcaggaatatcaagtgctgttggatgtgcgggctcgattggaatgcgagataaatacttacaggtcattgttggagtcagaagactgtaatcttccttccaatccttgcgccaccacaaatgcttgcagcaaaccgataggcccttgcctgtctaatccctgcacaagttgcgtgccaccagctccttgtaccccttgcgccccacgtccaaggtgcgggccatgtaattcattcgtaagatag

SEQ ID NO: 127135 - DNA, 1251 bp, Artificial Sequence
  derived and/or modified sequence
atgccctacaacttctgcctgcccagcctgagctgcagaaccagctgcagcagcagaccctgcgtgccccccagctgccacagctgcaccctgcccggcgcctgcaacatccccgccaacgtgagcaactgcaactggttctgcgagggcagcttcaacggcagcgagaaggagaccatgcagttcctgaacgacagactggccagctacctggagaaggtgagacagctggagagagacaacgccgagctggagaacctgatcagagagagaagccagcagcaggagcccctgctgtgccccagctaccagagctacttcaagaccatcgaggagctgcagcagaagatcctgtgcaccaagagcgagaacgccagactggtggtgcagatcgacaacgccaagctggccgccgacgacttcagaaccaagtaccagaccgagctgagcctgagacagctggtggagagcgacatcaacggcctgagaagaatcctggacgagctgaccctgtgcaagagcgacctggaggcccaggtggagagcctgaaggaggagctgctgtgcctgaagagcaaccacgagcaggaggtgaacaccctgagatgccagctgggcgacagactgaacgtggaggtggacgccgcccccaccgtggacctgaacagagtgctgaacgagaccagaagccagtacgaggccctggtggagaccaacagaagagaggtggagcagtggttcaccacccagaccgaggagctgaacaagcaggtggtgagcagcagcgagcagctgcagagctaccaggccgagatcatcgagctgagaagaaccgtgaacgccctggagatcgagctgcaggcccagcacaacctgagagacagcctggagaacaccctgaccgagagcgaggccagatacagcagccagctgagccaggtgcagagcctgatcaccaacgtggagagccagctggccgagatcagaagcgacctggagagacagaaccaggagtaccaggtgctgctggacgtgagagccagactggagtgcgagatcaacacctacagaagcctgctggagagcgaggactgcaacctgcccagcaacccctgcgccaccaccaacgcctgcagcaagcccatcggcccctgcctgagcaacccctgcaccagctgcgtgccccccgccccctgcaccccctgcgcccccagacccagatgcggcccctgcaacagcttcgtgagatag

SEQ ID NO: 127136 - protein, 448 aa, Artificial Sequence
  derived and/or modified sequence
MTSSCCVTNNLQASLKSCPRPASVCSSGVNCRPELCLGYVCQPMACLPSVCLPTTFRPASCLSKTYLSSSCQAASGISGSMGPGSWYSEGAFNGNEKETMQFLNDRLASYLTRVRQLEQENAELESRIQEASHSQVLTMTPDYQSHFRTIEELQQKILCTKAENARMVVNIDNAKLAADDFRAKYEAELAMRQLVEADINGLRRILDDLTLCKADLEAQVESLKEELMCLKKNHEEEVGSLRCQLGDRLNIEVDAAPPVDLTRVLEEMRCQYEAMVEANRRDVEEWFNMQMEELNQQVATSSEQLQNYQSDIIDLRRTVNTLEIELQAQHSLRDSLENTLTESEARYSSQLAQMQCMITNVEAQLAEIRADLERQNQEYQVLLDVRARLEGEINTYRSLLENEDCKLPCNPCSTPSCTTCVPSPCVPRTVCVPRTVGMPCSPCPQGRY

SEQ ID NO: 127137 - DNA, 1347 bp, Artificial Sequence
  derived and/or modified sequence
atgacgtcgtcttgttgtgtgactaacaacttgcaagcctctctgaaatcttgtccacgccccgcgtcagtgtgcagttctggcgtgaattgcaggccagagttgtgcctgggctacgtgtgtcaacctatggcctgcttgccttccgtctgccttccaacaacattccggccagcatcgtgcctttccaagacttacctttcctcttcttgccaggccgcatctggcattagtgggagtatgggaccaggatcctggtattcagaaggcgcattcaacggtaacgagaaggaaacaatgcagttccttaatgacagattggcctcttacttgactcgggtgaggcaactcgagcaggagaacgccgaactggaaagtagaatccaggaagctagccactcgcaggtactgactatgacacccgattatcagtcacactttcgtaccattgaggagctgcagcagaaaatcctgtgcaccaaggcagagaacgctcgcatggtggtcaatatcgataatgcgaaattagccgcagacgacttccgcgctaagtatgaggcggagctcgccatgcgtcagctcgtggaagccgacataaatgggctgcgaaggatcttagacgatttgactttatgcaaggctgacctggaagcccaggtcgaatctctaaaggaggagttgatgtgccttaagaagaaccatgaggaggaagttggcagcctcagatgccagttgggcgacaggctgaatatcgaagtcgacgctgccccacccgtggatttaacacgggtgctagaggagatgagatgccaatacgaggcaatggttgaggctaatcggcgtgacgtcgaggaatggtttaacatgcagatggaagaactgaatcaacaggtggccacatcctccgaacagctacaaaattaccagtccgacatcatcgacttgagacgaactgtaaacactctggagattgaactgcaggcgcaacattccctcagagatagcctagagaatactttaacagagtccgaggctagatactcctctcagctggcccaaatgcagtgcatgatcacaaacgtcgaggcccagttggctgagatacgagcagacctggagagacagaatcaagaataccaagtgcttttagacgtgcgcgccaggttggagggcgagatcaacacatacagaagcttgttagaaaacgaggattgtaagttgccatgcaatccctgcagcacccccagctgcactacctgcgtgccttcaccttgcgtacctcgaaccgtctgcgtgcctaggaccgtgggtatgccttgctccccctgtccacaggggcggtactag

SEQ ID NO: 127138 - DNA, 1750 bp, Artificial Sequence
  derived and/or modified sequence
ttctatcatgagccccctcactgcaagggcataaaatggcccgggcggcatggggtctgtagacatccaggtagctgtggctgaggagaaagggcctctccaacatgacatcctcctgctgtgtcaccaacaacttgcaagcctctctcaagagctgcccccggcctgcctcggtctgttccagcggcgtgaactgccggcctgagctgtgcctgggctatgtctgccagcccatggcatgcctgccttcggtctgcctgcccaccaccttccggccagccagctgcctctccaaaacctatctatccagttcctgccaggcagccagtggcatctccggctccatgggccccggcagctggtacagcgaaggggccttcaatggcaatgagaaggaaaccatgcagttccttaacgaccgcctggccagctacctgacgagggtgcggcagctggagcaggagaatgcggagctggagagcaggatccaagaggcctctcactcccaggtgctcaccatgactcctgactaccagtctcatttcaggaccattgaggagctccagcagaagattctgtgtaccaaggcagagaatgccaggatggttgtgaacattgataatgccaaactggctgccgatgacttcagggccaagtacgaggcagagctggccatgcggcagctggtggaggccgacatcaatggcctgcgcaggatcctggatgatctcactctgtgcaaggctgacctggaggcccaggttgagtccctgaaggaggagctgatgtgcctcaaaaagaaccatgaggaggaagtcggttcccttcgatgccagcttggggaccgccttaacatcgaggtggacgctgcacccccggtggacctgaccagggtgctggaggagatgcggtgtcagtacgaggccatggtggaggccaaccgcagggacgtggaggaatggttcaatatgcagatggaggagcttaaccaacaggtggccacaagctctgagcagcttcagaactaccagtcagacatcattgacctgagacgcacggtcaacacgctggagatcgagctgcaggcccagcacagcctgagggactccctggaaaacacgctgacggagagtgaggcccgctacagctcccagctggcccagatgcagtgcatgatcaccaacgttgaggcccagctggctgagatccgggctgacctggagcggcagaaccaggagtaccaggtgctgctggacgtccgggcccggctggagggcgagatcaacacgtaccggagcctgctggagaacgaggactgcaagctgccctgtaacccatgctccactccttcctgcaccacctgtgtgccctccccatgcgtgccccgcaccgtctgtgtgccacgcactgttggcatgccttgctcaccctgcccccagggccgctactgaagtccctttgtgccagtggatcctggagggcctggggctgggcagcctggtattcagtggccaccagaagagcagggccagccccggtcagcaaggaagaccctgagcaggaccgtggatcacctgcaacaagctctgatactccaggggatacttaagccctcatcacttcaaaactgcctcttttttccatgggtgaactgttctctttggtgatgtttctggttgtctgtgctgcctcaaagagcgtgtgttcttagttaactggcaaatagagctgtactcagtggccttgcaaa

SEQ ID NO: 127139 - DNA, 1347 bp, Artificial Sequence
  derived and/or modified sequence
atgaccagcagctgctgcgtgaccaacaacctgcaggccagcctgaagagctgccccaggcctgcctctgtgtgcagcagtggagtgaactgcaggcctgagctgtgcctgggctacgtgtgccagcccatggcctgcctgcccagcgtgtgcctgcccaccaccttccggcctgccagctgcctgagcaagacctacctgagcagcagctgccaggccgccagcggcatcagcggctccatgggccctggctcctggtacagcgagggcgccttcaatggaaatgagaaggagaccatgcagttcctgaatgaccggctggccagctacctgaccagggtgcggcagctggagcaggagaatgctgagctggagagccgcatccaggaggccagccacagccaggtgctgaccatgaccccagactaccagagccacttccgcaccatcgaggagctgcagcagaagatcctgtgcaccaaggcagaaaatgccaggatggtggtgaacatcgacaatgccaagctggccgcagatgacttccgggccaagtatgaagctgagctggccatgaggcagctggtggaggccgacatcaatggcctgcggcgcatcctggatgacctgaccctgtgcaaggctgacctggaggcccaggtggagagcctgaaggaggagctgatgtgcctgaagaagaaccacgaggaggaggtgggcagcctgcgctgccagctgggggaccggctgaacatcgaggtggatgctgcccctcctgtggacctgaccagggtgctggaggagatgcgctgccagtatgaggccatggtggaggccaacagaagagatgtggaggagtggttcaacatgcagatggaggagctgaaccagcaggtggccaccagcagcgagcagctgcagaactaccagagcgacatcatcgacctgcggaggacagtgaacaccctggagattgagctgcaggcccagcacagcctgcgggacagcctggagaacaccctgacagaaagtgaggcccgctacagcagccagctggcccagatgcagtgcatgatcaccaacgtggaggcccagctggccgagatccgggctgacctggagcggcagaaccaggagtaccaggtgctgctggatgtgcgggcccggctggagggggagatcaacacctaccgcagcctgctggagaatgaagactgcaagctgccctgcaacccctgcagcacccccagctgcaccacctgtgtgcccagcccctgtgtgcccaggacagtgtgtgtgcccaggacagtgggcatgccctgcagcccctgcccccagggccgctactag

SEQ ID NO: 127140 - DNA, 1347 bp, Artificial Sequence
  derived and/or modified sequence
atgaccagcagctgctgcgtgaccaacaacctgcaggccagcctgaagtcttgcccccgacccgcctccgtgtgttcttccggggttaattgtcgccccgagctgtgtctgggctacgtgtgccagcctatggcctgcctgccttccgtgtgcctgcccacaactttccgcccggcctcctgcctgtccaaaacctatctttctagtagctgccaggccgcttccggcatctcaggctcaatgggccctggtagttggtattcagagggagcctttaatggcaacgagaaggagactatgcaattcctgaacgaccgcctggcgagctacctaacaagggtgcgacagcttgagcaagagaacgcagaattagagagtagaattcaagaagcttcacactcccaggtactgacgatgactccggattatcagagccatttcaggacaatcgaagaactgcagcagaaaatcctgtgcacgaaggcagagaatgctcggatggtggtgaatatcgacaacgccaaactcgctgccgacgatttccgggccaagtacgaagcggaattggcgatgcggcaattagtggaggccgacatcaatggcctccggcggatactggacgacctgactctgtgtaaagctgatctggaggctcaggtggagagcctcaaagaagagctgatgtgtctgaagaagaaccatgaggaggaggtgggcagcctgcgctgtcagctcggcgaccgtttaaacattgaagtcgatgccgccccacctgtggacctcactcgcgtcctggaggaaatgcgttgccagtatgaagctatggtggaggccaatagaagagacgtggaggaatggtttaacatgcagatggaggagctcaatcaacaggttgcgacttcctccgaacagctgcaaaactatcagagtgacatcatcgatctcaggcggaccgtcaacacactggagattgagttacaagcccaacacagcctccgcgatagcctagagaacacgctgacggaaagcgaggcaaggtatagctcacagcttgctcagatgcagtgcatgatcacaaatgttgaggcccagcttgccgagattcgcgccgatcttgaacggcagaatcaggaatatcaggttctgctggacgttcgagctcgattggagggagagatcaacacctacaggtccctgctcgagaacgaggattgtaagttgccgtgcaacccgtgttccaccccctcttgcactacatgtgttccttcaccttgcgtcccaagaactgtgtgcgttcctcgtaccgtgggtatgccatgctctccatgcccgcaaggaagatactag

SEQ ID NO: 127141 - DNA, 1347 bp, Artificial Sequence
  derived and/or modified sequence
atgacaagctcttgctgtgtgaccaataacttgcaggcatccctgaagtcttgtccaaggccggcatctgtttgctcaagcggcgtgaactgcaggcccgagctttgcctgggctatgtttgtcagccgatggcatgtctcccttctgtatgtctgccaacaacatttcggcctgcttcctgtctgtcaaagacatatctttcttcatcgtgccaggcagccagcggcatcagtggcagcatgggcccaggatcatggtacagtgagggcgctttcaacgggaatgagaaagagaccatgcaatttctcaacgatcggctggcctcctacctgacgagggtgcgccaattagagcaggagaacgccgaattggagagtagaatccaagaggcctctcactcccaggttctcaccatgacacccgactaccagtctcatttcaggaccatcgaagagttgcagcagaagatcctctgcaccaaggctgagaacgcgaggatggttgtgaacattgataatgcgaagctggcagccgatgatttcagggctaagtatgaggctgagcttgccatgagacagctggtcgaagctgacatcaatggtctgagacggatcttggatgatctaactctgtgcaaggccgacctggaggcacaggtggagtctctgaaagaggaactgatgtgtctgaaaaagaaccatgaagaggaagtcggcagcttgagatgtcagctgggggaccgactaaacatcgaggtagacgccgcacctcccgttgacctgactcgcgtgctggaggaaatgcggtgtcaatacgaagctatggtcgaagccaatcgccgtgatgttgaggagtggtttaatatgcagatggaggagctgaaccagcaggtagctacatcctccgaacagctccagaactaccagtctgacattatcgacctgcgtcggactgtcaatacacttgaaattgaactgcaagcccagcatagcctgcgtgatagtttggaaaatactcttacggagagcgaagcgcgatactcctcacagctggcccaaatgcagtgcatgattacaaatgttgaagctcagctggccgaaatcagggctgacctcgagaggcaaaatcaggaatatcaggtgctgctcgacgtcagagcgcgacttgaaggagaaatcaatacatatcgctcactgcttgagaatgaagactgcaaattgccatgcaatccttgtagcactcccagctgcacgacctgtgtgccttccccctgtgtgcccaggacagtctgcgttccacggacggtcgggatgccatgctctccgtgtcctcaggggcgatactag

SEQ ID NO: 127142 - DNA, 1347 bp, Artificial Sequence
  derived and/or modified sequence
atgaccagcagctgctgcgtgaccaacaacctgcaggccagcctgaagagctgccccagacccgccagcgtgtgcagcagcggcgtgaactgcagacccgagctgtgcctgggctacgtgtgccagcccatggcctgcctgcccagcgtgtgcctgcccaccaccttcagacccgccagctgcctgagcaagacctacctgagcagcagctgccaggccgccagcggcatcagcggcagcatgggccccggcagctggtacagcgagggcgccttcaacggcaacgagaaggagaccatgcagttcctgaacgacagactggccagctacctgaccagagtgagacagctggagcaggagaacgccgagctggagagcagaatccaggaggccagccacagccaggtgctgaccatgacccccgactaccagagccacttcagaaccatcgaggagctgcagcagaagatcctgtgcaccaaggccgagaacgccagaatggtggtgaacatcgacaacgccaagctggccgccgacgacttcagagccaagtacgaggccgagctggccatgagacagctggtggaggccgacatcaacggcctgagaagaatcctggacgacctgaccctgtgcaaggccgacctggaggcccaggtggagagcctgaaggaggagctgatgtgcctgaagaagaaccacgaggaggaggtgggcagcctgagatgccagctgggcgacagactgaacatcgaggtggacgccgccccccccgtggacctgaccagagtgctggaggagatgagatgccagtacgaggccatggtggaggccaacagaagagacgtggaggagtggttcaacatgcagatggaggagctgaaccagcaggtggccaccagcagcgagcagctgcagaactaccagagcgacatcatcgacctgagaagaaccgtgaacaccctggagatcgagctgcaggcccagcacagcctgagagacagcctggagaacaccctgaccgagagcgaggccagatacagcagccagctggcccagatgcagtgcatgatcaccaacgtggaggcccagctggccgagatcagagccgacctggagagacagaaccaggagtaccaggtgctgctggacgtgagagccagactggagggcgagatcaacacctacagaagcctgctggagaacgaggactgcaagctgccctgcaacccctgcagcacccccagctgcaccacctgcgtgcccagcccctgcgtgcccagaaccgtgtgcgtgcccagaaccgtgggcatgccctgcagcccctgcccccagggcagatactag

SEQ ID NO: 127143 - protein, 425 aa, Artificial Sequence
  derived and/or modified sequence
MYSSSSCKLPSLSPVARSFSACSVGLGRSSYRATSCLPALCLPAGGFATSYSGGGGWFGEGILTGNEKETMQSLNDRLAGYLEKVRQLEQENASLESRIREWCEQQVPYMCPDYQSYFRTIEELQKKTLCSKAENARLVVEIDNAKLAADDFRTKYETEVSLRQLVESDINGLRRILDDLTLCKSDLEAQVESLKEELLCLKKNHEEEVNSLRCQLGDRLNVEVDAAPPVDLNRVLEEMRCQYETLVENNRRDAEDWLDTQSEELNQQVVSSSEQLQSCQAEIIELRRTVNALEIELQAQHSMRDALESTLAETEARYSSQLAQMQCMITNVEAQLAEIRADLERQNQEYQVLLDVRARLECEINTYRGLLESEDSKLPCNPCAPDYSPSKSCLPCLPAASCGPSAARTNCSPRPICVPCPGGRF

SEQ ID NO: 127144 - protein, 455 aa, Artificial Sequence
  derived and/or modified sequence
MASKCLKAGFSSGSLKSPGGASGGSTRVSAMYSSSSCKLPSLSPVARSFSACSVGLGRSSYRATSCLPALCLPAGGFATSYSGGGGWFGEGILTGNEKETMQSLNDRLAGYLEKVRQLEQENASLESRIREWCEQQVPYMCPDYQSYFRTIEELQKKTLCSKAENARLVVEIDNAKLAADDFRTKYETEVSLRQLVESDINGLRRILDDLTLCKSDLEAQVESLKEELLCLKKNHEEEVNSLRCQLGDRLNVEVDAAPPVDLNRVLEEMRCQYETLVENNRRDAEDWLDTQSEELNQQVVSSSEQLQSCQAEIIELRRTVNALEIELQAQHSMRDALESTLAETEARYSSQLAQMQCMITNVEAQLAEIRADLERQNQEYQVLLDVRARLECEINTYRGLLESEDSKLPCNPCAPDYSPSKSCLPCLPAASCGPSAARTNCSPRPICVPCPGGRF

SEQ ID NO: 127145 - DNA, 1278 bp, Artificial Sequence
  derived and/or modified sequence
atgtacagctcatctagttgtaaattaccatctctctctcctgtggcgagatctttcagcgcttgttcagtgggactggggaggtcatcttaccgagccacctcatgcctacccgcgctatgtctgcccgcgggcggttttgctacctcttatagcggggggggcggatggttcggcgagggcatcctaacaggaaacgagaaagagacaatgcaaagccttaatgaccggttagcagggtacctggaaaaagttcgacaactggagcaggagaacgcttcactcgaaagtaggataagagagtggtgcgaacaacaggtgccatatatgtgtcccgactatcagtcttacttcagaacaatagaggagctgcaaaagaagaccctgtgctccaaggcggaaaatgcgaggctcgtcgtggagatagacaatgcaaaactggccgctgatgattttagaacaaaatatgagacagaagtgtcacttagacagttagtggaaagcgacattaatggactgaggcggattttggatgatctgaccctatgtaaaagcgacttggaggcccaagtggagtcgctgaaggaggagctgctttgtttgaagaagaaccacgaagaggaggttaactctctacgctgccagctgggagaccgcctcaatgtggaggtggatgccgctccaccagtggatttgaatcgcgttttggaggaaatgagatgtcagtatgaaactctggtggagaacaaccgacgcgatgctgaggactggcttgacactcagagcgaggaactaaatcaacaggtggtgtctagctcagaacagttgcagagttgccaggccgagatcatcgagctgagacgaacagtgaacgcccttgagattgagctccaggctcaacactctatgcgggacgcccttgagtccactctagccgaaaccgaagccaggtattcaagccagctggcccagatgcaatgtatgatcaccaatgttgaggctcagctggccgaaatccgagctgatctcgagcgacagaaccaggagtatcaggtgctgctggatgtcagggcccgtctcgagtgcgaaatcaatacatatcgaggactactagaaagtgaggactcaaagttaccctgtaatccttgcgcccccgactattccccgtctaaatcatgtttgccttgcctaccagcggcgagttgcgggccgtccgcggccaggacaaactgttcgccccgacccatttgcgttccctgccccgggggccgcttttag

SEQ ID NO: 127146 - DNA, 1368 bp, Artificial Sequence
  derived and/or modified sequence
atggcttcaaagtgcttgaaagctggattctcaagcgggagcctgaaatctccaggtggcgccagcggcggctcaacccgcgtttctgcaatgtacagtagttctagctgtaagctaccaagcttgtccccagttgctagaagtttttctgcttgcagtgtaggtctgggacggtcttcatatagggcaacctcttgccttcccgctttgtgtctccccgcaggtggatttgctaccagctacagcgggggtggaggttggtttggtgagggcatcctgacgggaaacgaaaaggagacaatgcagagcttgaacgaccgactggctggatacctcgaaaaagtgcggcagctggagcaggagaacgcttctttagagtcaaggatacgtgagtggtgcgagcaacaagtcccgtatatgtgccccgactaccagagttacttccgtactattgaggaactgcagaaaaagacactctgctctaaagctgagaacgcacgcctggtcgtcgaaatcgacaacgctaaattggcagccgacgatttccgcaccaaatatgagactgaggtctctctaaggcagttagtcgagtctgacataaacggacttcgtcggatcctggatgacctgactctgtgcaaatccgatctcgaggcacaggtggagtcgctcaaagaggagctgttgtgtttgaagaagaatcacgaagaggaggtgaattcattgagatgccagttaggcgatcgcttgaacgtcgaagtggacgcggcgcctccagtagatttgaacagggtgttggaggagatgcggtgccagtatgaaaccctcgtggagaacaatcgaagggatgccgaagactggctcgatacccaaagcgaggaactgaaccaacaggttgtctcttcctcagagcagcttcagtcttgtcaggcggagattatcgaactgcgccggaccgtcaatgccttagagattgagctgcaggctcagcattcgatgagggacgcccttgagtctacactggccgaaacagaggcacgttattcctcacagctggcccagatgcagtgcatgattaccaacgttgaggcacagttagctgaaatcagagcagacctcgagcgacagaaccaggagtatcaggtgctgctggacgtccgtgctagattggagtgtgagataaatacatacagaggcctacttgaaagtgaggatagtaagctgccgtgcaatccgtgtgcacctgactacagtccaagtaaaagttgcctcccatgtctgccagccgccagctgtggcccgagtgcagctcgcaccaactgcagccctcgtcctatctgtgttccttgtccaggagggcgtttctag

SEQ ID NO: 127147 - DNA, 1778 bp, Artificial Sequence
  derived and/or modified sequence
ctggcctcagagacctatcaattgcatctgagttgcaggggccatggcttccaaatgcctcaaggccggcttctcttctgggtctctcaagagcccaggaggggccagtgggggctccactcgtgtgtccgcaatgtactccagcagctcttgcaagcttccaagtctctcccctgtggccagaagtttctctgcctgctcagtgggtctgggcagaagcagctacagggccaccagctgcctccctgctctctgcctccctgctggaggcttcgctaccagctacagtgggggtgggggctggtttggggagggcatcctcactggcaatgagaaggagaccatgcaatccctgaacgaccgcctggccggctacctggagaaggtgcgtcagctggagcaggagaacgccagcctggagagccgcatccgtgagtggtgtgagcagcaggtcccctacatgtgccctgactaccagtcctacttccggaccatcgaggagctccagaagaagactctatgcagcaaggctgagaatgccaggctggtggtggagattgacaatgccaaattggctgcagatgacttcaggaccaagtatgagacggaggtgtccctgcggcagctggtggagtcagacatcaacggcctgcgcaggatcctggatgacctgaccctgtgcaagtctgacctggaggcccaggtggagtccctgaaggaggagctgctctgcctgaagaagaaccatgaggaggaagtgaactcactgcgctgccaacttggtgaccgcctcaatgttgaggtggacgctgccccacctgttgacctgaaccgagttctggaggagatgaggtgccagtatgaaaccctggtggagaataaccgccgggatgctgaagactggttggacacccagagtgaggagctgaaccagcaggtggtgtccagctcagagcagttgcagtcctgccaggcagagatcatcgagctgagacgcacggtcaacgccctggagattgagctgcaggctcagcacagcatgagagatgctttggaatccaccctggcagagacggaggcccgctatagctcccagctggcccagatgcagtgcatgatcaccaacgtggaggcccagctggccgagatccgggctgacctggagcggcagaaccaggagtaccaggtgctgctggacgtccgggcccggctggagtgtgagatcaacacgtaccggggcctgctggagagtgaggacagcaagctcccctgtaacccatgtgcacctgactactcaccctccaagtcatgccttccctgtcttcctgcggcctcctgcggtcctagtgcagcccgcacaaactgcagcccccgccccatttgtgtgccctgcccagggggtcggttctgagagcgggtgacccagatggccatggctattgtctccagggcttgaacttggcctctacccaaacttaacccttgtagcccaatcccctctcttcgcgcagagcccaggcccagggtctggctgaaaaggctttctgcaaatacatgccctaaagtttctcagagcctgtcacaaaggccggctgcccccaaaggtctcaactcctcatcatttcaatgggtgccagggtctctgttctcaggctgcctcctgggtcaggttttccttctaggtgctgttccggtggattctgaaatgcagtagagggcttttgttggcagaacaataaagtgcatttgctcaggcccctgatgcctaacttgcacca

SEQ ID NO: 127148 - DNA, 1670 bp, Artificial Sequence
  derived and/or modified sequence
ctggcctcagagacctatcaattgcatctgagttgcaggggccatggcttccaaatgcctcaaggccggcttctcttctgggtctctcaagagcccaggaggggccagtgggggctccactcgtgtgtccgcaatgtactccagcagctcttgcaagcttccaagtctctcccctgtggccagaagtttctctgcctgctcagtgggtctgggcagaagcagctacagggccaccagctgcctccctgctctctgcctccctgctggaggcttcgctaccagctacagtgggggtgggggctggtttggggagggcatcctcactggcaatgagaaggagaccatgcaatccctgaacgaccgcctggccggctacctggagaaggtgcgtcagctggagcaggagaacgccagcctggagagccgcatccgtgagtggtgtgagcagcaggtcccctacatgtgccctgactaccagtcctacttccggaccatcgaggagctccagaagaagactctatgcagcaaggctgagaatgccaggctggtggtggagattgacaatgccaaattggctgcagatgacttcaggaccaagtatgagacggaggtgtccctgcggcagctggtggagtcagacatcaacggcctgcgcaggatcctggatgacctgaccctgtgcaagtctgacctggaggcccaggtggagtccctgaaggaggagctgctctgcctgaagaagaaccatgaggaggaagtgaactcactgcgctgccaacttggtgaccgcctcaatgttgaggtggacgctgccccacctgttgacctgaaccgagttctggaggagatgaggtgccagtatgaaaccctggtggagaataaccgccgggatgctgaagactggttggacacccagagtgaggagctgaaccagcaggtggtgtccagctcagagcagttgcagtcctgccaggcagagatcatcgagctgagacgcacggtcaacgccctggagattgagctgcaggctcagcacagcatgagagatgctttggaatccaccctggcagagacggaggcccgctatagctcccagctggcccagatgcagtgcatgatcaccaacgtggaggcccagctggccgagatccgggctgacctggagcggcagaaccaggagtaccaggtgctgctggacgtccgggcccggctggagtgtgagatcaacacgtaccggggcctgctggagagtgaggacagcaagctcccctgtaacccatgtgcacctgactactcaccctccaagtcatgccttccctgtcttcctgcggcctcctgcggtcctagtgcagcccgcacaaactgcagcccccgccccatttgtgtgccctgcccagggggtcggttctgagagcggggtctggctgaaaaggctttctgcaaatacatgccctaaagtttctcagagcctgtcacaaaggccggctgcccccaaaggtctcaactcctcatcatttcaatgggtgccagggtctctgttctcaggctgcctcctgggtcaggttttccttctaggtgctgttccggtggattctgaaatgcagtagagggcttttgttggcagaacaataaagtgcatttgctcaggcccctgatgcctaacttgcacc

SEQ ID NO: 127149 - DNA, 1278 bp, Artificial Sequence
  derived and/or modified sequence
atgtacagcagcagcagctgcaagctgcccagcctgagccctgtggcccggagcttcagcgcctgcagcgtgggcctgggccgcagcagctaccgggccaccagctgcctgcctgccctgtgcctgcctgctgggggctttgccaccagctacagcggcggcggcggctggtttggagagggcatcctgactggaaatgagaaggagaccatgcagagcctgaatgaccggctggccggctacctggagaaggtgcggcagctggagcaggagaatgccagcctggagagccgcatccgggagtggtgtgagcagcaggtgccctacatgtgcccagactaccagagctacttccgcaccatcgaggagctgcagaagaagaccctgtgcagcaaggccgagaatgcccggctggtggtggagattgacaatgccaagctggccgcagatgacttccgcaccaagtatgaaacagaggtgtccctgcggcagctggtggagagtgacatcaatggcctgcggcgcatcctggatgacctgaccctgtgcaagagtgacctggaggcccaggtggagagcctgaaggaggagctgctgtgcctgaagaagaaccacgaggaggaggtgaacagcctgcgctgccagctgggggaccggctgaatgtggaggtggatgctgcccctcctgtggacctgaacagagtgctggaggagatgcgctgccagtatgagaccctggtggagaacaacagaagagatgctgaggactggctggacacccagagcgaggagctgaaccagcaggtggtgagcagcagcgagcagctgcagagctgccaggccgagatcatcgagctgcggaggacagtgaatgccctggagattgagctgcaggcccagcacagcatgagagatgccctggagagcaccctggccgagacagaggcccgctacagcagccagctggcccagatgcagtgcatgatcaccaacgtggaggcccagctggccgagatccgggctgacctggagcggcagaaccaggagtaccaggtgctgctggatgtgcgggcccggctggagtgtgagatcaacacctaccggggcctgctggagagcgaggacagcaagctgccctgcaacccctgtgccccagactacagccccagcaagagctgcctgccctgcctgcctgctgccagctgtggccccagcgctgcccggaccaactgcagcccccggcccatctgtgtgccctgccctgggggccgcttctag

SEQ ID NO: 127150 - DNA, 1368 bp, Artificial Sequence
  derived and/or modified sequence
atggccagcaagtgcctgaaggccggcttcagcagcggcagcctgaagagccctgggggcgccagcggcggcagcaccagggtgtctgccatgtacagcagcagcagctgcaagctgcccagcctgagccctgtggcccggagcttcagcgcctgcagcgtgggcctgggccgcagcagctaccgggccaccagctgcctgcctgccctgtgcctgcctgctgggggctttgccaccagctacagcggcggcggcggctggtttggagagggcatcctgactggaaatgagaaggagaccatgcagagcctgaatgaccggctggccggctacctggagaaggtgcggcagctggagcaggagaatgccagcctggagagccgcatccgggagtggtgtgagcagcaggtgccctacatgtgcccagactaccagagctacttccgcaccatcgaggagctgcagaagaagaccctgtgcagcaaggccgagaatgcccggctggtggtggagattgacaatgccaagctggccgcagatgacttccgcaccaagtatgaaacagaggtgtccctgcggcagctggtggagagtgacatcaatggcctgcggcgcatcctggatgacctgaccctgtgcaagagtgacctggaggcccaggtggagagcctgaaggaggagctgctgtgcctgaagaagaaccacgaggaggaggtgaacagcctgcgctgccagctgggggaccggctgaatgtggaggtggatgctgcccctcctgtggacctgaacagagtgctggaggagatgcgctgccagtatgagaccctggtggagaacaacagaagagatgctgaggactggctggacacccagagcgaggagctgaaccagcaggtggtgagcagcagcgagcagctgcagagctgccaggccgagatcatcgagctgcggaggacagtgaatgccctggagattgagctgcaggcccagcacagcatgagagatgccctggagagcaccctggccgagacagaggcccgctacagcagccagctggcccagatgcagtgcatgatcaccaacgtggaggcccagctggccgagatccgggctgacctggagcggcagaaccaggagtaccaggtgctgctggatgtgcgggcccggctggagtgtgagatcaacacctaccggggcctgctggagagcgaggacagcaagctgccctgcaacccctgtgccccagactacagccccagcaagagctgcctgccctgcctgcctgctgccagctgtggccccagcgctgcccggaccaactgcagcccccggcccatctgtgtgccctgccctgggggccgcttctag

SEQ ID NO: 127151 - DNA, 1278 bp, Artificial Sequence
  derived and/or modified sequence
atgtacagcagcagcagctgcaagctgcccagcctgagccccgtggcccggtcgtttagtgcttgcagtgttggactggggagatcaagctatagagcgacatcttgtttacccgctttatgtctccctgccgggggtttcgctacttcttactccggaggaggtggatggttcggagagggtattctgaccggcaatgagaaggaaaccatgcagagcctgaatgatcgtctggcaggctatttggaaaaagttaggcaactcgaacaagaaaatgcttccctggagtcaagaattagggaatggtgtgaacaacaggtgccatacatgtgtcccgactaccagtcctattttcgtactattgaagaacttcagaagaagacactgtgctcgaaagccgagaatgctcgactcgttgtagaaatagacaatgcgaagctggcggcggacgacttcagaacaaaatatgaaacggaagttagcctgcgccagttggtggaatcggacatcaacgggttaagaaggattctcgatgatctgactctgtgtaagtcagatttggaagctcaggtcgaaagcctaaaggaggaactcctatgccttaaaaaaaatcacgaggaagaggtcaatagtctacgctgtcaactgggggaccgcctaaatgtagaggtcgacgccgctcccccagtggatctgaaccgcgtactggaggagatgaggtgccagtatgaaacactagtcgagaacaatagacgcgacgccgaggattggttggacactcagagcgaggaactaaatcagcaggtagtctcaagtagcgagcagctgcaatcttgtcaggccgaaataatagagctgcggagaaccgtgaatgctttggagattgagctgcaagcccagcactcaatgcgcgatgctctggagtctacattggcagaaactgaggctcggtatagctcccaattggcccaaatgcagtgtatgattacgaacgtggaggctcagctcgcggaaatcagagctgaccttgaacgccagaatcaggaatatcaagttctccttgacgtccgagctagactggagtgcgaaataaacacatacagggggctgctggagagcgaggatagcaaacttccctgtaacccgtgcgcccccgattacagccctagtaagtcctgtctcccttgtttgcccgccgcgtcttgcggtccatctgcggctcgtacgaactgttcgcctcgtcccatctgtgttccctgccccggcggccggttttag

SEQ ID NO: 127152 - DNA, 1368 bp, Artificial Sequence
  derived and/or modified sequence
atggccagcaagtgcctgaaggccggcttcagcagcggcagcctgaagtcacctggcggcgcctccggcggttcaaccagagtgtctgcaatgtacagttcctcgtcttgcaaactgccctccttgtcacctgtggcacgttctttttccgcgtgtagtgttggcctgggtcgctctagttatcgtgcgacgtcctgtctcccagcgctttgcttgcctgcgggagggttcgctactagctatagcggaggggggggctggtttggggagggtattctgactgggaatgaaaaggagacaatgcaatccctgaatgaccgcctcgccggatacttggaaaaagtaaggcagttggagcaagaaaacgcttcgcttgaaagtcgaatacgcgaatggtgcgagcagcaagtgccctacatgtgtcccgactaccagtcatacttcaggacgattgaggaactgcagaagaagactctctgctcaaaggccgagaatgcacgcctcgtcgtagaaatcgacaacgcaaagttggccgctgacgactttagaactaaatatgagactgaggttagcctcaggcagcttgtggagtcggatatcaatggcctgaggagaatcctcgacgatctgacgctgtgcaaatctgatctggaggcacaggtggaaagcctcaaggaagaactcctgtgtctaaaaaaaaatcacgaggaggaagttaactcacttagatgccaactgggcgacagactaaatgttgaggtcgatgctgctccaccagtggatctgaaccgggtcctggaggagatgagatgtcagtacgagaccctagttgaaaataaccggcgggatgcggaagactggctggacacccaaagcgaggagttaaaccagcaggtcgtttcctctagtgagcagctccaatcttgccaagccgaaatcatagagctcaggagaactgtgaacgccctagaaattgaacttcaggcacaacatagtatgagagatgctctggagtctacattggccgagactgaagctcggtacagctcacaattagcccaaatgcaatgtatgatcacaaacgtcgaagcccagctcgcggaaattcgtgccgatctggagcgccagaatcaggagtaccaagtgctccttgacgttcgtgccaggctcgaatgtgaaatcaatacgtaccgtggcctgctggagtccgaagatagcaaattaccctgtaacccatgcgcaccagattattcccctagcaaaagttgtctgccatgccttccagcagcttcgtgtggtcctagcgcggccagaaccaattgctcacctagaccaatttgtgtaccttgccccggtggacggttttag

SEQ ID NO: 127153 - DNA, 1278 bp, Artificial Sequence
  derived and/or modified sequence
atgtattccagcagcagctgcaagctgccttcattatcccccgtcgcaaggagttttagtgcgtgctctgttgggctaggccgaagcagctaccgagccacatcctgcttgccggcactttgcctgccagccggtggcttcgctacaagttattcaggaggaggcggatggttcggagaggggatcctcacaggcaatgaaaaagaaactatgcaaagtcttaacgaccgacttgctggctacttggagaaggtgcgccagctggagcaggagaacgctagtttggaatcaagaataagggaatggtgtgaacagcaggtgccttatatgtgccctgactaccagagctacttccggaccatagaggaacttcaaaagaagaccctctgttctaaagcagagaatgccaggctcgtcgtggagattgacaatgcgaaattagctgcagatgactttagaacaaagtatgaaactgaagttagtttgcgccagctagttgaaagcgacataaatggactgcggagaatactagacgatctaaccctatgtaagagtgacctcgaagcacaggtggagtccctgaaggaagagctgctctgcttgaagaagaaccacgaggaggaggtcaattcattaagatgtcaactgggtgacaggctaaatgttgaggttgacgccgcacccccagtggacctgaaccgggtgctcgaagagatgaggtgtcagtatgagaccctggtcgaaaataacagaagggacgctgaagattggttggatacacagtccgaggagcttaatcagcaggtggtcagcagcagcgaacaactgcaatcatgtcaggccgaaataatcgagctcagacggactgtcaacgctcttgagatagagcttcaggctcagcactcgatgagggacgcccttgagtccactttggctgaaacggaggccaggtactcgtcgcagctggcccaaatgcagtgtatgataaccaacgtggaggcccaattggctgaaattcgggctgatctggagcgacaaaaccaggagtatcaggtcctgctggatgtccgcgcacgcctggaatgcgaaatcaatacttatagaggactgctcgagagcgaggactctaaactgccgtgtaatccctgcgcgccagactactctcctagtaaaagctgtctgccttgtctccccgctgcctcttgtggtccttccgccgcaaggacaaattgttccccgaggccaatatgtgttccctgtccaggcggtcgattctag

SEQ ID NO: 127154 - DNA, 1368 bp, Artificial Sequence
  derived and/or modified sequence
atggccagtaaatgtctcaaggccggattctctagtggttccttaaaatcccccggaggcgcaagcgggggatctacaagagtctccgctatgtacagttccagcagttgtaaattaccatccctcagcccggtggctcgatcattctcagcttgtagcgttggacttgggaggtcatcctatcgggctacctcttgcctgcctgcactgtgtttacctgctgggggttttgccacatcttacagcggcggaggtggttggtttggcgaaggaatcctgaccgggaatgagaaagagacgatgcagagcctgaacgatcgattggccggttatcttgaaaaggtgcggcagttggaacaagagaatgctagtctcgagtctcgaatacgcgagtggtgtgagcaacaggtcccatacatgtgtccagactatcagtcttactttcgtaccatagaggagctacaaaaaaaaacactttgttcaaaagccgaaaacgccaggcttgtcgtggaaattgataacgctaagctcgcagccgatgattttagaaccaaatacgaaaccgaggtgagcctgaggcaattggtggaatcagatattaatggtctacgaagaatattggatgatctaacactgtgtaaatctgaccttgaggcccaggtggaatccctgaaggaagaattactatgcctgaagaagaaccatgaggaggaggtgaacagcctgagatgccagcttggcgataggctcaacgtggaggtggatgccgctccacctgtagacctcaatcgcgtcctggaagaaatgagatgtcagtatgagactcttgttgaaaataaccgaagagacgcggaagactggctggacacccagtcggaagagctcaatcagcaggtcgtcagctcttccgaacaactgcaaagctgccaggctgagataattgagctgcgcagaaccgttaacgctctggagattgagctccaggcgcaacacagcatgcgggatgcgctcgaaagcacacttgccgaaaccgaggcacgttattcgtcacagttagctcagatgcagtgcatgataaccaacgtcgaagcccaactcgcagaaatccgagctgacctggagcgccaaaatcaggagtatcaggtactattggatgtgcgggcaagattggaatgcgaaataaatacctaccgcggacttcttgagtccgaggacagcaagctgccatgcaatccttgtgcccctgattactcaccctcaaagtcttgtctgccttgcctgcccgcagcatcttgtgggccaagtgctgcacgtactaactgcagtcctcggcctatctgcgtgccttgtcccggtgggcgtttctag

SEQ ID NO: 127155 - DNA, 1278 bp, Artificial Sequence
  derived and/or modified sequence
atgtacagcagcagcagctgcaagctgcccagcctgagccccgtggccagaagcttcagcgcctgcagcgtgggcctgggcagaagcagctacagagccaccagctgcctgcccgccctgtgcctgcccgccggcggcttcgccaccagctacagcggcggcggcggctggttcggcgagggcatcctgaccggcaacgagaaggagaccatgcagagcctgaacgacagactggccggctacctggagaaggtgagacagctggagcaggagaacgccagcctggagagcagaatcagagagtggtgcgagcagcaggtgccctacatgtgccccgactaccagagctacttcagaaccatcgaggagctgcagaagaagaccctgtgcagcaaggccgagaacgccagactggtggtggagatcgacaacgccaagctggccgccgacgacttcagaaccaagtacgagaccgaggtgagcctgagacagctggtggagagcgacatcaacggcctgagaagaatcctggacgacctgaccctgtgcaagagcgacctggaggcccaggtggagagcctgaaggaggagctgctgtgcctgaagaagaaccacgaggaggaggtgaacagcctgagatgccagctgggcgacagactgaacgtggaggtggacgccgccccccccgtggacctgaacagagtgctggaggagatgagatgccagtacgagaccctggtggagaacaacagaagagacgccgaggactggctggacacccagagcgaggagctgaaccagcaggtggtgagcagcagcgagcagctgcagagctgccaggccgagatcatcgagctgagaagaaccgtgaacgccctggagatcgagctgcaggcccagcacagcatgagagacgccctggagagcaccctggccgagaccgaggccagatacagcagccagctggcccagatgcagtgcatgatcaccaacgtggaggcccagctggccgagatcagagccgacctggagagacagaaccaggagtaccaggtgctgctggacgtgagagccagactggagtgcgagatcaacacctacagaggcctgctggagagcgaggacagcaagctgccctgcaacccctgcgcccccgactacagccccagcaagagctgcctgccctgcctgcccgccgccagctgcggccccagcgccgccagaaccaactgcagccccagacccatctgcgtgccctgccccggcggcagattctag

SEQ ID NO: 127156 - DNA, 1368 bp, Artificial Sequence
  derived and/or modified sequence
atggccagcaagtgcctgaaggccggcttcagcagcggcagcctgaagagccccggcggcgccagcggcggcagcaccagagtgagcgccatgtacagcagcagcagctgcaagctgcccagcctgagccccgtggccagaagcttcagcgcctgcagcgtgggcctgggcagaagcagctacagagccaccagctgcctgcccgccctgtgcctgcccgccggcggcttcgccaccagctacagcggcggcggcggctggttcggcgagggcatcctgaccggcaacgagaaggagaccatgcagagcctgaacgacagactggccggctacctggagaaggtgagacagctggagcaggagaacgccagcctggagagcagaatcagagagtggtgcgagcagcaggtgccctacatgtgccccgactaccagagctacttcagaaccatcgaggagctgcagaagaagaccctgtgcagcaaggccgagaacgccagactggtggtggagatcgacaacgccaagctggccgccgacgacttcagaaccaagtacgagaccgaggtgagcctgagacagctggtggagagcgacatcaacggcctgagaagaatcctggacgacctgaccctgtgcaagagcgacctggaggcccaggtggagagcctgaaggaggagctgctgtgcctgaagaagaaccacgaggaggaggtgaacagcctgagatgccagctgggcgacagactgaacgtggaggtggacgccgccccccccgtggacctgaacagagtgctggaggagatgagatgccagtacgagaccctggtggagaacaacagaagagacgccgaggactggctggacacccagagcgaggagctgaaccagcaggtggtgagcagcagcgagcagctgcagagctgccaggccgagatcatcgagctgagaagaaccgtgaacgccctggagatcgagctgcaggcccagcacagcatgagagacgccctggagagcaccctggccgagaccgaggccagatacagcagccagctggcccagatgcagtgcatgatcaccaacgtggaggcccagctggccgagatcagagccgacctggagagacagaaccaggagtaccaggtgctgctggacgtgagagccagactggagtgcgagatcaacacctacagaggcctgctggagagcgaggacagcaagctgccctgcaacccctgcgcccccgactacagccccagcaagagctgcctgccctgcctgcccgccgccagctgcggccccagcgccgccagaaccaactgcagccccagacccatctgcgtgccctgccccggcggcagattctag

SEQ ID NO: 127157 - protein, 493 aa, Artificial Sequence
  derived and/or modified sequence
MTCGFNSIGCGFRPGNFSCVSACGPRPSRCCITAAPYRGISCYRGLTGGFGSHSVCGGFRAGSCGRSFGYRSGGVCGPSPPCITTVSVNESLLTPLNLEIDPNAQCVKQEEKEQIKSLNSRFAAFIDKVRFLEQQNKLLETKLQFYQNRECCQSNLEPLFAGYIETLRREAECVEADSGRLASELNHVQEVLEGYKKKYEEEVALRATAENEFVALKKDVDCAYLRKSDLEANVEALIQEIDFLRRLYEEEIRILQSHISDTSVVVKLDNSRDLNMDCIVAEIKAQYDDIATRSRAEAESWYRSKCEEMKATVIRHGETLRRTKEEINELNRMIQRLTAEVENAKCQNSKLEAAVAQSEQQGEAALSDARCKLAELEGALQKAKQDMACLIREYQEVMNSKLGLDIEIATYRRLLEGEEQRLCEGVEAVNVCVSSSRGGVVCGDLCVSGSRPVTGSVCSAPCNGNLVVSTGLCKPCGQLNTTCGGGSCGQGRH

SEQ ID NO: 127158 - DNA, 1482 bp, Artificial Sequence
  derived and/or modified sequence
atgacatgtggattcaactcgatcggttgcggattccgcccaggaaatttctcctgcgttagtgcttgcggacctcgtccttcccggtgctgtatcaccgccgccccataccgcggcataagttgttaccgtggtttaaccggcggtttcggatcacatagcgtatgcggagggttccgtgctggcagttgtggacggagttttggatatcgaagtgggggggtctgcggtccgtcaccgccatgtattactaccgtatccgttaatgagtctctgttgacgcccctgaatctggaaatcgacccaaacgctcagtgcgttaagcaggaagaaaaagaacagatcaaatcactgaatagcagattcgccgccttcattgataaggtgcgattcctggaacagcagaacaaacttcttgagacaaaactccagttttaccagaacagagagtgttgtcagtcaaacctcgagcccctattcgccggctacattgagacactgcgcagggaggccgaatgcgtggaggctgactccggaaggctcgccagcgaattgaaccacgtccaggaagtactggagggttataaaaaaaaatacgaggaggaggtggcgttgagagcgaccgcagaaaacgagttcgtggcactcaagaaggacgtggattgtgcctatttaaggaaatccgatcttgaggccaatgtggaagccctcattcaggagatagattttctgaggcgcctctacgaagaggagatcaggatccttcagagtcacatcagcgacacatccgtggtggtcaagctcgataattctagggacttaaacatggattgcatcgtggctgaaattaaagcccaatacgatgacattgcaacacgctcacgtgccgaggctgagtcctggtacagatccaagtgcgaggaaatgaaggctacagtcatacgccacggggagactctgaggagaaccaaggaagaaataaacgaactaaatcgtatgatccagcgcttgacagctgaggtggagaacgccaagtgtcagaacagcaaattggaggcagctgtggcacagtcagagcagcagggagaggccgccctgtcagacgctaggtgcaaactagctgagttagagggggccctccagaaagcaaaacaggacatggcctgcctgatccgggagtatcaggaagtgatgaatagcaaactgggcctggacattgagatcgcgacctaccgtcgcctattggagggggaagaacagaggctctgcgaaggagttgaggccgtgaacgtctgcgtatcctcttcaagagggggcgttgtatgcggcgacttgtgtgtctccggcagtcgaccagtcaccgggagtgtctgttctgcaccatgcaatggtaatctcgttgtgtctactggactgtgcaagccctgtggacagctgaatactacatgtggcggggggtcatgcggtcaggggaggcactag

SEQ ID NO: 127159 - DNA, 1875 bp, Artificial Sequence
  derived and/or modified sequence
acaggcccttggttccatcctctgccatctactccactgttcagacacctcctaacctccgtcatgacctgtggcttcaactccataggctgtgggttccgccctggaaacttcagctgtgtctctgcctgcgggccccggccaagccgctgctgcatcaccgccgccccctaccgcggcatctcctgctaccgcggcctcaccgggggctttggcagccacagcgtgtgcgggggcttccgcgccggctcctgcggacgcagcttcggctaccgctccgggggcgtgtgcggacccagccccccatgcatcaccaccgtgtcggtcaacgagagcctcctcacgcccctcaacctggagatagaccccaacgcgcagtgcgtgaagcaggaggagaaggagcagatcaagtccctcaacagcagattcgcggccttcatcgacaaggtgcgcttcctggagcagcagaacaagctgctggagacaaagctgcagttctaccaaaaccgcgagtgctgccagagtaacctggagcccctgtttgctggctacatcgagactctgcggcgggaggccgagtgcgtggaggctgacagtgggaggctggcctcagagctcaaccacgtgcaggaggtgctggagggctacaagaagaagtatgaagaagaagtagcacttcgagccacagcagagaacgagtttgtggctctaaagaaggatgtggactgcgcctacctccgcaagtcagacctggaggccaacgtggaggccctgatccaggagattgacttcctgaggcggctgtacgaggaggagatccgcattctccaatcccacatctcagacacctccgtggttgtcaagctggacaacagccgggacctgaacatggactgcatcgttgccgagatcaaggcacagtatgatgacattgccacccgtagccgggctgaggccgagtcctggtatcgcagcaagtgtgaggagatgaaggccacagtgatcaggcacggggagaccctgcgccgcaccaaggaggagatcaacgagctgaaccgcatgatccagaggctgacagccgaggtggagaatgccaagtgccagaactccaagctggaagctgcggtggcccagtctgagcagcagggtgaggcggccctcagtgatgcccgctgcaagctggccgagctggagggcgccctgcagaaggccaagcaagacatggcctgcctgatcagggagtaccaggaggtgatgaactccaagctaggcctggatatcgagatcgccacctacaggcgcctgctggagggcgaggagcagaggctgtgtgaaggtgttgaagctgtgaatgtctgtgtcagcagctcccggggtggggttgtgtgcggggatctctgcgtgtcgggctcccggccggtgacgggcagcgtctgcagtgccccctgcaacgggaacctggtggtgagcactggtttgtgcaagccctgtggccagctgaacaccacctgtggagggggctcctgcggccaggggaggcattaagtggcccaaaagagagccaggggagccccttctgcctgccagacgtgccactgccccaccaccagctgaaaacagcagcacatcgctggcttttccccttgtgttctgagaatacaccatcggctcattcccaccagcggctcctccccacctttcatcccactggaaaggggcctgtggctggggaatagacccattccttcccctgtctcagccttcagcccctcccggggagaagggccttgcttccctggaagaagcactgtgagactgttccccctgcctctctggcctcttgtctccccttttccaataaacttggggacctgc

SEQ ID NO: 127160 - DNA, 1482 bp, Artificial Sequence
  derived and/or modified sequence
atgacctgtggcttcaacagcatcggctgcggcttccggcccggcaacttcagctgtgtgtctgcctgtggcccccggcccagccgctgctgcatcacagctgccccctaccggggcatcagctgctaccggggcctgactggaggcttcggcagccacagcgtgtgtggcggcttccgggccggcagctgtggccgcagctttggctaccgcagcggcggcgtgtgtggccccagccccccctgcatcaccaccgtgtctgtgaatgaaagcctgctgacccccctgaacctggagattgaccccaatgcccagtgtgtgaagcaggaggagaaggagcagatcaagagcctgaacagcagatttgctgccttcatcgacaaggtgcgcttcctggagcagcagaacaagctgctggagaccaagctgcagttctaccagaaccgggagtgctgccagagcaacctggagcccctgtttgctggctacatcgagaccctgcggcgggaggccgagtgtgtggaggccgacagcggccgcctggccagcgagctgaaccacgtgcaggaggtgctggagggctacaagaagaagtatgaggaggaggtggccctgcgggccacagcagaaaatgaatttgtggccctgaagaaggatgtggactgtgcctacctgaggaagagtgacctggaggccaacgtggaggccctgatccaggagattgacttcctgcggcggctgtatgaggaggagatccgcatcctgcagagccacatcagtgacacctctgtggtggtgaagctggacaacagccgggacctgaacatggactgcatcgtggccgagatcaaggcccagtatgatgacatcgccaccaggagcagagctgaggccgagagctggtaccgcagcaaatgtgaggagatgaaggccaccgtcatccgccacggggagaccctgcggaggaccaaggaggagatcaatgagctgaacaggatgatccagaggctgacagctgaggtggagaatgccaagtgccagaacagcaagctggaggccgctgtggcccagagcgagcagcagggcgaggccgccctgagtgatgcccgctgcaagctggccgagctggagggcgccctgcagaaggccaagcaggacatggcctgcctgatccgggagtaccaggaggtgatgaacagcaagctgggcctggacatcgagatcgccacctaccgccgcctgctggagggggaggagcagaggctgtgtgaaggagtggaggccgtgaatgtgtgtgtgagcagcagccggggcggcgtggtgtgtggggacctgtgtgtgtctggcagcaggcctgtgacaggctctgtgtgcagcgccccctgcaatggaaacctggtggtgtccacaggcctgtgcaagccctgtggccagctgaacaccacctgtggcggcggcagctgtggccagggccgccactag

SEQ ID NO: 127161 - DNA, 1482 bp, Artificial Sequence
  derived and/or modified sequence
atgacctgcggcttcaacagcatcggctgcggcttccggcccggcaatttcagctgcgtctctgcctgcgggcctaggccttcacgctgctgcataaccgctgcaccctacaggggaatttcatgctaccgcgggctaaccggcggtttcggatcccatagcgtgtgtggcggcttccgcgccggctcctgcgggcgtagcttcggctatcgaagcgggggagtttgcggacccagtcctccatgcatcacaaccgtgagtgtaaacgaaagtctcttgacgccacttaatctagagattgatccaaacgcccagtgcgtcaagcaagaagagaaggaacagataaagagtttgaactcccggtttgcagcgttcatcgacaaggtgagatttctcgagcagcaaaataagctgctggaaaccaagctccagttctaccaaaacagggaatgctgtcaatctaacttagagcctctgttcgccgggtacattgagactctgcgcagagaggcggagtgcgtggaggcggactcagggcgcctggccagcgagcttaatcatgtgcaggaagtactggagggctacaagaagaagtatgaggaagaagtcgctcttcgggctacagccgaaaacgaattcgtggctctgaagaaagacgtggattgtgcttacttgcgaaagtctgaccttgaggccaatgtggaggccttgatacaggaaatcgactttctcagacggttgtacgaggaggaaatcagaatcctccagtctcacatctctgacacctccgtagtagtcaaactggataacagccgggacttgaatatggactgtattgtggcggaaatcaaggcacagtatgacgacatcgcaacccgatctcgagctgaggccgagtcttggtacagatccaagtgtgaggagatgaaggccacagtgatacgacacggcgagacactgagacgcaccaaggaagagattaatgagctgaacaggatgatccaaaggctgactgctgaggttgagaatgccaagtgccagaattcgaaactggaagcagccgtggcgcaaagcgaacagcaaggagaagcagctctttcagacgcacgttgcaagttggccgagcttgagggagctttgcagaaagccaaacaggacatggcttgcctgatcagagagtatcaggaggtgatgaactctaagttgggcttagacatcgaaatagccacttaccggcgtctcctggaaggagaggaacagcggttatgcgagggcgtggaggctgtgaatgtgtgcgtgtcttcctcaaggggcggggtggtgtgtggagatctgtgcgtgagtggtagccggccagtgaccggtagtgtttgctctgcgccatgtaatggtaacttggtggtttcaacaggactctgtaagccatgcggccagctcaacaccacatgtggcggaggttcttgcgggcagggacggcactag

SEQ ID NO: 127162 - DNA, 1482 bp, Artificial Sequence
  derived and/or modified sequence
atgacttgtgggtttaacagtattgggtgcgggttccgtcccggaaatttctcatgcgtgagtgcgtgtggtcccaggccctcacgttgttgcattacagctgccccatacagaggcattagttgctatcggggattgactggcggatttggttcccactccgtctgcggaggcttcagagcagggagctgcggtcgcagcttcgggtatcgtagcggtggcgtgtgcggaccctccccaccctgcattacaaccgtgagtgtaaacgagagcttgctcacacctttaaacctggagatcgaccctaatgcccagtgcgtgaagcaggaagaaaaggagcagatcaaatcgctgaactctcgattcgccgcattcatagataaggtgaggttcctggagcagcagaacaagctgctggagaccaaactccagttctatcaaaatcgtgaatgctgccagagcaacctcgagcctctgtttgccggttacatcgagacactccgacgcgaagcagagtgcgttgaagcggacagcggcaggctcgcttctgagctgaaccacgtgcaggaagtgctggaaggctacaagaagaagtacgaggaggaagtggcactgcgagctacagccgaaaatgagtttgtggcactaaagaaggacgtcgattgcgcctacctacggaaatccgatctcgaagcaaacgtcgaagccctgatacaagaaattgacttccttaggcgcctctacgaagaagagattagaatcctccaatcccacatatcagacacaagtgtggtggtcaagctggacaatagccgcgatctgaacatggactgcattgtcgcagagataaaggcccagtacgatgacatcgccacccgcagccgcgcagaggctgaatcttggtatagaagcaaatgtgaagagatgaaagcaacagtgattcgccatggcgagacacttaggcgaaccaaagaggaaattaatgagttaaatagaatgattcagcgtttgaccgcagaggtggaaaacgctaaatgtcagaattccaaactagaagctgccgtggcccagtctgaacagcagggggaagccgcactgagtgacgcccgatgtaaactcgccgaactggagggagcactgcagaaggcgaaacaagacatggcctgcctgataagggaataccaggaagtcatgaactccaagctgggccttgatatagaaattgcaacctataggcgcctgttagaaggcgaagaacagaggctttgtgagggtgtggaagccgtgaacgtgtgcgtgtcttcctctaggggaggggtcgtgtgcggggatctctgtgtttccggtagccggcctgtgactggctccgtctgctccgcaccttgtaacggaaatttagtggtctctactgggctttgcaagccatgtggccagctgaacaccacttgcggcggtgggtcctgcgggcagggccgacattag

SEQ ID NO: 127163 - DNA, 1482 bp, Artificial Sequence
  derived and/or modified sequence
atgacctgcggcttcaacagcatcggctgcggcttcagacccggcaacttcagctgcgtgagcgcctgcggccccagacccagcagatgctgcatcaccgccgccccctacagaggcatcagctgctacagaggcctgaccggcggcttcggcagccacagcgtgtgcggcggcttcagagccggcagctgcggcagaagcttcggctacagaagcggcggcgtgtgcggccccagccccccctgcatcaccaccgtgagcgtgaacgagagcctgctgacccccctgaacctggagatcgaccccaacgcccagtgcgtgaagcaggaggagaaggagcagatcaagagcctgaacagcagattcgccgccttcatcgacaaggtgagattcctggagcagcagaacaagctgctggagaccaagctgcagttctaccagaacagagagtgctgccagagcaacctggagcccctgttcgccggctacatcgagaccctgagaagagaggccgagtgcgtggaggccgacagcggcagactggccagcgagctgaaccacgtgcaggaggtgctggagggctacaagaagaagtacgaggaggaggtggccctgagagccaccgccgagaacgagttcgtggccctgaagaaggacgtggactgcgcctacctgagaaagagcgacctggaggccaacgtggaggccctgatccaggagatcgacttcctgagaagactgtacgaggaggagatcagaatcctgcagagccacatcagcgacaccagcgtggtggtgaagctggacaacagcagagacctgaacatggactgcatcgtggccgagatcaaggcccagtacgacgacatcgccaccagaagcagagccgaggccgagagctggtacagaagcaagtgcgaggagatgaaggccaccgtgatcagacacggcgagaccctgagaagaaccaaggaggagatcaacgagctgaacagaatgatccagagactgaccgccgaggtggagaacgccaagtgccagaacagcaagctggaggccgccgtggcccagagcgagcagcagggcgaggccgccctgagcgacgccagatgcaagctggccgagctggagggcgccctgcagaaggccaagcaggacatggcctgcctgatcagagagtaccaggaggtgatgaacagcaagctgggcctggacatcgagatcgccacctacagaagactgctggagggcgaggagcagagactgtgcgagggcgtggaggccgtgaacgtgtgcgtgagcagcagcagaggcggcgtggtgtgcggcgacctgtgcgtgagcggcagcagacccgtgaccggcagcgtgtgcagcgccccctgcaacggcaacctggtggtgagcaccggcctgtgcaagccctgcggccagctgaacaccacctgcggcggcggcagctgcggccagggcagacactag

SEQ ID NO: 127164 - protein, 507 aa, Artificial Sequence
  derived and/or modified sequence
MSCRSYRISSGCGVTRNFSSCSAVAPKTGNRCCISAAPYRGVSCYRGLTGFGSRSLCNLGSCGPRIAVGGFRAGSCGRSFGYRSGGVCGPSPPCITTVSVNESLLTPLNLEIDPNAQCVKQEEKEQIKSLNSRFAAFIDKVRFLEQQNKLLETKWQFYQNQRCCESNLEPLFSGYIETLRREAECVEADSGRLASELNHVQEVLEGYKKKYEEEVALRATAENEFVVLKKDVDCAYLRKSDLEANVEALVEESSFLRRLYEEEIRVLQAHISDTSVIVKMDNSRDLNMDCIIAEIKAQYDDVASRSRAEAESWYRSKCEEMKATVIRHGETLRRTKEEINELNRMIQRLTAEIENAKCQRAKLEAAVAEAEQQGEAALSDARCKLAELEGALQKAKQDMACLLKEYQEVMNSKLGLDIEIATYRRLLEGEEHRLCEGVGSVNVCVSSSRGGVSCGGLSYSTTPGRQITSGPSAIGGSITVVAPDSCAPCQPRSSSFSCGSSRSVRFA

SEQ ID NO: 127165 - DNA, 1524 bp, Artificial Sequence
  derived and/or modified sequence
atgagttgcaggtcctaccgcatttccagcggctgcggagtgacccggaacttttcatcttgctcagccgttgcgccaaaaactgggaacaggtgttgtatcagcgccgccccatacagaggcgtgagttgttatcgtggtctgaccggctttggttcccggtccctatgtaatctggggagctgtggtccgagaatcgcggtaggcggcttccgagcaggatcatgcgggaggagcttcggataccgttccgggggcgtctgcgggccctccccaccatgcattacgactgtgagcgtcaatgagtccctcttgacacccttgaaccttgagatcgaccccaatgcccaatgtgtgaagcaggaggagaaggagcagattaagtccttgaattcgcgcttcgcagcgttcatcgacaaagtgcgcttccttgagcagcaaaacaaactactggagacgaagtggcagttttaccagaaccagcgatgttgcgagtctaatctcgagcctctcttctcagggtacatagagacgctgcgcagggaagctgaatgtgttgaggcagatagtgggagactggcatctgagctgaaccacgtgcaggaagtgctggagggttacaaaaagaaatatgaagaggaagtcgctttgagggctaccgccgagaatgagttcgtggtgctgaaaaaagacgtagattgtgcctacctccggaaaagcgacctggaagctaatgtggaggcattagttgaggaaagctcctttttgagaagattgtacgaggaggaaattagggtgctgcaagcccatatatcagacactagcgtcattgtcaagatggacaattccagagacctgaacatggattgtatcatagccgaaataaaagcgcagtacgacgatgtcgcctcaagatcccgcgcggaagccgaatcttggtaccgatctaaatgcgaagagatgaaagccaccgtgataagacatggggaaacgcttaggaggaccaaagaggagatcaacgaattgaaccgcatgattcagcgcctgacggccgaaatcgagaacgctaaatgccagcgcgctaagctcgaggcagcagtggctgaggccgaacagcaaggagaggcggctttgtctgatgctagatgcaaactcgcggagctagaaggagcattgcagaaggctaagcaggatatggcctgcctcctgaaagagtaccaggaagtgatgaatagcaagttagggcttgatatcgagatcgctacctaccgccgcctgctggagggcgaggagcatcgactctgcgaaggcgtgggtagcgtcaatgtgtgtgtgtccagcagtcgcggcggcgtgtcatgcggcggactaagctactccacaactcccgggcggcagatcaccagcggtccctccgcgatagggggcagtataacagtggttgctccagatagctgcgcaccctgccagccaagaagcagctctttcagctgcgggtccagcaggtcggtccggttcgcgtag

SEQ ID NO: 127166 - DNA, 2447 bp, Artificial Sequence
  derived and/or modified sequence
agaaggatcctgagcctcgcactctgccgcccgcaccaccttccgctgcctctcagactctgctcagcctcacacgatgtcgtgccgctcctacaggatcagctcaggatgcggggtcaccaggaacttcagctcctgctcagctgtggcccccaaaactggcaaccgctgctgcatcagcgccgccccctaccgaggggtgtcctgctaccgagggctgacgggcttcggcagccgcagcctctgcaacctgggctcctgcgggccccggatagctgtaggtggcttccgagccggctcctgcggacgcagcttcggctaccgctccgggggcgtgtgcggacccagccccccatgcatcactaccgtgtcggtcaacgagagcctcctcacgcccctcaacctggagatcgaccccaacgcacagtgcgtgaagcaggaggagaaggagcagatcaagtccctcaacagcaggttcgcggccttcatcgacaaggtgcgcttcctggagcagcagaacaagctgctggagaccaagtggcagttctaccagaaccagcgctgctgcgagagcaacctggagccactgttcagtggctacatcgagactctgcggcgggaggccgagtgcgtggaggccgacagcgggaggctggcctcagagctcaaccatgtgcaggaggtgctggagggctacaagaagaagtatgaagaggaggtggccctgagagccacagcagagaatgagtttgtcgttctaaagaaggacgtggactgtgcctacctgcggaaatcagacctggaggccaatgtggaggccctggtggaggagtctagcttcctgaggcgcctctatgaagaggagatccgcgttctccaagcccacatctcagacacctcggtcatagtcaagatggacaacagccgagacctgaacatggactgcatcatcgctgagatcaaggctcagtatgacgatgttgccagccgcagccgggccgaggctgagtcctggtaccgtagcaagtgtgaggagatgaaggccacggtgatcaggcatggggagaccctgcgccgcaccaaggaggagatcaacgagctgaaccgcatgatccagaggctgacggccgagattgagaatgccaagtgccagcgtgccaagctggaggctgctgtggctgaggcagagcagcagggtgaggcggccctcagcgatgcccgctgcaagctggctgagctggagggcgccctgcagaaggccaagcaggacatggcctgcctgctcaaggagtaccaggaggtgatgaactccaagctgggcctggacatcgagatcgccacctacaggcgcctgctggagggcgaggaacacaggctgtgtgaaggtgtgggctctgtgaatgtctgtgtcagcagctcccgtggtggagtctcctgtgggggcctctcctacagcaccaccccagggcgccagatcacttctggcccctcagccataggcggcagcatcacggtggtggcccctgactcctgtgccccctgccagcctcgttcctccagcttcagctgcgggagtagccggtcggtccgctttgcctagtagagtcatggagccagggcttcctgccaagcacctgcctgcctgcatcactgcactgaatggcatgtgaatggaaaatgtgtgcttgcttccagaatcttctggatgttcctacagagggaaagacctacagagggaaagaccctcgggccgctcccctgcgccttttcatgctagggagatgcatcctagttgtcctcctggcagctgttttcagaggcattcccagcccttcacttaactcctacttagctccaaaatacctgtatccaatttgtattattcccccagctctcagggacaagaccagtcccccagcgtggtggtcagcacggaagctccaccttctgggtggaggcgccatcctaaccatccagccaggccacccacaacccgagaatcagggagaaagtccctccccagcagccccctcctcctggctgggaagaatggtcccccagcaagcacttgcctgttcattcctgttcatgttttgcttctctctcagactgccttcctgcttctgggctaacctgttccagccaggctcctcatgtgacctcgcagttgagaagcccattatcgtggggcatccttttgcctacagcccctggttagggcactttggacaggtcttgctattcagtgaacctttgtacatttcaaagaagactccatggctgctccagatgcccccttgctgggtgcaggtggggactgtccaatgcagagctggcgggacagagagttaagccacttcctgggtctccttcttgtgactgtctatgggtgcattgccttctgggttgtctcgatctgtgtttcaataaatgccgctgcaatgcaa

SEQ ID NO: 127167 - DNA, 1524 bp, Artificial Sequence
  derived and/or modified sequence
atgagctgccgcagctaccgcatcagcagcggctgcggcgtgaccaggaacttcagcagctgcagcgctgtggcccccaagacaggcaaccgctgctgcatctctgctgccccctacagaggagtgtcctgctaccggggcctgactggatttggcagccgcagcctgtgcaacctgggcagctgtggccccagaattgctgtgggcggcttccgggccggcagctgtggccgcagctttggctaccgcagcggcggcgtgtgtggccccagccccccctgcatcaccaccgtgtctgtgaatgaaagcctgctgacccccctgaacctggagattgaccccaatgcccagtgtgtgaagcaggaggagaaggagcagatcaagagcctgaacagcagatttgctgccttcatcgacaaggtgcgcttcctggagcagcagaacaagctgctggagaccaagtggcagttctaccagaaccagcgctgctgtgagagcaacctggagcccctcttcagcggctacatcgagaccctgcggcgggaggccgagtgtgtggaggccgacagcggccgcctggccagcgagctgaaccacgtgcaggaggtgctggagggctacaagaagaagtatgaggaggaggtggccctgcgggccacagcagaaaatgaatttgtggtgctgaagaaggatgtggactgtgcctacctgaggaagagtgacctggaggccaacgtggaggccctggtggaggagagcagcttcctgcggcggctgtatgaggaggagatccgggtgctgcaggcccacatcagtgacacctctgtgattgtgaagatggacaacagccgggacctgaacatggactgcatcatcgccgagatcaaggcccagtatgatgatgtggccagccgcagcagagctgaggccgagagctggtaccgcagcaaatgtgaggagatgaaggccaccgtcatccgccacggggagaccctgcggaggaccaaggaggagatcaatgagctgaacaggatgatccagaggctgacagctgagattgaaaatgccaagtgccagagggccaagctggaggccgctgtggccgaggccgagcagcagggcgaggccgccctgagtgatgcccgctgcaagctggccgagctggagggcgccctgcagaaggccaagcaggacatggcctgcctgctgaaggagtaccaggaggtgatgaacagcaagctgggcctggacatcgagatcgccacctaccgccgcctgctggagggggaggagcaccggctgtgtgaaggagtgggctctgtgaatgtgtgtgtgagcagcagccggggcggcgtgtcctgtggcggcctgagctacagcaccaccccaggccggcagatcaccagcggccccagcgccatcggcggcagcatcaccgtggtggccccagacagctgtgccccctgccagcccaggagcagcagcttcagctgtggcagcagccgctctgtgcgctttgcctag

SEQ ID NO: 127168 - DNA, 1524 bp, Artificial Sequence
  derived and/or modified sequence
atgagctgccggagctaccggatcagcagcggctgcggcgtgacccgcaattttagcagttgctccgcggtggcaccgaagaccggaaaccgctgctgtataagtgcagcgccctacaggggtgtgtcttgctaccgcgggctgactggtttcggctcccggagcctttgcaacctcggaagttgcggtccacgtattgccgttggtgggttccgagcggggtcttgtggtcgaagcttcgggtaccgctccggaggcgtttgcggccccagccccccttgtattaccaccgtgagcgttaatgagtcactgctgacgccactgaatttagagattgacccaaacgcgcagtgcgtgaagcaggaggaaaaggagcaaatcaagtccctgaatagccggtttgccgcattcatagataaagtacgcttcctcgagcaacagaacaagttactcgagaccaagtggcagttttatcagaatcaacgttgttgtgaatccaatctggagcctctttttagtggctatatcgaaacactgagacgtgaggcagaatgcgtggaggccgattccggaaggctggcctccgaactgaaccacgtgcaggaggttttagaggggtataagaagaagtatgaggaagaagtggcccttcgggctaccgccgagaacgagtttgttgtcctgaagaaagatgtagactgtgcctacttacggaaaagcgatctcgaagccaatgtggaggccctggtggaagagtcgagctttctgagacgtctgtatgaggaggagatacgcgtgctgcaggcccacatctcggatactagcgtgatcgttaaaatggataattctcgcgatctcaatatggactgcatcatcgcagagatcaaagctcagtatgacgatgtagcttcgcgctcgcgggccgaagccgagagctggtatcgctccaaatgcgaggagatgaaagcaactgtgattcgccacggtgagactctgaggcgaactaaagaagagattaatgaacttaaccgtatgatccagagactcacagctgaaattgagaatgctaagtgtcaaagagcaaagctggaagccgcagttgcagaggcggagcagcaaggcgaggctgcactgtccgacgcccggtgtaaacttgctgagttagagggcgctctccagaaagctaaacaggatatggcttgtctgcttaaagaatatcaggaagtgatgaactctaaactaggattagacatcgagatcgctacttacagaaggctgctagagggagaggagcatcgcctgtgtgagggtgttggttccgtcaacgtgtgcgtgtccagttcccgcggcggcgtgagttgtggaggactgagttacagcacaacacctggccggcaaatcacctccgggccttcagccatcggcggtagcatcacggttgtggcccccgattcctgcgcaccctgtcagcctcggtcttcttcattttcctgcgggagttccaggtctgttcgtttcgcctag

SEQ ID NO: 127169 - DNA, 1524 bp, Artificial Sequence
  derived and/or modified sequence
atgagttgtcgcagctaccggatcagttccgggtgcggtgtcacacgaaatttttcctcctgctctgcagtggcacccaagaccggtaaccggtgttgcatatcagctgcaccctatagaggagtgagctgctatcgtggccttaccgggtttgggtcccggtcattatgtaacctcggctcatgcggtcctcggatcgctgtgggcggtttcagggctggctcttgcggcagatctttcggataccgaagtggtggtgtgtgtgggcctagcccaccttgcataacaactgtatccgtgaacgagtcgctgcttacccccctcaatcttgaaatcgaccctaatgcccaatgcgtcaaacaggaggagaaggaacagatcaaatccctgaacagcaggttcgctgcttttattgacaaggtgagattcctggaacagcagaacaaactgctagagaccaagtggcagttttaccaaaaccagcgctgttgtgagtccaaccttgaacccttgttctctggctacattgagactctcaggagggaggctgaatgtgtagaagctgattcgggcagactcgcctcagagctgaaccatgttcaagaggtcctcgaggggtacaaaaagaaatacgaagaggaggtcgcattgagagcaaccgctgaaaacgaattcgtagtgctcaagaaggacgtagattgtgcttacctgaggaaatctgacttggaagccaatgtcgaggccctggtcgaggagtcaagctttctaaggcggttatatgaggaggaaattcgcgtccttcaggcccatatttctgatacgtcggtcatcgtgaagatggataatagtcgggatctgaatatggactgcattatagccgaaattaaagcgcaatatgatgatgtcgcttctcgttctagagccgaggcagaaagttggtatcggtctaagtgtgaggagatgaaagctacggttatccgacatggcgagacgctgcgaaggacaaaggaggagatcaatgaacttaatcgtatgatccagaggctgactgcagaaatagagaacgcaaagtgccagagagccaagttagaagccgcagtggctgaggcagaacaacaaggcgaggcagccctttctgatgctaggtgcaagctggcagagctggagggtgccttacagaaggccaaacaggatatggcttgtttattaaaggaataccaagaagtgatgaactcaaaattggggcttgacattgaaattgcgacctaccggcgactactggaaggcgaggagcaccggctgtgtgaaggcgtggggtctgtgaatgtgtgcgtctctagcagcagagggggagtgtcatgtggtggcttgtcttactcgactactcctggcaggcagatcacgtccggaccatcagctatcggcggatccattaccgtagtcgcaccagactcctgtgctccctgccagcctcggtcatcttccttctcatgcgggagctccagatccgttcggtttgcttag

SEQ ID NO: 127170 - DNA, 1524 bp, Artificial Sequence
  derived and/or modified sequence
atgagctgcagaagctacagaatcagcagcggctgcggcgtgaccagaaacttcagcagctgcagcgccgtggcccccaagaccggcaacagatgctgcatcagcgccgccccctacagaggcgtgagctgctacagaggcctgaccggcttcggcagcagaagcctgtgcaacctgggcagctgcggccccagaatcgccgtgggcggcttcagagccggcagctgcggcagaagcttcggctacagaagcggcggcgtgtgcggccccagccccccctgcatcaccaccgtgagcgtgaacgagagcctgctgacccccctgaacctggagatcgaccccaacgcccagtgcgtgaagcaggaggagaaggagcagatcaagagcctgaacagcagattcgccgccttcatcgacaaggtgagattcctggagcagcagaacaagctgctggagaccaagtggcagttctaccagaaccagagatgctgcgagagcaacctggagcccctgttcagcggctacatcgagaccctgagaagagaggccgagtgcgtggaggccgacagcggcagactggccagcgagctgaaccacgtgcaggaggtgctggagggctacaagaagaagtacgaggaggaggtggccctgagagccaccgccgagaacgagttcgtggtgctgaagaaggacgtggactgcgcctacctgagaaagagcgacctggaggccaacgtggaggccctggtggaggagagcagcttcctgagaagactgtacgaggaggagatcagagtgctgcaggcccacatcagcgacaccagcgtgatcgtgaagatggacaacagcagagacctgaacatggactgcatcatcgccgagatcaaggcccagtacgacgacgtggccagcagaagcagagccgaggccgagagctggtacagaagcaagtgcgaggagatgaaggccaccgtgatcagacacggcgagaccctgagaagaaccaaggaggagatcaacgagctgaacagaatgatccagagactgaccgccgagatcgagaacgccaagtgccagagagccaagctggaggccgccgtggccgaggccgagcagcagggcgaggccgccctgagcgacgccagatgcaagctggccgagctggagggcgccctgcagaaggccaagcaggacatggcctgcctgctgaaggagtaccaggaggtgatgaacagcaagctgggcctggacatcgagatcgccacctacagaagactgctggagggcgaggagcacagactgtgcgagggcgtgggcagcgtgaacgtgtgcgtgagcagcagcagaggcggcgtgagctgcggcggcctgagctacagcaccacccccggcagacagatcaccagcggccccagcgccatcggcggcagcatcaccgtggtggcccccgacagctgcgccccctgccagcccagaagcagcagcttcagctgcggcagcagcagaagcgtgagattcgcctag

SEQ ID NO: 127171 - protein, 1226 aa, Artificial Sequence
  derived and/or modified sequence
MDSFDLALLQEWDLESLCVYEPDRNALRRKERERRNQETQQDDGTFNSSYSLFSEPYKTNKGDELSNRIQNTLGNYDEMKDFLTDRSNQSHLVGVPKPGVPQTPVNKIDEHFVADSRAQNQPSSICSTTTSTPAAVPVQQSKRGTMGWQKAGHPPSDGQQRATQQGSLRTLLGDGVGRQQPRAKQVCNVEVGLQTQERPPAMAAKHSSSGHCVQNFPPSLASKPSLVQQKPTAYVRPMDGQDQAPDESPKLKSSSETSVHCTSYRGVPASKPEPARAKAKLSKFSIPKQGEESRSGETNSCVEEIIREMTWLPPLSAIQAPGKVEPTKFPFPNKDSQLVSSGHNNPKKGDAEPESPDSGTSNTSMLEDDLKLSSDEEENEQQAAQRTALRALSDSAVVQQPNCRTSVPSSKGSSSSSSSGSSSSSSDSESSSGSDSETESSSSESEGSKPPHFSSPEAEPASSNKWQLDKWLNKVNPHKPPILIQNESHGSESNQYYNPVKEDVQDCGKVPDVCQPSLREKEIKSTCKEEQRPRTANKAPGSKGVKQKSPPAAVAVAVSAAAPPPAVPCAPAENAPAPARRSAGKKPTRRTERTSAGDGANCHRPEEPAAADALGTSVVVPPEPTKTRPCGNNRASHRKELRSSVTCEKRRTRGLSRIVPKSKEFIETESSSSSSSSDSDLESEQEEYPLSKAQTVAASASSGNDQRLKEAAANGGSGPRAPVGSINARTTSDIAKELEEQFYTLVPFGRNELLSPLKDSDEIRSLWVKIDLTLLSRIPEHLPQEPGVLSAPATKDSESAPPSHTSDTPAEKALPKSKRKRKCDNEDDYREIKKSQGEKDSSSRLATSTSNTLSANHCNMNINSVAIPINKNEKMLRSPISPLSDASKHKYTSEDLTSSSRPNGNSLFTSASSSKKPKADSQLQPHGGDLTKAAHNNSENIPLHKSRPQTKPWSPGSNGHRDCKRQKLVFDDMPRSADYFMQEAKRMKHKADAMVEKFGKALNYAEAALSFIECGNAMEQGPMESKSPYTMYSETVELIRYAMRLKTHSGPNATPEDKQLAALCYRCLALLYWRMFRLKRDHAVKYSKALIDYFKNSSKAAQAPSPWGASGKSTGTPSPMSPNPSPASSVGSQGSLSNASALSPSTIVSIPQRIHQMAANHVSITNSILHSYDYWEMADNLAKENREFFNDLDLLMGPVTLHSSMEHLVQYSQQGLHWLRNSAHLS

SEQ ID NO: 127172 - protein, 99 aa, Artificial Sequence
  derived and/or modified sequence
MDSFDLALLQEWDLESLCVYEPDRNALRRKERERRNQETQQDDGTFNSSYSLFSEPYKTNKGDELSNRIQNTLGNYDEMKDFLTDRSNQSHLVGVPKPG

SEQ ID NO: 127173 - protein, 155 aa, Artificial Sequence
  derived and/or modified sequence
MDSFDLALLQEWDLESLCVYEPDRNALRRKERERRNQETQQDDGTFNSSYSLFSEPYKTNKGDELSNRIQNTLGNYDEMKDFLTDRSNQSHLVGVPKPGVPQTPVNKIDEHFVADSRAQNQPSSICSTTTSTPAAVPVQQSKRGTMGWQKAGHPP

SEQ ID NO: 127174 - protein, 114 aa, Artificial Sequence
  derived and/or modified sequence
MDSFDLALLQEWDLESLCVYEPDRNALRRKERERRNQETQQDDGTFNSSYSLFSEPYKTNKGDELSNRIQNTLGNYDEMKDFLTDRSNQSHLVGVPKPGVPQTPVNKIDEHFVA

SEQ ID NO: 127175 - protein, 17 aa, Artificial Sequence
  derived and/or modified sequence
MDSFDLALLQEWDLESL

SEQ ID NO: 127176 - protein, 161 aa, Artificial Sequence
  derived and/or modified sequence
MDSFDLALLQEWDLESLCVYEPDRNALRRKERERRNQETQQDDGTFNSSYSLFSEPYKTNKGDELSNRIQNTLGNYDEMKDFLTDRSNQSHLVGVPKPGVPQTPVNKIDEHFVADSRAQNQPSSICSTTTSTPAAVPVQQSKRGTMGWQKAGHPPSDGQQR

SEQ ID NO: 127177 - protein, 869 aa, Artificial Sequence
  derived and/or modified sequence
MDSFDLALLQEWDLESLCVYEPDRNALRRKERERRNQETQQDDGTFNSSYSLFSEPYKTNKGDELSNRIQNTLGNYDEMKDFLTDRSNQSHLVGVPKPGVPQTPVNKIDEHFVADSRAQNQPSSICSTTTSTPAAVPVQQSKRGTMGWQKAGHPPSDGQQRATQQGSLRTLLGDGVGRQQPRAKQVCNVEVGLQTQERPPAMAAKHSSSGHCVQNFPPSLASKPSLVQQKPTAYVRPMDGQDQAPDESPKLKSSSETSVHCTSYRGVPASKPEPARAKAKLSKFSIPKQGEESRSGETNSCVEEIIREMTWLPPLSAIQAPGKVEPTKFPFPNKDSQLVSSGHNNPKKGDAEPESPDSGTSNTSMLEDDLKLSSDEEENEQQAAQRTALRALSDSAVVQQPNCRTSVPSSKGSSSSSSSGSSSSSSDSESSSGSDSETESSSSESEGSKPPHFSSPEAEPASSNKWQLDKWLNKVNPHKPPILIQNESHGSESNQYYNPVKEDVQDCGKVPDVCQPSLREKEIKSTCKEEQRPRTANKAPGSKGVKQKSPPAAVAVAVSAAAPPPAVPCAPAENAPAPARRSAGKKPTRRTERTSAGDGANCHRPEEPAAADALGTSVVVPPEPTKTRPCGNNRASHRKELRSSVTCEKRRTRGLSRIVPKSKEFIETESSSSSSSSDSDLESEQEEYPLSKAQTVAASASSGNDQRLKEAAANGGSGPRAPVGSINARTTSDIAKELEEQFYTLVPFGRNELLSPLKDSDEIRSLWVKIDLTLLSRIPEHLPQEPGVLSAPATKDSESAPPSHTSDTPAEKALPKSKRKRKCDNEDDYREIKKSQGEKDSSSRLATSTSNTLSANHCNMNINSMQLPI

SEQ ID NO: 127178 - protein, 129 aa, Artificial Sequence
  derived and/or modified sequence
MDSFDLALLQEWDLESLCVYEPDRNALRRKERERRNQETQQDDGTFNSSYSLFSEPYKTNKGDELSNRIQNTLGNYDEMKDFLTDRSNQSHLVGVPKPGVPQTPVNKIDEHFVADSRAQNQPSSICSTT

SEQ ID NO: 127179 - DNA, 3681 bp, Artificial Sequence
  derived and/or modified sequence
atggactctttcgacctagccctgttacaagagtgggatctcgagagcctttgtgtatatgagccagacagaaacgccctgcgaaggaaggaaagggagcggcggaaccaggagactcagcaggacgacggtactttcaacagctcttactctctcttttccgagccctataagacaaataagggagacgaactgagcaaccggatacagaacacattgggcaattacgacgaaatgaaggactttttaacagatcgctctaatcagtcacacttagtcggagttcccaagcccggagtgccacagacccccgtgaacaagattgacgagcactttgtggctgacagtcgcgcacagaaccaaccgtcaagtatatgtagtaccaccacctccacaccagcggccgttcctgtgcaacagtcaaaacgcggcaccatgggatggcagaaagcaggacaccccccctctgacggacagcagagagctactcagcagggctccttgcgcaccctgcttggcgatggggtaggccggcaacagccgcgcgcaaaacaggtgtgcaatgtggaggttggcttgcaaacacaggagaggccccctgcaatggccgcaaagcacagcagcagtggtcactgcgtccagaatttcccccctagtttggccagcaagccatctctggtacaacagaaacctacagcctacgttaggccaatggacggccaggatcaagcaccggatgagagtcccaagttgaaatcctcaagtgagacgtccgtgcactgtacatcataccgtggcgttcctgctagtaagccggaaccagccagggctaaagctaaactgtcaaaattttccattcccaagcagggcgaagagtctcgatcaggtgaaaccaacagttgtgtggaggaaattatacgcgagatgacctggctgccaccactttccgccattcaggctccagggaaggtggagccaaccaaatttccttttcctaacaaagattcacaattagtgagctccggtcacaataacccgaaaaagggtgacgccgaacccgagtcgccggacagtgggacatcaaacaccagtatgctggaggatgatctcaagctgagcagcgacgaggaagagaacgaacagcaggccgcccagcggaccgccttgagggcccttagcgattctgctgttgttcagcagcctaactgccggaccagtgtaccgtcttcgaagggtagttccagtagctcctcttccggctcatcgagcagctcttcagactcggaatctagcagcggatctgattctgagacagaatcgtcttcctcggaaagcgaaggctccaagccaccccacttttcctctcctgaagctgaaccagcttccagtaacaagtggcagctggacaagtggctcaataaagtgaaccctcataaaccccccattctgattcaaaacgagtcccacgggtccgaaagcaatcagtactacaatcccgtcaaagaagatgtacaggattgcggaaaggttcccgatgtgtgccagccctccctcagagagaaagaaatcaagagcacatgtaaggaggaacagagaccgcgaaccgcaaacaaagcaccaggtagtaaaggcgtaaagcagaaatcccctccagcggctgtggctgtggctgtgagtgcagccgctcccccgccggcagtcccatgcgccccggccgagaacgctccagcccccgcacggcgttcagcgggtaaaaagcccacaaggaggactgagcgcacaagtgccggcgatggggcaaactgtcaccgccccgaagaacccgctgccgccgatgctctaggcacatccgtggttgtcccccctgagcccacgaaaacccggccttgtggaaacaatagagcctcccatcgcaaagaactgcggagttcagtcacatgcgaaaagcgcaggacccgcggactgagtcgcatcgtgcctaaatcaaaagagttcattgagactgagtcaagtagctcttcctcaagctcggatagtgacctggagtcagagcaggaggagtatcctctcagcaaagctcagacagttgcagcctcagcaagttcgggaaatgaccaacgcctgaaagaagcggcggccaacggtggctccggccctcgggccccagtaggatccatcaacgctcggaccaccagcgatatcgccaaggaactggaagagcagttttacacccttgttccttttggccgaaatgaactgctgtcgcctcttaaggacagcgatgaaatacgctctctgtgggtcaagattgatttgacgctgctgtcccggataccagaacatttacctcaggagccaggagtgcttagtgcgcccgccaccaaagacagcgagagcgctcctccaagtcacacgagcgacacgcccgcggagaaggcccttcctaagtccaaaaggaagcgcaaatgcgataacgaggacgattacagggagatcaaaaaaagtcagggcgagaaagacagctcctctagactcgctacctctacatccaacacactgtctgcaaatcattgcaacatgaatatcaacagtgtggccatccctatcaacaagaatgagaagatgttacgatctcctatctctcctcttagcgacgcctccaagcacaaatacacctcggaagacctcacaagcagctccaggcccaacggcaacagcttattcacctctgcaagttcctccaagaagcctaaggctgattcccagttgcaacctcacgggggggatttgacgaaggccgcccacaataacagtgagaatatcccgctccacaaatctcggccacaaaccaagccgtggtcccctggcagtaatgggcatcgggattgtaagagacagaagcttgtgttcgacgatatgcctcgctccgccgattatttcatgcaagaagccaaacgcatgaagcacaaagctgacgccatggtagaaaaatttgggaaagcacttaactacgccgaagcggccctgagtttcatagagtgcggtaacgccatggagcagggtccaatggaatctaagtcaccctatactatgtacagcgagacggtcgaactgatccggtacgctatgcgcctaaagacacacagtggacctaatgctacccctgaggataagcagctcgccgccttgtgttataggtgtctcgcccttttgtattggcgtatgttccggcttaaaagggaccacgccgtgaagtatagcaaagcccttatcgattacttcaagaacagttcaaaggctgcccaggctccaagcccctggggcgcctccgggaagagtaccggaaccccctccccgatgtctcccaacccgagcccagcgtccagcgtagggtctcagggcagtctaagtaacgcttccgctctgtctccatccacgatcgtctctatcccccagcgaatccaccagatggcagccaaccacgtgagcatcaccaattcgattcttcactcctacgactactgggaaatggcagacaatttggctaaggaaaatcgggaatttttcaatgatcttgacctcctgatgggcccagtgaccttacactcttcaatggaacatctggtccagtattcacaacaggggctgcactggctgcggaactcggctcacttgagttag

SEQ ID NO: 127180 - DNA, 3681 bp, Artificial Sequence
  derived and/or modified sequence
atggacagtttcgacctggctctccttcaggaatgggatctggaatccctgtgtgtgtatgagcctgatcgaaatgcacttcggcggaaggaacgagagagaaggaaccaggagacccagcaggacgacgggacattcaacagctcttactctttgttctccgaaccatacaagaccaacaagggggatgaactgagtaatcgcatccaaaacactttgggtaactatgatgagatgaaagactttttgacagatagatcaaatcaatcacatctggtcggcgtgcccaagcccggcgtcccccagacacctgttaataagatcgacgaacattttgtggcggattccagggcacaaaatcaaccatctagcatctgctccacaaccacttccacaccagctgcggtgcccgtacagcaatccaagcgggggacaatgggctggcagaaggcagggcatccccccagcgacggacaacagcgcgccacccagcaagggagcctgaggaccctgttaggggatggcgttggaaggcaacagcctcgcgcgaagcaagtgtgcaacgtggaagttgggctccagactcaggagagacctccagctatggcagcgaagcattcaagttctggacactgtgtgcagaactttcccccttcccttgcttctaagccttctttagttcagcagaagcccactgcatatgttcggcccatggacgggcaggatcaggcccctgacgagtccccgaagttaaagagtagttccgaaacaagtgtgcactgtaccagttacaggggagtccctgcatctaaaccagagccagccagggctaaggccaaactctctaagttttcgattcccaaacagggagaggaatcaagatccggagagaccaattcttgtgttgaggaaatcattcgggagatgacctggcttcccccgctgagcgcaatacaggcccccgggaaggtggaacctactaagttcccattcccaaataaagactcccagttggtatcaagcggccataataatcccaagaagggagacgccgagccggaatcacctgactccggaacatccaacacatctatgctggaagacgacttgaagctcagcagcgacgaggaggagaacgaacagcaggcagcacagcgtacggccctgcgggcactgtctgacagcgctgtagtgcaacagccgaattgccgaacctccgtcccttctagtaagggcagctcatccagctcttcgagcggatctagttcttctagcagcgactccgagtcgtcctcaggaagtgattcggagacagagtcctcctcatctgagtctgaagggagcaagccaccgcatttttcatctccagaggccgagccggcatcatccaacaaatggcaattggacaagtggttgaacaaggttaacccccacaagcccccaatacttatccagaacgaaagtcatgggagtgagtcaaaccagtattacaatcccgttaaggaagatgtgcaggactgcggtaaggtccctgatgtgtgccaaccttctcttcgagaaaaggaaatcaagtctacctgcaaagaagaacaacgaccaagaaccgctaataaggccccgggttcaaagggtgttaaacagaagtcccctccggctgctgtggcagtagcggtgagtgcagccgcacctcctccagctgtcccatgcgcccccgcggagaacgcacccgctccagcacggagatctgctggcaagaagccaacgcggagaactgaacggacgtctgcaggagacggcgctaactgccacagacccgaagagccagcagctgcagatgctctcgggacttctgtcgttgtccccccagaaccaacaaagacgcgtccttgtggcaacaacagggcctcccaccgtaaggagctgcgctcatctgtcacctgtgagaagcgtcggacaaggggattatcccgaatagtgcctaaatccaaggagtttatcgagaccgagtccagttcctcaagttctagttctgacagcgatttagagtctgaacaggaggagtaccccctgtccaaagctcagaccgtcgccgcgagtgccagttccggaaatgatcagcgcctgaaagaggcggccgccaatggggggtcagggcccagagcccccgtgggcagcattaatgctcgtacgactagcgatattgccaaagaattagaggagcaattctacactctcgtcccctttgggcggaacgaattactgagtccgctgaaggactcggacgagatccggtctttatgggtaaagattgatttaacactgttatccaggattcctgagcacctgcctcaggaacctggtgttctctcagctcctgccaccaaagacagtgaaagcgccccaccttcccatacctcagacacaccagctgagaaagcactgcccaagtcaaagagaaaaaggaagtgtgataatgaggacgattaccgtgagattaaaaaatcccagggggaaaaggattctagttctcggttagcaacctctacaagcaatacactcagtgcaaatcactgtaacatgaatatcaacagcgtcgctatcccgattaacaaaaatgagaagatgttaagatccccaatctcgcctctttccgacgccagcaaacacaagtacacttctgaagatctgacaagttcctctaggcctaacggcaacagtctgtttacaagcgcttcctccagtaagaaacccaaggcagacagtcaactccagcctcatggcggagatcttaccaaggcggcccacaacaattcagagaacatcccattacataaatctcgtccccagacgaagccgtggtccccaggttctaacgggcaccgagactgcaaaagacaaaaattggtgttcgacgacatgccaagatctgctgactatttcatgcaggaggcgaaacgcatgaaacataaggccgacgctatggtggagaaatttggtaaggcacttaactatgcagaggctgccctgtctttcatagagtgtggaaacgctatggagcagggtcccatggagagtaagtctccctacacgatgtattccgaaacagttgaactgatcagatatgccatgcgactgaagacccatagtggacccaacgcaacaccggaagataaacagttggcagcgctctgttacaggtgcctggctctgctgtactggcggatgttccgtctgaagagggatcacgcagtgaagtacagcaaggccctcattgactactttaagaactctagtaaggccgctcaagctcctagcccctggggtgcgagcgggaagtctacaggcacgcccagtcctatgtcacccaatcccagtcccgccagctccgttgggagccaagggtccctgtctaatgcttccgccctgtcaccgtctacaattgtatccatccctcagaggattcaccagatggccgctaatcacgtgtccatcaccaactcaatcctgcactcatatgattactgggagatggcggacaatctggctaaggagaacagagagttcttcaacgacctcgacctactcatgggcccggtgactctccattcctccatggagcacttagttcagtattctcagcaggggttacactggctacgaaactctgctcatcttagctag

SEQ ID NO: 127181 - DNA, 300 bp, Artificial Sequence
  derived and/or modified sequence
atggactcgttcgacttggccctgctgcaggagtgggacctggagtctctgtgcgtgtatgaacctgatcggaacgcccttaggcgcaaagaaagagagagaagaaaccaagaaactcagcaggacgacgggaccttcaactcatcgtattctctattctcggagccctacaagactaataagggagatgagctgagcaacaggatccagaacacccttggcaactacgatgagatgaaggatttcctgaccgacagatctaaccagtcgcacctggtaggggtgccaaagccaggctag

SEQ ID NO: 127182 - DNA, 468 bp, Artificial Sequence
  derived and/or modified sequence
atggacagctttgacttagcccttcttcaggagtgggacttggagtccttgtgcgtctacgaacccgaccggaatgcactgcgccgaaaggagcgcgagagaaggaatcaggaaacacaacaagatgacgggactttcaattcatcgtactctctgttttctgaaccttataaaaccaacaaaggtgatgagctctctaatagaattcaaaacactctgggcaattacgacgagatgaaggactttttgactgatcgatctaatcaatcgcatttggtgggggtgccaaaaccaggagtgccgcaaacaccggttaataaaatagacgagcactttgtagcagacagcagggcccagaaccagccttccagcatctgcagcacaaccacttcaacaccagctgctgtgccagtgcaacaaagtaagcgaggtacgatgggatggcagaaagccgggcacccgccatag

SEQ ID NO: 127183 - DNA, 345 bp, Artificial Sequence
  derived and/or modified sequence
atggatagctttgatctggcactcctacaagaatgggacctggagagcctgtgtgtgtatgagcctgacagaaacgccctcaggcgcaaagagcgggagagacgcaatcaggaaacacagcaggatgacggaacgtttaatagcagctatagtttattttctgaaccctacaaaaccaacaaaggcgatgagctgtcaaataggatccagaacactctgggcaattacgatgaaatgaaggacttcctaacggaccgatccaaccagagtcacctggtgggggtaccaaagcctggagtaccacagaccccagttaacaagatcgatgaacatttcgtcgcttag

SEQ ID NO: 127184 - DNA, 486 bp, Artificial Sequence
  derived and/or modified sequence
atggatagctttgatttggcactgctccaggagtgggatctagagtcactgtgtgtctatgaacccgatagaaacgctctgcgacggaaagagagggagcgccggaatcaggagactcaacaggatgatggcacattcaacagctcatattctctgttcagcgaaccttacaagaccaataaaggcgatgaactgtccaacagaatccagaacacactgggaaactatgatgagatgaaggattttttgactgatagatctaatcagtctcatttggtaggggtgcctaagcctggcgtcccccagactcccgtaaataagattgatgaacactttgttgctgattccagagcccagaaccagccttcctccatatgtagtaccaccacttccactccagccgctgtgcctgttcagcagagcaagaggggtaccatgggctggcaaaaggctggacatccaccctcagacggccagcagcgctag

SEQ ID NO: 127185 - DNA, 2610 bp, Artificial Sequence
  derived and/or modified sequence
atggacagtttcgatctcgcgctgcttcaggaatgggatctagaatcactgtgcgtgtacgagcccgatcgcaacgctctgcgccggaaggagcgggaacgtcgaaatcaggaaactcagcaggacgatggcactttcaacagttcttacagtttgttcagcgaaccatacaaaaccaataaaggagatgagctctccaatcggatacagaacaccctggggaactacgacgagatgaaggactttctgacggaccgatccaatcagtctcacctggtcggcgtgccaaagccgggagtgccacagacacccgtgaacaagattgatgagcactttgtcgccgacagcagagcacagaatcagcccagcagcatctgctcaaccactaccagtacacccgcagctgtacccgtccagcaatccaagcgcggtaccatgggctggcaaaaagcaggacatccgccctcggatgggcagcaaagagcgactcagcagggctcattaagaactctgctaggcgacggcgtagggaggcagcagcccagagctaagcaagtctgcaacgtggaagtgggcctacagacccaggagagacctcctgctatggccgcgaagcactcatcttccggacattgcgttcagaacttccccccaagcctggcatctaagccgtccctggtgcagcagaaaccaaccgcttacgtgcgaccaatggacggccaggaccaagcccctgatgaatctcccaagcttaagtctagttccgagacctctgtacactgtacatcttacaggggagtgccggcctccaagcctgagccagcccgcgcaaaggctaaactgagcaagtttagtatacccaagcagggggaagagagccgctcaggggaaactaatagctgcgtcgaagagattatccgggagatgacgtggctcccccccctcagtgcaatacaggcacccggcaaagtcgaaccgaccaagttcccattccccaataaagactctcagctcgtgtctagcgggcacaataatcctaagaagggggacgctgagccagagtcacccgacagtggcacctctaacacatccatgctggaagacgatctgaaattatccagcgacgaagaagagaacgagcagcaggctgctcagagaaccgccctccgtgcactaagtgactccgccgtagtccagcaaccaaattgtcgcacgtctgtgccaagctccaaaggatcctctagtagttccagctccgggagtagtagttcctcctctgactcggagtcgtctagcggctctgactctgaaacagaatcctcctcttcagagtcagagggcagtaagcccccacacttctcctctcctgaagctgagccagcttcaagcaacaaatggcagctggataagtggctcaacaaggtgaacccacataaaccccccatcctgattcaaaatgaatcccatggttcagaaagcaaccaatattacaatcccgtgaaggaagacgtgcaggactgcggcaaagtgccggatgtgtgtcagccttccctgagagagaaagaaatcaagagcacttgcaaggaggagcaacggccccgaacagcaaacaaggcccccggcagtaagggtgttaaacagaagagccctccggcagctgtggccgtggcagtgagcgcagccgctcccccgcctgcggtaccctgcgctccagctgaaaatgccccagcccctgcccgcaggtccgcagggaagaagcctacgagacgtactgagcgcacaagcgccggcgatggggccaactgccaccgcccggaggagcctgccgccgctgacgctctcggcaccagtgtagtcgtccctccagaacctaccaagacccgtccctgcggaaacaatcgcgcatcccataggaaggagctaaggtcaagcgtcacctgcgagaagagacggaccagaggactgagccgcattgtgcccaagtctaaggagtttatcgagacagagagctcctcttcatcttcaagctctgattcagatctggaatccgagcaggaggagtatcccctgtccaaggcgcagaccgtggcggcctccgcttcttctggaaatgatcaacgacttaaggaagctgccgctaacggcgggtccggaccaagggctcccgtgggatcaatcaatgcacgcactaccagcgacatagctaaggagctggaggaacagttctacaccctggtgcctttcggccgaaatgaactgttgtcacctctcaaagactctgatgaaattagaagtctgtgggtcaagatagacctgacactgctgagcaggatcccagagcatcttccccaggagcccggcgtgctgtccgctcccgcaaccaaggatagcgaatcagcccccccttcccacaccagcgatactccagccgagaaggcgttgcctaagtctaagaggaaacggaaatgtgacaatgaggatgactatcgagagatcaagaagagccagggggaaaaagattctagttcccgcctcgctacatcaacctctaatacccttagtgctaaccactgtaatatgaatatcaacagcatgcaactgcccatctag

SEQ ID NO: 127186 - DNA, 390 bp, Artificial Sequence
  derived and/or modified sequence
atggacagtttcgatcttgccttgctgcaggagtgggatctggagtctttgtgcgtgtacgaacccgacaggaacgcattgcgcagaaaggaacgagaacgaaggaatcaggagactcagcaggatgacggtacatttaactcttcttactcgttattcagcgagccatacaagaccaataaaggcgatgaactcagcaatcgcatccaaaatactctgggcaattatgacgaaatgaaggatttcctgaccgacagaagcaaccagtctcacctggtcggcgtccctaaacccggtgtgcctcagacaccagtgaataagattgatgagcattttgtggctgattcccgcgcccagaatcaaccctcgagtatttgctccactacatag

SEQ ID NO: 127187 - DNA, 3681 bp, Artificial Sequence
  derived and/or modified sequence
atggacagctttgacctggccctgctgcaggagtgggacctggagagcctgtgtgtgtatgagccagacagaaatgccctgcggaggaaggagcgggagaggaggaaccaggagacccagcaggatgatggcaccttcaacagcagctacagcctcttcagcgagccctacaagaccaacaagggagatgagctgagcaaccgcatccagaacaccctgggcaactatgatgagatgaaggacttcctgacagacaggagcaaccagagccacctggtgggcgtgcccaagccaggagtgccccagacccctgtgaacaagattgatgagcactttgtggccgacagccgggcccagaaccagcccagcagcatctgcagcaccaccaccagcaccccagctgctgtgcctgtgcagcagagcaagaggggcaccatgggctggcagaaggccggccaccccccatctgatggccagcagagggccacccagcagggcagcctgcggaccctgctgggagatggagtgggccggcagcagccccgggccaagcaggtgtgcaatgtggaggtgggcctgcagacccaggagcggcccccagccatggccgccaagcacagcagcagcggccactgtgtgcagaacttcccccccagcctggccagcaagcccagcctggtgcagcagaagcccacagcctacgtgcggcccatggatggccaggaccaggccccagatgagagccccaagctgaagagcagcagcgagacctctgtgcactgcaccagctaccggggcgtgcctgccagcaagccagagcccgcccgggccaaggccaagctgagcaagttcagcatccccaagcagggcgaggagagccgctctggagagaccaacagctgtgtggaggagatcatccgggagatgacctggctgccccccctgagcgccatccaggcccctgggaaggtggagcccaccaagttccccttccccaacaaggacagccagctggtgagcagcggccacaacaaccccaagaagggagatgctgagcctgagagcccagacagcggcaccagcaacacctccatgctggaggatgacctgaagctgagcagtgatgaggaggagaatgagcagcaggccgcccagaggacagccctgcgggccctgagtgacagcgctgtggtgcagcagcccaactgcaggacctctgtgcccagcagcaagggcagcagcagcagcagcagcagcggcagcagcagcagcagcagtgacagcgagagcagcagcggcagtgacagcgagacagagagcagcagcagcgagagcgagggcagcaagccaccccacttcagcagccctgaggccgagcccgccagcagcaacaagtggcagctggacaagtggctgaacaaggtgaacccccacaagccacccatcctgatccagaatgaaagccacggcagcgagagcaaccagtactacaaccctgtgaaggaggatgtgcaggactgtgggaaggtgcctgatgtgtgccagcccagcctgcgggagaaggagatcaagagcacctgcaaggaggagcagaggcccaggacagccaacaaggcccctggcagcaaaggagtgaagcagaagagccccccagctgctgtggccgtggccgtgtctgctgctgcccctcctcctgctgtgccctgtgccccagcagaaaatgccccagccccagcccggcgctctgctgggaagaagcccaccaggagaacagagaggaccagcgctggagatggagccaactgccacaggcctgaggagcctgctgctgctgatgccctgggcacctctgtggtggtgcccccagagcccaccaagacccggccctgtggcaacaacagagccagccacaggaaggagctgcggagctctgtgacctgtgagaagaggaggacccggggcctgagccgcatcgtgcccaagagcaaggagttcatcgagacagagagcagcagcagcagcagcagcagtgacagcgacctggagagcgagcaggaggagtaccccctgagcaaggcccagacagtggccgccagcgccagcagtggaaatgaccagaggctgaaggaggccgccgccaacggcggcagcggcccccgggcccctgtgggcagcatcaatgcccggaccaccagtgacatcgccaaggagctggaggagcagttctacaccctggtgcccttcggcagaaatgagctgctgagccccctgaaggacagtgatgagatccgcagcctgtgggtgaagattgacctgaccctgctgagccgcatccctgagcacctgccccaggagcccggggtgctgagcgccccagccaccaaggacagcgagagcgccccacccagccacaccagtgacaccccagctgagaaggccctgcccaagagcaagaggaagaggaaatgtgacaatgaagatgactaccgggagatcaagaagagccagggcgagaaggacagcagcagccggctggccaccagcaccagcaacaccctgagcgccaaccactgcaacatgaacatcaacagcgtggccatccccatcaacaagaatgagaagatgctgcggagccccatcagccccctgagtgatgccagcaagcacaagtacaccagcgaggacctgaccagcagcagccggcccaatggaaacagcctcttcaccagcgccagcagcagcaagaagcccaaggctgacagccagctgcagccccacggcggggacctgaccaaggccgcccacaacaacagcgagaacatccccctgcacaagagccggccccagaccaagccctggagccctggcagcaatggccaccgggactgcaagaggcagaagctggtgtttgatgacatgcccaggtctgctgactacttcatgcaggaggccaagaggatgaagcacaaggcagatgccatggtggagaagtttgggaaggccctgaactatgcagaggccgccctgtccttcattgaatgtggaaatgccatggagcagggccccatggagagcaagagcccctacaccatgtacagcgagaccgtggagctgatccgctatgccatgaggctgaagacccacagcggccccaatgccaccccagaggacaagcagctggccgccctgtgctaccgctgcctggccctgctgtactggaggatgttccggctgaagagggaccatgctgtgaagtacagcaaggccctgattgactacttcaagaacagcagcaaggccgcccaggcccccagcccctggggcgccagcggcaagagcacaggcacccccagccccatgagccccaaccccagccctgccagctctgtgggcagccagggcagcctgagcaatgccagcgccctgagccccagcaccatcgtgtccatcccccagaggatccaccagatggccgccaaccacgtgtccatcaccaacagcatcctgcacagctatgactactgggagatggctgacaacctggccaaggagaaccgggagttcttcaatgacctggacctgctgatgggccctgtgaccctgcacagctccatggagcacctggtgcagtacagccagcagggcctgcactggctgaggaacagcgcccacctgtcctag

SEQ ID NO: 127188 - DNA, 300 bp, Artificial Sequence
  derived and/or modified sequence
atggacagctttgacctggccctgctgcaggagtgggacctggagagcctgtgtgtgtatgagccagacagaaatgccctgcggaggaaggagcgggagaggaggaaccaggagacccagcaggatgatggcaccttcaacagcagctacagcctcttcagcgagccctacaagaccaacaagggagatgagctgagcaaccgcatccagaacaccctgggcaactatgatgagatgaaggacttcctgacagacaggagcaaccagagccacctggtgggcgtgcccaagccaggatag

SEQ ID NO: 127189 - DNA, 468 bp, Artificial Sequence
  derived and/or modified sequence
atggacagctttgacctggccctgctgcaggagtgggacctggagagcctgtgtgtgtatgagccagacagaaatgccctgcggaggaaggagcgggagaggaggaaccaggagacccagcaggatgatggcaccttcaacagcagctacagcctcttcagcgagccctacaagaccaacaagggagatgagctgagcaaccgcatccagaacaccctgggcaactatgatgagatgaaggacttcctgacagacaggagcaaccagagccacctggtgggcgtgcccaagccaggagtgccccagacccctgtgaacaagattgatgagcactttgtggccgacagccgggcccagaaccagcccagcagcatctgcagcaccaccaccagcaccccagctgctgtgcctgtgcagcagagcaagaggggcaccatgggctggcagaaggccggccaccccccatag

SEQ ID NO: 127190 - DNA, 345 bp, Artificial Sequence
  derived and/or modified sequence
atggacagctttgacctggccctgctgcaggagtgggacctggagagcctgtgtgtgtatgagccagacagaaatgccctgcggaggaaggagcgggagaggaggaaccaggagacccagcaggatgatggcaccttcaacagcagctacagcctcttcagcgagccctacaagaccaacaagggagatgagctgagcaaccgcatccagaacaccctgggcaactatgatgagatgaaggacttcctgacagacaggagcaaccagagccacctggtgggcgtgcccaagccaggagtgccccagacccctgtgaacaagattgatgagcactttgtggcctag

SEQ ID NO: 127191 - DNA, 486 bp, Artificial Sequence
  derived and/or modified sequence
atggacagctttgacctggccctgctgcaggagtgggacctggagagcctgtgtgtgtatgagccagacagaaatgccctgcggaggaaggagcgggagaggaggaaccaggagacccagcaggatgatggcaccttcaacagcagctacagcctcttcagcgagccctacaagaccaacaagggagatgagctgagcaaccgcatccagaacaccctgggcaactatgatgagatgaaggacttcctgacagacaggagcaaccagagccacctggtgggcgtgcccaagccaggagtgccccagacccctgtgaacaagattgatgagcactttgtggccgacagccgggcccagaaccagcccagcagcatctgcagcaccaccaccagcaccccagctgctgtgcctgtgcagcagagcaagaggggcaccatgggctggcagaaggccggccaccccccatctgatggccagcagaggtag

SEQ ID NO: 127192 - DNA, 2610 bp, Artificial Sequence
  derived and/or modified sequence
atggacagctttgacctggccctgctgcaggagtgggacctggagagcctgtgtgtgtatgagccagacagaaatgccctgcggaggaaggagcgggagaggaggaaccaggagacccagcaggatgatggcaccttcaacagcagctacagcctcttcagcgagccctacaagaccaacaagggagatgagctgagcaaccgcatccagaacaccctgggcaactatgatgagatgaaggacttcctgacagacaggagcaaccagagccacctggtgggcgtgcccaagccaggagtgccccagacccctgtgaacaagattgatgagcactttgtggccgacagccgggcccagaaccagcccagcagcatctgcagcaccaccaccagcaccccagctgctgtgcctgtgcagcagagcaagaggggcaccatgggctggcagaaggccggccaccccccatctgatggccagcagagggccacccagcagggcagcctgcggaccctgctgggagatggagtgggccggcagcagccccgggccaagcaggtgtgcaatgtggaggtgggcctgcagacccaggagcggcccccagccatggccgccaagcacagcagcagcggccactgtgtgcagaacttcccccccagcctggccagcaagcccagcctggtgcagcagaagcccacagcctacgtgcggcccatggatggccaggaccaggccccagatgagagccccaagctgaagagcagcagcgagacctctgtgcactgcaccagctaccggggcgtgcctgccagcaagccagagcccgcccgggccaaggccaagctgagcaagttcagcatccccaagcagggcgaggagagccgctctggagagaccaacagctgtgtggaggagatcatccgggagatgacctggctgccccccctgagcgccatccaggcccctgggaaggtggagcccaccaagttccccttccccaacaaggacagccagctggtgagcagcggccacaacaaccccaagaagggagatgctgagcctgagagcccagacagcggcaccagcaacacctccatgctggaggatgacctgaagctgagcagtgatgaggaggagaatgagcagcaggccgcccagaggacagccctgcgggccctgagtgacagcgctgtggtgcagcagcccaactgcaggacctctgtgcccagcagcaagggcagcagcagcagcagcagcagcggcagcagcagcagcagcagtgacagcgagagcagcagcggcagtgacagcgagacagagagcagcagcagcgagagcgagggcagcaagccaccccacttcagcagccctgaggccgagcccgccagcagcaacaagtggcagctggacaagtggctgaacaaggtgaacccccacaagccacccatcctgatccagaatgaaagccacggcagcgagagcaaccagtactacaaccctgtgaaggaggatgtgcaggactgtgggaaggtgcctgatgtgtgccagcccagcctgcgggagaaggagatcaagagcacctgcaaggaggagcagaggcccaggacagccaacaaggcccctggcagcaaaggagtgaagcagaagagccccccagctgctgtggccgtggccgtgtctgctgctgcccctcctcctgctgtgccctgtgccccagcagaaaatgccccagccccagcccggcgctctgctgggaagaagcccaccaggagaacagagaggaccagcgctggagatggagccaactgccacaggcctgaggagcctgctgctgctgatgccctgggcacctctgtggtggtgcccccagagcccaccaagacccggccctgtggcaacaacagagccagccacaggaaggagctgcggagctctgtgacctgtgagaagaggaggacccggggcctgagccgcatcgtgcccaagagcaaggagttcatcgagacagagagcagcagcagcagcagcagcagtgacagcgacctggagagcgagcaggaggagtaccccctgagcaaggcccagacagtggccgccagcgccagcagtggaaatgaccagaggctgaaggaggccgccgccaacggcggcagcggcccccgggcccctgtgggcagcatcaatgcccggaccaccagtgacatcgccaaggagctggaggagcagttctacaccctggtgcccttcggcagaaatgagctgctgagccccctgaaggacagtgatgagatccgcagcctgtgggtgaagattgacctgaccctgctgagccgcatccctgagcacctgccccaggagcccggggtgctgagcgccccagccaccaaggacagcgagagcgccccacccagccacaccagtgacaccccagctgagaaggccctgcccaagagcaagaggaagaggaaatgtgacaatgaagatgactaccgggagatcaagaagagccagggcgagaaggacagcagcagccggctggccaccagcaccagcaacaccctgagcgccaaccactgcaacatgaacatcaacagcatgcagctgcccatctag

SEQ ID NO: 127193 - DNA, 390 bp, Artificial Sequence
  derived and/or modified sequence
atggacagctttgacctggccctgctgcaggagtgggacctggagagcctgtgtgtgtatgagccagacagaaatgccctgcggaggaaggagcgggagaggaggaaccaggagacccagcaggatgatggcaccttcaacagcagctacagcctcttcagcgagccctacaagaccaacaagggagatgagctgagcaaccgcatccagaacaccctgggcaactatgatgagatgaaggacttcctgacagacaggagcaaccagagccacctggtgggcgtgcccaagccaggagtgccccagacccctgtgaacaagattgatgagcactttgtggccgacagccgggcccagaaccagcccagcagcatctgcagcaccacctag

SEQ ID NO: 127194 - DNA, 3914 bp, Artificial Sequence
  derived and/or modified sequence
gagctcgctgctctctcttgagtgtgcctgcgcgcaagccggggagcggcgcgcgggcggcccgagcctcggcggcggcggtagcggcggcggcgacgctgacacctcccaccatggacagcttcgacttagccctgctccaggaatgggacctcgagtcactgtgtgtctatgaaccagatagaaatgcattacggaggaaagaacgagaaagaagaaatcaagaaactcaacaggatgatggcacgtttaattctagttactctctcttcagtgagccctacaagactaacaagggggatgaactctccaaccggatccagaacactttaggcaattatgatgaaatgaaagactttttaactgatagatccaatcagagtcatctcgttggagttcccaaacctggggttcctcagactcctgtgaacaagatcgatgaacattttgttgcagattcaagagcccagaaccagccctcgtctatctgtagcactacaacttccacaccagcagctgtccccgtgcagcagagtaagagaggcactatgggctggcagaaggctgggcacccaccctctgacggccaacagagagcaacacaacagggctctctcaggaccttgcttggagatggtgttggcagacagcagcctcgggccaaacaagtgtgcaatgtggaggtgggccttcagacccaggagaggccacctgccatggcggccaagcacagcagcagcggacactgtgttcagaactttcctccatccctagcttcaaaacccagcctggtccagcagaaaccgaccgcgtatgtgaggccaatggacggccaagatcaggcccctgatgagtctcctaagctgaagtcgtcttcggaaaccagcgtgcactgcacatcatacaggggagtccctgccagcaagccggagcctgccagagccaaggccaagctctccaagttcagcatccccaagcagggggaggagagtagatctggagaaaccaacagctgtgttgaagaaataatccgggagatgacctggcttccaccactttctgctattcaagcacctggcaaagtggaaccaaccaaatttccatttccaaataaggactctcagcttgtatcctctggacacaataatccaaagaaaggtgatgcagagccagagagtccagacagtggcacatcgaatacatcaatgctggaagatgaccttaagctaagcagtgatgaagaggagaatgaacagcaggcagctcagagaacggctctccgcgctctctctgacagcgccgtggtccagcagcccaactgcagaacctcggtgccttccagcaagggcagcagcagcagcagcagcagcggcagcagcagctcctccagcgactcagagagcagctccggatctgactcggagaccgagagcagctccagcgagagtgagggcagcaagcccccccacttctccagccccgaggctgaaccggcatcctctaacaagtggcagctggataaatggctaaacaaagttaatccccacaagcctcctattctgatccaaaatgaaagccacgggtcagagagcaatcagtactacaacccggtgaaagaggacgtccaggactgtgggaaagtccccgacgtttgccagcccagcctgagagagaaggagatcaagagcacttgcaaggaggagcaaaggccaaggacagccaacaaggcccctgggagtaaaggcgtgaagcagaagtccccgcccgcggccgtggccgtggcggtgagcgcagccgccccgccacccgcagtgccctgtgcgcccgcggagaacgcgcccgcgcctgcccggaggtccgcgggcaagaagcccaccaggcgcaccgagaggacctcagccggggacggcgccaactgccaccggcccgaggagcccgcggccgcggacgcgctggggacgagcgtggtggtccccccggagcccaccaaaaccaggccctgtggcaacaacagagcgagccaccgcaaggagctgcgctcctccgtgacctgcgagaagcgccgcacgcgggggctaagcaggatcgtccccaaatccaaggagttcattgagacagagtcgtcatcttcatcctcctcctcggactccgacctggagtccgagcaggaggagtaccctctgtccaaagcacagaccgtggctgcctctgcctcctccgggaatgatcagaggctgaaggaggccgctgccaacgggggcagtggtcctagggcccctgtaggctccatcaacgccaggaccaccagtgacatcgccaaggagctggaggagcagttctacacactggtcccctttggccggaacgaacttctctcccctctaaaggacagtgatgagatcaggtctctctgggtcaaaatcgacctgaccctcctgtccaggatcccagaacacctgccccaggagccaggggtattgagcgcccctgccaccaaggactctgagagcgcaccgcccagccacacctcggacacacctgcagaaaaggctttgccaaaatccaagaggaaacgcaagtgtgacaacgaagacgactacagggagatcaagaagtcccagggagagaaagacagctcttcaagactggccacctccaccagtaatactttgtctgcaaaccactgcaacatgaacatcaacagtgtggcaataccaataaataaaaatgaaaaaatgcttcggtcgcccatctcacccctctctgatgcatctaaacacaaatacaccagcgaggacttaacttcttccagccgacctaatggcaacagtttgtttacttcagcctcttccagcaaaaagcctaaggccgacagccagctgcagcctcacggcggagacctcacgaaagcagctcacaacaattctgaaaacattcccctccacaagtcacggccgcagacgaagccgtggtctccaggctccaacggccacagggactgcaagaggcagaaacttgtcttcgatgatatgcctcgcagtgccgattattttatgcaagaagctaaacgaatgaagcataaagcagatgcaatggtggaaaagtttggaaaggctttgaactatgctgaagcagcattgtcgtttatcgagtgtggaaatgcaatggaacaaggccccatggaatccaaatctccttatacgatgtattcagaaacagtagagctcatcaggtatgctatgagactaaaaacccactcaggccccaatgccacaccagaagacaaacaactggctgcattatgttaccgatgcctggccctcctgtactggcggatgtttcgactcaaaagggaccacgctgtaaagtattcaaaagcactaatcgactatttcaagaactcatctaaagccgcccaagccccatctccgtggggggccagtggaaagagcactggaaccccatcccccatgtctcccaacccctctcccgccagctccgtggggtctcagggcagcctctccaacgccagcgccctgtccccgtcgaccatcgtcagcatcccacagcgcatccaccagatggcggccaaccacgtcagcatcaccaacagcatcctgcacagctacgactactgggagatggccgacaacctggccaaggaaaaccgagaattcttcaacgacctggatctgctcatggggccggtcaccctgcacagcagcatggagcacctggtccagtactcccaacagggcctgcactggctgcggaacagcgcccacctgtcatagggacctcaccctggggccagagtgggctctggtctccacagatggctcaacgtttttggacactgtgctactgaaactcccagccacagcatttatcagactgcggtgaacatttcctca

SEQ ID NO: 127195 - DNA, 545 bp, Artificial Sequence
  derived and/or modified sequence
agaaagctcgccagcgagaagagagctccacgctcagcctcagaagaaagacgttcaacgacttactggggagagaaagaaaaggaacgggagctgagagaaagtttcacacatatgatttagaccttacgatcagccattgtttacatcgggaagcatcaatccggagtaactggcaagcagcgcgcgggcggcccgagcctcggcggcggcggtagcggcggcggcgacgctgacacctcccaccatggacagcttcgacttagccctgctccaggaatgggacctcgagtcactgtgtgtctatgaaccagatagaaatgcattacggaggaaagaacgagaaagaagaaatcaagaaactcaacaggatgatggcacgtttaattctagttactctctcttcagtgagccctacaagactaacaagggggatgaactctccaaccggatccagaacactttaggcaattatgatgaaatgaaagactttttaactgatagatccaatcagagtcatctcgttggagttcccaaacctgggg

SEQ ID NO: 127196 - DNA, 551 bp, Artificial Sequence
  derived and/or modified sequence
aaacggtttgtttggggcgctgctgcgggcggcacagctcactctccccgcgcctgggcggccggggaattcccccgcacccacccgggtccgccgcccgcgggagcgcccagcagggtcaagtggattctgggccgcgggagaacgcgcgggcggcccgagcctcggcggcggcggtagcggcggcggcgacgctgacacctcccaccatggacagcttcgacttagccctgctccaggaatgggacctcgagtcactgtgtgtctatgaaccagatagaaatgcattacggaggaaagaacgagaaagaagaaatcaagaaactcaacaggatgatggcacgtttaattctagttactctctcttcagtgagccctacaagactaacaagggggatgaactctccaaccggatccagaacactttaggcaattatgatgaaatgaaagactttttaactgatagatccaatcagagtcatctcgttggagttcccaaacctggggttcctcagactcctgtgaacaagatcgatgaacattttgttgca

SEQ ID NO: 127197 - DNA, 559 bp, Artificial Sequence
  derived and/or modified sequence
ctttcgttgcagcgcgcgggcggcccgagcctcggcggcggcggtagcggcggcggcgacgctgacacctcccaccatggacagcttcgacttagccctgctccaggaatgggacctcgagtcactgtgtgtctatgaaccagatagaaatgcattacggaggaaagaacgagaaagaagaaatcaagaaactcaacaggatgatggcacgtttaattctagttactctctcttcagtgagccctacaagactaacaagggggatgaactctccaaccggatccagaacactttaggcaattatgatgaaatgaaagactttttaactgatagatccaatcagagtcatctcgttggagttcccaaacctggggttcctcagactcctgtgaacaagatcgatgaacattttgttgcagattcaagagcccagaaccagccctcgtctatctgtagcactacaacttccacaccagcagctgtccccgtgcagcagagtaagagaggcactatgggctggcagaaggctgggcacccaccctctgacggccaacagaga

SEQ ID NO: 127198 - DNA, 543 bp, Artificial Sequence
  derived and/or modified sequence
aaaccgcaacggagagcaggtccgggtggaagaggtttcctccgcgccgccgctttatttcgctgaacttgcgggctccagagaccttaaacgcgcgcgggcggcccgagcctcggcggcggcggtagcggcggcggcgacgctgacacctcccaccatggacagcttcgacttagccctgctccaggaatgggacctcgagtcactgtgtgtctatgaaccagatagaaatgcattacggaggaaagaacgagaaagaagaaatcaagaaactcaacaggatgatggcacgtttaattctagttactctctcttcagtgagccctacaagactaacaagggggatgaactctccaaccggatccagaacactttaggcaattatgatgaaatgaaagactttttaactgatagatccaatcagagtcatctcgttggagttcccaaacctggggttcctcagactcctgtgaacaagatcgatgaacattttgttgcagattcaagagcccagaaccagccctcgtctatctgtagcactac

SEQ ID NO: 127199 - DNA, 3681 bp, Artificial Sequence
  derived and/or modified sequence
atggacagcttcgacctggccctgctgcaggagtgggacctggagagtctgtgcgtatatgagcctgatcgcaatgcccttagaaggaaagaaagggagcgtagaaatcaggagacacaacaggacgatggtacattcaactcatcctactcgctcttttcagagccatacaaaaccaataaaggggatgagttgtcgaataggattcagaacacactaggaaattatgacgaaatgaaggacttcctcacagataggtccaaccagtcccatttagttggcgtccccaagcctggggttccccagaccccggtgaacaaaatcgatgaacactttgtggctgacagcagagcccagaatcagcccagctctatttgcagcacaacaacatcaacccctgccgccgtgcccgtgcagcagagcaagcgaggaactatggggtggcagaaggcaggccaccctccctcagacggccagcaaagggcaacccagcagggatctctacgcaccttgttaggcgatggagtgggtagacagcaacctcgtgctaaacaagtttgcaatgtggaggttggacttcagacccaggaacggcctcccgccatggccgctaaacacagcagctccgggcactgtgtgcagaatttcccccctagcctagcatcaaaaccatcgctggtgcagcagaagcctactgcttacgtgaggcccatggacggacaagatcaagcccccgatgagtctcccaaactcaagtccagctcagagacgtcggtgcactgcacctcttaccggggagtcccagcaagcaaaccagagcccgctcgggccaaggctaagctgagtaagttcagtattcccaaacagggagaagaatcccgcagcggcgaaaccaactcttgtgtggaggagattattcgagagatgacttggctgccccctctctcagctatccaagcccctggaaaagtggaaccaaccaagtttccgttcccaaacaaggactctcagttagtgtcgtctggtcataataatcctaaaaaaggggacgccgagcccgagtcacctgactcgggaactagtaacacttcaatgctcgaagacgacctgaaactcagtagcgacgaagaggagaacgaacaacaggccgctcagagaaccgctctgcgggcccttagcgactctgccgtcgtgcagcagcctaactgcaggacttccgtcccgagcagtaaaggatcgtcctcgtcgtcctcctcaggctcgtctagttcaagctcggatagtgaatcctcctccgggtcagatagtgagaccgaatcctccagcagtgagtctgaaggaagcaagcctccacatttctcctcccccgaggccgagcctgcgagcagcaataaatggcagctcgacaagtggctcaataaagtgaatccccacaagcctcccattctgattcagaacgagtcccacggctctgaaagcaatcaatactacaaccctgtcaaagaggacgttcaagactgtggtaaggtgcccgatgtatgccagccctccctgagggagaaagaaattaaatcaacatgcaaagaggagcagcgcccacgaaccgccaataaggcccctgggtcgaagggggttaaacagaaatcgccccctgcagccgtggcagttgccgtatctgctgccgcaccccctccggccgtgccatgcgcgcccgccgagaacgccccagctcctgctaggcggagtgctggaaaaaagcctacccggagaactgaacgtacctctgccggcgacggcgcaaattgtcaccggcctgaggaacctgccgcagcagacgcccttggaacatcggtcgttgtcccaccagagcccacaaagacgcggccctgcggcaataaccgcgctagccacagaaaggaattacgcagttccgtgacatgcgagaagaggaggacacgcggcttgagtaggatcgtgccaaaatcaaaggagttcattgagacagagtcctcctcttcttcctcctcgtccgattctgatttggagagtgaacaggaggagtatcctttgagtaaggctcagaccgtggcggcgtctgccagttctggtaacgatcaaagacttaaggaagccgcggcaaacggagggtcgggccctcgtgcacccgtcggttctattaatgcccgcacaacttccgatatagccaaagagttggaggaacaattctatacactggtgccatttgggcgcaacgagcttctgagtcctctgaaagattccgatgagataaggtcactgtgggttaaaatcgacttgaccttgctgtctaggatccccgaacatttgccccaggagccaggcgtactgagcgccccagccacaaaagacagtgaaagtgcccctccatctcacacatctgatacccctgcggaaaaagctctacccaagtctaagcgaaagcggaagtgcgacaatgaggacgactaccgcgagataaagaaaagtcagggcgagaaggatagcagctccaggcttgcaacttccacaagtaacactttgagtgccaatcactgtaatatgaacatcaacagcgttgcaattcccatcaataaaaacgaaaaaatgctgcgatcaccgataagccccctgagcgatgcgtctaaacacaagtacaccagtgaggacttgacctcatccagcaggccaaatgggaactctttgtttacttcagcaagctcatcaaagaagcccaaggccgactcccaactgcaacctcacggtggagatttgaccaaagccgctcacaataattccgaaaacattccacttcataaaagcaggccacaaactaaaccatggtccccaggctctaacggccatcgcgattgtaaaagacagaagctggtatttgacgacatgccccgcagcgctgactactttatgcaggaggcaaagcgcatgaaacacaaagctgacgcgatggtggaaaagttcggaaaagcattgaattatgctgaggcagctctctccttcattgagtgtgggaatgccatggagcagggacctatggaaagtaagtccccttacaccatgtattcagaaacagtggagcttattaggtatgctatgcgactaaaaactcacagcggccctaacgccactcctgaggataagcagcttgcagcactgtgctacagatgcctggctcttctctattggcggatgttccggctgaagcgcgatcacgctgttaagtacagcaaggctttgattgattattttaaaaattcctcaaaggctgcacaagcccctagtccgtggggagcctcaggaaagtccacaggcactcccagccccatgagcccaaatccatccccagccagttccgtgggctcccaaggatcattgtctaacgccagcgccctctccccttctactattgtgtcaatcccacagcgaatccaccagatggctgctaatcacgtgtctataaccaattccattttacattcgtacgattactgggaaatggccgataacctagcgaaagaaaaccgggagttcttcaacgaccttgacctgttgatgggccctgtcacactacactctagtatggagcacctggtacagtactctcagcagggactgcattggctgaggaacagcgctcacttgtcatag

SEQ ID NO: 127200 - DNA, 3681 bp, Artificial Sequence
  derived and/or modified sequence
atggacagcttcgacctggccctgctgcaggagtgggacctggagtctctttgcgtttatgagcccgatagaaatgcgctgcggcgcaaggagagggaacggcggaatcaggagacacagcaggatgatggcaccttcaactcctcatactctctgttctctgaaccatacaagaccaacaagggagatgagttgagcaacagaatccagaatactcttggtaactacgatgagatgaaggacttcctaactgaccgatcgaaccagtcccacctcgtgggggtccccaagcccggggtcccacagacacccgtcaacaagattgacgaacacttcgtggccgatagtcgcgcgcaaaatcaaccctcatctatttgttcgactactacctctactccagctgcagtgccggtacaacagagtaaacgtggcaccatgggttggcagaaagcggggcaccctccctcggacggccaacagcgcgcgacacaacagggttcactgcggactctgctgggcgatggtgtgggacgacaacagccaagagcgaagcaggtttgtaacgtcgaggttggtctccaaacacaggagagaccacccgctatggccgctaaacattcatcctccgggcactgcgttcagaactttccaccctccctggcctccaaaccatccctggtacagcagaagcctactgcgtatgtcagacctatggacggacaagatcaagcccctgatgaatctccaaagctgaaatcatctagcgaaacttcggtgcactgcacatcctacagaggggtgcccgccagtaagcctgaacccgccagggcgaaagccaagctgagtaagttctccataccaaagcagggggaagaaagcagatccggagagacgaattcatgtgtggaggagattattcgcgaaatgacctggctgcctccgctgagtgcaatccaggccccaggcaaggtagagccaactaaattcccatttccaaacaaagatagccagctggtgtcatcaggccataacaatccaaagaagggggatgccgagcccgagagcccagattccggaacgagcaacacgagtatgctggaggacgatcttaaacttagttctgatgaagaggagaacgaacagcaggccgctcagagaacagccttgagagcgctcagcgacagtgcagtggttcagcaacccaactgtcggacaagcgttccgtcttcaaagggctcaagctcatcatcatcctccggatctagtagcagttcgtcagatagcgaatcatcatccggaagcgattcagagaccgagagctcctccagcgaatctgagggatctaaaccacctcacttttcaagtcccgaggccgaacccgcttcatccaacaagtggcagctagacaagtggctgaacaaggtgaatccacacaagcctccaatacttattcagaacgaatcgcacggttcagagtcaaaccaatactacaacccagtcaaagaggatgtgcaggactgcggtaaagtcccagacgtgtgccagccatccttgcgcgaaaaggagattaaatcaacctgcaaagaagaacagaggccaagaactgcaaacaaggcgcccggttctaagggggtgaaacagaaatccccccccgcagcagtggcagtggcagtcagcgccgcagcgccgccacctgccgttccttgcgccccagcagaaaacgcaccagcaccggccagacggtcagcaggaaagaagcccaccagacgcaccgagagaactagcgctggggacggcgccaattgccatcggcccgaggaacccgcagccgcggatgccttgggcacaagcgtcgtcgttccgcccgagcctaccaagaccaggccatgtggaaacaatcgagcttcacaccgaaaagagctcagaagtagcgtcacttgcgaaaagcgacgtacgcggggactttcacgtatcgtgcccaagtctaaagagtttatcgagactgagtcatcatcatcttcttcttcaagcgattccgacctcgagagtgaacaggaggagtaccccctcagtaaggcacagaccgtggctgctagtgcctcatcagggaatgaccagcggcttaaagaggcagctgcaaatggtggatcaggacctcgggctccggtgggctccatcaatgctcgcaccacctcagacattgctaaggaactggaggaacagttctatacactggtccctttcgggcgcaatgagttactttctccattgaaggatagcgatgagatccgatctttgtgggttaaaatcgatctcacattgctgtcgcgcatccctgaacacctgccacaggaaccaggagtcttaagcgccccagcaacaaaggatagtgagtctgctcccccaagtcacacatcggacacaccagcggaaaaagctctcccaaagtctaaaagaaagagaaagtgcgacaatgaagacgactatcgagagataaaaaaaagtcagggcgagaaagacagcagcagccgcctggccacctctacctccaacacgctcagcgcgaaccactgtaatatgaatatcaacagcgttgccattccaatcaacaagaacgagaagatgctgaggtcacctatatctcccctctctgatgcttcaaagcataagtacacttctgaggacctgactagttcatcaagacctaacggaaactcgctctttacatctgccagctcatccaaaaaacctaaagccgactctcagctgcagcctcacggtggtgacctcaccaaagcagctcataataattcagaaaatatccctctccacaagagcaggccacagaccaaaccttggtcacccggatctaacgggcatagagactgtaagagacagaaactggttttcgacgacatgccgcgttcagcagattattttatgcaggaggcaaagcgcatgaagcacaaagcggacgcaatggtggagaaatttgggaaggcccttaactatgccgaagctgctctatcttttattgaatgtggaaatgccatggaacagggccccatggagtctaagtccccttatacaatgtatagcgagactgtggagcttattagatacgctatgcgcctcaagacccactccggcccgaacgccactccggaggacaagcaactggcagctttgtgctacaggtgtctggctctcctgtactggcgcatgtttaggctgaagcgagaccatgccgttaagtactctaaagccttaatcgactattttaaaaactcaagtaaggctgcacaggctccgagtccttggggggcaagtggaaaatcaaccggcacaccgtccccaatgtccccaaatcctagtccagcatcttctgtgggctctcaagggagcctgtctaatgccagcgcactgtctccgtctacgatagtctcaatccctcagagaattcatcaaatggccgccaaccacgtgagtattacaaacagtatactccattcgtacgattactgggagatggctgataatttagcaaaagagaaccgggagtttttcaatgatctcgacttgcttatggggccagtgaccctacactcaagtatggagcatctggtccagtatagccagcaggggcttcactggctacggaatagtgcccacctgtcttag

SEQ ID NO: 127201 - DNA, 300 bp, Artificial Sequence
  derived and/or modified sequence
atggacagcttcgacctggccctgctgcaggagtgggacctggagtccctgtgcgtctatgagcctgaccgcaatgccttgcgtcggaaagagcgagaacgtaggaaccaggagacccagcaagacgatgggaccttcaacagctcttactctttgttttcagagccctataagactaacaagggcgatgagcttagcaacagaatccaaaataccttaggaaactacgacgagatgaaggatttcttaaccgaccgcagcaaccagtctcacttggttggcgtgcccaagcccgggtag

SEQ ID NO: 127202 - DNA, 468 bp, Artificial Sequence
  derived and/or modified sequence
atggacagcttcgacctggccctgctgcaggagtgggacctggagtccctgtgcgtttatgaacctgacagaaacgcactgcggcggaaggagcgagaacgtaggaatcaagagacccagcaagatgatgggacttttaacagcagctactcacttttcagtgaaccctacaaaaccaataaaggagacgagctatccaatcggatacagaatactctggggaactacgacgaaatgaaagacttcttgactgaccggagcaaccaatctcacttagtcggggtgcctaaaccaggtgtgcctcagacacctgtcaataagattgacgagcacttcgtggccgattctagggcacagaatcagcccagctcaatttgtagtaccacaacaagtaccccggccgccgttccagtccagcagagcaagagagggacgatgggatggcaaaaggccggccatcccccctag

SEQ ID NO: 127203 - DNA, 345 bp, Artificial Sequence
  derived and/or modified sequence
atggacagcttcgacctggccctgctgcaggagtgggacctggagtctctctgtgtttacgaacccgatagaaacgctttgaggaggaaagagagagagaggaggaaccaggagactcagcaggatgatggcaccttcaattcatcctattcgctgttttcagaaccttataagacaaataagggggacgagctctcgaatcgtattcagaacaccctgggtaattacgacgagatgaaggatttcctgaccgatcggtcaaaccagtcccatttagtaggcgttcccaagcccggcgtgccccagacgcccgtaaataagatagacgaacactttgtcgcctag

SEQ ID NO: 127204 - DNA, 486 bp, Artificial Sequence
  derived and/or modified sequence
atggacagcttcgacctggccctgctgcaggagtgggacctggagtcactgtgtgtgtacgagcctgatagaaatgccctccggaggaaggaacgcgaaaggcgcaaccaggagacccaacaggacgatggcacatttaattcttcgtattccctgttcagtgagccttataaaaccaataagggggatgagctctctaatcgcatacagaatactctggggaattatgatgagatgaaggactttctgactgacagatcaaatcagagtcacctagtgggagtgcccaagcccggcgtgccccaaacccctgtaaacaagattgacgagcacttcgtcgccgattcgcgagcacagaatcagccctcgagtatctgctctaccacaacctctactcctgccgccgtgccagtgcagcagtccaagagagggaccatggggtggcagaaagccggacacccaccctcggacggtcagcagcggtag

SEQ ID NO: 127205 - DNA, 2610 bp, Artificial Sequence
  derived and/or modified sequence
atggacagcttcgacctggccctgctgcaggagtgggacctggagagcctgtgtgtttacgaacctgatcggaatgcccttaggcgcaaggaaagagagagaagaaatcaggagacacagcaggacgacgggacctttaactcatcttattctttgtttagcgaaccctataaaacgaataaaggagacgaactgtccaaccgaatacagaacacactaggtaattacgatgaaatgaaagatttcctgactgacaggtctaatcagagccacctcgttggggtccccaaaccgggagtacctcaaactccggtaaacaagatcgatgaacacttcgttgcagattcccgtgcccagaaccagccctcgtctatctgctcaaccacaactagcactcccgctgctgtgcctgttcaacaatctaaacgtggaacgatgggttggcaaaaggcaggccatccacctagcgatgggcagcaaagggcaactcagcagggcagtctcagaactctgttaggggacggtgtaggcagacaacagcccagagccaaacaggtatgcaacgtagaggtcggtctccagacccaggaacggccaccggcgatggctgccaaacattcctcctcaggtcactgcgttcagaatttccctccttcgctcgctagcaaacctagccttgtgcagcagaaacccactgcatacgtgcgcccaatggatggccaggatcaggctccagatgagtctccaaagctgaaatcatccagcgaaacgtcagtgcattgtacatcctatcggggggtgcccgcttcgaagcctgagcctgcaagggctaaagccaaactgtctaaattcagcatccctaaacagggagaagagtctagatcaggagaaaccaatagctgcgttgaagaaataattagagagatgacttggctacccccattgtcggccatccaggcccctggaaaggtcgagccaacaaaattcccattccccaataaagattcgcagctggtatcctcaggccacaataatcctaagaagggcgatgccgaacccgaatcccccgattccggcaccagcaacacatccatgctcgaagatgatctgaagctgtctagtgacgaagaggaaaatgagcagcaggcagcccagcggaccgcgttacgagcactttcggattccgccgtagtgcagcagcctaattgtagaacctcagtaccaagctcaaaaggaagctcctcaagtagcagttcagggagtagctcaagctcatccgactcggagtcttcatcaggctctgattctgagacagagtccagctcaagtgaatccgagggaagcaagcccccgcatttttcctccccagaggccgaaccagctagctctaacaaatggcagctcgataaatggctgaataaggttaaccctcacaaacccccgattctgatccagaatgaatcccatgggtcagaatctaatcaatactacaatcctgtgaaggaggatgttcaggattgtggcaaggtgcccgacgtgtgccagccaagcctccgcgagaaggagatcaagtcaacgtgcaaagaagaacagcggcctcggaccgcaaataaggcccctggatccaaaggcgtgaaacagaaaagtccaccagccgctgtggcagttgcagtaagcgctgctgctcccccaccagccgtcccatgcgccccggccgaaaacgcccccgcgcctgctagacggtccgcgggcaaaaaacctacacggcgtacagagcggacatccgccggagatggtgccaactgccatcgaccagaggagcctgccgccgccgacgccctgggcaccagtgtcgtggtcccgccagaacctactaagactcgcccttgcggtaataaccgcgcttcgcaccgaaaggagctgcgctccagcgtaacatgcgagaaacggcgcaccaggggactgtcccgaattgttccaaagtccaaggagtttattgagacggaatctagctcgagctcctcctcatctgatagcgacttagagtccgaacaggaggagtatcccctgagcaaggcccagactgtggcagctagcgcaagcagtggaaatgaccaacgccttaaggaagctgcagcgaacgggggctctggccctagggcccctgtgggatccataaatgcccggaccacgagcgacatagcaaaggagctggaagagcaattttacacccttgtgcccttcggacgtaacgagttgctctcccctctgaaggattctgacgagatccgctctctgtgggtgaagattgacctgaccctgctgtctcgcattccagagcacctgccgcaggaacccggtgtgctttccgctcccgcaaccaaggactctgagagcgcacctcctagccatacctccgacactccggccgagaaagccctccctaaaagtaaaagaaaaaggaagtgcgataacgaggatgattatcgcgaaataaaaaagagtcagggggaaaaagacagctctagtaggctggctacctcgacctctaacaccctgtcggccaaccactgcaacatgaatatcaattctatgcagctccccatttag

SEQ ID NO: 127206 - DNA, 390 bp, Artificial Sequence
  derived and/or modified sequence
atggacagcttcgacctggccctgctgcaggagtgggacctggagagcctctgcgtgtacgaacccgatagaaacgcgcttcggagaaaagagcgggagaggcggaaccaagaaacccaacaagatgatggaacttttaatagctcctattcactgttctccgagccttacaagacaaataaaggcgacgagctatccaaccggattcagaatacattgggcaactacgacgagatgaaagactttctgaccgacagatctaatcagagccatctggtgggtgtaccaaaaccgggcgtcccccagacccctgtcaacaaaattgatgagcattttgttgccgattcacgggcgcaaaaccagccctccagcatctgcagtacaacctag

SEQ ID NO: 127207 - DNA, 3681 bp, Artificial Sequence
  derived and/or modified sequence
atggattccttcgacctcgcgctcttacaagaatgggatctggaaagtctatgtgtgtatgaacccgatcggaacgctttgcgcaggaaggagcgagaaagacgaaaccaggagacgcagcaagacgatgggacctttaattcaagctattcattgttttccgaaccatataaaactaacaagggtgatgaactctccaacagaatccagaatactttgggcaactacgacgagatgaaagacttcctcactgatcggagcaaccagtcccacctggttggtgtccccaaaccaggagtgcctcagacccccgttaataagattgatgaacactttgttgccgatagccgggctcaaaatcaaccgagttctatatgtagcacaaccacttcaacccctgctgctgtgcctgtgcagcagtccaaaaggggtaccatggggtggcagaaggcaggtcaccccccttccgatggacagcagagagcaactcagcagggtagcctgagaactctgttgggggacggagtggggcgacaacagccccgtgccaagcaggtgtgcaacgtcgaagtgggcttacagacccaggaacgccctcccgctatggcagcaaagcactcctcttccggacactgtgtgcagaacttcccaccatccctggcttctaagcctagtctggtccagcagaagcccacagcatatgttcgccctatggatggacaggaccaagcacccgacgagtcaccaaagctcaagtcatcaagtgagactagcgtccactgcacgtcttaccgaggtgtgcccgctagtaagcctgagccagccagagccaaagccaaactgtctaagttctccatacccaagcagggcgaagaatcccggagcggtgaaaccaactcctgcgtcgaagagatcatacgggaaatgacttggttacctcccctgagcgctattcaagcacccggaaaagttgagcctactaagtttccctttccaaacaaagactcccagctggttagttcaggtcacaataatccaaagaagggggatgccgagcccgaaagtccagattcagggaccagcaacaccagcatgctcgaggacgacctgaagctgtcatccgacgaggaggagaatgagcaacaggcagcacagaggacagctctccgcgctctctccgattcagctgtcgttcaacagccaaattgcagaactagcgtcccatctagcaaggggtcaagctcatctagctccagcggcagctcatccagcagcagcgacagcgagtcatcttctggatcggacagcgagactgaatcgtccagctctgagtccgagggctctaagccaccccattttagttctcccgaagcagagcctgcttccagtaataaatggcaactggataagtggctcaacaaagtgaacccccataagccccctatactcatccagaatgagagtcacgggtcagagtctaaccagtactacaatccagtaaaggaggatgttcaagactgtggaaaggtgcctgatgtgtgccagccttcattgagggagaaagagattaaaagcacctgcaaggaagaacagcggccacgcactgctaacaaggccccaggcagcaagggcgtgaagcagaaaagccctcccgctgccgtggccgtcgccgtaagcgctgctgctccccctcctgccgtcccttgcgcccctgccgaaaacgccccagccccagctcggagaagcgcagggaagaagcctaccaggcgtaccgaacgcacctctgcaggggatggagccaattgtcatcgcccagaagagcctgcagctgcagacgcgttaggtaccagtgtcgttgttccaccggagccaacaaaaacacgcccatgcggtaacaacagagccagtcatagaaaagaactgcggagcagtgtgacgtgtgaaaaaaggcggacacggggattatccaggattgttcctaagtcgaaggaatttattgaaaccgagtcaagctcgagcagcagtagctcggacagcgatctggagtctgaacaagaggagtacccgctgtccaaggcccagacagtggccgcttctgccagtagtggaaacgaccagcgactgaaggaggcagctgccaatgggggatccggaccaagggcaccagtcggatcaattaacgcgagaacaacgagcgacatcgccaaagagctggaggaacagttttatacacttgtccctttcggtcgcaacgaactgctgtcgcccctgaaagattccgacgagatacggagtctctgggtcaagatcgacctcaccctgctctcccggatccctgagcacttgccccaggagccgggagtgctgagcgctcccgctacgaaggactcggagtcagcgccacccagccatacaagcgacacacccgcagagaaggccctgcccaagtccaaaaggaagaggaagtgtgataacgaggacgactatcgtgagatcaagaagtctcagggagaaaaagatagtagcagtcgcttagcaacctccaccagcaacacactgtcggccaatcactgcaatatgaacatcaatagtgtggccattccaatcaacaaaaatgaaaaaatgctgaggtccccaatatccccgttatccgacgccagcaaacataaatatactagcgaagatctaacaagctcctcccggccaaatgggaactccttgttcacatcagcttcgagcagtaaaaagccgaaagctgattctcagctccagccgcacggaggcgacctaacaaaggcagcacacaacaatagcgaaaacatcccgctccataaatctagaccgcagaccaagccttggtcgccaggaagtaacggccaccgggattgcaaacggcagaaattggtgtttgatgacatgccccgatccgccgattacttcatgcaggaagccaagaggatgaaacataaagcagatgccatggtggagaagttcgggaaagcactcaattacgcagaagctgctctctcctttatagagtgcggcaatgctatggaacaaggtccaatggagtctaaaagtccatacactatgtacagcgaaacggtagagctgatccgctatgccatgcggcttaaaacgcactctggcccaaacgccaccccggaagacaaacagctcgccgctctttgttatagatgtttggccctgctctactggcgaatgttccggctcaagagggaccacgctgttaagtactctaaggccctaatagactatttcaagaattcatctaaggccgctcaggccccatccccctggggagcctccgggaaatcaaccgggacaccttctccaatgtcgcccaatccgtctcccgcatccagcgtgggatcacaagggagcctcagtaatgcttctgctttatccccatccacgatcgtgtcgatcccacagcgcatccatcaaatggccgcaaatcacgtttccattacaaactccatcttacactcctatgattattgggaaatggccgacaatctggccaaggagaatcgggagtttttcaatgatctggatctgctgatgggaccggtgaccctccatagtagtatggaacatctcgttcaatactcacaacaaggcttgcactggttaaggaatagcgcccatttatcctag

SEQ ID NO: 127208 - DNA, 3681 bp, Artificial Sequence
  derived and/or modified sequence
atggacagttttgacctcgctctgctccaggaatgggacttagaatccctctgtgtttacgagcctgacaggaatgctctgcgtcgcaaggagagagagcgaaggaatcaggagacacagcaggacgatgggaccttcaattccagctatagcctgttttcagaaccttacaagaccaacaagggagatgagctaagtaaccggatacaaaatactctcggcaactatgatgaaatgaaggactttctcacagatagaagtaaccaatcccacctggttggggtgcctaagccaggagtaccacagacaccagtgaataagatcgatgaacacttcgtggccgattcccgagcccagaatcagccaagctctatttgctccactaccacgtccacacccgctgcggtcccagtgcagcagtctaaacgcggaaccatgggctggcagaaagctggccaccctcccagcgacggtcagcagagggcaactcagcagggaagtcttagaacactgctgggcgatggcgtggggcgtcagcaacctcgggctaagcaagtttgtaacgtggaagtcggcctgcagacacaagagcgacccccagcaatggctgctaaacacagctcttccggccactgcgttcaaaatttccccccttccctggcctccaaaccttctttggtgcaacagaagcccacagcttacgtccgcccaatggatggtcaggaccaggcccctgatgagtctcctaagttgaagtcctcaagcgaaacatctgtgcactgtacatcatatagaggggtgccagccagtaagcccgaaccagcaagggcaaaggccaagctgtctaagttcagcataccgaagcagggtgaagagtctcgctcaggggagacaaactcgtgtgttgaagagatcatccgggaaatgacctggctccctccactgtctgcaattcaagcaccgggaaaagtcgagcccactaagttcccatttccaaacaaggattctcaactggtaagctctggccacaataatcccaaaaaaggcgacgctgagcctgaatcacccgatagcggaacatctaacacgtccatgctcgaggacgacttgaagttgtcatcggacgaggaagaaaatgaacagcaggctgcacaacgcactgcactgcgtgcactgtctgacagcgctgtcgtgcagcagcccaactgtcggacctccgtgccatcaagcaagggaagttcttctagttcctccagtgggagcagctcctcgagtagcgattctgaatcttcaagcgggagcgactccgaaactgagtcctcttcatctgagtcagagggatcgaaacctccacacttcagctccccagaggccgagcccgcttcctcaaacaagtggcagctcgacaagtggctcaataaagtcaatccacacaaaccacccattttgattcagaatgagtcccacggaagcgagagcaaccagtattataaccccgtcaaagaggatgtgcaggactgcggaaaagtacctgacgtttgccagcctagtctgagggagaaggagatcaaaagcacgtgtaaagaggagcaacgcccaaggacagcaaataaggctcccggaagtaagggagtgaaacagaagtccccaccagccgcagtggccgtcgccgtaagcgccgcagcacctccacctgccgtgccatgcgccccagccgaaaatgcacctgctccggctaggaggagcgctgggaagaaaccaaccagacgtacggagagaaccagcgcgggtgacggagcgaattgtcataggcctgaagagccagccgcagcagatgccctcggaaccagtgtggttgtccctccggaaccaacgaagacccgtccgtgtggcaacaatcgcgcatcccacaggaaagaactcaggagctccgttacatgcgaaaagagacggacgcgcggactttctcgaatcgtcccaaaatcgaaagagttcatcgaaaccgaatcctcatcttccagcagttcaagcgatagcgatttggagagcgagcaggaggagtatcctctgtctaaagctcagactgtggcggcatcagcgtccagcggaaatgaccaacgcctgaaggaagcggctgctaatggcggatccgggccacgtgctccagtgggatctatcaatgccaggaccacaagcgacattgccaaagagctggaggagcagttttacactttggtcccttttggcagaaatgagctgctctccccgctgaaggatagcgacgaaattcgcagtctttgggttaagatcgacctgaccctgctgtccaggattccggaacatttgcctcaggagccaggcgttctttctgctccagccacgaaagacagcgagagcgcaccaccctctcatacttcggacactcccgcagagaaagccttacctaaaagtaagagaaaacgcaaatgtgataacgaggatgattaccgggagatcaaaaaaagccaaggagagaaggactccagttctaggctggccacttccacttctaatactctgtcagctaaccattgtaatatgaatatcaacagtgtggcaatcccaatcaacaaaaacgaaaaaatgttgcggtctcctatctcccctttatctgatgccagtaagcacaaatacacctccgaggacttgacaagcagctccaggcctaacggtaattcactgtttacctctgcctctagcagtaagaagccaaaagccgactctcagctccaaccacatgggggagacctgactaaggcggctcacaataatagtgagaatattcctctacataagagtagacctcagactaagccatggagcccgggttctaatggacatagggattgcaagcggcagaaactagtcttcgatgacatgccacgctcagctgattatttcatgcaggaggccaagcgaatgaagcataaggccgatgctatggtggaaaaattcggcaaagctctgaattacgccgaggcggctctgagctttatcgaatgtggcaacgcaatggaacaggggcctatggagtccaaaagtccatatactatgtattccgaaaccgtggagctgatcaggtatgctatgaggttaaagacccatagcggcccaaatgcaacacctgaagataagcaacttgctgcactctgttatagatgcctagccctcctttactggcgcatgttccgtctcaaaagagaccatgccgtcaaatattcaaaagccctgatagactactttaagaatagttcaaaggccgcacaagccccaagcccctggggggcatccggcaaaagtaccggcacaccgtccccaatgtccccaaacccgtcccctgcaagcagtgtcggttcgcaaggttctttgtccaacgcaagtgccctgagtccatcaacgatcgtgagcattccgcaacgtattcaccagatggctgccaaccacgtttctataacaaattccattctacattcatatgactattgggaaatggctgacaacttagccaaagaaaatagggagttttttaacgatctcgacctcctcatggggccagtcacgcttcacagtagcatggagcacctggtgcagtattctcagcaaggcctacattggctgcgaaactctgcccatctctcctag

SEQ ID NO: 127209 - DNA, 300 bp, Artificial Sequence
  derived and/or modified sequence
atggatagttttgacttagccctattacaggaatgggatctggagagtttatgtgtttacgagccagaccgaaacgccctgagacgaaaggagcgcgagaggcggaaccaggagacacagcaggacgacgggacctttaattcttcttactctcttttcagcgagccatataagaccaataagggtgatgaactctcgaaccgcatccagaataccttgggtaactacgatgaaatgaaagactttctcaccgatcgtagcaatcagtctcatctggtgggtgtgcccaagcctggctag

SEQ ID NO: 127210 - DNA, 468 bp, Artificial Sequence
  derived and/or modified sequence
atggactctttcgatcttgctttgctgcaggaatgggacttagagagtctgtgtgtgtatgaacctgacagaaatgccctacgacgcaaagagagggagaggaggaaccaagagacccagcaagacgacggaacctttaacagttcttactccctctttagtgagccttacaaaaccaacaagggggacgaactttccaataggatccagaataccttaggcaattatgatgaaatgaaggacttcctgacagaccgcagcaatcagtcccaccttgtgggagtacccaaaccaggggtaccacagaccccagttaacaagatcgacgaacatttcgtggccgactctagggcccaaaaccagcccagttccatctgcagtacgacaacttctacccccgctgccgtcccagtgcagcaatctaagcgcggtacaatgggatggcagaaagcgggacaccctccctag

SEQ ID NO: 127211 - DNA, 345 bp, Artificial Sequence
  derived and/or modified sequence
atggatagcttcgaccttgcacttctgcaagagtgggatctcgagtccttatgcgtctacgagccggacagaaacgctctccgcaggaaagaacgggagcgacgaaaccaggaaacacagcaggacgacgggacgttcaattcttcctactctttattctcagaaccatataagacaaataaaggagatgagcttagcaacagaatccaaaacaccctgggcaattacgatgagatgaaagatttcctgacagatcggtctaaccagtcccacttggtcggggttcctaagccgggagttccacaaacacccgtgaacaagatagacgaacattttgtcgcttag

SEQ ID NO: 127212 - DNA, 486 bp, Artificial Sequence
  derived and/or modified sequence
atggactcatttgatctggccctactgcaggagtgggacctggagagtctctgtgtgtacgaaccagatcgcaatgcgctccggcgaaaagagcgggaacggagaaaccaggaaacccagcaggatgacgggacatttaactcctcgtactccttgttctcagagccatataagacgaacaagggcgatgagctcagcaatcgcattcagaatactctcggaaactatgacgaaatgaaggattttctgacagatcgctccaatcaaagccacctggtgggcgttcctaagcctggggtgcctcagacgcccgtcaacaaaattgacgaacattttgtcgccgatagtagagctcagaatcagccttcctctatttgctccacaaccacctccacgccagcagccgtccccgtgcagcagagcaaacgcggtacgatgggttggcagaaggccggtcatcctccctctgatggccagcagcgttag

SEQ ID NO: 127213 - DNA, 2610 bp, Artificial Sequence
  derived and/or modified sequence
atggacagcttcgatctggccctactgcaggagtgggatttggaaagcctttgtgtgtacgagcccgatcgcaacgctttgagaagaaaagaacgcgagcggcgtaaccaggaaacacagcaggacgacgggacattcaatagcagttattcattgttttcagaaccctacaaaaccaataagggtgacgagctgtccaacagaattcagaatacattgggcaattacgacgagatgaaagactttttgaccgacagatccaaccagtcacacctggtgggcgtccccaagccaggagtgccccagacacctgttaacaaaatcgacgaacactttgtcgcagattctcgcgcacagaaccagccgtcttccatctgttccaccaccacctctacacctgccgctgttcccgtccagcaaagcaaacgcggaaccatgggatggcagaaagctggacaccctccttcagacggtcagcagcgggctacccagcaagggtctctccgcacgttgctgggagacggagtgggcaggcagcagccaagagccaaacaagtgtgcaacgtagaggttggactgcagacccaggagcgccctccagccatggccgcaaagcatagttctagtgggcactgtgtgcagaacttccctccttcactggcttctaagccatcccttgtacagcaaaaacctactgcgtatgtcaggcccatggatggccaagatcaggcccctgacgagagtcccaaactcaagtcatccagcgagacgtcagttcactgcacatcttaccggggagtccctgccagtaaacccgaacctgcacgcgctaaagccaaactgtcaaagtttagcattccaaaacaaggcgaagagagtagaagcggcgagaccaactcctgtgtggaggagattatcagagaaatgacttggctccctcctctttctgccattcaggctcctggaaaggttgaacctactaagttcccttttcccaacaaggacagccagctggtatcatcgggccacaacaatccaaagaagggggatgccgagcccgaatcccctgattcaggaactagcaacacttccatgcttgaggacgatctcaaattgtcgagcgatgaagaggagaacgagcagcaggccgctcagcgcaccgctctgagagccctgtcggactcggccgtcgtgcagcagcctaattgtcgcacaagcgtccccagtagcaaggggagctccagttcaagttctagtggatcatctagcagtagcagcgactccgagagcagttctgggtcagacagtgagaccgagagctccagctccgaaagcgagggaagtaagccgcctcatttttctagccccgaagctgaacctgccagctcaaacaagtggcagctggacaagtggttgaacaaagtaaatcctcacaagcccccaattctcattcagaacgaatcccatgggtctgagagcaatcaatattacaaccctgtcaaagaggatgtgcaggactgcgggaaggtgccagacgtgtgtcaacccagtctgcgggagaaggaaataaagagcacctgcaaggaggaacagcgacccagaaccgccaacaaggctcccggatctaagggagtgaagcaaaaaagtcccccagctgctgtggcagtcgccgtgtccgctgctgctccacccccagccgtgccatgcgccccagccgaaaacgcccctgctcccgctagacgatccgctgggaagaaaccaacccgccgaacggagagaaccagcgctggggatggtgcaaattgccatcgccctgaagaacccgctgcagccgacgccctggggacctctgttgtcgtcccgccagaaccaactaaaacccggccttgcggtaacaatcgcgcttcccaccgcaaagagcttcggagttcagtgacttgtgagaagcgaagaactagggggctgtcccgtatagtgcctaagtcaaaagagtttatcgaaaccgaatcctcaagcagctcaagtagctcagatagtgacctggagtctgaacaggaggagtaccccttgtccaaagcacagacagtggctgcaagtgcttcttcaggcaacgatcagcgcttaaaggaagccgctgcaaacggagggtcaggccctcgggcacctgtgggtagtatcaatgctagaaccacgagtgacattgcgaaagagctggaggaacaattctacacccttgtgccctttggccgtaacgaattgctgtcgcccctgaaagacagtgatgagataaggagtctgtgggtgaaaatcgacctgacacttctgtctcgtataccggagcaccttccacaggagcccggagtcctttccgccccagccaccaaagatagtgaatcggccccaccttctcacacatccgatactcccgcagagaaggccctgcccaaatccaagcgcaagcgcaaatgtgataatgaggacgattacagggaaattaagaaatcgcagggcgagaaggattcttccagtagattggcaacctccacttccaacacgctgtccgcgaaccactgcaacatgaatataaacagtatgcagctacccatatag

SEQ ID NO: 127214 - DNA, 390 bp, Artificial Sequence
  derived and/or modified sequence
atggacagctttgacctcgccctgctacaggagtgggacctggaatcattgtgcgtgtatgaacccgatcggaacgctctccgtcgcaaagaacgtgaacggagaaaccaggagacacagcaggacgatggaacgttcaatagcagttattcactgtttagcgagccatataaaacgaacaagggtgatgagttatccaatagaatccagaatactctcggcaattatgatgagatgaaggacttcttgactgatcgctcaaatcagtctcatttagtcggagtgcctaaaccaggggtcccacaaactcccgtgaacaaaatcgacgagcattttgttgccgattccagagctcaaaatcagcccagctccatatgtagtaccacctag

SEQ ID NO: 127215 - DNA, 3681 bp, Artificial Sequence
  derived and/or modified sequence
atggacagcttcgacctggccctgctgcaggagtgggacctggagagcctgtgcgtgtacgagcccgacagaaacgccctgagaagaaaggagagagagagaagaaaccaggagacccagcaggacgacggcaccttcaacagcagctacagcctgttcagcgagccctacaagaccaacaagggcgacgagctgagcaacagaatccagaacaccctgggcaactacgacgagatgaaggacttcctgaccgacagaagcaaccagagccacctggtgggcgtgcccaagcccggcgtgccccagacccccgtgaacaagatcgacgagcacttcgtggccgacagcagagcccagaaccagcccagcagcatctgcagcaccaccaccagcacccccgccgccgtgcccgtgcagcagagcaagagaggcaccatgggctggcagaaggccggccacccccccagcgacggccagcagagagccacccagcagggcagcctgagaaccctgctgggcgacggcgtgggcagacagcagcccagagccaagcaggtgtgcaacgtggaggtgggcctgcagacccaggagagaccccccgccatggccgccaagcacagcagcagcggccactgcgtgcagaacttcccccccagcctggccagcaagcccagcctggtgcagcagaagcccaccgcctacgtgagacccatggacggccaggaccaggcccccgacgagagccccaagctgaagagcagcagcgagaccagcgtgcactgcaccagctacagaggcgtgcccgccagcaagcccgagcccgccagagccaaggccaagctgagcaagttcagcatccccaagcagggcgaggagagcagaagcggcgagaccaacagctgcgtggaggagatcatcagagagatgacctggctgccccccctgagcgccatccaggcccccggcaaggtggagcccaccaagttccccttccccaacaaggacagccagctggtgagcagcggccacaacaaccccaagaagggcgacgccgagcccgagagccccgacagcggcaccagcaacaccagcatgctggaggacgacctgaagctgagcagcgacgaggaggagaacgagcagcaggccgcccagagaaccgccctgagagccctgagcgacagcgccgtggtgcagcagcccaactgcagaaccagcgtgcccagcagcaagggcagcagcagcagcagcagcagcggcagcagcagcagcagcagcgacagcgagagcagcagcggcagcgacagcgagaccgagagcagcagcagcgagagcgagggcagcaagcccccccacttcagcagccccgaggccgagcccgccagcagcaacaagtggcagctggacaagtggctgaacaaggtgaacccccacaagccccccatcctgatccagaacgagagccacggcagcgagagcaaccagtactacaaccccgtgaaggaggacgtgcaggactgcggcaaggtgcccgacgtgtgccagcccagcctgagagagaaggagatcaagagcacctgcaaggaggagcagagacccagaaccgccaacaaggcccccggcagcaagggcgtgaagcagaagagcccccccgccgccgtggccgtggccgtgagcgccgccgcccccccccccgccgtgccctgcgcccccgccgagaacgcccccgcccccgccagaagaagcgccggcaagaagcccaccagaagaaccgagagaaccagcgccggcgacggcgccaactgccacagacccgaggagcccgccgccgccgacgccctgggcaccagcgtggtggtgccccccgagcccaccaagaccagaccctgcggcaacaacagagccagccacagaaaggagctgagaagcagcgtgacctgcgagaagagaagaaccagaggcctgagcagaatcgtgcccaagagcaaggagttcatcgagaccgagagcagcagcagcagcagcagcagcgacagcgacctggagagcgagcaggaggagtaccccctgagcaaggcccagaccgtggccgccagcgccagcagcggcaacgaccagagactgaaggaggccgccgccaacggcggcagcggccccagagcccccgtgggcagcatcaacgccagaaccaccagcgacatcgccaaggagctggaggagcagttctacaccctggtgcccttcggcagaaacgagctgctgagccccctgaaggacagcgacgagatcagaagcctgtgggtgaagatcgacctgaccctgctgagcagaatccccgagcacctgccccaggagcccggcgtgctgagcgcccccgccaccaaggacagcgagagcgccccccccagccacaccagcgacacccccgccgagaaggccctgcccaagagcaagagaaagagaaagtgcgacaacgaggacgactacagagagatcaagaagagccagggcgagaaggacagcagcagcagactggccaccagcaccagcaacaccctgagcgccaaccactgcaacatgaacatcaacagcgtggccatccccatcaacaagaacgagaagatgctgagaagccccatcagccccctgagcgacgccagcaagcacaagtacaccagcgaggacctgaccagcagcagcagacccaacggcaacagcctgttcaccagcgccagcagcagcaagaagcccaaggccgacagccagctgcagccccacggcggcgacctgaccaaggccgcccacaacaacagcgagaacatccccctgcacaagagcagaccccagaccaagccctggagccccggcagcaacggccacagagactgcaagagacagaagctggtgttcgacgacatgcccagaagcgccgactacttcatgcaggaggccaagagaatgaagcacaaggccgacgccatggtggagaagttcggcaaggccctgaactacgccgaggccgccctgagcttcatcgagtgcggcaacgccatggagcagggccccatggagagcaagagcccctacaccatgtacagcgagaccgtggagctgatcagatacgccatgagactgaagacccacagcggccccaacgccacccccgaggacaagcagctggccgccctgtgctacagatgcctggccctgctgtactggagaatgttcagactgaagagagaccacgccgtgaagtacagcaaggccctgatcgactacttcaagaacagcagcaaggccgcccaggcccccagcccctggggcgccagcggcaagagcaccggcacccccagccccatgagccccaaccccagccccgccagcagcgtgggcagccagggcagcctgagcaacgccagcgccctgagccccagcaccatcgtgagcatcccccagagaatccaccagatggccgccaaccacgtgagcatcaccaacagcatcctgcacagctacgactactgggagatggccgacaacctggccaaggagaacagagagttcttcaacgacctggacctgctgatgggccccgtgaccctgcacagcagcatggagcacctggtgcagtacagccagcagggcctgcactggctgagaaacagcgcccacctgagctag

SEQ ID NO: 127216 - DNA, 300 bp, Artificial Sequence
  derived and/or modified sequence
atggacagcttcgacctggccctgctgcaggagtgggacctggagagcctgtgcgtgtacgagcccgacagaaacgccctgagaagaaaggagagagagagaagaaaccaggagacccagcaggacgacggcaccttcaacagcagctacagcctgttcagcgagccctacaagaccaacaagggcgacgagctgagcaacagaatccagaacaccctgggcaactacgacgagatgaaggacttcctgaccgacagaagcaaccagagccacctggtgggcgtgcccaagcccggctag

SEQ ID NO: 127217 - DNA, 468 bp, Artificial Sequence
  derived and/or modified sequence
atggacagcttcgacctggccctgctgcaggagtgggacctggagagcctgtgcgtgtacgagcccgacagaaacgccctgagaagaaaggagagagagagaagaaaccaggagacccagcaggacgacggcaccttcaacagcagctacagcctgttcagcgagccctacaagaccaacaagggcgacgagctgagcaacagaatccagaacaccctgggcaactacgacgagatgaaggacttcctgaccgacagaagcaaccagagccacctggtgggcgtgcccaagcccggcgtgccccagacccccgtgaacaagatcgacgagcacttcgtggccgacagcagagcccagaaccagcccagcagcatctgcagcaccaccaccagcacccccgccgccgtgcccgtgcagcagagcaagagaggcaccatgggctggcagaaggccggccaccccccctag

SEQ ID NO: 127218 - DNA, 345 bp, Artificial Sequence
  derived and/or modified sequence
atggacagcttcgacctggccctgctgcaggagtgggacctggagagcctgtgcgtgtacgagcccgacagaaacgccctgagaagaaaggagagagagagaagaaaccaggagacccagcaggacgacggcaccttcaacagcagctacagcctgttcagcgagccctacaagaccaacaagggcgacgagctgagcaacagaatccagaacaccctgggcaactacgacgagatgaaggacttcctgaccgacagaagcaaccagagccacctggtgggcgtgcccaagcccggcgtgccccagacccccgtgaacaagatcgacgagcacttcgtggcctag

SEQ ID NO: 127219 - DNA, 486 bp, Artificial Sequence
  derived and/or modified sequence
atggacagcttcgacctggccctgctgcaggagtgggacctggagagcctgtgcgtgtacgagcccgacagaaacgccctgagaagaaaggagagagagagaagaaaccaggagacccagcaggacgacggcaccttcaacagcagctacagcctgttcagcgagccctacaagaccaacaagggcgacgagctgagcaacagaatccagaacaccctgggcaactacgacgagatgaaggacttcctgaccgacagaagcaaccagagccacctggtgggcgtgcccaagcccggcgtgccccagacccccgtgaacaagatcgacgagcacttcgtggccgacagcagagcccagaaccagcccagcagcatctgcagcaccaccaccagcacccccgccgccgtgcccgtgcagcagagcaagagaggcaccatgggctggcagaaggccggccacccccccagcgacggccagcagagatag

SEQ ID NO: 127220 - DNA, 2610 bp, Artificial Sequence
  derived and/or modified sequence
atggacagcttcgacctggccctgctgcaggagtgggacctggagagcctgtgcgtgtacgagcccgacagaaacgccctgagaagaaaggagagagagagaagaaaccaggagacccagcaggacgacggcaccttcaacagcagctacagcctgttcagcgagccctacaagaccaacaagggcgacgagctgagcaacagaatccagaacaccctgggcaactacgacgagatgaaggacttcctgaccgacagaagcaaccagagccacctggtgggcgtgcccaagcccggcgtgccccagacccccgtgaacaagatcgacgagcacttcgtggccgacagcagagcccagaaccagcccagcagcatctgcagcaccaccaccagcacccccgccgccgtgcccgtgcagcagagcaagagaggcaccatgggctggcagaaggccggccacccccccagcgacggccagcagagagccacccagcagggcagcctgagaaccctgctgggcgacggcgtgggcagacagcagcccagagccaagcaggtgtgcaacgtggaggtgggcctgcagacccaggagagaccccccgccatggccgccaagcacagcagcagcggccactgcgtgcagaacttcccccccagcctggccagcaagcccagcctggtgcagcagaagcccaccgcctacgtgagacccatggacggccaggaccaggcccccgacgagagccccaagctgaagagcagcagcgagaccagcgtgcactgcaccagctacagaggcgtgcccgccagcaagcccgagcccgccagagccaaggccaagctgagcaagttcagcatccccaagcagggcgaggagagcagaagcggcgagaccaacagctgcgtggaggagatcatcagagagatgacctggctgccccccctgagcgccatccaggcccccggcaaggtggagcccaccaagttccccttccccaacaaggacagccagctggtgagcagcggccacaacaaccccaagaagggcgacgccgagcccgagagccccgacagcggcaccagcaacaccagcatgctggaggacgacctgaagctgagcagcgacgaggaggagaacgagcagcaggccgcccagagaaccgccctgagagccctgagcgacagcgccgtggtgcagcagcccaactgcagaaccagcgtgcccagcagcaagggcagcagcagcagcagcagcagcggcagcagcagcagcagcagcgacagcgagagcagcagcggcagcgacagcgagaccgagagcagcagcagcgagagcgagggcagcaagcccccccacttcagcagccccgaggccgagcccgccagcagcaacaagtggcagctggacaagtggctgaacaaggtgaacccccacaagccccccatcctgatccagaacgagagccacggcagcgagagcaaccagtactacaaccccgtgaaggaggacgtgcaggactgcggcaaggtgcccgacgtgtgccagcccagcctgagagagaaggagatcaagagcacctgcaaggaggagcagagacccagaaccgccaacaaggcccccggcagcaagggcgtgaagcagaagagcccccccgccgccgtggccgtggccgtgagcgccgccgcccccccccccgccgtgccctgcgcccccgccgagaacgcccccgcccccgccagaagaagcgccggcaagaagcccaccagaagaaccgagagaaccagcgccggcgacggcgccaactgccacagacccgaggagcccgccgccgccgacgccctgggcaccagcgtggtggtgccccccgagcccaccaagaccagaccctgcggcaacaacagagccagccacagaaaggagctgagaagcagcgtgacctgcgagaagagaagaaccagaggcctgagcagaatcgtgcccaagagcaaggagttcatcgagaccgagagcagcagcagcagcagcagcagcgacagcgacctggagagcgagcaggaggagtaccccctgagcaaggcccagaccgtggccgccagcgccagcagcggcaacgaccagagactgaaggaggccgccgccaacggcggcagcggccccagagcccccgtgggcagcatcaacgccagaaccaccagcgacatcgccaaggagctggaggagcagttctacaccctggtgcccttcggcagaaacgagctgctgagccccctgaaggacagcgacgagatcagaagcctgtgggtgaagatcgacctgaccctgctgagcagaatccccgagcacctgccccaggagcccggcgtgctgagcgcccccgccaccaaggacagcgagagcgccccccccagccacaccagcgacacccccgccgagaaggccctgcccaagagcaagagaaagagaaagtgcgacaacgaggacgactacagagagatcaagaagagccagggcgagaaggacagcagcagcagactggccaccagcaccagcaacaccctgagcgccaaccactgcaacatgaacatcaacagcatgcagctgcccatctag

SEQ ID NO: 127221 - DNA, 390 bp, Artificial Sequence
  derived and/or modified sequence
atggacagcttcgacctggccctgctgcaggagtgggacctggagagcctgtgcgtgtacgagcccgacagaaacgccctgagaagaaaggagagagagagaagaaaccaggagacccagcaggacgacggcaccttcaacagcagctacagcctgttcagcgagccctacaagaccaacaagggcgacgagctgagcaacagaatccagaacaccctgggcaactacgacgagatgaaggacttcctgaccgacagaagcaaccagagccacctggtgggcgtgcccaagcccggcgtgccccagacccccgtgaacaagatcgacgagcacttcgtggccgacagcagagcccagaaccagcccagcagcatctgcagcaccacctag

SEQ ID NO: 127222 - protein, 525 aa, Artificial Sequence
  derived and/or modified sequence
MWEAQFLGLLFLQPLWVAPVKPLQPGAEVPVVWAQEGAPAQLPCSPTIPLQDLSLLRRAGVTWQHQPDSGPPAAAPGHPLAPGPHPAAPSSWGPRPRRYTVLSVGPGGLRSGRLPLQPRVQLDERGRQRGDFSLWLRPARRADAGEYRAAVHLRDRALSCRLRLRLGQASMTASPPGSLRASDWVILNCSFSRPDRPASVHWFRNRGQGRVPVRESPHHHLAESFLFLPQVSPMDSGPWGCILTYRDGFNVSIMYNLTVLGLEPPTPLTVYAGAGSRVGLPCRLPAGVGTRSFLTAKWTPPGGGPDLLVTGDNGDFTLRLEDVSQAQAGTYTCHIHLQEQQLNATVTLAIITVTPKSFGSPGSLGKLLCEVTPVSGQERFVWSSLDTPSQRSFSGPWLEAQEAQLLSQPWQCQLYQGERLLGAAVYFTELSSPGAQRSGRAPGALPAGHLLLFLILGVLSLLLLVTGAFGFHLWRRQWRPRRFSALEQGIHPPQAQSKIEELEQEPEPEPEPEPEPEPEPEPEQL

SEQ ID NO: 127223 - DNA, 1578 bp, Artificial Sequence
  derived and/or modified sequence
atgtgggaagcacaattcctggggctcctgttccttcagccactgtgggtggccccagtgaagccccttcaaccaggagccgaagttcctgtggtatgggcccaggagggggcccctgctcagcttccttgttcaccaacaattcctcttcaggatcttagtctcctgcgacgggcaggcgtgacctggcaacatcagcctgactcaggccctcccgccgctgctccaggtcatccgctggcccctgggcctcacccagctgcaccttcctcctggggtcctcgaccgcgaaggtacactgtgctatcggtcgggccgggcggtctgagatctggtcggcttcctctgcaacctagagtacagctggacgagagagggcgtcagcgtggcgatttttctctgtggttaaggccggctagaagggcagatgctggcgaataccgcgctgcagtccacctcagagatagagcactcagttgtagactcaggttacgacttgggcaggctagcatgactgcctccccccccggtagtctccgggcatctgattgggtcatcctgaattgctcattctctcgcccagataggcccgcttccgtgcactggttccggaacagaggccagggccgggtgccggtacgcgaatctcctcatcaccaccttgccgaaagcttcctctttctccctcaggtgtcgccgatggattcaggcccttggggctgcatcttaacttaccgtgacgggttcaatgtatccatcatgtacaatctgacggtgctgggcctagaacccccaactcctctcacagtgtatgctggtgctggctcgcgagtcggactgccatgcaggctgccggctggagtgggaaccaggagttttctgaccgcaaagtggactccccccgggggtggcccggacctcctcgtaacaggagacaatggcgattttactctcagattggaggacgtgtcccaggcacaggcaggtacctacacatgtcatattcatctgcaggagcagcaattaaatgccacagtcacattggcaatcatcaccgtcacacctaagtccttcggcagcccgggaagtctgggtaagctgctttgcgaggttaccccagtatctggccaggaaagatttgtttggagctctcttgatactccttcccaacgatcttttagcggcccttggctcgaggcccaggaggcacaactgttaagccagccttggcagtgccagctgtaccaaggagaacgcctgctcggcgcagctgtgtactttaccgagttgtctagccccggagctcagcggtcaggcagagctccgggcgccctgcctgctggacacctcctcttattcctgatcctgggggttctctccctgctgttgctggtgactggcgcgtttgggtttcatctttggcgacgccagtggcgcccacgtcgcttctctgcccttgagcaagggatccatccccctcaggcccagtcgaaaatagaggaacttgagcaagagcctgagcccgagccagagcctgaacccgagccagaaccggaacccgaacctgaacaactgtag

SEQ ID NO: 127224 - DNA, 1578 bp, Artificial Sequence
  derived and/or modified sequence
atgtgggaggcccagttcctgggcctgctcttcctgcagcccctgtgggtggcccctgtgaagcccctgcagcctggagctgaggtgcctgtggtgtgggcccaggagggcgccccagcccagctgccctgcagccccaccatccccctgcaggacctgagcctgctgcggcgggccggcgtgacctggcagcaccagccagattctggccccccagctgctgcccctggccaccccctggcccctggcccccaccctgctgcccccagctcctggggcccccggccccggcgctacacagtgctgtctgtgggccctgggggcctgcggagcggccgcctgcccctgcagccccgggtgcagctggatgagcggggccggcagagaggagacttcagcctgtggctgcggcctgcccggcgggcagatgctggggagtacagagctgctgtgcacctgcgggaccgggccctgagctgccgcctgcggctgcggctgggccaggcctccatgacagccagccccccaggcagcctgcgggccagtgactgggtgatcctgaactgcagcttcagcaggccagacaggcctgcctctgtgcactggttcaggaacagaggccagggccgggtgcctgtgcgggagagcccccaccaccacctggccgagagcttcctgttcctgccccaggtgagccccatggacagcggcccctggggctgcatcctgacctacagagatggcttcaacgtgtccatcatgtacaacctgactgtgctgggcctggagccccccacccccctgactgtgtatgctggggccggcagccgggtgggcctgccctgccgcctgcctgctggggtgggcaccaggagcttcctgacagccaagtggaccccacctgggggcggccctgacctgctggtgactggagacaatggagacttcaccctgcggctggaggatgtgtcccaggcccaggccggcacctacacctgccacatccacctgcaggagcagcagctgaatgccaccgtgaccctggccatcatcaccgtgacccccaagagctttggcagccctggcagcctgggcaagctgctgtgtgaggtgacccctgtgtctggccaggagagatttgtgtggagcagcctggacacccccagccagaggagcttcagcggcccctggctggaggcccaggaggcccagctgctgagccagccctggcagtgccagctgtaccagggcgagcggctgctgggcgctgctgtgtacttcacagagctgagcagccctggggcccagaggagcggccgggcccctggggccctgcctgctggccacctgctgctcttcctgatcctgggcgtgctgagcctgctgctgctggtgactggagccttcggcttccacctgtggaggcggcagtggaggccccggcgcttcagcgccctggagcagggcatccaccccccccaggcccagagcaagattgaggagctggagcaggagcctgagcctgagcctgagcctgagcctgagcctgagcctgagcctgagcctgagcagctgtag

SEQ ID NO: 127225 - DNA, 1974 bp, Artificial Sequence
  derived and/or modified sequence
agagaccagcagaacggcatcccagccacgacggccactttgctctgtctgctctccgccacggccctgctctgttccctgggacacccccgcccccacctcctcaggctgcctgatctgcccagctttccagctttcctctggattccggcctctggtcatccctccccaccctctctccaaggccctctcctggtctcccttcttctagaaccccttcctccacctccctctctgcagaacttctcctttaccccccaccccccaccactgccccctttccttttctgacctccttttggagggctcagcgctgcccagaccataggagagatgtgggaggctcagttcctgggcttgctgtttctgcagccgctttgggtggctccagtgaagcctctccagccaggggctgaggtcccggtggtgtgggcccaggagggggctcctgcccagctcccctgcagccccacaatccccctccaggatctcagccttctgcgaagagcaggggtcacttggcagcatcagccagacagtggcccgcccgctgccgcccccggccatcccctggcccccggccctcacccggcggcgccctcctcctgggggcccaggccccgccgctacacggtgctgagcgtgggtcccggaggcctgcgcagcgggaggctgcccctgcagccccgcgtccagctggatgagcgcggccggcagcgcggggacttctcgctatggctgcgcccagcccggcgcgcggacgccggcgagtaccgcgccgcggtgcacctcagggaccgcgccctctcctgccgcctccgtctgcgcctgggccaggcctcgatgactgccagccccccaggatctctcagagcctccgactgggtcattttgaactgctccttcagccgccctgaccgcccagcctctgtgcattggttccggaaccggggccagggccgagtccctgtccgggagtccccccatcaccacttagcggaaagcttcctcttcctgccccaagtcagccccatggactctgggccctggggctgcatcctcacctacagagatggcttcaacgtctccatcatgtataacctcactgttctgggtctggagcccccaactcccttgacagtgtacgctggagcaggttccagggtggggctgccctgccgcctgcctgctggtgtggggacccggtctttcctcactgccaagtggactcctcctgggggaggccctgacctcctggtgactggagacaatggcgactttacccttcgactagaggatgtgagccaggcccaggctgggacctacacctgccatatccatctgcaggaacagcagctcaatgccactgtcacattggcaatcatcacagtgactcccaaatcctttgggtcacctggatccctggggaagctgctttgtgaggtgactccagtatctggacaagaacgctttgtgtggagctctctggacaccccatcccagaggagtttctcaggaccttggctggaggcacaggaggcccagctcctttcccagccttggcaatgccagctgtaccagggggagaggcttcttggagcagcagtgtacttcacagagctgtctagcccaggtgcccaacgctctgggagagccccaggtgccctcccagcaggccacctcctgctgtttctcatccttggtgtcctttctctgctccttttggtgactggagcctttggctttcacctttggagaagacagtggcgaccaagacgattttctgccttagagcaagggattcaccctccgcaggctcagagcaagatagaggagctggagcaagaaccggagccggagccggagccggaaccggagcccgagcccgagcccgagccggagcagctctgacctggagctgaggcagccagcagatctcagcagcccagtccaaataaactccctgtcagcagc

SEQ ID NO: 127226 - DNA, 1578 bp, Artificial Sequence
  derived and/or modified sequence
atgtgggaggcccagttcctgggcctgctgttcctgcagcccctgtgggtggctcccgtaaagccattgcagcctggagccgaagtgcctgtagtgtgggctcaggaaggcgctcccgcccagttgccttgctcccccactattcccctgcaagacttaagcctccttcggagggcaggcgttacttggcagcaccagcccgacagtggcccgccggcagctgcccccggtcaccccctggcccctgggccccacccagcagctccttcttcctgggggccccgtccaaggaggtatactgtgttatctgtaggtccgggaggacttagatccggacgcttgcccctccaacctcgtgtccaattagacgagcgcggaagacaaaggggagacttttctctgtggttgcggcctgccaggcgagccgacgctggcgagtatagggctgccgtgcatttacgggatcgtgccctctcctgtcggctgagattgcgactgggacaggcatctatgactgcttctcctccggggagtctgcgggcctctgactgggtcattctcaactgctctttttcacgaccagaccgtcctgcttcggtgcactggtttaggaatcgaggccagggccgtgttcctgtgcgggaatctccccaccatcacctagcagagtctttcctgtttctgccccaggtgtcccccatggatagtggtccatgggggtgcatcctgacatatagggatgggtttaatgtgagtatcatgtataatttgacagtccttggcctggaaccccccacaccactcactgtgtatgctggtgccggctctagggtgggcctgccctgcagactccctgctggcgtgggaacaaggtcgtttctgacggctaaatggacgccccctgggggcgggccagatctcctggtgaccggtgacaacggggactttacgctgaggttagaagatgtgtcacaggcccaggcaggaacatacacctgccacatacacttgcaggagcaacagttaaatgcaacagtgacattggccatcatcaccgtgactcccaaatccttcggctctcctggctccctcggaaagctcctttgcgaagtcactcccgtctcagggcaggaaagattcgtgtggtcctctctggatactccctctcaacgctcattctcgggtccttggctggaggcacaggaggcacagctgttgtctcagccctggcagtgtcagctgtatcagggtgagaggctgctgggggccgcagtctattttactgaattgagctcacccggggcacaaagatcagggcgggcccctggagcgctccccgcgggccatctgcttctattcctgattctgggtgttctctctctgctgcttctggtaactggagcctttggatttcatttgtggcggcgacagtggcgcccccggcgcttctctgccctggagcagggtattcacccccctcaggctcagtcaaaaattgaggagcttgaacaagagcctgagcccgagcctgaaccagagccagagccagagccagaaccagaacccgagcagttatag

SEQ ID NO: 127227 - DNA, 1578 bp, Artificial Sequence
  derived and/or modified sequence
atgtgggaggcacagttccttggcctgctgtttttgcagcctctgtgggtggcaccggtgaagcccctgcagcccggagcagaagtgccagtggtgtgggcccaagaaggtgcccctgctcagctgccgtgctcccctacaatccctctccaggatttatcgctcctcagaagggccggtgtgacatggcagcatcagccagacagcgggccaccagccgctgcgcctgggcatccactggcgccaggaccccacccagctgctccaagcagctgggggcctcgccctcgcagatacaccgtgctgtctgtgggtcctgggggtctccggtcaggccgacttcccctgcagccccgagtgcagctggatgaaagagggaggcagagaggagatttcagtctctggctgagacccgctcgcagagcagacgctggagaatacagggctgcagtgcacctcagagatagggctctcagttgccgtctcaggctcagattgggtcaagcgtcaatgactgcctctccacccggttccttacgcgctagcgactgggtgattctgaactgctcttttagtcggccagaccggccagcctctgtgcactggtttcggaatcgcggacaaggccgagtccccgtacgggaaagtccccaccaccacctggctgagtcatttcttttcctcccgcaggtcagtcctatggattcaggcccttggggttgcatcctcacttatcgcgacggattcaacgtctcaatcatgtacaatttgacggtactcggacttgagccgccaacccccttgaccgtgtacgcaggcgctggtagtagggttggactgccctgtaggcttcccgctggagtggggactaggtcctttctgaccgccaagtggacgccacccggaggcggacccgatctgcttgtgacgggtgataatggggacttcaccttgcgtttagaagacgtctctcaggcccaggctggtacttacacttgccatatccacttgcaagagcagcagctgaatgctacggtaacattggctattattaccgtgacaccgaaatccttcggttccccaggttccctcggaaagctgctgtgtgaggtgacacctgtatcgggccaggaacgatttgtgtggagctctctggacaccccatcccagcgatccttcagcggcccatggctggaagcacaggaggctcagctccttagtcagccctggcagtgtcagctgtaccagggggagagactcctgggcgcagccgtctactttacagagctaagcagccctggagcacagagatccggacgggctcctggggcactcccggctggacacctcctgttgttcctgatcctgggggtgctgtcactactgcttttagtcactggagcattcgggtttcatttgtggcgcagacagtggcgaccacggagatttagtgccttggaacagggcatccatcccccacaggcacaatctaaaatcgaggaactggaacaggagccggaaccagagccagaacccgagccagagcctgaacctgaaccagagccggaacaactgtag

SEQ ID NO: 127228 - DNA, 1578 bp, Artificial Sequence
  derived and/or modified sequence
atgtgggaggcccagttcctgggcctgctgttcctgcagcccctgtgggtggcccccgtgaagcccctgcagcccggcgccgaggtgcccgtggtgtgggcccaggagggcgcccccgcccagctgccctgcagccccaccatccccctgcaggacctgagcctgctgagaagagccggcgtgacctggcagcaccagcccgacagcggcccccccgccgccgcccccggccaccccctggcccccggcccccaccccgccgcccccagcagctggggccccagacccagaagatacaccgtgctgagcgtgggccccggcggcctgagaagcggcagactgcccctgcagcccagagtgcagctggacgagagaggcagacagagaggcgacttcagcctgtggctgagacccgccagaagagccgacgccggcgagtacagagccgccgtgcacctgagagacagagccctgagctgcagactgagactgagactgggccaggccagcatgaccgccagcccccccggcagcctgagagccagcgactgggtgatcctgaactgcagcttcagcagacccgacagacccgccagcgtgcactggttcagaaacagaggccagggcagagtgcccgtgagagagagcccccaccaccacctggccgagagcttcctgttcctgccccaggtgagccccatggacagcggcccctggggctgcatcctgacctacagagacggcttcaacgtgagcatcatgtacaacctgaccgtgctgggcctggagccccccacccccctgaccgtgtacgccggcgccggcagcagagtgggcctgccctgcagactgcccgccggcgtgggcaccagaagcttcctgaccgccaagtggaccccccccggcggcggccccgacctgctggtgaccggcgacaacggcgacttcaccctgagactggaggacgtgagccaggcccaggccggcacctacacctgccacatccacctgcaggagcagcagctgaacgccaccgtgaccctggccatcatcaccgtgacccccaagagcttcggcagccccggcagcctgggcaagctgctgtgcgaggtgacccccgtgagcggccaggagagattcgtgtggagcagcctggacacccccagccagagaagcttcagcggcccctggctggaggcccaggaggcccagctgctgagccagccctggcagtgccagctgtaccagggcgagagactgctgggcgccgccgtgtacttcaccgagctgagcagccccggcgcccagagaagcggcagagcccccggcgccctgcccgccggccacctgctgctgttcctgatcctgggcgtgctgagcctgctgctgctggtgaccggcgccttcggcttccacctgtggagaagacagtggagacccagaagattcagcgccctggagcagggcatccaccccccccaggcccagagcaagatcgaggagctggagcaggagcccgagcccgagcccgagcccgagcccgagcccgagcccgagcccgagcccgagcagctgtag

SEQ ID NO: 127229 - protein, 287 aa, Artificial Sequence
  derived and/or modified sequence
MSPHPTALLGLVLCLAQTIHTQEEDLPRPSISAEPGTVIPLGSHVTFVCRGPVGVQTFRLERESRSTYNDTEDVSQASPSESEARFRIDSVSEGNAGPYRCIYYKPPKWSEQSDYLELLVKETSGGPDSPDTEPGSSAGPTQRPSDNSHNEHAPASQGLKAEHLYILIGVSVVFLFCLLLLVLFCLHRQNQIKQGPPRSKDEEQKPQQRPDLAVDVLERTADKATVNGLPEKDRETDTSALAAGSSQEVTYAQLDHWALTQRTARAVSPQSTKPMAESITYAAVARH

SEQ ID NO: 127230 - DNA, 864 bp, Artificial Sequence
  derived and/or modified sequence
atgagcccccaccccacagctttgctcggcctggtgctctgcctagcgcaaaccattcatacccaagaagaggacctcccacggccctccatttctgctgagcctggaactgtgattcccctgggcagtcatgtgacattcgtgtgtagaggtcccgtgggcgtgcagacatttaggcttgagagagaaagccgttcaacttacaacgatactgaggatgtgagtcaggcttcccccagcgagtctgaggcgcgattccgtattgacagcgtgagcgagggcaatgcgggaccgtataggtgtatctactacaagcccccaaaatggagcgagcaatcagattacctggagttgcttgtgaaggagaccagcggaggccccgactcaccggacacagagcccggttcatcggctggcccaacacagaggccatccgataactctcataatgagcacgcacccgcgagtcagggcctgaaggctgagcacctctatatattgatcggtgtgtcggtggtctttctgttttgtctcctgttgctggtactcttttgcctacatcgccagaaccagatcaaacagggcccacctcgctctaaagacgaggagcagaagccccagcagcggcctgatttggcggtggacgtactagagcgaaccgccgataaagccacggtgaacgggcttcctgagaaggatcgggagaccgatacaagcgctctcgccgctggttcgtcacaagaggtgacctacgcccagcttgaccattgggcacttacccagaggaccgcccgcgcagtgtccccacagtctactaaaccaatggccgaatccatcacttacgctgccgtggctagacactag

SEQ ID NO: 127231 - DNA, 864 bp, Artificial Sequence
  derived and/or modified sequence
atgagcccccaccccacagccctgctgggcctggtgctgtgcctggcccagaccatccacacccaggaggaggacctgccccggcccagcatctctgctgagcccggcaccgtcatccccctgggcagccacgtgacctttgtgtgccggggccctgtgggcgtgcagaccttccggctggagcgggagagccgcagcacctacaatgacacagaagatgtgtcccaggccagccccagcgagagcgaggcccgcttcagaattgacagcgtgtctgagggcaatgccggcccctaccgctgcatctactacaagccacccaagtggagcgagcagagcgactacctggagctgctggtgaaggagaccagcggcggccctgacagcccagacacagagcccggcagcagcgctggccccacccagaggcccagcgacaacagccacaatgagcacgccccagccagccagggcctgaaggccgagcacctgtacatcctgattggagtgtctgtggtgttcctgttctgcctgctgctgctggtgctcttctgcctgcaccggcagaaccagatcaagcagggcccccccaggagcaaggatgaggagcagaagccccagcagaggccagacctggccgtggatgtgctggagaggacagctgacaaggccaccgtgaatggcctgcctgagaaggaccgggagacagacaccagcgccctggccgccggcagcagccaggaggtgacctacgcccagctggaccactgggccctgacccagaggacagcccgggctgtgagcccccagagcaccaagcccatggccgagagcatcacctacgccgctgtggcccggcactag

SEQ ID NO: 127232 - DNA, 1610 bp, Artificial Sequence
  derived and/or modified sequence
agaaagctcttcctcttgtgtgaggcagttgctgtggaagccccataggcaggaggcccccgggcagcacatcctgtctgcttgtgtctgctgcagagttctgtccttgcattggtgcgcctcaggccaggctgcactgctgggacctgggccatgtctccccaccccaccgccctcctgggcctagtgctctgcctggcccagaccatccacacgcaggaggaagatctgcccagaccctccatctcggctgagccaggcaccgtgatccccctggggagccatgtgactttcgtgtgccggggcccggttggggttcaaacattccgcctggagagggagagtagatccacatacaatgatactgaagatgtgtctcaagctagtccatctgagtcagaggccagattccgcattgactcagtaagtgaaggaaatgccgggccttatcgctgcatctattataagccccctaaatggtctgagcagagtgactacctggagctgctggtgaaagaaacctctggaggcccggactccccggacacagagcccggctcctcagctggacccacgcagaggccgtcggacaacagtcacaatgagcatgcacctgcttcccaaggcctgaaagctgagcatctgtatattctcatcggggtctcagtggtcttcctcttctgtctcctcctcctggtcctcttctgcctccatcgccagaatcagataaagcaggggccccccagaagcaaggacgaggagcagaagccacagcagaggcctgacctggctgttgatgttctagagaggacagcagacaaggccacagtcaatggacttcctgagaaggacagagagacggacacctcggccctggctgcagggagttcccaggaggtgacgtatgctcagctggaccactgggccctcacacagaggacagcccgggctgtgtccccacagtccacaaagcccatggccgagtccatcacgtatgcagccgttgccagacactgaccccatacccacctggcctctgcacctgagggtagaaagtcactctaggaaaagcctgaagcagccatttggaaggcttcctgttggattcctcttcatctagaaagccagccaggcagctgtcctggagacaagagctggagactggaggtttctaaccagcatccagaaggttcgttagccaggtggtcccttctacaatcgagcagctccttggacagactgtttctcagttatttccagagacccagctacagttccctggctgtttctagagacccagctttattcacctgactgtttccagagacccagctaaagtcacctgcctgttctaaaggcccagctacagccaatcagccgatttcctgagcagtgatgccacctccaagcttgtcctaggtgtctgctgtgaacctccagtgaccccagagactttgctgtaattatctgccctgctgaccctaaagaccttcctagaagtcaagagctagccttgagactgtgctatacacacacagctgagagccaagcccagttctctgggttgtgctttactccacgcatcaataaataattttgaaggcctcaca

SEQ ID NO: 127233 - DNA, 864 bp, Artificial Sequence
  derived and/or modified sequence
atgagcccccaccccaccgccctgctgggcctggtgctgtgcctggcacagaccatacacacccaagaagaagacctgcctcggcctagtatatctgccgaacctggaaccgtcatcccattgggatcccacgtgacctttgtctgcaggggtccagtgggggtacagacctttcgcctggaacgggaatcccgttccacctataatgacactgaggacgtatcacaggcttcaccctccgaaagtgaagctagattccggatcgactctgtgtcagaaggcaatgccggaccgtatcgctgcatctactacaagccgccaaagtggtcggaacagagcgactacttagagctcctggttaaggagacctccggtgggcccgactcccctgacaccgaaccgggatcatccgcaggccctacccagcgacctagcgacaacagtcacaatgagcacgctcccgccagccaaggtctcaaggccgagcatctgtacattctgattggggtctctgtggtcttcctattctgcttgctgctgctggtgctcttctgcctccaccggcagaatcagattaaacagggtccccctagaagcaaagatgaggaacaaaaaccacagcaacggcccgacctggcagttgacgtcttagaaagaacggccgacaaagccaccgtcaatggcctgcctgaaaaagatcgggagacagacactagtgctctggccgctggaagttcacaagaagttacctacgcccagttagaccactgggctctcacccaaagaacagcccgcgcagtctctccacagtcaactaagcctatggctgagagcatcacatacgcggccgtcgcaagacactag

SEQ ID NO: 127234 - DNA, 864 bp, Artificial Sequence
  derived and/or modified sequence
atgagtcctcaccccaccgctctgttggggctcgtgctttgcctcgctcagaccatacacacacaagaggaggatctccctagaccgtccatatctgcagagcccggtaccgtgatcccactcggctcacatgtcaccttcgtgtgtcgcggaccggtaggagtccagactttccgcctggaaagagaatcaaggtcaacctacaacgacacagaggacgtaagtcaggcttcaccatctgagtccgaagcccgattccggattgacagtgtttccgaggggaatgctggaccttacagatgcatctactacaagccccctaagtggagcgaacagagcgactatctcgaactcctggtgaaggaaacctcaggtggacccgattcccccgacacagagccgggatcttcagcgggacctacccagagaccatccgacaattcccataacgagcatgcccctgccagccaagggttgaaggcagagcacctgtacattctaataggtgtgtccgtcgtgttcttgttttgtctgcttctgcttgtgctattctgcctgcatcgccagaaccagatcaagcaaggaccgcctaggtcaaaggacgaggagcagaaaccgcagcagcggccagatttagccgttgatgtgttagagcgaacagccgacaaggcgacagtgaatggccttccagaaaaagaccgcgaaacagacacttccgctctagctgctggaagctcacaggaagtcacttacgctcaattggaccattgggctcttactcagcgaaccgcacgcgctgtgagcccccagtctacgaaacccatggccgagtcaatcacttatgcagctgtggcaagacactag

SEQ ID NO: 127235 - DNA, 864 bp, Artificial Sequence
  derived and/or modified sequence
atgagcccccaccccaccgccctgctgggcctggtgctgtgcctggcccagaccatccacacccaggaggaggacctgcccagacccagcatcagcgccgagcccggcaccgtgatccccctgggcagccacgtgaccttcgtgtgcagaggccccgtgggcgtgcagaccttcagactggagagagagagcagaagcacctacaacgacaccgaggacgtgagccaggccagccccagcgagagcgaggccagattcagaatcgacagcgtgagcgagggcaacgccggcccctacagatgcatctactacaagccccccaagtggagcgagcagagcgactacctggagctgctggtgaaggagaccagcggcggccccgacagccccgacaccgagcccggcagcagcgccggccccacccagagacccagcgacaacagccacaacgagcacgcccccgccagccagggcctgaaggccgagcacctgtacatcctgatcggcgtgagcgtggtgttcctgttctgcctgctgctgctggtgctgttctgcctgcacagacagaaccagatcaagcagggcccccccagaagcaaggacgaggagcagaagccccagcagagacccgacctggccgtggacgtgctggagagaaccgccgacaaggccaccgtgaacggcctgcccgagaaggacagagagaccgacaccagcgccctggccgccggcagcagccaggaggtgacctacgcccagctggaccactgggccctgacccagagaaccgccagagccgtgagcccccagagcaccaagcccatggccgagagcatcacctacgccgccgtggccagacactag

SEQ ID NO: 127236 - protein, 152 aa, Artificial Sequence
  derived and/or modified sequence
MSPHLTALLGLVLCLAQTIHTQEGALPRPSISAEPGTVISPGSHVTFMCRGPVGVQTFRLEREDRAKYKDSYNVFRLGPSESEARFHIDSVSEGNAGLYRCLYYKPPGWSEHSDFLELLVKESSGGPDSPDTEPGSSAGTVPGTEASGFDAP

SEQ ID NO: 127237 - DNA, 459 bp, Artificial Sequence
  derived and/or modified sequence
atgagccctcacctgaccgcgttgctgggcttggtcctgtgcctggcccaaacaatccatacccaagaaggcgctctccccaggccatcgatctctgccgaacccggtacggtgattagccctggctctcatgtgactttcatgtgccggggacccgtgggagtgcagacgtttcggctggaaagagaggaccgtgcaaagtataaggatagctataacgtcttccgcctgggcccttctgaatcggaggccagattccacattgatagtgtttcagagggcaatgccggactgtaccggtgtctctactataagcctccgggttggagcgaacatagcgatttcttagagcttctcgtgaaagagtcctctggcggacctgacagccctgatactgagccaggatcaagcgcaggaacagtgccaggaaccgaagccagcgggttcgacgctccatag

SEQ ID NO: 127238 - DNA, 459 bp, Artificial Sequence
  derived and/or modified sequence
atgtcccctcacctcactgcactgctgggtctggttctttgtctggcacaaactatccatacacaagagggggctctaccgaggccatccattagtgcagaacctggcacagtgatctcccctggcagtcatgtcacctttatgtgccgagggccagtgggagtgcaaacgtttcgtctggaacgagaagatagggccaaatacaaagatagttacaacgtgtttcgcttgggaccttctgaaagcgaagccagatttcacattgacagtgtctctgaaggaaatgccggattatatcgttgtctgtattacaaacccccaggatggtcagaacactcagattttctggaactgctcgtcaaagaaagctccggaggaccagattctcccgacactgagccaggctcatctgctgggactgtaccgggcacagaggctagtggattcgatgcgccctag

SEQ ID NO: 127239 - DNA, 459 bp, Artificial Sequence
  derived and/or modified sequence
atgagcccacacctgaccgctctcttggggctcgttttgtgcctggcgcagaccatccacacccaggaaggcgcactgccccggccttcaatatcagcagaacccggcaccgttatttcccccggttcccacgttactttcatgtgcaggggccctgtgggcgtgcaaacctttcgcctagagcgagaagatagagcgaagtacaaggatagctataacgtgttccggcttggaccttcagaatctgaggcccgcttccacattgattccgtcagcgagggcaacgctggactgtacagatgtctgtattacaaacccccaggatggtcagaacactcagattttctggaactgctcgtcaaagaaagctccggaggaccagattctcccgacactgagccaggctcatctgctgggactgtaccgggcacagaggctagtggattcgatgcgccctag

SEQ ID NO: 127240 - DNA, 459 bp, Artificial Sequence
  derived and/or modified sequence
atgagcccccacctgaccgccctgctgggcctggtgctgtgcctggcccagaccatccacacccaggagggcgccctgcccagacccagcatcagcgccgagcccggcaccgtgatcagccccggcagccacgtgaccttcatgtgcagaggccccgtgggcgtgcagaccttcagactggagagagaggacagagccaagtacaaggacagctacaacgtgttcagactgggccccagcgagagcgaggccagattccacatcgacagcgtgagcgagggcaacgccggcctgtacagatgcctgtactacaagccccccggctggagcgagcacagcgacttcctggagctgctggtgaaggagagcagcggcggccccgacagccccgacaccgagcccggcagcagcgccggcaccgtgcccggcaccgaggccagcggcttcgacgccccctag

SEQ ID NO: 127241 - DNA, 459 bp, Artificial Sequence
  derived and/or modified sequence
atgtcccctcatctcactgcattgcttggcctggtgctgtgccttgcccagactattcacacccaggagggagccttgccccgcccatccattagcgctgagcctggtacagttatctctccaggatcacacgtgaccttcatgtgtcgcggccccgtgggggtgcaaaccttcagactcgagagggaggacagagccaaatacaaggattcctacaatgtgtttcgactcggtccttcggaatcagaggcacggtttcatatcgatagcgtctctgaaggtaatgctggcttgtatcgctgcctttactataagccaccagggtggtctgaacacagcgactttctcgagctgcttgttaaggaatccagcggcggtcctgattcacccgatacagagcccggatctagcgcaggcaccgtcccaggcaccgaggcctctgggttcgacgctccttag

SEQ ID NO: 127242 - DNA, 459 bp, Artificial Sequence
  derived and/or modified sequence
atgagcccccacctgacagccctgctgggcctggtgctgtgcctggcccagaccatccacacccaggagggcgccctgccccggcccagcatctctgctgagcccggcaccgtcatcagccctggcagccacgtgaccttcatgtgccggggccctgtgggcgtgcagaccttccggctggagagagaagatcgggccaagtacaaggacagctacaacgtgttccggctgggccccagcgagagcgaggcccgcttccacatcgacagcgtgtctgagggcaatgccggcctgtaccgctgcctgtactacaagcccccaggctggagcgagcacagcgacttcctggagctgctggtgaaggagagcagcggcggccctgacagcccagacacagagcccggcagcagcgctggcaccgtgcccggcacagaggccagcggctttgatgccccctag

SEQ ID NO: 127243 - DNA, 459 bp, Artificial Sequence
  derived and/or modified sequence
atgagcccccacctgaccgccctgctgggcctggtgctgtgcctggctcagaccatccatacccaagagggagcactcccaaggccgtcaataagtgcagagcccgggaccgtgatcagccccggatcccacgtgacctttatgtgccgcggtcccgttggtgtacagacgttcagacttgaacgggaagaccgggcgaaatataaagactcttataatgtcttcaggctggggccctccgagagcgaggcgcgcttccatatcgacagtgtctcggaggggaatgctggactctatcgttgtctctactataaaccccctggctggagtgagcacagtgacttcctcgagctgctggtcaaagagtcgagcggcgggcccgactcccctgacacggaaccagggagttccgccgggacagtgcccggcacggaggccagcgggttcgatgcgccgtag

SEQ ID NO: 127244 - RNA, 459 nt, Artificial Sequence
  derived and/or modified sequence
auguccccucaccucacugcacugcugggucugguucuuugucuggcacaaacuauccauacacaagagggggcucuaccgaggccauccauuagugcagaaccuggcacagugaucuccccuggcagucaugucaccuuuaugugccgagggccagugggagugcaaacguuucgucuggaacgagaagauagggccaaauacaaagauaguuacaacguguuucgcuugggaccuucugaaagcgaagccagauuucacauugacagugucucugaaggaaaugccggauuauaucguugucuguauuacaaacccccaggauggucagaacacucagauuuucuggaacugcucgucaaagaaagcuccggaggaccagauucucccgacacugagccaggcucaucugcugggacuguaccgggcacagaggcuaguggauucgaugcgcccuag

SEQ ID NO: 127245 - RNA, 459 nt, Artificial Sequence
  derived and/or modified sequence
augagcccacaccugaccgcucucuuggggcucguuuugugccuggcgcagaccauccacacccaggaaggcgcacugccccggccuucaauaucagcagaacccggcaccguuauuucccccgguucccacguuacuuucaugugcaggggcccugugggcgugcaaaccuuucgccuagagcgagaagauagagcgaaguacaaggauagcuauaacguguuccggcuuggaccuucagaaucugaggcccgcuuccacauugauuccgucagcgagggcaacgcuggacuguacagaugucuguauuacaaacccccaggauggucagaacacucagauuuucuggaacugcucgucaaagaaagcuccggaggaccagauucucccgacacugagccaggcucaucugcugggacuguaccgggcacagaggcuaguggauucgaugcgcccuag

SEQ ID NO: 127246 - protein, 88 aa, Artificial Sequence
  derived and/or modified sequence
MALSSAWRSVLPLWLLWSAACSRAASGDDNAFPFDIEGSSAVGRQDPPETSEPRVALGRLPPAAEKCNAGFFHTLSGECVPCDCNGNS

SEQ ID NO: 127247 - protein, 1816 aa, Artificial Sequence
  derived and/or modified sequence
MALSSAWRSVLPLWLLWSAACSRAASGDDNAFPFDIEGSSAVGRQDPPETSEPRVALGRLPPAAEKCNAGFFHTLSGECVPCDCNGNSNECLDGSGYCVHCQRNTTGEHCEKCLDGYIGDSIRGAPQFCQPCPCPLPHLANFAESCYRKNGAVRCICNENYAGPNCERCAPGYYGNPLLIGSTCKKCDCSGNSDPNLIFEDCDEVTGQCRNCLRNTTGFKCERCAPGYYGDARIAKNCAVCNCGGGPCDSVTGECLEEGFEPPTGCDKCVWDLTDALRLAALSIEEGKSGVLSVSSGAAAHRHVNEINATIYLLKTKLSERENQYALRKIQINNAENTMKSLLSDVEELVEKENQASRKGQLVQKESMDTINHASQLVEQAHDMRDKIQEINNKMLYYGEEHELSPKEISEKLVLAQKMLEEIRSRQPFFTQRELVDEEADEAYELLSQAESWQRLHNETRTLFPVVLEQLDDYNAKLSDLQEALDQALNYVRDAEDMNRATAARQRDHEKQQERVREQMEVVNMSLSTSADSLTTPRLTLSELDDIIKNASGIYAEIDGAKSELQVKLSNLSNLSHDLVQEAIDHAQDLQQEANELSRKLHSSDMNGLVQKALDASNVYENIVNYVSEANETAEFALNTTDRIYDAVSGIDTQIIYHKDESENLLNQARELQAKAESSSDEAVADTSRRVGGALARKSALKTRLSDAVKQLQAAERGDAQQRLGQSRLITEEANRTTMEVQQATAPMANNLTNWSQNLQHFDSSAYNTAVNSARDAVRNLTEVVPQLLDQLRTVEQKRPASNVSASIQRIRELIAQTRSVASKIQVSMMFDGQSAVEVHSRTSMDDLKAFTSLSLYMKPPVKRPELTETADQFILYLGSKNAKKEYMGLAIKNDNLVYVYNLGTKDVEIPLDSKPVSSWPAYFSIVKIERVGKHGKVFLTVPSLSSTAEEKFIKKGEFSGDDSLLDLDPEDTVFYVGGVPSNFKLPTSLNLPGFVGCLELATLNNDVISLYNFKHIYNMDPSTSVPCARDKLAFTQSRAASYFFDGSGYAVVRDITRRGKFGQVTRFDIEVRTPADNGLILLMVNGSMFFRLEMRNGYLHVFYDFGFSGGPVHLEDTLKKAQINDAKYHEISIIYHNDKKMILVVDRRHVKSMDNEKMKIPFTDIYIGGAPPEILQSRALRAHLPLDINFRGCMKGFQFQKKDFNLLEQTETLGVGYGCPEDSLISRRAYFNGQSFIASIQKISFFDGFEGGFNFRTLQPNGLLFYYASGSDVFSISLDNGTVIMDVKGIKVQSVDKQYNDGLSHFVISSVSPTRYELIVDKSRVGSKNPTKGKIEQTQASEKKFYFGGSPISAQYANFTGCISNAYFTRVDRDVEVEDFQRYTEKVHTSLYECPIESSPLFLLHKKGKNLSKPKASQNKKGGKSKDAPSWDPVALKLPERNTPRNSHCHLSNSPRAIEHAYQYGGTANSRQEFEHLKGDFGAKSQFSIRLRTRSSHGMIFYVSDQEENDFMTLFLAHGRLVYMFNVGHKKLKIRSQEKYNDGLWHDVIFIRERSSGRLVIDGLRVLEESLPPTEATWKIKGPIYLGGVAPGKAVKNVQINSIYSFSGCLSNLQLNGASITSASQTFSVTPCFEGPMETGTYFSTEGGYVVLDESFNIGLKFEIAFEVRPRSSSGTLVHGHSVNGEYLNVHMKNGQVIVKVNNGIRDFSTSVTPKQSLCDGRWHRITVIRDSNVVQLDVDSEVNHVVGPLNPKPIDHREPVFVGGVPESLLTPRLAPSKPFTGCIRHFVIDGHPVSFSKAALVSGAVSINSCPAA

SEQ ID NO: 127248 - protein, 129 aa, Artificial Sequence
  derived and/or modified sequence
MALSSAWRSVLPLWLLWSAACSRAASGDDNAFPFDIEGSSAVGRQDPPETSEPRVALGRLPPAAEKCNAGFFHTLSGECVPCDCNGNSNECLDGSGYCVTTDGEDPGFSASALSFILSSQGAREARAPT

SEQ ID NO: 127249 - protein, 81 aa, Artificial Sequence
  derived and/or modified sequence
MALSSAWRSVLPLWLLWSAACSRAASGDDNAFPFDIEGSSAVGRQDPPETSEPRVALGRLPPAAEKCNAGFFHTLSGECVP

SEQ ID NO: 127250 - protein, 324 aa, Artificial Sequence
  derived and/or modified sequence
MALSSAWRSVLPLWLLWSAACSRAASGDDNAFPFDIEGSSAVGRQDPPETSEPRVALGRLPPAAEKCNAGFFHTLSGECVPCDCNGNSNECLDGSGYCVHCQRNTTGEHCEKCLDGYIGDSIRGAPQFCQPCPCPLPHLANFAESCYRKNGAVRCICNENYAGPNCERCAPGYYGNPLLIGSTCKKCDCSGNSDPNLIFEDCDEVTGQCRNCLRNTTGFKCERCAPGYYGDARIAKNCAVCNCGGGPCDSVTGECLEEGFEPPTGCDKCVWDLTDALRLAALSIEEGKSGVLSVSSGAAAHRHVNEINATIYLLKKTKQKNNKK

SEQ ID NO: 127251 - DNA, 5451 bp, Artificial Sequence
  derived and/or modified sequence
atggccttgagcagtgcttggcgctcagttctgcccttgtggctcttgtggtccgccgcctgttcgcgggctgctagtggtgacgacaacgctttcccattcgatatcgaggggtctagcgccgtagggcgacaggatccacccgaaaccagtgagccgcgggtagctctgggtaggctgcccccagcggccgaaaaatgcaatgccggcttttttcacaccctgtccggggaatgcgttccatgcgattgcaatgggaacagtaatgagtgccttgatggttcaggctactgcgtgcattgccagagaaacactacaggtgaacactgcgagaaatgtcttgatggatatattggcgacagtattagaggggccccacagttttgccagccgtgtccctgtcctctcccacaccttgctaatttcgcagagagctgttatcgaaagaacggcgctgtacggtgtatttgcaatgaaaactacgctggccccaattgcgagaggtgcgcacctggctattatggtaaccctttattgattggaagcacctgcaagaagtgtgactgctcagggaactctgaccctaatctgatcttcgaagattgtgatgaggtcaccgggcagtgtcggaattgcttgaggaacacgaccggctttaagtgtgaaagatgcgcaccaggctactacggggacgcacggatagcgaagaattgcgccgtgtgcaactgtggaggcggcccctgtgacagcgtcaccggagagtgtcttgaggaggggtttgagcctcctacagggtgtgacaagtgcgtgtgggatctcactgacgcactgcgcctggctgctctgagtattgaggagggtaagagtggcgtgctctccgtgtcctctggtgcagctgcacatcgtcacgtcaacgagatcaatgccactatctacctgctaaagaccaagctctcagaacgggagaaccagtacgcgctaaggaagattcaaatcaacaacgctgaaaacaccatgaaatctctgctgagcgatgtggaggaattggttgagaaagaaaaccaggccagccgcaaaggccagctggtacagaaggagagcatggataccatcaatcacgccagtcagctcgtcgagcaggctcatgacatgagggataaaattcaagagatcaacaataaaatgctctactacggtgaagaacacgagctgagccccaaagaaatatctgaaaagctcgtgttggcgcaaaaaatgctcgaggaaattaggagccggcagcctttcttcactcaacgggagctggttgatgaagaagccgatgaagcctatgagctgctctcccaagccgagtcttggcagcgattgcataacgagacccggacactattcccggttgttttggagcagctagatgattacaacgccaagctgtcagaccttcaggaagcccttgatcaggcactgaactatgtgcgggatgccgaagacatgaatagggccacggctgcacgccagcgggaccacgagaagcagcaggaaagggtaagggagcagatggaggtggtcaatatgagcctgagcacatccgctgattccctgacaacccccagactgaccctgtccgagctcgatgacataattaagaacgcatccggcatttatgctgaaatcgatggcgcaaagtccgaactacaagtgaagttgtcaaatttgagcaacctttcccatgacctggtgcaggaggctatcgaccacgcacaggacttacaacaggaggctaacgaattatcaaggaagctccactcctccgacatgaatggccttgtgcagaaagccctggatgcttcaaacgtgtacgaaaacatagtaaactacgtcagcgaagccaatgagaccgctgagtttgccctaaacacaacagacaggatttatgacgcagtgtcgggcatcgacacccaaatcatctaccataaagacgagagcgagaatctattaaaccaggcccgggaactacaggccaaagccgaaagttcgagcgacgaggccgtggctgacacctccagaagggtggggggagctctggcgcgcaaatccgctcttaagactcgcctgtccgacgcagttaaacaactgcaagctgcagagcggggcgacgcccagcaaagacttggccagagccgccttatcacagaggaggccaaccgtactacgatggaggtccaacaggccaccgctcctatggcgaataatcttacaaattggtcacaaaatctgcagcacttcgattcttctgcctataatactgctgtgaattccgcacgagatgccgtgaggaacttgacagaggtggtgccccaactcctggaccaactacgaaccgtggaacagaagaggcctgccagcaacgtgagcgccagtatacagcgcatcagggagctgattgcccagacacgatctgtggctagtaagatccaggtctcaatgatgttcgacggacagtcagcagtagaagtgcactcgcgcacgtctatggatgacttgaaggcattcacaagccttagtctctacatgaagcccccagtgaaaaggcccgagttgacagagacagccgaccagttcatcctgtacctggggagcaagaacgccaagaaggagtacatggggctagccattaaaaacgacaaccttgtctatgtttataatctgggcaccaaagacgtggaaatacctcttgactcaaaacctgtatcaagttggcccgcatatttttctattgtcaagatcgagagagttggtaagcacggaaaagtctttcttactgtgccctctctctccagtaccgcggaggagaagtttattaaaaagggcgagttcagcggcgatgactctctcctggacttggaccctgaagacacggtgttttacgtcggcggcgtgccaagtaatttcaaactcccaactagcctgaatctgcccggcttcgtaggttgcctggaactcgcaactttaaacaacgacgtgatcagtctctataacttcaaacacatttacaatatggacccctccacttctgtcccttgcgcacgcgacaagcttgccttcacccagagcagagccgcttcatatttttttgacgggagtggttatgctgtcgtacgtgacatcaccaggagaggcaaatttgggcaagtcaccaggtttgatattgaggttaggacacctgctgacaacggtctgattctgttaatggtgaacggctccatgttttttaggttggagatgaggaacggctacctccatgtgttctacgacttcggtttcagcggtggccctgttcatctggaagacacattaaagaaagcacaaattaacgacgccaaatatcatgaaatcagcatcatttaccacaatgacaagaaaatgattctggtagtggaccggaggcatgtcaagtcaatggacaacgagaaaatgaagattcccttcacagacatttatatcggaggcgcgccaccagagattttgcagagtcgagccttgcgcgcccatctcccccttgacataaacttccgagggtgcatgaaaggtttccaatttcagaagaaggatttcaacctgcttgagcagactgagactttgggtgttggttacgggtgcccagaagatagtctgatctcgagacgtgcctactttaacggtcaatcttttattgcgtcaatacaaaagatctcttttttcgatggatttgaggggggcttcaacttccgcacattgcagccaaacggcctgttattctactacgcaagtggcagtgacgtcttttctatctctctggacaacggtaccgtcatcatggatgttaaggggatcaaagtgcagtcagtggataagcagtacaatgacggcctatcacatttcgtgatctcttccgtgtctcctacccggtacgagcttatcgtagataaatcccgggtaggttccaaaaaccctaccaagggaaaaattgagcagactcaggcatccgagaaaaaattttattttggagggtcccctatcagcgcacagtacgcaaatttcacgggttgtatctctaatgcgtacttcacaagggttgatagggatgttgaggtcgaggactttcagcggtacactgaaaaggtccatacctctttgtacgaatgtcctatcgaatcgagccccctcttcctgctccacaagaaggggaaaaatctctcgaaaccaaaagcgagtcagaacaagaaaggcgggaaaagtaaggatgctccctcgtgggacccagttgccctgaaacttcccgagcggaacacacctcgcaatagccactgccacctcagcaatagtcctcgtgccattgagcatgcctaccagtatggcgggactgccaattcaagacaagagtttgagcacctgaagggagatttcggcgctaaatcgcagttttccattagattacgaacgcgaagctcccatggcatgatattctacgtgtcagaccaggaggaaaacgactttatgactctgttcctggctcatggaagactggtatacatgttcaatgtcgggcataagaaacttaagattcggagccaggagaagtataatgacggcctctggcacgatgtaatcttcatcagggaacgctcaagcggcagactcgtcatcgacgggctgcgagttctcgaggagagcttgccaccgacagaggccacttggaaaattaagggccccatctatttgggcggagtggcacccggcaaagctgtgaaaaacgttcagatcaacagcatatacagtttctctggctgtcttagcaacttgcagttaaacggtgcttccatcaccagcgcttcacaaactttcagtgttacaccctgctttgaaggccccatggagacaggcacttacttcagcacagaaggaggatatgtagtgctcgacgaaagcttcaatatcggcctgaagtttgagatagcctttgaggtgcggcctcggagcagcagcggtacactggtgcatggccactctgtgaatggtgaatacctgaacgtccacatgaaaaatggccaggtgatcgtcaaggtcaataatgggattcgtgatttcagcacctccgttactcccaaacagtccctgtgcgatggacgatggcaccggataactgtgatacgcgattctaacgtcgtccagttggatgtggactccgaggttaaccatgtcgtcggtccactgaacccaaaacccatagatcacagagaacccgtcttcgtcggtggagtgcccgaaagcttgctgacacctaggctggcaccctctaagccttttacggggtgcattagacacttcgtgattgacgggcatcctgtctcctttagcaaggccgcgctggtgtctggtgcggtgagtataaatagttgcccagctgcctag

SEQ ID NO: 127252 - DNA, 5451 bp, Artificial Sequence
  derived and/or modified sequence
atggccctgtccagcgcctggagaagtgtccttcccctctggttactgtggtccgccgcctgctctagagcggcctcaggggatgacaatgctttcccctttgatatcgaaggctcatctgcagtgggacgccaggacccccccgagactagcgagccccgagttgcgttgggccgcctgccgccggccgctgaaaaatgtaacgccggttttttccacaccctgtctggcgagtgcgttccttgtgattgtaatggtaactcgaatgaatgcctcgacggttcaggctattgcgtccactgccagaggaacaccactggcgagcattgtgagaaatgtctggacggctatattggagatagtattagaggggcgccacagttctgccagccttgcccatgtcctctcccacaccttgcaaatttcgctgagtcctgttatcggaagaacggggccgttagatgcatctgcaacgagaactatgccggcccaaactgcgagaggtgcgcacctggttactacgggaatccacttctgattggctctacatgtaagaagtgtgactgcagcggaaactccgacccaaacctgatctttgaagattgcgacgaagttaccggccagtgtagaaactgtctgaggaatacaaccgggttcaaatgcgaaaggtgcgctcccggatactacggagacgcccggattgccaagaattgtgcggtatgcaattgcgggggagggccatgcgattccgtgactggtgaatgcctcgaagaaggttttgagcctcctacagggtgcgataagtgtgtttgggatctgactgatgccctgcgcctagctgccctatccattgaggaggggaaatctggtgtgctaagtgtgtctagtggcgccgcagcacatcgccatgtcaatgagattaacgctaccatctatctgctcaagactaaactcagcgagcgcgagaatcagtatgctttgagaaagatacaaatcaataacgcagaaaacacgatgaagagcctcctctcagacgtggaagaattggtggaaaaggaaaatcaggccagccgaaaggggcagctcgtgcaaaaagaatcaatggacaccataaatcatgcctcacaactcgttgagcaggcccacgacatgcgagacaagatccaggagatcaacaacaagatgttatattatggggaggaacatgagctgtcccccaaggagatctccgagaagctggtactggctcagaagatgctggaagaaatccggtcccgtcagcccttttttacccagcgtgagttggtggatgaagaggcagatgaggcctatgagctcttgagtcaggctgaaagttggcagcggcttcataatgaaacccgaacccttttcccagtggttctagagcagctcgacgattacaatgctaagttatccgatctgcaagaggcactggaccaggcccttaactacgtaagagacgctgaggacatgaacagggcgactgctgctcggcagcgcgatcacgagaagcagcaggaaagggtgcgcgaacagatggaggtagtgaacatgtctctgtccacctccgcagactccctgaccaccccgcgcctaacactcagtgagctggatgatatcatcaagaacgcatcaggaatttatgccgaaatcgacggcgccaagagcgaacttcaggtgaagctgtccaatctgagtaacctgtctcatgacctggtgcaggaggctatcgaccacgcccaagacctgcagcaagaggcaaatgagttgtccagaaagttgcactcctcagacatgaatggtctggttcagaaagccctggacgctagcaatgtgtacgaaaatattgtcaattatgtatccgaggcgaatgagaccgctgagtttgccctaaatacgacagatcgaatatacgacgccgtctctggaattgatacacagatcatctaccacaaagatgagtctgagaatctcctgaaccaggctagggaactgcaggccaaggccgaatcaagttctgacgaggccgtagctgatacctcgcgaagagtcgggggggccctggcaagaaagagtgctctgaagacaagactgagtgatgccgtgaagcagctgcaggcggccgagaggggcgatgcccagcagcgactgggacagtcccgactgatcactgaggaagcaaacagaacgaccatggaagtacaacaggctactgcccccatggccaacaacctcaccaactggagtcagaaccttcaacatttcgactcttctgcttataacaccgccgtgaatagtgcccgtgatgcagtccggaatctgacggaagtggtcccccagcttctggaccagctgcgcaccgtagagcagaaacgtcccgcctctaatgttagtgcatctatccaacggattagagaactgattgctcagactcggagtgtggcctcaaagatccaagtctctatgatgttcgatggtcagtctgccgtcgaagttcattctcgcacctcgatggacgacttgaaggcctttacttcactgtccctctacatgaagccacccgtcaagaggcctgaacttacagagaccgcggaccagtttatcctgtatttgggttccaagaatgccaaaaaagaatatatgggcctcgctatcaaaaacgataatctcgtgtatgtgtacaacttgggaactaaggatgtcgaaatccctctggattctaaacccgtgagctcatggcccgcatatttctcgatcgtgaagatagagcgcgtaggcaaacacggaaaagttttcctgacggtcccttctctttcttctactgccgaagagaagttcataaagaagggagaatttagcggagacgacagtctactggacttggacccagaggatacagtgttctacgtggggggggtcccaagcaatttcaaattgcccacctccctgaacttaccgggattcgtcggctgcctcgagctcgccaccctgaataatgacgtgattagtctctataacttcaaacatatctacaacatggatccatccacatcagttccttgcgccagagataaattggcattcacacagagcagagcagcatcatacttttttgacggctccggatacgctgtcgtgagagatattacacggcgcgggaaatttgggcaggtgacgcgctttgacatcgaagtccgaaccccggcagataatgggctcatcttactgatggtgaacgggtctatgttctttcgcttagaaatgaggaatggatatctccacgtattttatgattttggcttctccggaggtcccgtccacctggaggacacactcaagaaagctcaaatcaatgacgccaaatatcacgaaatctcgatcatttaccacaacgacaagaagatgattctagtcgttgatcgacgacacgttaaaagcatggataatgagaagatgaagatcccgttcaccgatatatacatcgggggagccccgcccgagattttgcaaagcagagctttgagggctcacctgcctctagatatcaatttccgaggatgcatgaagggcttccagttccagaagaaggacttcaatctcctggaacaaacagaaactctcggggttggatatggctgtcccgaggatagcttgataagtcgacgggcttactttaatggccaatcgtttatcgcctctatccaaaagatctctttttttgacggctttgaggggggatttaatttcagaaccttgcagcccaacgggttactcttctactatgctagcggcagcgatgtcttttcgattagcctcgataatggaacggtgattatggacgtgaaagggattaaagtccagtccgtggataaacagtacaatgacggcctctcacacttcgtgattagctccgtttcacctactcgctacgaactcattgtcgataaatccagagtggggagcaaaaatcccactaaaggcaagattgaacagactcaggcatcggagaagaagttctactttggtggctccccgatttcagcccagtatgccaattttaccggatgcatctcgaacgcttattttaccagagtagatagggatgtcgaggtggaggacttccaacgatatactgaaaaagtgcacacctccctgtacgaatgccctatcgagagcagccctctgtttctgctccataagaaaggtaagaatctgtccaaaccaaaagcttcccagaacaaaaagggcggcaagagcaaagatgcccctagctgggacccagtggctcttaagctgccagagcggaataccccgcggaactctcattgtcacctcagtaactccccccgtgcaatcgaacacgcttaccagtacggtgggaccgcaaactctaggcaggagtttgagcaccttaagggagatttcggagctaaaagccagttctcaatcaggcttaggactcgctcttcccatgggatgattttctacgtcagcgatcaggaagaaaacgatttcatgacactgttccttgcgcatggccggttggtgtatatgttcaatgtaggccacaagaaactcaagattcggtcacaggagaagtacaatgacgggctttggcatgatgtgatcttcattagggagcggagctcgggaaggttggtgatcgacggcctgcgcgtgttggaagagtctctgcctcccactgaagcaacatggaaaatcaagggacccatctacctcggaggtgtggccccaggaaaagccgtgaagaatgtgcaaattaacagtatatattctttcagcgggtgtttgtccaacctccagctgaatggagccagcattactagtgcaagccaaacctttagcgtcactccatgctttgaaggacctatggagactggcacgtactttagtactgaaggagggtatgttgtcttagatgagagttttaacatcggcctgaagttcgagatagcgttcgaagttaggccaagatcctcttccggcacactggtgcatgggcactccgttaatggggagtaccttaatgtgcatatgaaaaatggtcaggtcattgtgaaagtgaacaacggcatacgggacttctctactagtgtgacgccgaagcagagtctatgtgacggccgctggcatcggatcacggtgattcgggattcaaacgtggttcagctcgatgttgactctgaagtaaatcatgttgtaggtcctctaaaccccaagcctatcgaccatagggaaccagtgtttgtggggggcgttcctgaaagtctcctcactcccagattggccccaagtaagccctttactggatgtattcggcactttgttatcgacggccatcccgtcagcttcagcaaggctgccctggtgagtggcgccgtgagtataaacagctgtccggccgcgtag

SEQ ID NO: 127253 - DNA, 5451 bp, Artificial Sequence
  derived and/or modified sequence
atggcgctgtcatctgcttggcgctctgtcttgcccttgtggctactctggtcagcagcctgtagcagggccgcctctggagatgataatgccttcccctttgacatcgagggatctagtgcagttggcagacaggacccccccgaaacatctgaaccgcgcgttgctctgggtaggctgccccctgccgctgagaaatgcaatgctggattcttccacactctatccggagagtgcgtgccatgcgactgcaacggcaattctaatgagtgtctcgatgggtccggatactgcgtgcactgccagcggaacaccaccggtgagcactgcgaaaagtgtctagatggatacataggggatagcataaggggggccccacaattctgtcaaccatgtccttgccccctgccccatctggccaatttcgccgaaagctgctatcgcaagaatggggccgtgcgttgcatctgcaatgagaattatgccggtcccaactgcgagagatgcgccccgggctattatggtaatccattgctaattggaagtacttgtaagaaatgtgattgttcaggcaatagcgacccaaacctgattttcgaagactgtgacgaagtgacgggccaatgtcgaaactgcctgcggaacactaccggatttaagtgtgaacgttgcgccccgggctattatggcgacgccagaatcgctaagaattgcgctgtctgcaactgtggaggaggcccgtgcgattccgttacgggggaatgcctagaggaaggcttcgagcccccaaccggctgtgataaatgcgtgtgggacctgacagacgctttgcgacttgctgccctgagtattgaggagggcaaatcgggggtcctttccgtgtcaagcggtgcagcagcccataggcatgtaaacgaaatcaacgccaccatttatttactgaaaaccaaactgagcgagagggagaatcagtatgcccttcggaagatccagataaataacgctgagaatacaatgaaatccctgctcagtgacgtggaggaacttgtagagaaggaaaatcaggcctccagaaagggacagctagtgcaaaaagaaagcatggacacaataaatcatgcatcgcagctggtcgagcaagcacatgatatgcgggataagattcaggaaattaataacaaaatgttgtattacggcgaggaacacgagttgtcccccaaggagatttccgaaaaattggtgctcgcacagaaaatgctggaggagatcagaagtcgccagcccttctttacccagcgtgagctcgtggatgaggaggccgatgaggcctacgaacttctgagtcaggctgaatcctggcaaagactacacaacgaaactagaaccctgtttcctgtggttctggagcagctcgacgattacaacgcgaaactcagcgatctgcaggaagcactcgatcaagctttaaattacgtccgagatgcagaagatatgaatagggcaacagctgcaaggcaacgggatcatgaaaaacagcaggagcgggtgcgggaacaaatggaggtcgtgaacatgtccttgtcaactagtgctgactctctgactacaccccgcctgacgctgtcagaactcgacgacataatcaaaaacgccagtggcatctacgccgagatagacggtgccaagagtgaactgcaggtcaaactgtcaaatctgtcaaatctgtctcacgatctggttcaagaggctatcgatcatgctcaggacctacagcaggaagcgaatgagttatccagaaaactccactcctccgatatgaatggcctggtgcaaaaagcactggatgcctcgaatgtgtacgagaatatcgtgaattatgtcagcgaggcaaatgaaacagccgagtttgccctgaatacaaccgatcgcatttatgacgccgtcagtgggatcgatacacagataatttatcacaaagatgagtctgagaacttgctcaatcaggctagagaattacaggcgaaagccgagagtagcagcgacgaggcggtcgccgacacctctaggcgcgttgggggtgctctcgccaggaagtctgccctgaaaaccagactgtccgatgctgtaaagcagttgcaggcggccgagcggggcgatgcgcaacagaggctggggcagtctcgactgatcaccgaagaggcgaaccggaccacaatggaggttcagcaagccactgcccccatggccaataatctgacaaattggtcacagaacctgcagcactttgactctagcgcatataacaccgcggttaattcagcccgcgacgctgtacgaaatctgacggaagtggtgcctcagctgctggaccagctgagaactgttgagcagaagcgtcccgcatcaaacgtgagtgcttctattcagcgcatcagagaactcatcgctcagacccgctccgtggcctctaaaatccaggtaagcatgatgttcgatgggcagtccgctgtagaggtgcatagcagaacaagtatggatgacctgaaagcttttacatcgttgtccctgtatatgaagccccctgtgaagagaccagagcttaccgaaacagccgatcagtttatcctgtacctgggttctaagaacgccaaaaaggagtacatggggctggcaatcaaaaatgacaacttggtgtacgtctataacttggggacaaaggacgtcgaaatccccctggattccaaacccgtgtcttcatggcctgcatacttctcaattgtcaaaattgagcgtgttggcaagcacggtaaggtgtttttgaccgtgcctagcttatcttccacagctgaagagaaatttatcaaaaagggagagttctccggagacgattctctgttggatctggatcctgaagatacggttttttatgttggtggggtgccctcaaatttcaagctgcctacttccttgaacttacctggctttgtaggctgtttagaactcgccacactgaacaacgacgtgataagcctttataacttcaaacatatttataatatggacccttccacaagcgtgccatgcgcgagagacaaattggccttcacccaatctagggcagctagttatttctttgacggatccgggtacgccgtcgtcagagacataacacgtcgaggcaaatttgggcaggtgacccgtttcgatatcgaggtgcgcaccccagccgataacggtctgattctcctgatggtgaacggatccatgttcttccgcctcgaaatgaggaatggttatctgcatgtgttttatgacttcggcttcagcggtggccctgtgcacctggaggacacattaaaaaaggctcagattaacgacgctaaataccacgagatatccattatttaccacaacgataaaaaaatgatcctggtggtggacagacgccatgtcaaatcaatggacaacgagaaaatgaagatccccttcacagacatctacatcggcggcgcacctcctgagatcctccagagccgcgcactgcgggcccacctgccactcgatattaacttccgaggctgtatgaagggctttcagttccagaagaaggattttaatctccttgaacaaaccgagactctgggggtggggtacgggtgcccagaagattcattgattagtcgaagggcctattttaacgggcagagtttcatcgcatccatccagaaaatcagtttctttgacggctttgagggcggctttaatttccggacactgcagccgaatggcctactgttctattacgccagcggctcagacgtgttttccatttctttggataatggcacggtgatcatggacgttaagggaatcaaagtccaaagtgtggataaacagtacaatgacggactctcccacttcgtaatttcttccgttagcccgacacggtacgagctcattgtagataaatcgcgggtgggatccaaaaacccaactaagggtaagattgaacagactcaggccagtgaaaagaaattttattttggaggatcaccaatctcagctcagtatgcaaacttcacaggatgcatatcaaatgcctatttcacaagggtggaccgggatgttgaagttgaggattttcaaaggtacaccgagaaggtgcatacttctctgtacgagtgcccgattgagagttcccccctgtttttgctgcataaaaaaggcaaaaacttatccaaaccaaaggcctcccagaataaaaaaggtggaaaatcgaaggacgctccaagttgggaccctgtggctctgaaacttccagagcgaaacacaccccggaactcacattgccatctgtccaattcccctagggcgattgaacatgcctatcagtacggggggactgccaattcacggcaggagttcgagcacctgaaaggagattttggcgccaaaagtcagttttctatcagacttcggacccgatcttctcacggcatgattttttatgtgagtgaccaggaggaaaacgactttatgaccctgttcttggcccatggtcgacttgtgtacatgtttaacgtggggcacaaaaaattaaagattcgctctcaggagaagtacaatgacggactgtggcacgacgtgatctttatccgcgagaggtcctccggacggcttgtcatcgacggcctgagagtgctggaagagtctttgcctccgacagaagcgacatggaagataaaaggccctatctatcttggcggagtggcccctggtaaggccgtgaaaaacgtgcagataaacagcatctactccttcagcggctgtctgtcaaaccttcagcttaatggtgccagtatcactagtgcgagccagacatttagcgtgactccgtgtttcgaaggaccaatggaaaccggaacctacttctctaccgagggaggctacgtggtgctagacgagtcgttcaatattggattgaagtttgaaatagcttttgaagtgcggcctcgctctagtagcgggacgctggtacatggccactcagtcaacggggaatacctgaacgtgcacatgaagaacgggcaggttattgtgaaggtcaacaacggcataagagatttttcaacgtcggtgacccccaaacagtctctctgcgacggtcggtggcataggattactgtgatccgggattctaatgtcgttcagctggatgtcgacagtgaggtgaaccacgtcgttggtcctctcaacccaaagcccatcgatcacagggagccagtctttgtgggtggcgttccagaaagcctgctgacccccagattggcaccaagtaagccctttaccgggtgcatacgccactttgttatcgacgggcaccccgtgtctttcagcaaagccgcattggtttcaggagccgtttcgataaattcttgccccgctgcttag

SEQ ID NO: 127254 - DNA, 6297 bp, Artificial Sequence
  derived and/or modified sequence
agaaggtaaaaagggagtggtgagaatgaatgtgagaaggaagccaggacagcgcagtccccagtcccgaacggccagggagaggaggtggcctagcgctggcggggctcaccccaatccgtctgccttttgatgccgtactctgctggttgcgcagccacctcgggatactgcacacggagaggagggaaaataagcgaggcaccgccgcaccacgcgggagacctacggagacccacagcgcccgagccctggaagagcactactggatgtcagcggagaaatggctttgagctcagcctggcgctcggttctgcctctgtggctcctctggagcgctgcctgctcccgcgccgcgtccggggacgacaacgcttttccttttgacattgaagggagctcagcggttggcaggcaagacccgcctgagacgagcgaaccccgcgtggctctgggacgcctgccgcctgcggccgagaaatgcaatgctggattctttcacaccctgtcgggagaatgtgtgccctgcgactgtaatggcaattccaacgagtgtttggacggctcaggatactgtgtgcactgccagcggaacacaacaggagagcactgtgaaaagtgtctggatggttatatcggagattccatcaggggagcaccccaattctgccagccgtgcccctgtcccctgccccacttggccaattttgcagaatcctgctataggaaaaatggagctgttcggtgcatttgtaacgaaaattatgctggacctaactgtgaaagatgtgctcccggttactatggaaaccccttactcattggaagcacctgtaagaaatgtgactgcagtggaaattcagatcccaacctgatctttgaagattgtgatgaagtcactggccagtgtaggaattgcttacgcaacaccaccggattcaagtgtgaacgttgcgctcctggctactatggggacgccaggatagccaagaactgtgcagtgtgcaactgcgggggaggcccatgtgacagtgtaaccggagaatgcttggaagaaggttttgaaccccctacaggctgtgataagtgcgtctgggacctgactgatgcactgcggttagcagcgctctccatcgaggaaggcaaatccggggtgctgagcgtatcctctggggccgccgctcataggcacgtgaatgaaatcaacgccaccatctacctcctcaaaacaaaattgtcagaaagagaaaaccaatacgccctaagaaagatacaaatcaacaatgctgagaacacgatgaaaagccttctgtctgacgtagaggaattagttgaaaaggaaaatcaagcctccagaaaaggacaacttgttcagaaggaaagcatggacaccattaaccacgcaagtcagctggtagagcaagcccatgatatgagggataaaatccaagagatcaacaacaagatgctctattatggggaagagcatgaacttagccccaaggaaatctctgagaagctggtgttggcccagaagatgcttgaagagattagaagccgtcaaccatttttcacccaacgggagctcgtggatgaggaggcagatgaggcttacgaactactgagccaggctgagagctggcagcggctgcacaatgagacccgcactctgtttcctgtcgtcctggagcagctggatgactacaatgctaagttgtcagatctccaggaagcacttgaccaggcccttaactatgtcagggatgccgaagacatgaacagggccacagcagccaggcagcgggaccatgagaaacaacaggaaagagtgagggaacaaatggaagtggtgaacatgtctctgagcacatctgcggactctctgacaacacctcgtctaactctttcagaacttgatgatataataaagaatgcgtcagggatttatgcagaaatagatggagccaaaagtgaactacaagtaaaactatctaacctaagtaacctcagccatgatttagtccaagaagctattgaccatgcacaggaccttcaacaagaagctaatgaattgagcaggaagttgcacagttcagatatgaacgggctggtacagaaggctttggatgcatcaaatgtctatgaaaatattgttaattatgttagtgaagccaatgaaacagcagaatttgctttgaacaccactgaccgaatttatgatgcggtgagtgggattgatactcaaatcatttaccataaagatgaaagtgagaacctcctcaatcaagccagagaactgcaagcaaaggcagagtctagcagtgatgaagcagtggctgacactagcaggcgtgtgggtggagccctagcaaggaaaagtgcccttaaaaccagactcagtgatgccgttaagcaactacaagcagcagagagaggggatgcccagcagcgcctggggcagtctagactgatcaccgaggaagccaacaggacgacgatggaggtgcagcaggccactgcccccatggccaacaatctaaccaactggtcacagaatcttcaacattttgactcttctgcttacaacactgcagtgaactctgctagggatgcagtaagaaatctgaccgaggttgtccctcagctcctggatcagcttcgtacggttgagcagaagcgacctgcaagcaacgtttctgccagcatccagaggatccgagagctcattgctcagaccagaagtgttgccagcaagatccaagtctccatgatgtttgatggccagtcagctgtggaagtgcactcgagaaccagtatggatgacttaaaggccttcacgtctctgagcctgtacatgaaaccccctgtgaagcggccggaactgaccgagactgcagatcagtttatcctgtacctcggaagcaaaaacgccaaaaaagagtatatgggtcttgcaatcaaaaatgataatctggtatacgtctataatttgggaactaaagatgtggagattcccctggactccaagcccgtcagttcctggcctgcttacttcagcattgtcaagattgaaagggtgggaaaacatggaaaggtgtttttaacagtcccgagtctaagtagcacagcagaggaaaagttcattaaaaagggggaattttcgggagatgactctctgctggacctggaccctgaggacacagtgttttatgttggtggagtgccttccaacttcaagctccctaccagcttaaacctgcctggctttgttggctgcctggaactggccactttgaataatgatgtgatcagcttgtacaactttaagcacatctataatatggacccctccacatcagtgccatgtgcccgagataagctggccttcactcagagtcgggctgccagttacttcttcgatggctccggttatgccgtggtgagagacatcacaaggagagggaaatttggtcaggtgactcgctttgacatagaagttcgaacaccagctgacaacggccttattctcctgatggtcaatggaagtatgtttttcagactggaaatgcgcaatggttacctacatgtgttctatgattttggattcagcggtggccctgtgcatcttgaagatacgttaaagaaagctcaaattaatgatgcaaaataccatgagatctcaatcatttaccacaatgataagaaaatgatcttggtagttgacagaaggcatgtcaagagcatggataatgaaaagatgaaaataccttttacagatatatacattggaggagctcctccagaaatcttacaatccagggccctcagagcacaccttcccctagatatcaacttcagaggatgcatgaagggcttccagttccaaaagaaggacttcaatttactggagcagacagaaaccctgggagttggttatggatgcccagaagactcacttatatctcgcagagcatatttcaatggacagagcttcattgcttcaattcagaaaatatctttctttgatggctttgaaggaggttttaatttccgaacattacaaccaaatgggttactattctattatgcttcagggtcagacgtgttctccatctcactggataatggtactgtcatcatggatgtaaagggaatcaaagttcagtcagtagataagcagtacaatgatgggctgtcccacttcgtcattagctctgtctcacccacaagatatgaactgatagtagataaaagcagagttgggagtaagaatcctaccaaagggaaaatagaacagacacaagcaagtgaaaagaagttttacttcggtggctcaccaatcagtgctcagtatgctaatttcactggctgcataagtaatgcctactttaccagggtggatagagatgtggaggttgaagatttccaacggtatactgaaaaggtccacacttctctttatgagtgtcccattgagtcttcaccattgtttctcctccataaaaaaggaaaaaatttatccaagcctaaagcaagtcagaataaaaagggagggaaaagtaaagatgcaccttcatgggatcctgttgctctgaaactcccagagcggaatactccaagaaactctcattgccacctttccaacagccctagagcaatagagcacgcctatcaatatggaggaacagccaacagccgccaagagtttgaacacttaaaaggagattttggtgccaaatctcagttttccattcgtctgagaactcgttcctcccatggcatgatcttctatgtctcagatcaagaagagaatgacttcatgactctatttttggcccatggccgcttggtttacatgtttaatgttggtcacaaaaaactgaagattagaagccaggagaaatacaatgatggcctgtggcatgatgtgatatttattcgagaaaggagcagtggccgactggtaattgatggtctccgagtcctagaagaaagtcttcctcctactgaagctacctggaaaatcaagggtcccatttatttgggaggtgtggctcctggaaaggctgtgaaaaatgttcagattaactccatctacagttttagtggctgtctcagcaatctccagctcaatggggcctccatcacctctgcttctcagacattcagtgtgaccccttgctttgaaggccccatggaaacaggaacttacttttcaacagaaggaggatacgtggttctagatgaatctttcaatattggattgaagtttgaaattgcatttgaagtccgtcccagaagcagttccggaaccctggtccacggccacagtgtcaatggggagtacctaaatgttcacatgaaaaatggacaggtcatagtgaaagtcaataatggcatcagagatttttccacctcagttacacccaagcagagtctctgtgatggcagatggcacagaattacagttattagagattctaatgtggttcagttggatgtggactctgaagtgaaccatgtggttggacccctgaatccaaaaccaattgatcacagggagcctgtgtttgttggaggtgttccagaatctctactgacaccacgcttggcccccagcaaacccttcacaggctgcatacgccactttgtgattgatggacacccagtgagcttcagtaaagcagccctggtcagcggcgccgtaagcatcaactcctgtccagcagcctgacatgacagagcacagctgcccaaatacaaagttctttagagcactgaaagaaacacaaagccagccaggaggaacagtaactcttccttcgggtggaagctttcatcgagttgaacaggacttaaacgaatcatcagggaccggatatttcttatttctcatttggattcttaaccttgaatccaaagtgtctgcaatggacaacaattgaaggagtggcaaacttacttgtattgagagcacacgcaattcctactggtgaaattactgtttctgtttctaataaaatagaagggattccaaataaacacttgcacacatttttgaagtgcggctagattctcagattcacctttcttccagggaagataactttcaatctatataaaaatctctgtcctaaaactacctttctttattttgaagagacttactaacttacatataatctaaattagatgatagatttgtttttagcccttttgtttggtctatcagtataagaagaatattttaggtttatagctgaagttatcaaggtttaataaagtaaatttctaaca

SEQ ID NO: 127255 - DNA, 5983 bp, Artificial Sequence
  derived and/or modified sequence
agtcccgaacggccagggagaggaggtggcctagcgctggcggggctcaccccaatccgtctgccttttgatgccgtactgtaagctccgtccatctgtaggttcttgagccagaacctctgcgggaaggagaaaaagtgaaagagggagagggagagggagagagagggggagaaggggagagagagagagggagagagaggctggaactctcccttactctcgcactttccctttatttcctaagctgctggttgcgcagccacctcgggatactgcacacggagaggagggaaaataagcgaggcaccgccgcaccacgcgggagacctacggagacccacagcgcccgagccctggaagagcactactggatgtcagcggagaaatggctttgagctcagcctggcgctcggttctgcctctgtggctcctctggagcgctgcctgctcccgcgccgcgtccggggacgacaacgcttttccttttgacattgaagggagctcagcggttggcaggcaagacccgcctgagacgagcgaaccccgcgtggctctgggacgcctgccgcctgcggccgagaaatgcaatgctggattctttcacaccctgtcgggagaatgtgtgccctgcgactgtaatggcaattccaacgagtgtttggacggctcaggatactgtgtgcactgccagcggaacacaacaggagagcactgtgaaaagtgtctggatggttatatcggagattccatcaggggagcaccccaattctgccagccgtgcccctgtcccctgccccacttggccaattttgcagaatcctgctataggaaaaatggagctgttcggtgcatttgtaacgaaaattatgctggacctaactgtgaaagatgtgctcccggttactatggaaaccccttactcattggaagcacctgtaagaaatgtgactgcagtggaaattcagatcccaacctgatctttgaagattgtgatgaagtcactggccagtgtaggaattgcttacgcaacaccaccggattcaagtgtgaacgttgcgctcctggctactatggggacgccaggatagccaagaactgtgcagtgtgcaactgcgggggaggcccatgtgacagtgtaaccggagaatgcttggaagaaggttttgaaccccctacaggctgtgataagtgcgtctgggacctgactgatgcactgcggttagcagcgctctccatcgaggaaggcaaatccggggtgctgagcgtatcctctggggccgccgctcataggcacgtgaatgaaatcaacgccaccatctacctcctcaaaacaaaattgtcagaaagagaaaaccaatacgccctaagaaagatacaaatcaacaatgctgagaacacgatgaaaagccttctgtctgacgtagaggaattagttgaaaaggaaaatcaagcctccagaaaaggacaacttgttcagaaggaaagcatggacaccattaaccacgcaagtcagctggtagagcaagcccatgatatgagggataaaatccaagagatcaacaacaagatgctctattatggggaagagcatgaacttagccccaaggaaatctctgagaagctggtgttggcccagaagatgcttgaagagattagaagccgtcaaccatttttcacccaacgggagctcgtggatgaggaggcagatgaggcttacgaactactgagccaggctgagagctggcagcggctgcacaatgagacccgcactctgtttcctgtcgtcctggagcagctggatgactacaatgctaagttgtcagatctccaggaagcacttgaccaggcccttaactatgtcagggatgccgaagacatgaacagggccacagcagccaggcagcgggaccatgagaaacaacaggaaagagtgagggaacaaatggaagtggtgaacatgtctctgagcacatctgcggactctctgacaacacctcgtctaactctttcagaacttgatgatataataaagaatgcgtcagggatttatgcagaaatagatggagccaaaagtgaactacaagtaaaactatctaacctaagtaacctcagccatgatttagtccaagaagctattgaccatgcacaggaccttcaacaagaagctaatgaattgagcaggaagttgcacagttcagatatgaacgggctggtacagaaggctttggatgcatcaaatgtctatgaaaatattgttaattatgttagtgaagccaatgaaacagcagaatttgctttgaacaccactgaccgaatttatgatgcggtgagtgggattgatactcaaatcatttaccataaagatgaaagtgagaacctcctcaatcaagccagagaactgcaagcaaaggcagagtctagcagtgatgaagcagtggctgacactagcaggcgtgtgggtggagccctagcaaggaaaagtgcccttaaaaccagactcagtgatgccgttaagcaactacaagcagcagagagaggggatgcccagcagcgcctggggcagtctagactgatcaccgaggaagccaacaggacgacgatggaggtgcagcaggccactgcccccatggccaacaatctaaccaactggtcacagaatcttcaacattttgactcttctgcttacaacactgcagtgaactctgctagggatgcagtaagaaatctgaccgaggttgtccctcagctcctggatcagcttcgtacggttgagcagaagcgacctgcaagcaacgtttctgccagcatccagaggatccgagagctcattgctcagaccagaagtgttgccagcaagatccaagtctccatgatgtttgatggccagtcagctgtggaagtgcactcgagaaccagtatggatgacttaaaggccttcacgtctctgagcctgtacatgaaaccccctgtgaagcggccggaactgaccgagactgcagatcagtttatcctgtacctcggaagcaaaaacgccaaaaaagagtatatgggtcttgcaatcaaaaatgataatctggtatacgtctataatttgggaactaaagatgtggagattcccctggactccaagcccgtcagttcctggcctgcttacttcagcattgtcaagattgaaagggtgggaaaacatggaaaggtgtttttaacagtcccgagtctaagtagcacagcagaggaaaagttcattaaaaagggggaattttcgggagatgactctctgctggacctggaccctgaggacacagtgttttatgttggtggagtgccttccaacttcaagctccctaccagcttaaacctgcctggctttgttggctgcctggaactggccactttgaataatgatgtgatcagcttgtacaactttaagcacatctataatatggacccctccacatcagtgccatgtgcccgagataagctggccttcactcagagtcgggctgccagttacttcttcgatggctccggttatgccgtggtgagagacatcacaaggagagggaaatttggtcaggtgactcgctttgacatagaagttcgaacaccagctgacaacggccttattctcctgatggtcaatggaagtatgtttttcagactggaaatgcgcaatggttacctacatgtgttctatgattttggattcagcggtggccctgtgcatcttgaagatacgttaaagaaagctcaaattaatgatgcaaaataccatgagatctcaatcatttaccacaatgataagaaaatgatcttggtagttgacagaaggcatgtcaagagcatggataatgaaaagatgaaaataccttttacagatatatacattggaggagctcctccagaaatcttacaatccagggccctcagagcacaccttcccctagatatcaacttcagaggatgcatgaagggcttccagttccaaaagaaggacttcaatttactggagcagacagaaaccctgggagttggttatggatgcccagaagactcacttatatctcgcagagcatatttcaatggacagagcttcattgcttcaattcagaaaatatctttctttgatggctttgaaggaggttttaatttccgaacattacaaccaaatgggttactattctattatgcttcagggtcagacgtgttctccatctcactggataatggtactgtcatcatggatgtaaagggaatcaaagttcagtcagtagataagcagtacaatgatgggctgtcccacttcgtcattagctctgtctcacccacaagatatgaactgatagtagataaaagcagagttgggagtaagaatcctaccaaagggaaaatagaacagacacaagcaagtgaaaagaagttttacttcggtggctcaccaatcagtgctcagtatgctaatttcactggctgcataagtaatgcctactttaccagggtggatagagatgtggaggttgaagatttccaacggtatactgaaaaggtccacacttctctttatgagtgtcccattgagtcttcaccattgtttctcctccataaaaaaggaaaaaatttatccaagcctaaagcaagtcagaataaaaagggagggaaaagtaaagatgcaccttcatgggatcctgttgctctgaaactcccagagcggaatactccaagaaactctcattgccacctttccaacagccctagagcaatagagcacgcctatcaatatggaggaacagccaacagccgccaagagtttgaacacttaaaaggagattttggtgccaaatctcagttttccattcgtctgagaactcgttcctcccatggcatgatcttctatgtctcagatcaagaagagaatgacttcatgactctatttttggcccatggccgcttggtttacatgtttaatgttggtcacaaaaaactgaagattagaagccaggagaaatacaatgatggcctgtggcatgatgtgatatttattcgagaaaggagcagtggccgactggtaattgatggtctccgagtcctagaagaaagtcttcctcctactgaagctacctggaaaatcaagggtcccatttatttgggaggtgtggctcctggaaaggctgtgaaaaatgttcagattaactccatctacagttttagtggctgtctcagcaatctccagctcaatggggcctccatcacctctgcttctcagacattcagtgtgaccccttgctttgaaggccccatggaaacaggaacttacttttcaacagaaggaggatacgtggttctagatgaatctttcaatattggattgaagtttgaaattgcatttgaagtccgtcccagaagcagttccggaaccctggtccacggccacagtgtcaatggggagtacctaaatgttcacatgaaaaatggacaggtcatagtgaaagtcaataatggcatcagagatttttccacctcagttacacccaagcagagtctctgtgatggcagatggcacagaattacagttattagagattctaatgtggttcagttggatgtggactctgaagtgaaccatgtggttggacccctgaatccaaaaccaattgatcacagggagcctgtgtttgttggaggtgttccagaatctctactgacaccacgcttggcccccagcaaacccttcacaggctgcatacgccactttgtgattgatggacacccagtgagcttcagtaaagcagccctggtcagcggcgccgtaagcatcaactcctgtccagcagcctgacatgacagagcacagctgcccaaatacaaagttctttagagcactgaaagaaacacaaagccagccaggaggaacagtaactcttccttcgggtggaagctttcatcgagttgaacaggacttaaacgaatcatcagggaccgg

SEQ ID NO: 127256 - DNA, 6438 bp, Artificial Sequence
  derived and/or modified sequence
ttcttctggagcccttggaggggctccaaactgagaggggagggaagaccgcagggaaaggcggacctcagtgtctgaaaagccagcttagagtgggagggcctgggagtagaaggtaaaaagggagtggtgagaatgaatgtgagaaggaagccaggacagcgcagtccccagtcccgaacggccagggagaggaggtggcctagcgctggcggggctcaccccaatccgtctgccttttgatgccgtactgtaagctccgtccatctctgctggttgcgcagccacctcgggatactgcacacggagaggagggaaaataagcgaggcaccgccgcaccacgcgggagacctacggagacccacagcgcccgagccctggaagagcactactggatgtcagcggagaaatggctttgagctcagcctggcgctcggttctgcctctgtggctcctctggagcgctgcctgctcccgcgccgcgtccggggacgacaacgcttttccttttgacattgaagggagctcagcggttggcaggcaagacccgcctgagacgagcgaaccccgcgtggctctgggacgcctgccgcctgcggccgagaaatgcaatgctggattctttcacaccctgtcgggagaatgtgtgccctgcgactgtaatggcaattccaacgagtgtttggacggctcaggatactgtgtgcactgccagcggaacacaacaggagagcactgtgaaaagtgtctggatggttatatcggagattccatcaggggagcaccccaattctgccagccgtgcccctgtcccctgccccacttggccaattttgcagaatcctgctataggaaaaatggagctgttcggtgcatttgtaacgaaaattatgctggacctaactgtgaaagatgtgctcccggttactatggaaaccccttactcattggaagcacctgtaagaaatgtgactgcagtggaaattcagatcccaacctgatctttgaagattgtgatgaagtcactggccagtgtaggaattgcttacgcaacaccaccggattcaagtgtgaacgttgcgctcctggctactatggggacgccaggatagccaagaactgtgcagtgtgcaactgcgggggaggcccatgtgacagtgtaaccggagaatgcttggaagaaggttttgaaccccctacaggctgtgataagtgcgtctgggacctgactgatgcactgcggttagcagcgctctccatcgaggaaggcaaatccggggtgctgagcgtatcctctggggccgccgctcataggcacgtgaatgaaatcaacgccaccatctacctcctcaaaacaaaattgtcagaaagagaaaaccaatacgccctaagaaagatacaaatcaacaatgctgagaacacgatgaaaagccttctgtctgacgtagaggaattagttgaaaaggaaaatcaagcctccagaaaaggacaacttgttcagaaggaaagcatggacaccattaaccacgcaagtcagctggtagagcaagcccatgatatgagggataaaatccaagagatcaacaacaagatgctctattatggggaagagcatgaacttagccccaaggaaatctctgagaagctggtgttggcccagaagatgcttgaagagattagaagccgtcaaccatttttcacccaacgggagctcgtggatgaggaggcagatgaggcttacgaactactgagccaggctgagagctggcagcggctgcacaatgagacccgcactctgtttcctgtcgtcctggagcagctggatgactacaatgctaagttgtcagatctccaggaagcacttgaccaggcccttaactatgtcagggatgccgaagacatgaacagggccacagcagccaggcagcgggaccatgagaaacaacaggaaagagtgagggaacaaatggaagtggtgaacatgtctctgagcacatctgcggactctctgacaacacctcgtctaactctttcagaacttgatgatataataaagaatgcgtcagggatttatgcagaaatagatggagccaaaagtgaactacaagtaaaactatctaacctaagtaacctcagccatgatttagtccaagaagctattgaccatgcacaggaccttcaacaagaagctaatgaattgagcaggaagttgcacagttcagatatgaacgggctggtacagaaggctttggatgcatcaaatgtctatgaaaatattgttaattatgttagtgaagccaatgaaacagcagaatttgctttgaacaccactgaccgaatttatgatgcggtgagtgggattgatactcaaatcatttaccataaagatgaaagtgagaacctcctcaatcaagccagagaactgcaagcaaaggcagagtctagcagtgatgaagcagtggctgacactagcaggcgtgtgggtggagccctagcaaggaaaagtgcccttaaaaccagactcagtgatgccgttaagcaactacaagcagcagagagaggggatgcccagcagcgcctggggcagtctagactgatcaccgaggaagccaacaggacgacgatggaggtgcagcaggccactgcccccatggccaacaatctaaccaactggtcacagaatcttcaacattttgactcttctgcttacaacactgcagtgaactctgctagggatgcagtaagaaatctgaccgaggttgtccctcagctcctggatcagcttcgtacggttgagcagaagcgacctgcaagcaacgtttctgccagcatccagaggatccgagagctcattgctcagaccagaagtgttgccagcaagatccaagtctccatgatgtttgatggccagtcagctgtggaagtgcactcgagaaccagtatggatgacttaaaggccttcacgtctctgagcctgtacatgaaaccccctgtgaagcggccggaactgaccgagactgcagatcagtttatcctgtacctcggaagcaaaaacgccaaaaaagagtatatgggtcttgcaatcaaaaatgataatctggtatacgtctataatttgggaactaaagatgtggagattcccctggactccaagcccgtcagttcctggcctgcttacttcagcattgtcaagattgaaagggtgggaaaacatggaaaggtgtttttaacagtcccgagtctaagtagcacagcagaggaaaagttcattaaaaagggggaattttcgggagatgactctctgctggacctggaccctgaggacacagtgttttatgttggtggagtgccttccaacttcaagctccctaccagcttaaacctgcctggctttgttggctgcctggaactggccactttgaataatgatgtgatcagcttgtacaactttaagcacatctataatatggacccctccacatcagtgccatgtgcccgagataagctggccttcactcagagtcgggctgccagttacttcttcgatggctccggttatgccgtggtgagagacatcacaaggagagggaaatttggtcaggtgactcgctttgacatagaagttcgaacaccagctgacaacggccttattctcctgatggtcaatggaagtatgtttttcagactggaaatgcgcaatggttacctacatgtgttctatgattttggattcagcggtggccctgtgcatcttgaagatacgttaaagaaagctcaaattaatgatgcaaaataccatgagatctcaatcatttaccacaatgataagaaaatgatcttggtagttgacagaaggcatgtcaagagcatggataatgaaaagatgaaaataccttttacagatatatacattggaggagctcctccagaaatcttacaatccagggccctcagagcacaccttcccctagatatcaacttcagaggatgcatgaagggcttccagttccaaaagaaggacttcaatttactggagcagacagaaaccctgggagttggttatggatgcccagaagactcacttatatctcgcagagcatatttcaatggacagagcttcattgcttcaattcagaaaatatctttctttgatggctttgaaggaggttttaatttccgaacattacaaccaaatgggttactattctattatgcttcagggtcagacgtgttctccatctcactggataatggtactgtcatcatggatgtaaagggaatcaaagttcagtcagtagataagcagtacaatgatgggctgtcccacttcgtcattagctctgtctcacccacaagatatgaactgatagtagataaaagcagagttgggagtaagaatcctaccaaagggaaaatagaacagacacaagcaagtgaaaagaagttttacttcggtggctcaccaatcagtgctcagtatgctaatttcactggctgcataagtaatgcctactttaccagggtggatagagatgtggaggttgaagatttccaacggtatactgaaaaggtccacacttctctttatgagtgtcccattgagtcttcaccattgtttctcctccataaaaaaggaaaaaatttatccaagcctaaagcaagtcagaataaaaagggagggaaaagtaaagatgcaccttcatgggatcctgttgctctgaaactcccagagcggaatactccaagaaactctcattgccacctttccaacagccctagagcaatagagcacgcctatcaatatggaggaacagccaacagccgccaagagtttgaacacttaaaaggagattttggtgccaaatctcagttttccattcgtctgagaactcgttcctcccatggcatgatcttctatgtctcagatcaagaagagaatgacttcatgactctatttttggcccatggccgcttggtttacatgtttaatgttggtcacaaaaaactgaagattagaagccaggagaaatacaatgatggcctgtggcatgatgtgatatttattcgagaaaggagcagtggccgactggtaattgatggtctccgagtcctagaagaaagtcttcctcctactgaagctacctggaaaatcaagggtcccatttatttgggaggtgtggctcctggaaaggctgtgaaaaatgttcagattaactccatctacagttttagtggctgtctcagcaatctccagctcaatggggcctccatcacctctgcttctcagacattcagtgtgaccccttgctttgaaggccccatggaaacaggaacttacttttcaacagaaggaggatacgtggttctagatgaatctttcaatattggattgaagtttgaaattgcatttgaagtccgtcccagaagcagttccggaaccctggtccacggccacagtgtcaatggggagtacctaaatgttcacatgaaaaatggacaggtcatagtgaaagtcaataatggcatcagagatttttccacctcagttacacccaagcagagtctctgtgatggcagatggcacagaattacagttattagagattctaatgtggttcagttggatgtggactctgaagtgaaccatgtggttggacccctgaatccaaaaccaattgatcacagggagcctgtgtttgttggaggtgttccagaatctctactgacaccacgcttggcccccagcaaacccttcacaggctgcatacgccactttgtgattgatggacacccagtgagcttcagtaaagcagccctggtcagcggcgccgtaagcatcaactcctgtccagcagcctgacatgacagagcacagctgcccaaatacaaagttctttagagcactgaaagaaacacaaagccagccaggaggaacagtaactcttccttcgggtggaagctttcatcgagttgaacaggacttaaacgaatcatcagggaccggatatttcttatttctcatttggattcttaaccttgaatccaaagtgtctgcaatggacaacaattgaaggagtggcaaacttacttgtattgagagcacacgcaattcctactggtgaaattactgtttctgtttctaataaaatagaagggattccaaataaacacttgcacacatttttgaagtgcggctagattctcagattcacctttcttccagggaagataactttcaatctatataaaaatctctgtcctaaaactacctttctttattttgaagagacttactaacttacatataatctaaattagatgatagatttgtttttagcccttttgtttggtctatcagtataagaagaatattttaggtttatagctgaagttatcaaggtttaataaagtaaatttctaacagaatactagaaaaa

SEQ ID NO: 127257 - DNA, 5451 bp, Artificial Sequence
  derived and/or modified sequence
atggccctgagcagcgcctggaggtctgtgctgcccctgtggctgctgtggagcgctgcctgcagccgggccgccagcggagatgacaatgccttcccctttgacatcgagggcagcagcgctgtgggccggcaggaccccccagagaccagcgagccccgggtggccctgggccgcctgcccccagctgctgagaagtgcaatgccggcttcttccacaccctgagcggggagtgtgtgccctgtgactgcaatggaaacagcaatgaatgtctggatggcagcggctactgtgtgcactgccagaggaacaccaccggggagcactgtgagaagtgcctggatggctacatcggggacagcatccggggggccccccagttctgccagccctgcccctgccccctgccccacctggccaactttgctgagagctgctacaggaagaatggagctgtgcgctgcatctgcaatgaaaattatgccggccccaactgtgagcgctgtgcccctggctactacggcaaccccctgctgattggcagcacctgcaagaagtgtgactgcagcggcaacagcgaccccaacctgatctttgaggactgtgatgaggtgacaggccagtgcaggaactgcctgaggaacaccaccggcttcaagtgtgagcgctgtgcccctggctactatggagatgcccgcatcgccaagaactgtgctgtgtgcaactgtggcggcggcccctgtgacagcgtgactggagagtgcctggaggagggctttgagccccccaccggctgtgacaagtgtgtgtgggacctgacagatgccctgcggctggccgccctgagcattgaggagggcaagtctggagtgctgtctgtgagcagcggggctgctgcccacagacatgtgaatgagatcaatgccaccatctacctgctgaagaccaagctgtctgagcgggagaaccagtatgccctgaggaagatccagatcaacaatgctgagaacaccatgaagagcctgctgagtgatgtggaggagctggtggagaaggagaaccaggccagcaggaagggccagctggtgcagaaggagagcatggacaccatcaaccacgccagccagctggtggagcaggcccatgacatgagggacaagatccaggagatcaacaacaagatgctgtactacggggaggagcacgagctgagccccaaggagatcagcgagaagctggtgctggcccagaagatgctggaggagatccgcagccggcagcccttcttcacccagcgggagctggtggatgaggaggctgatgaggcctatgagctgctgagccaggccgagagctggcagaggctgcacaatgagaccaggaccctcttccctgtggtgctggagcagctggatgactacaatgccaagctgagtgacctgcaggaggccctggaccaggccctgaactacgtgagagatgctgaggacatgaacagagccacagctgcccggcagagggaccacgagaagcagcaggagcgggtgcgggagcagatggaggtggtgaacatgagcctgagcaccagcgctgacagcctgaccaccccccggctgaccctgtctgagctggatgacatcatcaagaatgccagcggcatctatgcagaaattgatggagccaagtctgagctgcaggtgaagctgagcaacctgagcaacctgagccatgacctggtgcaggaggccatcgaccacgcccaggacctgcagcaggaggccaatgagctgagcaggaagctgcacagcagtgacatgaatggcctggtgcagaaggccctggatgccagcaatgtgtatgaaaatattgtgaactacgtgtctgaggccaatgaaacagctgagtttgccctgaacaccacagaccgcatctatgatgctgtgtctggaattgacacccagatcatctaccacaaggatgaaagtgagaacctgctgaaccaggcccgggagctgcaggccaaggccgagagcagcagtgatgaagctgtggccgacaccagcagaagagtgggcggggccctggccaggaagagcgccctgaagacccggctgagtgatgctgtgaagcagctgcaggccgctgagagaggagatgcccagcagaggctgggccagagccgcctcatcacagaggaggccaacagaaccaccatggaggtgcagcaggccacagcccccatggccaacaacctgaccaactggagccagaacctgcagcactttgacagcagcgcctacaacacagctgtgaacagcgccagagatgctgtgaggaacctgacagaggtggtgccccagctgctggaccagctgaggacagtggagcagaagaggcctgccagcaatgtgtctgccagcatccagaggatccgggagctgattgcccagaccaggtctgtggccagcaagatccaggtgtccatgatgtttgatggccagagcgctgtggaggtgcacagcaggacctccatggatgacctgaaggccttcaccagcctgagcctgtacatgaagccccctgtgaagaggcctgagctgacagaaacagctgaccagttcatcctgtacctgggcagcaagaatgccaagaaggagtacatgggcctggccatcaagaatgacaacctggtgtatgtgtacaacctgggcaccaaggatgtggagatccccctggacagcaagcctgtgtcctcctggccagcctacttcagcatcgtgaagattgagcgggtgggcaagcacggcaaggtgttcctgactgtgcccagcctgagcagcacagctgaggagaagttcatcaagaagggggagttctctggagatgacagcctgctggacctggaccctgaagatactgtgttctacgtgggcggcgtgcccagcaacttcaagctgcccaccagcctgaacctgcccggctttgtgggctgcctggagctggccaccctgaacaatgatgtgatcagcctgtacaacttcaagcacatctacaacatggaccccagcacctctgtgccctgtgcccgggacaagctggccttcacccagagccgggccgccagctacttctttgatggcagcggctatgctgtggtgcgggacatcacccggcggggcaagtttggccaggtgaccaggtttgacatcgaggtgaggaccccagctgacaatggcctcatcctgctgatggtgaatggctccatgttcttccggctggagatgagaaatggctacctgcacgtgttctatgactttggcttcagcggcggccctgtgcacctggaggacaccctgaagaaggcccagatcaatgatgccaagtaccacgagatcagcatcatctaccacaatgacaagaagatgatcctggtggtggaccggcggcacgtgaagtccatggacaatgagaagatgaagatccccttcacagacatctacatcggcggggcccctcctgagatcctgcagagccgggccctgcgggcccacctgcccctggacatcaacttccggggctgcatgaagggcttccagttccagaagaaggacttcaacctgctggagcagacagagaccctgggcgtgggctacggctgcccagaggacagcctcatcagccggcgggcctacttcaacggccagagcttcatcgccagcatccagaagatctccttctttgatggctttgagggcggcttcaacttccgcaccctgcagcccaacggcctgctcttctactatgccagcggcagtgatgtgttcagcatcagcctggacaatggaacagtcatcatggatgtgaagggcatcaaggtgcagagcgtggacaagcagtacaatgatggcctgagccactttgtgatcagctctgtgagccccaccaggtatgagctgattgtggacaagagccgggtgggcagcaagaaccccaccaagggcaagattgagcagacccaggccagcgagaagaagttctactttggaggcagccccatcagcgcccagtatgccaacttcaccggctgcatcagcaatgcctacttcaccagggtggacagagatgtggaggtggaggacttccagcgctacacagagaaggtgcacaccagcctgtatgagtgccccatcgagagcagccccctcttcctgctgcacaagaagggcaagaacctgagcaagcccaaggccagccagaacaagaagggcggcaagagcaaggatgcccccagctgggaccctgtggccctgaagctgcctgagaggaacacccccaggaacagccactgccacctgagcaacagcccccgggccattgaacatgcctaccagtatggaggaacagccaacagccggcaggagtttgagcacctgaagggggactttggagccaagagccagttcagcatccggctgcggaccaggagcagccacggcatgatcttctacgtgtctgaccaggaggagaatgacttcatgaccctcttcctggcccacggccgcctggtgtacatgtttaatgtgggccacaagaagctgaagatccgcagccaggagaagtacaatgatggcctgtggcatgatgtgatcttcatccgggagaggagcagcggccgcctggtgattgatggcctgcgggtgctggaggagagcctgcccccaacagaggccacctggaagatcaagggccccatctacctgggcggcgtggcccctgggaaggctgtgaagaatgtgcagatcaacagcatctacagcttcagcggctgcctgagcaacctgcagctgaatggagccagcatcaccagcgccagccagaccttctctgtgaccccctgctttgagggccccatggagaccggcacctacttcagcacagagggcggctacgtggtgctggatgagagcttcaacatcggcctgaagtttgaaattgcctttgaggtgcggcccaggagcagcagcggcaccctggtgcacggccacagcgtgaatggagagtacctgaatgtgcacatgaagaatggccaggtgattgtgaaggtgaacaacggcatccgggacttcagcacctctgtgacccccaagcagagcctgtgtgatggccgctggcaccgcatcaccgtcatccgggacagcaatgtggtgcagctggatgtggacagcgaggtgaaccacgtggtgggccccctgaaccccaagcccatcgaccaccgggagcctgtgtttgtgggcggcgtgcctgagagcctgctgaccccccggctggcccccagcaagcccttcaccggctgcatccgccactttgtgattgatggccaccctgtgtccttcagcaaggccgccctggtgtctggagctgtgtccatcaacagctgcccagctgcctag

SEQ ID NO: 127258 - DNA, 5451 bp, Artificial Sequence
  derived and/or modified sequence
atggccctgagcagcgcctggcggagcgtgctgcccctgtggctgttatggagcgctgcttgctcgcgggccgcatccggtgatgacaacgcattcccctttgacatcgaaggcagctccgcagtgggcaggcaggacccgcctgagacaagcgagcctcgcgtcgcacttgggcggctacccccagccgccgagaagtgtaatgctggatttttccacaccctttctggagagtgtgtgccctgtgactgtaatggcaacagcaacgaatgcttggacggttcaggctactgtgtccactgccaaagaaacaccaccggagagcattgtgagaaatgtttagacggatacataggcgattcgattaggggtgcaccacagttttgccagccctgcccttgtccgctgccacacctcgcaaatttcgctgagagctgttaccggaaaaacggggccgtaaggtgcatctgtaatgagaattacgcgggcccaaattgtgagagatgtgccccaggatactatggcaaccctttgctaatcgggtctacatgtaaaaagtgtgactgttcagggaatagcgatcccaacttgatattcgaggactgcgatgaagttactggacagtgcaggaactgtctgcgcaacacaaccgggttcaaatgtgagaggtgcgctccgggctactacggcgacgctaggatcgctaaaaactgtgcagtgtgtaattgcgggggcgggccttgcgactctgtcacgggcgagtgcttggaagagggttttgagccccccaccgggtgtgacaagtgtgtttgggacttaactgatgcactccgccttgcggccttgtccattgaggaaggaaagagcggggttctgagcgtatccagcggcgctgctgcacacagacacgtcaacgaaatcaacgccaccatatacttgttgaagaccaaactatccgagcgcgaaaatcagtatgccctgcgtaaaatccagataaataacgctgagaatacgatgaagtccctgttgtctgacgtcgaggaactcgtcgaaaaggaaaaccaggccagtcggaaggggcagttagtacagaaagaaagtatggacaccataaaccatgcaagccagctagtggagcaagcccacgacatgcgcgacaagatccaggagatcaacaataagatgctgtactatggagaagagcatgaactgagtcccaaggagattagcgagaagttggtattggctcagaaaatgttggaggaaatccggtcaaggcagccattttttacccagcgggagctggtagatgaggaggctgatgaagcctatgaactgctgtcgcaggcagaaagctggcagaggctccataatgagactcgcaccctctttcccgttgtgcttgagcagctggacgattacaacgccaagctgagcgacctgcaggaagccctggatcaggcattaaactatgtcagggatgccgaggacatgaacagggcaaccgcagcccggcagcgagatcacgaaaaacagcaggaaagggttcgggagcagatggaggtggtcaacatgagtttgtcaacaagtgccgactccctgaccactcctagattgacgctctcagagctggacgatatcattaagaacgcctcaggtatttatgccgagattgatggggccaaatccgagctccaggtaaagctcagtaatctaagcaacctttcccacgatttggtgcaggaggctattgatcatgcacaggacctccaacaggaggcaaacgagcttagtcgcaagctccattcatctgacatgaatggcctagtgcaaaaggccctggatgcttctaatgtgtatgaaaacatagtaaactatgtttctgaagcaaacgagacagcagagttcgctctcaacaccactgaccggatttatgatgctgtctccgggatcgacacacagatcatctaccacaaggatgaatccgaaaatctgctgaaccaggcacgtgagttgcaggcaaaggcggagtcgtcatctgatgaggccgttgccgacaccagccgcagggtgggtggagccttagctcgcaagagcgccctgaaaactcgcctctccgatgccgttaaacaactgcaggccgccgagcgtggcgacgcccaacagcgactcggccagtcccgtctcatcaccgaggaggccaaccgaaccacaatggaagttcaacaggccaccgctccgatggctaataatctaacaaattggtcacagaatttgcagcacttcgactccagtgcctataatacagctgtgaactctgcgcgtgatgccgtccggaatctcacggaggtggtcccacaactgctagaccagctccggaccgtggaacaaaagaggcctgcaagtaacgtatccgcttccatccagagaatcagggaattgatcgcccagacacggtccgtggcgagcaagatccaggtctctatgatgtttgatggtcaatccgctgtggaggtgcattccagaacaagcatggatgatctcaaagccttcacttcacttagcttatacatgaaaccacctgtaaagcgcccagaactgacagagacggccgaccagttcatcttgtatctggggagcaagaacgccaagaaggagtatatggggcttgcaatcaagaacgacaaccttgtttacgtttataatctaggaaccaaggatgtggaaattcccctggattctaaacccgtgtcaagctggcctgcgtatttctcgattgtgaaaatcgagagagttggcaagcacggaaaggtgtttctaaccgtccccagtttgagcagcacagctgaagaaaagtttataaagaaaggagaattttcaggcgatgactccctgcttgacctagatcccgaggacactgttttctatgtgggtggagtcccaagtaactttaaactgcctacatccctaaatttgccgggattcgtaggctgcctcgaactcgctactctgaacaacgacgtcatatccctgtataatttcaagcacatctacaacatggatccgagcaccagcgtgccatgcgcacgtgacaagttggcatttactcagagtagagcagccagctactttttcgacgggagtggctatgcagtcgttcgggacattacaaggaggggtaaattcggacaggttactcgctttgatatcgaggtgcgcactcccgccgacaatggtctgatattgctcatggtgaacggctctatgttctttagactagagatgcgaaatggataccttcacgttttctatgatttcgggttttccggaggcccggtgcacttggaagatactctcaagaaagctcagattaacgacgctaagtaccacgagatttctatcatctatcacaacgacaaaaagatgatcctagtcgtcgatcgacgtcacgtcaagagtatggacaacgaaaagatgaagattccattcacagatatttacatcgggggagccccaccagagatattacagtcccgcgctctgagagctcacttacctttggacattaacttcagaggttgcatgaagggtttccaattccaaaagaaagactttaacctactagaacagactgaaacactgggggttgggtacggctgtccagaggattctctgatctctagacgcgcctatttcaacgggcagagcttcatcgcttccatccagaagatctcgtttttcgacggctttgaaggtgggttcaatttcagaacgctacaacccaacggcctgctgttctactacgctagtggttctgatgtcttcagcatttccctggacaacgggacagtgattatggacgtgaaggggatcaaggtgcaaagcgtggacaaacaatacaacgacggcctatcgcattttgtaatttcttcagtgtcccccacaaggtatgaattaatcgttgataagtccagagttggaagcaagaaccccacaaaggggaaaatagagcaaacccaagcttcggagaagaaattttactttggaggtagtccaattagcgcgcagtacgctaatttcacgggttgtataagtaatgcttattttacccgtgtcgatcgagatgtggaggtagaggatttccagaggtacacagagaaagtccacacctctctgtatgagtgcccgatcgagagctcaccactctttttgctgcacaaaaaggggaagaacttatcaaagccaaaagccagccagaataaaaaaggcgggaagtcaaaggacgcaccaagctgggacccggttgccctgaagctgcccgaacgcaacactcccaggaatagtcactgtcacctgtccaacagtcctagggcaattgagcatgcctaccagtacggcgggacagccaactcccgccaggagttcgagcatttaaaaggcgatttcggcgctaaaagccagttctctattcgcctacgcactaggtcttctcatggtatgatcttttatgtttccgaccaggaggagaacgatttcatgacgctgttcctggcacacggcaggttagtgtacatgtttaatgtggggcacaaaaagctcaagatccgtagccaggaaaagtataacgatgggctgtggcatgatgtcattttcattcgtgagaggtctagcggtagactggttatcgacgggctaagggttctcgaggagtcccttcccccgacggaagctacctggaaaattaaagggcctatttacctgggtggagttgccccaggcaaggcagtgaagaatgtacaaatcaactccatttatagcttcagtggatgcctgtcgaatctgcaactgaatggagcttcaattacttcagcgtcccaaaccttctccgtcacaccctgttttgagggccccatggagactgggacatactttagtaccgaaggcggatatgtggtgctcgatgagagtttcaatatagggctcaaatttgaaatcgcattcgaggtgaggccccgcagcagtagcggaacactcgtccacggccattcggtgaatggcgaatatctgaatgtgcacatgaagaatgggcaagttattgtgaaagtgaataatgggattagggacttcagcacttcagttacccccaaacagagtctttgtgacggccggtggcaccggattacagtaattcgcgacagcaatgtggtgcagctcgatgtcgactctgaggtgaatcacgtggtgggacctcttaacccaaagccaatcgatcacagagaacctgtttttgtcgggggggtgcctgagtccctccttactccgagactagcgccttccaaacccttcactggatgtatacgccatttcgttatcgacgggcatcctgtgagcttttccaaggccgcactggtcagcggagcagtgtctattaacagttgtcccgcagcatag

SEQ ID NO: 127259 - DNA, 5451 bp, Artificial Sequence
  derived and/or modified sequence
atggccctgagcagcgcctggcggagcgtgctgcccctgtggctgctgtggtcagcagcctgctcgcgagccgcatctggagatgataatgcattcccgtttgatatagagggcagttctgccgtcggccggcaagatccccccgaaacctccgagcctagagttgcactgggccgcctgccaccggccgctgagaaatgcaacgccggattcttccatacactttccggtgaatgcgtgccttgtgattgtaacggaaatagtaatgaatgcctggatgggagtgggtactgcgtgcactgtcagcgaaacactacaggagagcattgcgaaaagtgtttggacgggtacatcggagactcaattaggggcgcccctcagttctgtcaaccctgtccttgccccctgccacatctagccaactttgcagaaagctgttaccgtaagaacggggccgtgcgctgtatttgcaacgagaactacgccggacccaattgcgaacgctgtgcccctggctattatggcaacccccttctcatcgggtcaacatgcaaaaagtgcgattgttccggtaatagtgaccctaatcttatcttcgaggactgtgacgaagttaccggtcagtgtcgcaactgccttaggaataccacaggttttaaatgtgagcgatgcgccccaggttactacggcgacgctaggattgccaagaattgtgcagtgtgcaactgtggcggcggcccctgtgattcagtaactggggaatgcctggaagaaggcttcgaaccacccaccggatgtgataagtgtgtctgggatctgacagatgctctgaggctcgctgcattatccatcgaagaagggaagtcaggagtcttatcagtgtcttccggtgccgccgcccatcggcatgtgaatgaaatcaacgccactatctaccttctgaagacaaaactgagcgagagagagaatcagtacgctttacggaaaatacagatcaacaatgcagagaacacaatgaagagtctgctgtctgacgtggaagaactcgtggagaaggagaatcaagcttcccggaagggacaactcgtccaaaaagaaagtatggataccattaatcatgcatcccaactggttgaacaagcacatgacatgagagacaagatccaggagataaacaacaagatgctttactatggggaagaacacgagctctcgccaaaagagattagtgaaaagttggtgctggctcaaaagatgctggaggagatccggtcgaggcagccgtttttcacacagcgggagctggtcgatgaagaggcagacgaagcctacgagctcctctcccaggcggagtcttggcagcgcctccataacgagactaggacccttttcccagttgttttagagcagctggatgactacaacgccaaattatccgaccttcaagaggcactggaccaagccctgaactatgtgcgcgacgcagaggatatgaatcgcgccacggccgcacgccaacgggaccacgagaagcagcaggaacgcgtccgagaacaaatggaggtggtcaacatgagcctaagtacttctgccgatagcctcacaacaccccgcctgaccttgtctgaactcgatgatatcataaagaatgcaagcgggatttacgcggagattgatggggctaagtcagaactccaggttaagctttccaacctctctaatctctcccatgacctggtgcaggaggctattgatcatgcccaggacctacagcaggaggccaacgaactgtcccgcaagctgcattctagtgatatgaatggattggtgcagaaagccttagacgctagtaatgtctacgaaaacattgtcaactacgtttcagaggccaacgaaaccgccgaattcgcactgaacacgactgataggatctacgacgctgtgtcaggcatagatactcagatcatctatcacaaagatgagtcagaaaacctcctcaaccaagctcgcgaacttcaggccaaggctgaatcatccagtgatgaagctgtggccgatacgtcccgcagagttgggggcgccttggcaaggaagtccgccttaaagactcgcctcagcgatgctgtgaaacagttgcaggccgccgaacgaggggacgcacagcagagactcgggcagagccggttaatcacagaggaagcaaacaggaccaccatggaggtccagcaagccaccgcccccatggctaataatcttaccaattggagccagaatcttcagcattttgattcctctgcttataacacagccgtcaacagcgctcgtgatgctgtgcgaaacctgactgaggtcgtacctcagcttttggatcagctgcggaccgtcgaacagaagcgtccagcctccaatgtgtcagccagcatccagcggatcagggaactcattgcccaaaccaggtcagttgcaagcaaaattcaggtttcaatgatgttcgatgggcagtctgccgtcgaagtgcactcccgtacatccatggacgaccttaaggctttcaccagcctgtccctgtatatgaagcctcctgtgaaaaggcccgagctgactgagaccgccgatcaattcattttgtatttaggcagcaaaaacgctaagaaggagtacatggggcttgcgattaaaaacgataacctagtgtacgtctacaatctggggacaaaggatgtggagatacctctggactccaaaccagtttctagctggccggcatatttttccatcgtcaaaattgagagagtgggcaaacacggtaaggtctttctcaccgtgccatcactctcatctaccgcggaagagaagtttattaaaaaaggagagttcagcggtgatgactccctgctggaccttgaccccgaggacacagttttttacgtgggcggcgtgccctcaaatttcaaactgcctacctccttgaatctgccaggcttcgttggctgtctggaactcgccactctgaataacgatgtgatttccctttacaattttaaacatatatacaatatggacccctccacctctgtcccatgcgcacgcgataagctggcgttcacacagtcccgagcagccagctatttctttgacggcagtggctacgctgtggttcgggacattaccagacggggcaaattcggccaggtgacaaggttcgatatcgaggtcaggaccccagcagataatggccttattctcttgatggtgaatgggagcatgttctttcggctggagatgcgcaacgggtatctgcacgtgttctacgactttgggtttagcggtggcccagtccatttagaggacaccctgaagaaagcgcagatcaacgacgcaaagtaccatgagatcagcattatctatcacaatgataagaagatgatcctggtagttgacaggcgacacgtgaaaagtatggacaatgaaaaaatgaagatcccatttacagatatttatatcggaggggcaccgccagaaattcttcagagcagagctctgagggcgcatctccccttggatataaatttccgtggatgcatgaaaggcttccaattccagaagaaggatttcaatctgttggaacaaactgagactctcggagttggatacgggtgccccgaggacagcctcatttcgaggagagcctattttaacgggcagtcctttattgccagtattcagaagataagcttttttgatggcttcgagggcggtttcaacttccgcactctgcagccaaacggccttctcttctattacgcttccgggagcgacgttttcagcatctcccttgacaacggcaccgttatcatggatgtcaaaggaatcaaggtgcagtccgtggacaagcagtacaacgatggactttctcatttcgttatatcatctgtttcccccaccagatatgagctgatagtcgacaagagtcgtgtcggatctaagaaccccacgaaaggcaaaatagaacaaacgcaggcctccgaaaagaagttctactttggcggcagtccaatttccgctcaatatgctaacttcacagggtgcattagcaacgcctactttaccagagtggatcgggacgtggaggtcgaggacttccaacggtacaccgagaaggtccacactagcctgtatgaatgccctatcgagagtagccctttatttctgctgcataagaagggcaagaaccttagcaagcctaaagcttcccagaataagaaaggggggaaatctaaggacgcaccatcctgggatccagtcgccctgaagctccccgaaaggaatactccaaggaatagtcactgtcatttgtcaaattctccacgtgccattgaacacgcataccagtatggaggaactgccaactctcgtcaggagtttgaacaccttaaaggtgactttggagctaaatcccagtttagcatcaggctgcggaccaggtctagccatgggatgatcttctacgtgagtgatcaggaggaaaacgatttcatgacactcttcttggcgcacggcaggctagtatacatgttcaacgtaggtcacaagaaattgaaaatccgcagtcaggagaagtataacgatgggctgtggcacgacgtcatattcatccgcgagagatcctcaggccggctcgtgatcgacggactccgcgtattggaggaaagcctcccacccacggaggccacatggaagataaaggggccaatttacctggggggagtcgctcccggaaaagctgtaaaaaacgttcagattaattccatatattccttctcaggctgtctctccaacctccagctgaacggtgcctcaatcacgagtgcatcgcagaccttcagtgtgacgccctgtttcgaggggcctatggagacgggaacttatttttcgaccgagggcggttacgtggtgctcgacgaatccttcaacatcggcctcaagttcgagatagcgttcgaagtgagaccgcggtcctcttcaggcaccttagtccatgggcatagcgtgaacggagagtacttaaacgttcatatgaaaaatggacaggtgatcgtgaaggtgaataacggcatccgagattttagcacgagtgtcacccccaagcagtcattatgtgatggaagatggcacagaattaccgtgatccgggattcaaacgtagttcagcttgacgtggactccgaggttaatcatgtcgttgggcctctcaacccaaagccaatcgaccatagggagcctgtatttgtgggcggtgtgccggaatcactgctcacacctcgactggctcctagcaagccttttacaggatgtattagacatttcgtgattgacggacatcctgtcagctttagcaaggcagcgctcgtgtctggagccgtctcaattaattcctgtcctgctgcctag

SEQ ID NO: 127260 - DNA, 5451 bp, Artificial Sequence
  derived and/or modified sequence
atggccctgagcagcgcctggcggagcgtgctgcccctgtggctgctttggagcgcggcctgttctagggcagcatctggggacgacaacgcattcccgttcgacatagagggctcttcagctgttggtcggcaggaccctccagagacatccgagccccgtgttgccctaggaagacttccacccgccgccgagaagtgcaacgcggggttttttcataccctttccggtgaatgtgttccctgcgattgcaacgggaatagtaatgaatgtctggacgggtccggatactgtgttcattgccagcggaacacaaccggcgaacattgtgagaagtgcttggacgggtatataggcgacagcattagaggagctccacagttttgccagccatgcccttgtccgcttccccacctggcaaacttcgccgagtcatgttaccgcaaaaatggcgcagtgagatgcatttgcaacgagaactatgcaggccccaactgcgaacggtgtgcacccggctattatggaaacccccttctcatcggttccacatgtaagaaatgtgattgctccgggaattcagatccaaacctaattttcgaagactgcgacgaggttaccgggcagtgtcgcaactgtctgcgtaacaccaccggatttaaatgcgaaaggtgcgcacctggatactatggcgatgcacgtatcgcgaagaattgtgcggtgtgtaattgtggtggcggcccttgcgactctgtaacgggtgagtgtctggaggaaggatttgaaccccccaccggctgtgataaatgtgtgtgggacttgacggatgcgctcagactcgctgccctcagcatagaggaggggaagtctggcgtgctctcagtgtcgtccggcgcagcagcccacagacacgtcaacgaaatcaatgcaaccatatatctgctgaaaacaaaactcagcgaacgggagaatcaatatgctctcaggaaaatccagatcaacaacgccgaaaacaccatgaagtcactgcttagcgacgtcgaggagctcgttgaaaaggagaatcaggctagccgcaaaggccagctggttcagaaagagagcatggacactatcaaccacgcatctcagctggtcgaacaggcacacgacatgcgcgataagatacaggaaattaacaacaaaatgctctactatggcgaggagcatgaactatctccaaaagagatcagcgagaaattggttttggcccagaagatgcttgaggagatccgctcgagacagccttttttcacgcaacgcgagctcgtcgatgaagaagctgacgaggcgtatgaactgctctcccaggctgagtcctggcagaggcttcacaacgaaactcgcacgctttttcctgtggtcctcgaacaactcgacgactataatgctaaactgtccgacctgcaggaggcgctggaccaggcactcaattatgttagagacgctgaagatatgaaccgcgcaaccgctgccagacagcgcgaccacgaaaagcagcaggaaagagtgagggagcagatggaggtagtgaatatgtcattgtccacttccgcagactctctgaccacccctagactcaccctttctgagctcgacgacataatcaagaacgcttcaggcatctacgctgagatcgacggggctaagtctgagctacaggttaagcttagtaatttatcaaatctgtcccacgaccttgtccaggaggctattgatcacgcacaggatctacagcaagaagcaaacgaactgtctaggaagctccattcctcagacatgaatggcctcgtgcagaaggccttagacgcctccaacgtctatgaaaatattgtcaactatgtcagcgaggctaacgagactgcagagttcgcgctgaacactacagaccgtatatacgacgccgtatccggaatcgatacacagattatctatcataaagacgaaagcgaaaatctccttaatcaggccagggagctccaagccaaggccgaaagcagctccgacgaggccgtagccgatacctcccgtagggttggtggcgccctcgcacgaaagtctgcgctgaaaacccgattgtctgacgccgttaaacagctgcaggctgctgaacgcggagacgcccagcagcggctagggcagagccgtctaatcacagaggaggcaaatcgaacgacaatggaagtacagcaagctactgctccgatggctaataacttaacaaattggtctcagaacctgcagcatttcgattcctctgcctacaacaccgccgtcaattctgcccgcgacgcagtccgcaatcttacagaagtcgtgccacaactcctagatcagttgcgtaccgtggagcaaaagcgtcccgcctccaacgtgagtgcatcaattcagcggatcagagaattgatcgctcagaccagatctgtggcaagcaaaatccaggtgagtatgatgtttgacggccaatccgcagtggaggtgcactcacgcacaagtatggatgacctcaaagcttttacaagcctgagcctatacatgaagccacctgttaagcgccccgaattgacggagacagctgatcagttcattctgtaccttggctctaagaacgccaagaaggagtacatggggctggctattaaaaacgataacctcgtgtacgtgtacaacctggggacaaaggacgtcgagatcccgcttgattccaagccagttagttcttggcctgcctacttcagtatcgtgaagattgagagggtggggaagcacggcaaggtgttcctaactgtgccctcactgtcttcgaccgctgaagaaaaatttattaaaaagggagaattctccggtgacgattccttattagacctcgacccagaagatacagtgttctatgttggtggtgtaccgagtaacttcaagctcccaacctccctgaacctgccagggtttgtaggctgcctggaactggctacacttaacaatgatgttatttccctgtacaatttcaagcatatctacaatatggacccaagcacaagtgtgccgtgtgcgagagacaagctggcttttacacaatcaagggccgcgtcttatttcttcgatggctccggatacgcagtggtgagagacataacaaggcggggcaagtttggccaagtgactcggtttgacatcgaagtgaggacacccgcggataacggcctgattctactgatggttaatggttccatgttctttaggcttgaaatgcgcaatggttatcttcatgtcttctacgactttggcttctcaggcggaccagtgcatctggaggataccctgaaaaaggcacaaattaacgacgcgaagtaccacgaaatctctattatataccacaacgataagaaaatgattctcgtcgtggatcgtcgccacgtcaaatcaatggacaatgagaagatgaaaataccatttactgatatttacataggaggtgccccgcctgaaatcctccagagccgagctctccgggcccatctccccctggacatcaatttcaggggttgcatgaagggcttccagtttcagaagaaggatttcaaccttctggagcaaacagagaccttaggcgtgggctatgggtgccctgaggactctctgatttcgagacgcgcgtattttaacgggcagagctttatcgcctctatccagaagatcagtttctttgatggctttgagggcggcttcaactttcggactctacaaccgaacggcctgttgttttattacgccagcgggtccgatgttttctctataagcctggataatgggacggtcatcatggatgtcaagggcattaaggtccagtctgtggataagcagtataatgacggcctgtcccattttgtgatcagcagtgtgtctccaaccagatacgaacttattgtggacaaatcaagagtggggagcaaaaaccccaccaaaggcaaaattgagcaaactcaggcttccgagaagaagttttatttcggaggaagcccaatcagcgctcagtatgcaaactttacaggatgtatctctaacgcctattttacgcgtgtggatcgggatgtggaagtggaggactttcagaggtatactgagaaagtgcacaccagtttgtatgaatgtccaattgaatccagccctttgtttttgctccataaaaaagggaagaaccttagcaaacctaaggcatcacagaataaaaaaggaggtaaatccaaggatgctccctcgtgggaccccgtggccctgaaactgccagaacgcaatacgccgaggaatagccactgtcatctaagtaattccccccgcgctatcgagcatgcctaccagtatggcggcaccgccaattcccgccaggagtttgagcaccttaagggggatttcggcgccaagagccagttctcaatccggctacgcactcgttcctcacacggaatgattttttacgtttctgatcaagaggaaaacgatttcatgaccctcttcttggcacatgggcggcttgtttacatgtttaacgttggacataagaagttgaaaatccgtagccaagaaaaatataacgacggactgtggcacgacgtcatattcattagagaacgctcctcaggcaggcttgtgattgatgggctgagggtccttgaggaatccctgccaccaacggaggctacttggaagatcaagggaccaatttacctcgggggtgttgccccgggtaaagcggtcaagaatgttcaaatcaatagcatctactctttcagcgggtgcttgtcgaatttacagctaaacggtgcatccatcacatctgcgagccaaactttttcagtgactccctgtttcgaaggacccatggagacgggcacctacttttctacagagggtggctatgtggtcctggacgagtcattcaatatagggctcaaattcgaaatagcatttgaggtgcggcccaggtcatcatctggcacccttgtacatggtcactcagttaatggagaatatctgaacgtgcacatgaaaaatggtcaggtcatcgtcaaggtgaataatggcatacgcgacttctcaacatccgtgacacccaaacagtcattgtgtgacgggcggtggcatcgcatcacggttataagagattcgaacgtggtgcagctggacgtggactcagaagtaaaccacgtggtcggaccacttaaccccaaaccaattgaccaccgcgaaccagtatttgttggaggcgtcccagaaagccttttgactccgcgtcttgcccctagcaagccctttacgggctgcatccgccatttcgtgattgatggccatcccgtgtcattttccaaggccgcgctcgtttcaggggctgtatcaataaattcatgccccgcagcatag

SEQ ID NO: 127261 - DNA, 5450 bp, Artificial Sequence
  derived and/or modified sequence
atggcattatcctccgcttggcggagcgtcctaccactctggttgctgtggtctgcggcatgtagcagggcagcaagcggcgacgataatgcttttcccttcgatatcgagggcagcagcgcagttgggaggcaggatccccctgagacctctgaaccaagggtggccttgggacgcctacctccggcagccgaaaaatgtaacgctggcttttttcacaccttatccggagagtgcgttccatgcgattgtaacggcaattcaaatgaatgtctggacgggtccggctactgcgttcattgccaacggaacacgactggagaacactgtgaaaaatgtctggatggatatattggcgattccatccgcggtgcaccacagttctgccaaccttgcccttgccccttaccacatctggctaactttgccgagagttgctaccgtaaaaacggggctgttaggtgcatctgtaacgaaaactatgccggacctaactgtgagcgttgcgcaccagggtactatggcaatccactgctcatcgggagcacttgcaagaagtgcgactgctctggcaactccgacccaaatctgatctttgaggattgtgatgaggtcactggccaatgcagaaattgtctccggaatacaaccgggttcaaatgcgagagatgcgcccctgggtattatggcgatgcccgtattgccaagaactgtgctgtttgtaattgtggaggagggccatgtgactctgtcaccggggaatgcctggaggaggggttcgagccaccgaccggctgcgacaagtgtgtctgggacctgactgatgcactgcgtcttgctgccctgtctattgaagagggcaagagcggtgtcctgtccgtgagcagcggtgctgcagcacaccgacacgtcaacgagattaacgccacaatctacctgcttaagacgaagctctctgagagagaaaaccagtatgctttacgtaaaatccaaattaataatgctgagaacaccatgaaatccctgctgagcgacgtcgaggagctggtggaaaaggaaaatcaggcatccagaaaaggccaactagtccagaaagagtcgatggatacaatcaaccatgcaagccagctggtggaacaggcccacgatatgcgggataagatccaggaaatcaacaataaaatgctatactacggcgaggaacacgaactgtcacccaaggagattagcgagaaattggtcttagctcagaagatgctcgaagagattaggagccgccagccgttctttacacagcgggaattagtggacgaggaagccgatgaggcttatgagctgcttagccaagccgagtcttggcagagactgcataatgagaccaggacgctcttcccagtggtcctggagcagctggacgattataacgccaagctgtccgatcttcaggaggcactggaccaggcactaaattacgtaagagacgcagaagacatgaaccgcgctaccgcagccagacagagagatcacgaaaaacagcaggaacgggtgagggagcaaatggaagtggtgaacatgtccttgtccaccagtgccgactccttaacgacccccaggctcactttgagcgaactcgacgacatcataaagaacgcgtctgggatatacgccgagatcgatggcgctaagagtgaactccaagtgaaattgagtaacttgtcaaatctgtctcacgatcttgttcaggaagccattgaccatgcccaggacctacagcaggaggccaacgagctgtcacgcaaattacattctagcgacatgaacggactggtgcagaaagcactggatgcatccaacgtatatgaaaatattgtaaactacgtatctgaggctaatgagacggccgaatttgccctcaatactactgatcggatctacgatgccgtcagtggcatcgacacccagataatctaccacaaagacgagagcgaaaatctgcttaaccaggctcgtgaattgcaggcaaaggctgagagctccagtgatgaagcggtggccgacactagccggagagttggcggtgccttggcaagaaagagcgcactgaagacgagactgtcagatgccgtcaagcagttgcaagccgctgagcgcggagacgcacaacaaagattgggacaatcccgactgataactgaagaagcaaataggaccacaatggaagtgcagcaggccacagcaccgatggccaacaacctaacgaattggtctcagaatctacagcactttgatagctctgcgtacaatactgccgttaacagcgcgcgagatgctgtgcgaaatctgacagaagttgtcccccagttactcgaccagctgcgcaccgtagagcaaaaaaggccagcgagcaacgtgagtgcctccattcaacggatcagggagctgatagcccagacacgctctgtcgcttctaagattcaggtatcaatgatgtttgatgggcaaagcgcggtagaggtacactctagaactagcatggacgacctgaaagccttcacaagtttgagcttgtacatgaaacccccagtcaaacggccagagctgaccgagaccgcagatcaattcatcctgtatctcggcagtaaaaacgcgaaaaaagagtacatgggtctggccatcaaaaacgacaacttggtttatgtgtacaacctggggactaaggacgtggaaatccctctggattcaaagccagtctcaagttggcccgcttatttctctatcgttaagattgaacgcgtgggtaagcacggcaaggtttttctgacggtaccgtcactcagctctactgccgaggagaaatttattaaaaagggcgagttctcaggcgatgactctctcctcgacctggaccctgaagacacagtattctatgtggggggagtgcctagcaatttcaagctccctacttccttgaacctaccgggatttgtgggctgcctcgaattggccactttgaacaatgatgtaatctccctttataacttcaagcacatttacaacatggacccatccacctccgttccatgcgccagagataagcttgccttcacacaatcacgagctgcctcgtatttctttgatggatcgggttatgctgtggtgcgtgatattactcgcaggggcaaatttgggcaagtcacaaggttcgatattgaagtgcgcacacctgcagataacgggctcatcctcctgatggtgaacggtagtatgttctttcggcttgagatgaggaacggctatctccacgtattttacgatttcggtttttctggcggtccggtgcatttagaggacactctaaaaaaggcacaaattaacgatgccaagtaccatgaaatctctatcatctaccataatgataaaaagatgatcctagtcgtggataggaggcacgtcaaatctatggacaacgagaagatgaagatcccattcacagacatttacatcggaggggctccccctgaaatcctccagtcaagggcgctgcgggcacacctgccactggacatcaactttcgcggatgcatgaagggtttccaatttcagaagaaggatttcaatttactggaacagacagagacattaggggtggggtacggttgcccggaggactctctgatatcgaggcgggcttatttcaatgggcaatcgtttatcgcctcaattcagaaaatctcctttttcgatggcttcgaggggggttttaattttcggacgctccagcctaacggcctgctgttttactatgctagcggctccgatgttttcagcatttcactcgacaacggaactgtgatcatggatgtgaaaggaataaaagttcagagtgtcgacaaacaatacaatgatgggctctcccacttcgtgatctctagtgtgtcgcccacacgctacgagttgattgtggacaaaagtcgtgtggggagtaagaatccgacgaagggcaaaatcgaacagacccaggccagtgagaaaaagttttattttgggggaagtcctatctctgctcagtatgctaatttcacaggctgtatctcgaatgcatattttacgagagtagaccgagatgtggaggtagaagatttccagcggtatacagaaaaggtccacaccagcctatatgagtgccccatcgagtccagccctctcttcctcttgcacaaaaagggaaaaaatctgtccaaacccaaggcgtcacagaataaaaaaggtggcaagtcaaaggatgcgccatcctgggaccctgtagccctgaaactgccagagcggaatactcctcggaactctcattgtcacttgtcgaacagccctcgagccatcgagcacgcataccagtatggcggtacggccaacagtcgccaggaatttgagcatctcaagggtgattttggagctaagtcccagttctcaattaggctacgaacgcggtcttctcatggcatgattttctatgttagtgatcaggaagagaacgattttatgaccttattcctagcccacggtcggctggtatatatgttcaacgttggccacaaaaagctcaaaatccgatctcaggaaaaatataatgacggactctggcatgacgtaatttttattcgggaacgcagctccggcaggctagttatagatggactgagagtcttggaggagtcgctgcccccaaccgaggccacctggaagattaaggggccaatatacttgggcggagtggccccaggtaaggccgtgaagaatgtacagataaacagcatatactctttctcaggatgcctcagcaacctccagctaaacggcgcaagcatcaccagcgcgagccaaacgttcagcgttacgccttgctttgaaggacccatggaaaccggaacatatttctccactgaggggggatatgtagtgctcgacgagtccttcaacatcggtctcaaattcgaaatcgcatttgaggtccgtcccagatcttcttcaggtactcttgtccacggtcattccgtgaacggagaatatctcaacgtgcacatgaagaacggacaggtcatagtgaaagttaacaatggaataagagacttctcgacctccgtgacgcccaagcaaagcctgtgcgatggccgttggcaccgaatcacagttatacgagattcaaatgtcgtgcagctcgatgtagactcagaggtcaaccatgtcgttggacccctgaaccctaaacccatagatcacagggagcccgtctttgtgggaggcgttccggagagcctcttgactccgaggttagcaccaagtaaacctttcactggatgcatccgccacttcgttatcgatggtcaccccgttagcttctcaaaagccgctcttgtctccggagctgtaagcatcaacagctgcccagccgcata

SEQ ID NO: 127262 - DNA, 5451 bp, Artificial Sequence
  derived and/or modified sequence
atggctttgtcttccgcttggcgctctgtgctgcccttatggctcctctggtcagccgcttgcagtagagcggcatctggagacgacaatgccttcccatttgacatcgagggctccagtgcggtgggacggcaggacccaccagaaactagtgagccacgcgtggctctgggaagactaccaccagcagctgagaagtgtaatgcagggtttttccacacgttaagcggtgaatgtgtcccatgcgattgtaacgggaatagcaacgaatgcctagatggtagtggatattgtgttcattgtcagagaaataccaccggagagcactgtgaaaaatgtttagatggctacataggcgattccatcaggggagcaccacagttttgccagccctgcccttgccccctgccccatctcgcaaattttgccgaaagctgctatcgaaaaaatggggctgtgcgctgtatctgcaacgagaactacgctggtcccaactgcgaacgttgcgctcccggatattacggtaatccactgctgattggctctacatgcaagaagtgtgattgtagtggaaacagcgatcctaacttgatctttgaggactgtgacgaagtcaccggacagtgccgcaattgtctccgcaacacgacaggcttcaagtgtgaacggtgcgcccctggctattatggggacgccaggattgctaagaactgtgcagtgtgtaactgtggaggcggtccctgcgactctgtgaccggggaatgcttggaggagggttttgagccccctacagggtgtgataagtgtgtctgggacttaaccgatgccttgagacttgcagccctcagtatcgaagagggaaaaagtggggttctctccgtgtcttcaggagccgcagcccaccgccacgtcaacgagatcaacgccacaatctacctgttaaaaacaaagctgtcggaacgtgagaatcagtacgccctccggaagatacagattaacaacgcggagaacacaatgaaatcgctgctttcagatgtagaagagctggtcgagaaggaaaatcaagccagccggaaagggcagctggtgcagaaagagagcatggatacaattaatcacgcttctcagctagtggaacaggcccacgacatgcgggacaagattcaggagatcaacaataaaatgctgtattacggcgaggagcatgagctctcgcccaaagaaatttccgagaaactcgttctcgcacagaaaatgctggaggagatccgctcccgccagcctttcttcactcagagagagcttgttgacgaggaggccgacgaagcctacgagctcctgtctcaggccgagagctggcaacggctgcacaacgagacccgcacgttatttccagtagttctggaacagctggatgattataatgccaagctatccgatctccaggaagcgctagatcaggccttgaattatgtccgggacgcggaagatatgaaccgcgcaaccgcagcgaggcagcgagatcatgagaagcagcaagaacgggttagggagcagatggaagtcgttaatatgagtttaagcacttctgcggacagcctgactaccccacgtttgacccttagcgagttagacgatattatcaagaacgcatcgggcatctatgccgagatcgatggggctaagtctgagctacaagtcaagctttccaatctatccaacctgagtcacgacctagtgcaggaggccattgaccacgctcaggaccttcagcaggaggctaacgaactcagtcgcaagctgcatagcagcgacatgaacggcctcgtccagaaagcactggacgccagcaatgtctacgaaaatatcgttaactatgtgtctgaggccaatgagaccgccgagttcgcgttaaatactactgaccggatctacgacgctgtcagcggcattgatacccagataatttaccataaggatgagtccgaaaatcttctgaatcaggccagagagttacaggctaaggctgaatcctcatctgacgaggccgtcgctgataccagtaggcgagtcggtggcgctctcgctagaaagagtgccctcaagacccggcttagtgatgccgttaagcagctgcaggccgctgagcggggagacgcccagcagaggctgggccaaagcagattaatcaccgaggaagcaaatcgcactacgatggaggtacagcaagccaccgcccctatggcaaataatctgaccaactggtcccagaacctacagcattttgactccagcgcttataacaccgctgtcaattctgcacgagatgccgtacgcaatttgactgaggttgtgccccaacttctcgaccagcttcgcaccgtagaacagaagcggcctgccagcaacgtctccgccagcatacaaagaatccgcgagctcattgctcaaaccaggtcagtcgcatctaaaattcaagtgagtatgatgttcgatggacaatcagctgttgaagttcatagccgaacatctatggatgatctaaaggcttttactagcctgagtctttacatgaagccgcctgttaagagacctgagctgaccgaaacagcagatcaattcatcctttacttaggctcaaaaaatgccaagaaagagtacatgggtctcgccatcaagaatgataacctggtttatgtatacaacctaggaactaaggacgtggagattcctctcgactccaaacctgtgtcgtcctggccagcttatttttctatcgtaaaaatcgagagagttggaaagcacggcaaggtcttcctgacagtgccgtccctcagctcgaccgccgaggagaagttcataaagaaaggggagttcagtggcgatgactccttgctcgaccttgatccggaggacaccgtgttctacgtcggcggtgtaccctcaaacttcaagctacccacctcgctcaatctccccggattcgtgggatgcttggaacttgcaactctgaacaatgacgtcatctccctttacaacttcaagcacatctataacatggatccttctacctccgtgccctgtgcccgtgacaaactcgcatttacccagagcagagcggcttcttatttctttgatggctctggttacgccgttgtgcgcgatatcactcgtcgaggtaaattcggccaggttactcggttcgatatcgaagtcaggactcctgcggacaacgggcttattctgcttatggtcaatgggagtatgttttttagactcgaaatgcggaatggatatctacatgttttctacgacttcggcttctctggcggaccggtacacctcgaggacaccctgaagaaagcgcagatcaatgacgccaagtaccatgagatcagcatcatctatcacaatgataagaaaatgatcctggtagtagatagaaggcatgtcaagtcaatggataacgaaaaaatgaagatacccttcacagacatctacatcggtggagcacctcctgagatcttgcagtccagggccttacgggcacacctaccactcgatattaacttcaggggttgtatgaaaggctttcagttccagaaaaaggactttaatctgctggagcagactgagacactcggggtcggctacgggtgcccggaggattcacttatttcacggagagcctattttaatggtcagtccttcattgccagcatacagaaaattagttttttcgatggctttgagggcggattcaatttccggacgctccagcccaatggcctgcttttctattacgcgagcggcagcgatgtcttctccattagcctggataacggaacagtgattatggacgtgaagggtatcaaagtacagagcgtagacaaacagtacaacgacggcctgtcccacttcgtgattagttctgtttcacccacgagatacgaacttatagttgataagagcagagtcggcagtaagaatccaacaaagggcaagatagaacaaactcaagctagcgagaagaagttttatttcggtggatccccaattagcgcgcaatacgcgaatttcacaggttgtatatctaacgcatactttaccagggtggacagggatgtcgaagtggaggactttcaaagatatacagaaaaggtgcacactagcctgtacgagtgtcccattgagagctccccgctgttcctgctccacaaaaagggaaaaaacctgtctaagccaaaggccagccagaacaagaagggaggaaagtctaaagatgcaccttcctgggacccagtagccctgaagctccctgagaggaataccccacgtaattcacactgccacctaagtaattctccgagggctatagaacatgcataccagtatggaggcaccgcaaattctcgacaagaattcgagcacttgaagggcgactttggcgcaaagagccaattttccattaggctccggactcgctcctcacatggtatgattttctacgtttccgaccaagaggaaaatgactttatgactctcttcctggcgcacggtagactggtttatatgtttaacgtggggcataagaagctcaagatccgctcccaagagaagtacaacgacgggctgtggcacgacgtgatattcattagggaacggagtagcggccgactggtgattgatgggcttagagtgctggaggagagtctcccacccacagaagccacctggaaaattaaaggccctatttatttggggggagtcgctcccggaaaagccgtcaagaacgtgcagataaatagtatttactctttctctggttgcctctctaacctgcagctcaacggcgcttccatcacctcagcttcacagacctttagcgtgacaccctgtttcgaaggcccaatggagaccggcacgtactttagcaccgaagggggatatgtggttcttgatgaaagcttcaacattggattgaaattcgaaatcgcgttcgaggtcagacctcgcagctcctccgggaccttggttcatggccattccgtgaatggagagtatctgaatgtgcatatgaaaaacggtcaggtgattgtaaaggtcaataacggcattagggatttctccacgtctgtcactccaaagcagtctctctgcgatggccgatggcaccggataacagtgattcgggacagtaacgtggtccagctcgatgtggatagcgaagtgaatcatgtggtgggccctctcaatccaaaacctattgaccaccgtgagcctgtttttgtggggggagttcccgagtcactcctcaccccaagactagccccaagtaagccatttacgggctgtattaggcacttcgtcattgacgggcatcctgttagcttttctaaagccgcactcgtgagcggggcagtctccatcaatagttgtccagccgcatag

SEQ ID NO: 127263 - DNA, 5450 bp, Artificial Sequence
  derived and/or modified sequence
atggcactatcatcagcttggagaagcgtgttaccactgtggttactgtggtccgcggcttgttcccgcgctgcttctggggatgacaacgctttccccttcgatattgaagggagcagcgcagtaggtagacaagatcctcccgaaacgtccgagcctcgcgtggctctggggagactgcctccagcggctgaaaagtgtaacgcaggtttttttcacactctttcaggcgaatgcgtgccctgcgactgtaacggtaattccaacgaatgcctggacgggagcggctattgcgtgcactgccagcggaacacgaccggggagcattgcgaaaagtgccttgatggttatattggcgactcaatccgcggagccccacagttttgccagccctgtccgtgtcctctgccccacctggctaacttcgcagagtcttgctaccgcaaaaatggcgctgtcagatgcatttgtaatgagaactatgccggtccaaactgcgagagatgcgcccctggttactatggaaaccctttgctgattggaagcacttgtaagaagtgcgactgctcaggaaactcggaccctaatcttatatttgaggactgcgatgaggtgacaggtcaatgtcgcaactgtctgcgaaataccacaggttttaagtgtgagcggtgtgccccaggatattacggggatgctcggattgccaaaaattgcgctgtctgcaattgtggtggaggaccctgcgactctgttactggcgagtgtctggaggagggatttgaacccccaaccggctgtgacaagtgtgtctgggacctaactgacgccctccggctggcggctctaagcatcgaggagggtaagtcaggtgtcttgtccgtcagtagcggcgcagccgcacacaggcacgtcaatgagattaacgccaccatttatctgttaaagacaaaactgagcgaaagggaaaatcagtacgctctgcggaagatccagatcaacaacgcagagaatacaatgaagtcgttactcagtgatgttgaagagctggtggagaaggaaaatcaggctagccggaagggccagcttgtgcaaaaggaaagtatggatacaatcaaccacgccagtcagcttgtcgagcaggcccacgatatgagggataagatacaggagattaacaataaaatgctgtactatggcgaggaacatgaactttcaccaaaagagatctccgagaagctcgtactggcccagaagatgctggaggaaatacgatccaggcagccattttttacccaaagggaactagtggatgaggaagctgatgaagcctacgaactgctcagccaagcagagagttggcagaggctgcacaacgaaaccaggactctgtttcctgtggtgctggaacagcttgatgactacaatgcaaagctcagcgacctacaggaagccttggatcaggccctgaactatgttcgcgacgctgaggatatgaacagggcaactgccgcacgtcagagagatcacgaaaaacaacaagagagagttcgcgaacaaatggaggtggttaacatgtccctgagcactagtgccgactcccttacaacgccaagactgacgctcagcgaacttgacgatattatcaaaaacgcctcaggtatatatgcagagattgacggggctaagtcggagctccaggtgaaacttagcaacctttctaacctgtcacacgatctcgttcaggaggctatcgatcacgcacaagatctgcagcaggaggccaacgagctgtctcggaaacttcacagctcggacatgaacgggctggtgcagaaggctcttgacgcgtcaaatgtgtatgagaatatcgtaaactatgttagcgaagccaatgagaccgccgaatttgcattaaacacaacggataggatctatgacgctgtgagtgggattgacacgcagattatctaccacaaggacgagagtgagaacctgctgaatcaggctagagagctacaagcgaaggccgaaagcagcagcgatgaggcagtggcggacacctcaaggcgggtgggcggtgctctggccagaaagtcagcacttaaaacccgcctgtctgacgccgtcaagcaactgcaggccgcagagcgaggtgacgcccagcaacggttgggccaatcccgactgatcactgaagaagcgaatagaaccacgatggaagtgcagcaggccaccgcaccgatggctaataacctgactaattggtcacaaaaccttcagcactttgacagctctgcatacaacaccgccgttaattccgcgagagatgcagtccggaacctgactgaagttgttccccagctgttggatcagttgcggaccgtggagcagaagcggccagccagtaatgtcagtgcaagcatacagaggattagggagctgatcgcccagacccgtagcgtggcgtcaaagatacaggtcagtatgatgttcgatggacagagtgcggtcgaggtccactcccggacgtctatggatgacctgaaagcctttacatcgctttctttgtatatgaagcccccagtaaaaagaccagaactaactgagacagcggaccaattcatactctatttggggtcaaagaacgctaagaaggagtacatgggactggctattaagaacgataacctggtgtacgtgtacaatcttggcacgaaggacgtggagatcccacttgatagcaagccggttagttcatggccggcttacttcagcattgttaagatagagagagttggtaagcacggaaaggtcttcctcaccgtccccagcctgagttccacggctgaagaaaaattcattaagaaaggggagttctcaggggacgactccctcctggatctggaccctgaggataccgtgttctatgtgggcggagttccaagcaacttcaaactcccaaccagcttgaatttgccaggtttcgtaggatgcctcgagctcgccaccttaaataatgatgtaatcagcctttacaacttcaagcacatctacaacatggatcccagcaccagcgtgccatgtgcgagagataagctcgccttcacacagtccagagctgcatcctatttctttgacggatccggttatgcagtggtgcgagatatcacccgcagagggaagttcgggcaggtaacaagatttgacatcgaagtcagaacaccagccgacaacggccttatactgctaatggttaatggtagtatgtttttccgcctggagatgcggaatgggtacctccacgtcttttacgattttggattttcaggcggtccggttcacctggaggacacccttaaaaaagcccagatcaacgatgcaaagtatcatgagatttccattatctaccacaacgataaaaaaatgatccttgttgtcgatcggcgtcatgtgaagtccatggataacgaaaaaatgaaaatcccgttcactgatatatatatcggcggtgctccgccagaaatcctgcaatcacgggcactgagggcccacttgcccctggacatcaatttcagaggttgcatgaaggggttccagttccagaaaaaagacttcaaccttctggaacagacagaaaccttgggggttggatatggttgccctgaagactctctgatttcaagacgcgcttacttcaatggccagagttttattgcgagcatccagaagatcagtttcttcgacggattcgagggcggttttaatttcagaactctccagcctaacgggctgttgttctactatgcgtcagggagtgatgtcttttctatcagcctggataatggcactgtcattatggatgtgaaagggatcaaggtgcagtcagtggacaagcagtataacgatggactgtcacactttgtgatctctagtgtgtcccctacaagatacgagctcattgtcgacaagtcccgcgtgggaagcaaaaatcccacaaaaggtaagatcgagcagacccaggcatccgaaaagaaattttatttcgggggttcgccgatctcagctcagtacgccaatttcactggttgcatctccaatgcctattttactcgcgttgatcgcgatgtggaagtcgaagacttccagcggtatacagaaaaggtgcacacctctctgtatgagtgtccaattgaatcttccccattgttcctgctccacaaaaagggcaagaacctgtccaagccaaaagccagccaaaacaagaagggcggaaaatccaaagatgctccttcatgggatcctgtggctctaaagctccccgaacgcaacactcccagaaattcacattgccacctcagcaacagccctcgggcaatcgagcacgcttatcagtatggcggaactgccaacagtagacaggagttcgagcacctgaaaggggattttggcgctaaatctcagttttccatacgactcaggactagatcttcacacgggatgattttctacgtgagcgatcaggaggagaacgactttatgacgctcttcttagcgcatggccgacttgtctatatgtttaatgtggggcacaaaaaactgaaaatcagaagccaagaaaagtacaatgatggtctatggcacgatgttatctttattagggaacgatcatcaggtcgcctggtcatcgacgggctccgggttctcgaggaatcgctgccgccaaccgaagccacttggaaaattaaaggacccatttatctgggaggagtggctccaggcaaagcggtgaagaacgtgcagattaactccatctattctttttcgggatgtctgtctaacctgcagctgaatggcgcaagtattacttcggccagtcagactttctccgtgacaccctgctttgaaggtccaatggaaaccggaacttacttttctactgaaggaggatatgttgttcttgacgagagttttaatatcggtttgaaatttgaaatcgccttcgaggtccgcccacggtcatcttccggtaccctggtccacggccactcagttaacggtgagtatctcaatgtccatatgaagaacggccaggttattgtcaaagtgaacaacggaatacgggatttttctacttccgtgacacccaaacagagtctctgcgacgggcgatggcatagaattacagtgatacgagactccaacgttgtccaactagatgtagacagcgaggtaaatcatgtggttggcccactaaacccaaagcctatcgatcatagggaacccgtcttcgtaggtggcgtgcctgagtccctgcttacccccaggctggctccttcgaaaccgttcactggctgtattcgacactttgtgattgatggccatccagtcagtttctcaaaggctgcactagtttctggggcagtcagcatcaactcttgccctgctgcata

SEQ ID NO: 127264 - DNA, 5451 bp, Artificial Sequence
  derived and/or modified sequence
atggcactgagcagcgcatggcggtctgtgctcccactgtggcttttatggtccgccgcatgctcacgtgcggcatcaggcgacgataacgcatttcccttcgacatcgagggaagcagcgcagtaggacgtcaggacccccccgagacctccgagccccgcgtggcacttggacgcttgccccccgcagccgaaaaatgcaacgccggctttttccacaccttgagcggggagtgtgtcccttgtgattgcaatgggaactcgaatgaatgcctggacgggtccggctattgcgtacattgtcaacgcaataccaccggtgagcactgcgagaagtgcctcgatggttatatcggcgattcaatccgaggggcacctcaattttgtcaaccttgcccttgtcctttaccccacttagccaacttcgctgagagttgctacaggaagaacggcgccgtccgctgcatttgcaatgagaattacgctgggcccaattgcgaacggtgtgccccaggctattatggaaatccacttctcatcggcagcacttgcaagaagtgcgattgtagcggcaattcggaccccaacttaatatttgaggactgcgacgaggtgacagggcaatgtcggaactgtctgcgcaacactacaggcttcaagtgcgaacggtgtgcacctggatactacggcgacgctagaatcgctaaaaattgcgccgtctgcaactgcggaggcggaccttgcgactctgtgacgggtgagtgcctggaagaagggttcgaaccacccacgggttgtgacaaatgcgtttgggatctcaccgacgccttaaggcttgcagcactgagcatcgaggaaggcaagtccggcgttttatcggtgagtagtggagcggccgcacacagacacgtcaacgagatcaatgccaccatttacctgttgaaaaccaaattgtccgagagggagaaccaatatgcgctcagaaaaattcagatcaataatgctgaaaacaccatgaagtcactgctttctgacgtggaggagctcgtggaaaaagaaaatcaagcctcgagaaaaggacagttagtgcagaaagaaagcatggacacaatcaaccacgctagtcaacttgtggagcaagcccacgacatgcgggacaagatccaggagattaataataaaatgctttactacggggaggagcatgaattgtcccccaaagagataagcgaaaagctggtcctggcacaaaaaatgcttgaggaaattaggtcacggcagcctttcttcacacagagagaacttgtggacgaagaagctgacgaagcttacgaactgctgtctcaggcggaaagctggcagagacttcacaatgaaacacgcactttattccctgttgtgctggaacagctggatgactataatgcaaaactgtccgacctgcaggaggccctggatcaagccctcaactacgtgagagatgccgaggacatgaaccgagctacagccgctcggcaaagggaccacgagaaacagcaggagcgcgtgcgcgaacagatggaagtcgtcaatatgagcctgtcaacatccgctgattctctgactacacctaggctaaccctgtcagagctcgatgatatcataaagaacgcctccggcatttatgctgaaattgatggtgctaaatctgagctccaggtgaagttaagcaatctatccaacttgtcccatgacctggtgcaggaggcaatcgatcacgctcaggatttgcagcaagaagcaaacgagctgtccagaaagctgcattcctctgatatgaacggtcttgtacaaaaagcccttgatgcgtcaaacgtttacgaaaatattgtgaattacgtctcagaggcaaacgagaccgcagaattcgcactgaataccaccgacagaatttacgatgctgtgagtgggattgacacacagattatttatcacaaggatgaatccgagaatcttttaaaccaggctagagagttacaggccaaagccgagagctctagtgacgaggccgtagccgacacatccaggcgggtgggaggagcattagcgcggaaaagcgctttaaagacacgactgtctgacgctgtgaagcaactacaggccgctgagagaggcgacgcgcagcagcggctcggacaaagccgactgattaccgaggaagcaaatagaaccaccatggaagtgcagcaggccaccgccccaatggccaataacctgacaaattggagccagaacctgcagcatttcgactctagcgcttataacaccgcggtgaactcagcacgcgacgctgtgagaaacctgactgaggttgtgccacaattgctagatcagcttcgcaccgtagaacaaaaacgccccgcctctaacgtaagtgcctccatacagcgcatcagagaattgatcgcacaaactaggtccgtggcctctaaaattcaggtttcaatgatgttcgacgggcaatcagcggtcgaggtgcactcacgcacgagtatggatgatctcaaagctttcactagcctctcattatacatgaagcctccagtgaaaagacccgagttgactgagacagcagaccaattcatcctttacctcggttccaagaacgcaaaaaaggagtatatgggtctagcaatcaaaaacgataatttggtttacgtctacaatttggggaccaaagacgttgaaatccctctcgattcaaagccagtgtcatcttggcccgcctacttttctatcgtcaaaatcgagcgggttggcaaacacgggaaagtatttctcaccgtgcctagcctatccagtacggcagaggaaaaattcattaagaaaggcgaatttagtggcgacgattcccttttggacctggaccccgaggatactgtcttctacgtgggcggcgttccttctaatttcaagctacccacttcccttaacctcccaggatttgtaggctgcttggagctggccacattaaacaatgatgttatcagcctctataacttcaagcacatatacaatatggacccttcgacctctgtgccctgtgctagggataagctggcgtttacacagtctagggcggcaagctacttttttgacggcagcggatatgctgtggtccgtgacatcacacgacggggtaagtttggtcaagtaacgcgattcgatatagaagtccgaactcccgctgacaacggtctcatacttctcatggtgaatggatcaatgttcttccgactggagatgcgcaatggttacctccatgttttttatgacttcgggtttagcggcgggcccgtgcacctagaagatacacttaagaaggcccagatcaacgacgctaaatatcatgagataagtatcatttatcacaatgataaaaagatgatcctggtggtggataggagacatgtgaagtccatggacaatgagaagatgaaaattccattcacggacatctatattggcggcgccccacccgagatcctacaaagccgggcactgagggctcatctgcctttagatatcaatttccgcggctgcatgaagggttttcaattccagaaaaaggactttaacctattggagcaaactgagaccctcggagtggggtacggctgcccggaggacagcctaatcagtagacgagcatattttaatggccagagtttcatagccagcatccagaaaattagcttcttcgacggatttgaggggggctttaacttccgcaccctccaaccaaacggcctgctcttttattatgcatctggatctgacgtgtttagcattagtctggacaacggcactgttattatggatgtgaaaggaattaaggtccagagcgtcgataagcagtacaacgatggactgtctcattttgtgatctcgtcagtgtcacccacacggtacgaactgatcgttgacaagagccgagtcggatctaagaatccaacaaaaggtaagattgaacagactcaggctagcgagaagaagttctacttcgggggctccccaatctcagcgcaatacgccaacttcaccggatgcatttcaaacgcatattttacaagagtcgaccgcgacgttgaagtggaggatttccaacggtatactgaaaaggtccataccagcctgtacgaatgtcccatcgagagctctccactgttcctacttcataagaaaggtaaaaatctttctaaacctaaggcttctcagaacaagaagggtggaaaatctaaggacgccccgagctgggatcccgttgccctcaagcttcccgagagaaacacaccaaggaactcccattgccatctgagcaattccccccgcgcaatcgaacacgcttaccaatacggaggcacagccaatagtcgccaggagtttgaacatttgaaaggagattttggtgctaaatctcagttctccatcaggctgaggacacgctcctcacatgggatgattttttatgtaagcgatcaggaggaaaacgatttcatgacgttgttcctggctcacggacggctggtatacatgttcaacgtcggtcacaagaagctcaagatccgatctcaggaaaagtacaatgatgggttatggcacgacgtgatattcattcgcgagcgatctagtggacgcctggtgatcgatggcctgcgggtgctcgaagagtctctacctcctactgaagccacttggaaaataaagggaccgatttacttggggggtgtagcaccagggaaagctgtcaaaaacgttcagattaactccatatactctttttctgggtgtttaagcaatctccagctcaatggtgcatctattacctccgccagccagacgttctccgtgacaccttgctttgagggccccatggagacggggacatatttctcaaccgaaggggggtatgttgtgctagacgagtcatttaatattggccttaagttcgagattgcatttgaagtacgccccagatcctccagcggcaccctggttcatggacactcagtcaacggcgagtatctgaacgtgcatatgaaaaatgggcaggtgatcgtgaaggtgaataatggaattcgagactttagcacaagcgtcacaccaaaacaaagtttgtgtgatggccgctggcacagaatcaccgtcattagagactccaatgtggtgcagctcgatgtcgactccgaggtgaaccacgtggtcggacccctcaatccaaagcccatcgatcatcgcgagccagtttttgtcggcggggtgcctgagagcctgctcacaccgcgcctagcaccctcaaaacctttcactggatgcatccgccattttgttattgatggacacccggttagcttttccaaggccgcccttgtgagcggggccgtgagcattaactcatgccccgccgcttag

SEQ ID NO: 127265 - DNA, 5451 bp, Artificial Sequence
  derived and/or modified sequence
atggccctgtcaagcgcctggagatcggttcttccactttggctgttgtggagtgccgcctgctcaagggctgcctctggtgacgacaatgcatttcctttcgatatagaaggatcatcagctgtaggcaggcaggatcctcccgagactagtgagcccagggtagcgcttggccggctgcctcctgctgctgagaagtgcaatgccgggtttttccatacactgagtggtgagtgtgtgccatgcgactgcaatgggaattcaaatgaatgcctggacggaagcggctattgcgtccattgtcaacggaacacgactggtgaacactgtgaaaaatgtctggacgggtacatcggagacagcatacgcggggcaccccagttctgtcaaccttgcccttgcccccttccccaccttgcgaatttcgctgagagctgttacagaaaaaatggcgccgtgcgctgtatttgtaatgaaaattacgcaggcccaaattgcgagcgttgcgcccctggatattacggcaaccccctgctgatcggaagcacgtgtaaaaaatgcgattgcagcggtaatagtgatcctaacttgattttcgaggactgtgatgaggtcacaggccagtgccgaaactgtctgaggaacaccaccggctttaaatgcgagcgttgtgcccctggctactacggagatgcgcgaatcgctaagaactgcgctgtgtgtaattgtgggggcgggccatgtgatagtgtaacaggggaatgccttgaggaaggctttgagcccccaactgggtgcgacaagtgtgtttgggatctgaccgatgccttgcggctcgctgctctatctatcgaagaaggaaagagcggtgttctgagcgtcagctctggtgccgctgcacatagacacgtcaacgagatcaatgcaaccatctacctgctgaagacaaagctgtccgagcgagagaaccaatacgcactgaggaagatccaaatcaataacgcagaaaatactatgaaatcactgctcagcgatgttgaggaactggtagagaaggagaaccaggcaagccgtaaaggccaactagtgcaaaaggaaagcatggacacgattaatcatgcttctcaactggtcgaacaggcgcacgacatgcgcgataagatccaagaaataaataataagatgctctattacggtgaagaacatgaactgagcccaaaagagatctccgaaaagcttgtcctggcccagaagatgctggaggaaattaggagcaggcagccctttttcacccaacgggaactagtagatgaggaggccgacgaggcctatgagctgctcagtcaggctgagagctggcagaggttgcacaacgaaacccgaaccctgttccctgttgtcctagaacagctggacgactacaatgccaagctttccgacctgcaggaggcgctcgaccaggccctcaactatgtgagagatgccgaggatatgaacagggcgactgccgctcgccagcgagaccatgagaagcagcaagagcgggttagagaacagatggaggttgtgaacatgtccctcagtacaagtgccgacagcttgacaaccccacgtctgaccctctctgaactggacgacataatcaaaaatgcttcaggcatctacgccgaaatcgatggtgctaagtcagaactgcaggtgaaactctccaacctgagcaatctctcccatgacctggttcaggaagcgattgatcatgcacaggacttacaacaggaagcaaacgagctgtcacgcaagttgcactcctccgatatgaatggtctggtccagaaggccctagatgccagcaacgtgtatgagaatattgtgaactatgtttcagaggcaaatgagacagctgagttcgctctgaacacaactgaccgcatctatgacgccgtttctggaatcgatactcaaatcatctaccataaagacgaatctgaaaacctcctgaaccaggcgagagaactacaggctaaggccgagtccagtagcgacgaggccgtggcagataccagtaggagagttggcggagccctggccaggaaatccgcgctcaagacacggcttagtgacgcagtgaaacaactacaggcagctgagcgaggcgatgctcagcagcggctcggacagtcgcggttgattacagaagaagctaacaggaccactatggaagtccagcaggccaccgctcccatggcgaacaatcttacaaattggagtcagaatcttcaacacttcgactcttctgcctacaataccgccgtgaattccgcaagggacgcagtgcgaaacctgacggaggtcgttccacaattgttggaccagcttagaaccgtcgagcaaaaaagacctgcttctaatgtgtctgcttcaatccaaagaatcagggaattgatcgcgcagacccgcagtgtggcatcaaagattcaggtcagcatgatgtttgatggtcagtctgcggtagaagtgcactcaagaactagcatggatgatttaaaggccttcaccagcttgagcctgtacatgaaaccacccgttaaaaggccagagctaacagagacggctgatcagtttatactgtacctgggctccaagaacgcaaagaaagagtacatgggtttagctatcaagaacgacaacctggtgtacgtgtataacttagggactaaagacgtggagatccctctagacagtaaacccgtgtcgtcttggcctgcatatttctcaattgtcaaaatcgaaagagttggcaaacacgggaaagtttttttgaccgttccctcattaagcagcactgccgaggagaaatttattaaaaagggcgaattttctggtgacgattccctactggatcttgaccctgaagacacagtattttacgttggtggcgttccttctaacttcaaactgcccacctctctgaacctgcctggatttgttggctgtctcgaactcgccaccctgaacaacgatgtgataagcctctacaactttaaacatatctacaatatggaccctagcaccagcgtcccatgcgcccgcgacaagctcgcctttacccagtctagagccgcctcctattttttcgatgggtctggctatgccgtggtcagagatattacacggcgaggcaagttcggacaggttacccggtttgatatcgaagtaagaacaccagccgacaacggactgatcctgcttatggttaacggaagtatgttctttaggctggaaatgcggaatggatacctccatgtattttacgacttcggcttctctggaggccccgtccaccttgaagacacactaaaaaaagcccagatcaacgacgctaagtatcacgagataagtataatttatcacaatgacaagaaaatgatcttggtggtggatcggcggcatgtaaagagcatggacaacgagaaaatgaaaattcctttcacagacatttatattgggggagccccgccagagatcctccagagtagagctctgagagctcatctgcctctagacataaactttcgcggctgtatgaaaggatttcaattccagaagaaagactttaatcttcttgagcagaccgaaactctcggtgtggggtacggttgtccagaagatagtctgatctctcgacgggcatactttaatggacaatcattcatagcctcaatccaaaaaatttctttctttgatggatttgagggcggattcaacttccggacactccaacctaatggattactgttctattatgcgtcaggatcagacgtgttcagcatttcactggataatgggaccgtcataatggacgttaagggaataaaggtgcaatctgtggacaaacaatataatgatggtctgtcccacttcgttatctcttcagtgtctccaacccgttatgaactcatcgtagacaagtctcgtgtcggtagcaagaatccgacaaaaggcaagatagagcagactcaggctagcgagaaaaaattctatttcggtgggtctccaatctccgcccaatacgccaacttcactggatgtataagcaacgcctatttcacccgtgtggaccgtgatgttgaggttgaagatttccagagatatactgaaaaggtccacaccagcctgtacgaatgcccaattgagtcatcaccactctttctgttacacaaaaaaggtaaaaatctgagtaagcctaaggcttcccaaaataaaaaaggcggaaaatctaaggatgctccgagctgggatcctgtggctctgaaattgccggagcgaaatacacctcggaactctcactgtcacctgtccaactctcccagggctattgagcatgcctaccagtatggagggacagcgaattcgaggcaagaattcgaacatttgaaaggagacttcggagctaagagccaattctccatcagactacgtacgcggagcagccacgggatgatcttttacgtgagcgatcaggaggaaaatgacttcatgacgctattcctggctcatggcagactggtgtatatgtttaacgtgggtcataagaagctgaagatcagatctcaggaaaaatacaatgacggcttatggcatgatgtcatattcattcgcgaaagaagttcaggacgcctggttatcgatggtttgcgggtgctggaggaaagtctcccaccaaccgaggctacatggaagattaagggccccatttacttgggaggagtggcccctgggaaggccgtgaaaaacgtccaaattaatagcatctacagcttttcaggctgcctaagtaacttacagctcaacggagccagtattaccagcgctagtcagacattctccgtcacgccttgttttgaggggcctatggagacaggcacatacttcagcaccgaaggggggtacgtggtcttagacgaatcctttaatatcggactgaagtttgagatagcattcgaagtaagacctcggagttcgagtgggacactggttcacggacacagcgtgaatggtgaatacttgaacgtgcacatgaaaaatggccaagttatcgtgaaagtgaataacggtatccgggacttcagcacttccgtgactcctaagcagagcctatgtgatggccggtggcataggattaccgtcatccgagatagcaacgtcgtccagctcgacgttgactccgaagtcaaccacgtggtaggccctcttaacccgaagcctatcgaccaccgggaacctgtgtttgtcggtggcgtgccagagagccttcttactccgaggctcgcaccctccaagccatttaccgggtgcatccgccactttgttatcgacggacaccccgtgtctttcagcaaggccgcgctggtcagcggcgccgtgagcattaactcttgccctgctgcctag

SEQ ID NO: 127266 - DNA, 5451 bp, Artificial Sequence
  derived and/or modified sequence
atggctctgtcgtcagcgtggaggtccgttcttcctctgtggttgttatggtcggctgcctgctcaagagccgcatcaggggacgacaatgcctttccttttgatatcgaaggatcatccgcagtagggaggcaggatccccctgagacaagcgagccccgggtggcgctaggtcgcttaccccctgctgcagaaaaatgcaacgccggattcttccacaccctgtctggggagtgtgtaccctgcgactgtaatggcaactccaacgagtgtttagacggctcaggatattgcgtccattgccaacgaaacactacgggagagcactgcgaaaagtgcctggacggatatatcggtgattctatcaggggagcccctcaattttgccagccgtgcccatgtccactgccacatttagctaatttcgccgaatcatgttatagaaaaaacggagccgtccgctgcatttgtaatgagaactatgccggccctaactgtgaacgatgtgcccctggttactatggaaaccccctgttaattggttctacttgcaagaaatgtgattgcagtgggaactccgatcccaatctcattttcgaagattgcgatgaagtcaccggccaatgtcggaattgcctgcgtaacaccaccggattcaagtgcgagcgctgcgctccaggttattacggagacgccagaatagccaaaaactgtgctgtgtgtaattgcggtggcggcccctgcgatagtgtcactggtgagtgtctggaggaagggttcgaaccccccacagggtgcgacaagtgtgtctgggacctgactgatgcattgcgactggcggcattgtcaattgaagaaggaaagtcgggcgtcctttcggtatcaagcggggccgccgcccacaggcatgttaacgagatcaacgcaacaatttacctactgaaaacaaaactgtccgaacgggaaaaccaatacgccctcagaaaaattcagatcaataacgctgaaaacacaatgaaaagcctcctgagcgatgtggaagaactggtcgaaaaagaaaatcaggcgagcagaaagggccagctggtacaaaaagaatcaatggataccatcaaccatgcctcacagctggtcgagcaggcgcatgacatgcgcgataaaatccaggagatcaataacaagatgctgtattacggagaggaacacgaactaagcccgaaggaaatctcggagaaacttgtacttgcccagaagatgttggaagagattcggagcaggcaaccattttttacacaaagagaactcgtcgacgaggaggcagacgaagcttatgagctgctttcccaggctgagagctggcagcgcctgcacaatgagactagaactctgttccctgtggtgctcgaacagctggacgattataacgcaaaactctcagatctccaggaggcgctggatcaggctctgaactatgtgagggatgctgaggatatgaatcgcgccactgcagcccgccagagagatcacgaaaagcagcaggagagggttagggagcagatggaagtagtgaacatgtctttatctactagcgcagactctctcacaacccctaggctaaccctgagtgaactcgacgacatcattaagaatgcgtctggtatttacgccgagattgatggtgccaaatctgagcttcaggtcaaacttagcaacctttcaaacctttcccatgacctggttcaggaagctatcgaccacgcccaggacctccaacaggaagcaaacgaactgagccgcaaactgcatagctctgatatgaatggtctggtgcagaaagctttggatgcttcaaacgtgtatgagaatatcgtgaactacgtaagcgaggccaatgaaaccgcagagtttgcactgaacacaaccgatcgcatctacgatgctgtgtccggtatagacactcagataatataccacaaggacgagtccgagaacctgctcaaccaggcacgcgagctccaggcaaaggccgagagttccagcgacgaggccgtagcagacacaagccggcgcgtgggaggagccctggcccggaaatcggcactcaagacccgcttgtccgatgccgtgaagcagctgcaagctgcggagagaggtgatgcacagcagagactaggtcagtccaggctgattaccgaggaggctaataggacgactatggaagttcagcaggcgacagcacccatggccaataatctaactaactggagccagaacttacaacactttgacagttctgcttataacacggccgtcaactcagccagagacgctgtacgaaatctgacagaagtggtaccccagctgttggaccagctgcgcactgtggagcagaaacgccccgcaagcaacgtctctgcttcgatccaaaggattagggagctgatagcacagacgaggtctgtggccagcaaaatccaggtatcaatgatgttcgacggacaatctgcggtagaggttcatagcagaacatcaatggatgatttaaaagcgtttacttccctgtcgctctacatgaagccgcctgtgaaaaggcccgaattgaccgagaccgcagatcagttcatactttacctggggtccaagaatgccaagaaggaatatatgggccttgctatcaaaaacgataatttggtgtacgtttacaatcttggaactaaagacgtggagatccccctggacagcaaaccggttagttcatggcccgcttacttctctatcgttaaaatagaaagggtcggcaaacacggaaaagtgttcctaacagtgccaagcctctctagcacagccgaagagaaattcattaaaaaaggggagtttagtggtgacgattctcttcttgaccttgaccccgaggacactgttttttacgtgggaggggtcccctcaaatttcaagctgcccaccagcttgaatcttcctggctttgtcggctgtcttgagctcgcaactctaaataatgacgtgatatctctgtacaactttaagcatatctataacatggaccctagcacctctgtcccatgcgctcgagataagctggccttcacacagtcacgcgctgcatcttatttcttcgatggcagcggttacgctgttgtgagagatattaccaggagaggtaagtttggacaagtgaccagattcgacatcgaggtgaggacgcccgccgacaatggcctgatactactaatggtgaatggatccatgttctttcggcttgagatgagaaacggatacctgcacgtgttttatgactttgggttcagcggagggcccgtacacctggaggacactctgaaaaaagcacagatcaacgatgctaaatatcacgagatttctattatctaccacaatgataaaaagatgatactggttgttgatcggcggcatgttaaaagcatggataacgagaagatgaaaatacccttcacagatatttatataggaggtgcgccacctgaaatcctgcagtctcgggctctcagagcgcacctccctttagacattaattttcgcgggtgtatgaaaggcttccaatttcagaagaaggatttcaatctactcgagcagacagagacgctgggagtcggatacggctgccccgaagactccctcatttcacggagggcttatttcaatggacagagttttattgcaagcattcaaaagatttcttttttcgacggattcgaaggcggctttaattttcggacactgcaacccaacggacttcttttctattacgcatcagggagtgacgtgttctcgattagccttgataatggaacggtgatcatggatgtcaagggaattaaagtccagtccgtagataagcagtataatgacgggctgagccatttcgtcattagttctgtatcacctacgcggtatgagctgattgtagataaatccagggtggggtcgaagaacccaacgaagggaaagattgaacagacccaagcatccgaaaaaaaattctattttggcggcagcccgatatccgcgcaatatgcaaacttcacaggatgcatcagcaacgcatatttcaccagggtagacagggacgtggaagtggaggattttcagcgctatactgaaaaggttcacacctcactgtacgagtgtcccatcgagagtagcccactatttctgctgcataagaagggtaagaaccttagtaagcccaaagctagccaaaacaagaagggcggcaaatcgaaagacgcaccaagctgggaccccgtggctttaaagcttcctgagcggaatacgcctcgtaacagccactgccatctgagcaattcaccacgggccatcgaacatgcataccagtacggagggaccgccaattcccggcaggagtttgagcatctcaagggagatttcggagccaaatcgcagttttccatccgcctcaggacaagatcttcacatggcatgatcttctatgtgtccgaccaggaagagaatgactttatgacactcttcttagcacacggccggttggtgtacatgttcaacgtgggtcacaaaaaactcaaaatcagaagccaggaaaagtataacgacggactgtggcatgacgtgatcttcataagagaaaggtcaagcggcaggttggttattgatggactgcgcgtgttggaagagagcctaccaccgacagaggcgacctggaaaattaaagggccaatctacctgggcggcgtggcccctgggaaagccgtgaaaaacgtgcagataaattccatttatagcttttctgggtgcctgtccaacctgcagctcaatggcgcaagcatcacctctgcatctcagaccttctccgtgacaccctgttttgaaggccctatggaaacaggcacttacttttctacggagggaggatatgtcgttctggacgagagcttcaacatcggattaaagtttgagatcgcattcgaagttcgccctcggtcctctagcggcactcttgtgcacggacactcagtgaacggagaatacctgaatgtgcacatgaagaatggacaagttattgtgaaggtcaacaacggcatccgggacttctcaacaagcgtcacacccaagcagtccctatgtgatgggcggtggcatcggatcacggtcatacgggattccaatgtggtgcagctagatgtagactccgaagtgaatcacgtggtgggtcctttgaatcctaagcctatcgatcatcgcgaaccggtttttgtggggggcgttcccgaaagccttttaactccacgtctggccccatctaaaccattcaccggctgtatacgccatttcgtgatcgacggccatcccgtgtcgttttccaaggccgctctcgtctctggcgccgtgtcgatcaattcttgtccggccgcttag

SEQ ID NO: 127267 - DNA, 5451 bp, Artificial Sequence
  derived and/or modified sequence
atggccttgtccagcgcctggcggtctgtgctaccactgtggctgctgtggtccgcagcttgctctcgcgctgcgtccggggacgacaacgcttttccctttgacattgagggctcttccgccgtgggacgacaagatcctcccgagacgtcagaacctagagtggcgctgggacgcttaccacctgctgcagaaaaatgcaatgccggtttctttcatacgctgtcaggagagtgtgtcccctgtgactgtaatggaaattccaacgaatgtctcgacggttccggttactgcgttcactgccaaagaaataccaccggcgaacattgcgagaaatgcctggatggatacattggcgactccatccgcggcgccccccaattctgccagccgtgcccatgcccactccctcacttggccaacttcgcagaaagctgttatcgcaagaatggagctgttagatgtatttgcaatgaaaattacgctgggcccaactgtgagcgatgcgccccaggatattacggaaatcccctcctgattggaagtacttgcaaaaagtgtgactgctccggcaactctgacccgaatctgatatttgaggattgtgacgaagtaactggccagtgccgtaactgtctcagaaatacaacagggttcaagtgtgagagatgcgccccaggttattacggagatgcaagaatagccaagaattgtgctgtttgcaactgtgggggtgggccctgcgattctgtgactggcgagtgtctggaggaagggtttgaaccgccgaccggctgcgataagtgtgtgtgggatcttaccgatgccctgcggcttgctgccttgtccattgaagaagggaagagtggcgtgttaagtgtgagttctggggccgcggcacaccgccacgtgaacgaaataaacgctacaatctacttgctcaaaaccaaactgtctgaaagagagaaccagtatgccctccggaaaatccagattaacaatgcggaaaatacaatgaagtctttgcttagtgatgttgaggaactcgttgagaaagagaaccaggcatcaaggaaaggtcaactcgtgcagaaggagagtatggatacaataaatcatgcatcccagctcgttgaacaggcacatgacatgagagacaaaattcaggagatcaataataagatgttatattacggagaggagcatgaattgtcacccaaagagatatcagaaaaactcgtgctggctcagaaaatgctggaggagattcggtcaagacagcctttctttacccagcgggagcttgtagatgaggaggccgatgaagcctatgaactgttgtcccaagcggaatcctggcagaggctgcacaatgagactcgcacacttttccccgtggtactggagcagctggacgactataacgcaaaacttagtgatctgcaggaggccctagaccaggctttaaattacgtgcgggacgccgaagatatgaatagggctactgcggccaggcagcgggaccatgagaagcagcaagaaagagttcgtgagcagatggaagtcgtcaacatgtcgttatccacaagcgctgacagcttgacaacgcctagactgaccctcagcgagctcgatgacattattaagaatgcctccggaatctatgcagaaatcgacggggcgaaatcagagttgcaagtcaaactcagcaatttaagcaacctttctcacgatttagtccaggaagccattgaccacgcgcaggacctccaacaggaagctaatgagctgtcaagaaagcttcattcatctgatatgaatggcctcgtacaaaaggccctggatgcaagtaacgtatacgaaaatattgtgaactatgtttccgaggccaatgaaacagccgaattcgccctgaacacgactgacagaatatatgatgccgtcagcggaatagatacacagataatctatcacaaagacgagagcgagaacctcctgaaccaagctagggaattacaggcaaaagcagagtcctcctccgatgaggctgtggcggacactagtcggcgggttggaggagccttggccagaaagtcagcccttaaaacacggttatctgacgctgttaaacagttacaagcagcggaaagaggtgacgcacaacagcgactcggacaatcaaggcttattacagaagaggcgaacagaaccactatggaagtgcagcaagcaacagcaccgatggctaacaatctcacaaactggtcacagaacctgcaacattttgattcatccgcttacaatactgccgtgaactccgctcgcgacgccgtgagaaatctaacggaagtcgtgccgcagctgctggaccagcttcgaactgttgagcagaaacggcctgcaagcaatgtgagtgccagcattcaacggatccgagaactgatcgcacagacaagaagtgtggcatccaaaattcaagtcagtatgatgtttgatggacagagcgcagttgaagtgcattcaagaacgagtatggatgacttgaaagcctttacatctctctcgctgtacatgaaaccacctgtgaaacgtccagagcttaccgagactgccgaccagtttatcctgtacttggggtcaaaaaacgctaaaaaagagtatatgggtctcgcgataaagaacgacaacctagtgtacgtctataacttaggaaccaaggacgtcgaaatccctctagacagtaagcccgtgtccagttggcctgcttacttctcgatcgtgaaaatcgagcgcgtgggaaagcacggaaaagtgttcttaacagtgccgtctctaagctccaccgccgaagaaaaattcatcaagaaaggcgaatttagcggagacgatagtctgttggatctggaccccgaggacaccgtcttctacgtgggtggcgtcccatctaattttaaattgccaacatcattgaacctgccaggattcgtaggatgtctcgagttagcaaccctgaacaacgacgtgatatcactctacaatttcaaacacatctacaatatggatccctctacctccgttccatgcgcccgagataaattagcctttacacagtcgcgggcagcttcctatttttttgacggatcagggtatgccgtggttagagatattacgcggcgcggtaagttcggccaggtgaccaggtttgatattgaagtaagaacccctgcagacaacggcctgatcctcctgatggttaatggaagtatgttcttcagacttgagatgagaaacgggtacctgcatgtgttctatgactttggattctctggaggaccagtgcacctggaggacactctgaagaaagctcaaataaacgacgctaaatatcatgaaatatccatcatctatcataacgacaagaaaatgattctggtggtcgatagaagacacgtgaaatccatggataatgaaaaaatgaaaatccccttcaccgacatttacatcggcggagctcctcccgagatcctgcagtcacgtgcattgcgggctcacttgccacttgacattaattttcggggttgtatgaaaggcttccaattccagaaaaaagattttaatttactggaacaaactgagacgcttggagtgggttacggatgccccgaagacagcctcatctcccggagggcttattttaatggacaaagcttcatcgcttctattcagaagatttcattctttgacggcttcgaggggggcttcaactttagaactctgcagccaaatgggctattattttactacgctagtggcagcgacgttttctcaatcagcctcgataacgggaccgtaatcatggacgttaagggtataaaagtgcagagcgtggacaaacagtataacgacggcctcagccatttcgtgatctcatcggtgagccccacaagatatgaactgatcgttgacaaatcaagagtcggatccaagaacccaaccaagggcaaaatagaacaaacacaagcttcagagaaaaagttttattttggtggcagtcctatctcggcccaatacgctaacttcacaggatgtatcagtaacgcttattttacccgggtagacagagatgtagaggttgaagatttccaacgatacaccgagaaggtacatacaagtctgtacgagtgcccgatagaatccagccctttattcctcctgcacaaaaagggcaagaacttgagtaagccgaaggcatcacaaaacaagaaaggaggaaaaagtaaagatgcccccagctgggaccccgttgccctgaagctgcctgaacgaaataccccccggaactcacattgccacctcagtaactcccccagagccattgaacatgcctaccaatatggaggtaccgctaacagtagacaggaatttgagcatttgaaaggagattttggtgctaagtctcagttctctattagacttcgaaccagaagctctcacggtatgattttctacgttagtgatcaggaggagaatgacttcatgaccttgttcctggctcacggtcgcttagtctacatgtttaatgtgggtcacaagaaattaaagattaggtcacaggagaagtacaacgacggattatggcacgacgttatcttcattagagagagatcatcaggcagacttgttattgacggtttgagagtactcgaggaaagcctaccgccaaccgaggcaacctggaagattaaagggcctatctatttaggtggagtggctccaggaaaagctgtgaaaaacgttcagatcaattccatttacagcttttcagggtgtctgagcaaccttcagcttaacggcgcatctatcacaagtgcatctcaaacattttctgtgaccccctgttttgaaggccctatggaaactggcacctatttttcaaccgagggtggttacgtggtcctggatgagtcattcaacatcggcttgaagttcgaaatagcctttgaagtaagacccagatctagcagcggaaccttagtgcacggacatagcgtgaacggtgagtatctcaatgttcacatgaagaacggacaggtgatcgtgaaggttaataacggaattcgagacttttctacctccgttacccctaaacaaagcttatgtgacgggcgctggcacaggattaccgtgattagagactcaaacgtagtgcagctcgatgtggacagtgaggttaaccatgtcgttgggccccttaaccccaagccaatcgatcaccgtgaacccgttttcgtggggggggtccctgagtccctgctgaccccaagattagctccttccaagcccttcaccggttgtatcagacacttcgtgatcgacgggcatccagtttctttctccaaagctgctttagtatccggtgccgtctctattaattcctgccccgctgcttag

SEQ ID NO: 127268 - DNA, 5451 bp, Artificial Sequence
  derived and/or modified sequence
atggccctgagttcagcttggcggtctgtgttacccctgtggttgttgtggagcgccgcctgttcccgcgctgcttcgggtgacgataatgcttttccttttgatattgagggctcttccgccgtgggtcgccaagatcctcccgagacctctgagcctcgcgttgccctggggcgccttcccccggctgcagagaagtgtaacgcaggttttttccacaccttaagcggtgaatgcgtgccatgtgattgtaatggaaattcaaacgaatgtctggatgggagtggatactgtgttcactgtcaacgtaatacgaccggcgagcattgcgaaaagtgcctcgatgggtacatcggagattctatccgaggcgcacctcaattttgccaaccttgtccctgcccattacctcacctggctaactttgccgaatcatgttatagaaagaatggggccgtgcgctgtatatgtaacgagaattacgccggcccaaattgcgagagatgcgcgcccggttactatggcaaccccctgctgattggatcaacgtgtaaaaaatgcgactgctctggaaattccgaccccaacttaatcttcgaagactgtgacgaggtgaccgggcaatgccgaaattgcttgaggaatactactggcttcaaatgtgagcgatgtgcccccggatactatggcgatgctaggatagctaaaaattgcgctgtatgtaactgcggaggcgggccatgcgactccgtcacaggcgagtgtctggaggaaggatttgaacccccaaccggctgcgacaaatgcgtgtgggacctgactgatgccctgaggctggctgcgttgtctattgaggaaggtaagtctggcgtgctgagtgtttccagtggtgccgctgcacaccggcacgtgaacgagatcaatgccacgatctacctcctgaaaactaagctttctgagcgagagaaccaatacgccctccggaagattcaaatcaataacgccgagaatacaatgaagagcctcctgagcgatgtcgaagagttagtagaaaaagaaaaccaagcaagtcggaaaggccagctcgtgcagaaagaaagcatggacactatcaatcatgcctctcaactggttgagcaggcccacgacatgagagacaaaatccaagagataaataataaaatgctctactatggggaagagcatgagctcagccctaaggagataagcgaaaagctggtcctggctcagaaaatgttggaggaaattagatccagacagccattctttacacagcgagaacttgtggacgaagaagccgatgaggcgtatgaactattgtcacaagccgaatcctggcagagattgcacaatgagacccggactcttttcccagtcgtgctcgaacaacttgacgactacaatgccaagctatcagatctgcaggaagctcttgaccaggcgctgaattacgttcgtgacgctgaagatatgaacagagccacggctgcgcgccaaagagaccatgagaagcagcaggagcgagtaagggaacaaatggaagtcgtgaatatgagcctctcaacatccgctgattctctcaccacaccacgattgacgcttagtgaactggatgacataattaagaatgcctccggaatctacgcagaaattgatggcgcaaaaagtgaactgcaggtaaaactgtctaacctttcaaacctcagccatgacttagttcaggaggctattgatcatgcccaggatctgcaacaagaagcaaacgaactttcacgcaagctgcattcatccgatatgaatggcctcgtgcagaaagcactcgacgcgtcaaacgtgtatgaaaacattgtgaattatgtgtctgaagctaatgagaccgctgaattcgccttgaacactactgataggatctatgatgcagtttccggaatcgatacccagatcatctaccacaaggacgaatcagagaacctactgaaccaggctcgggaactccaagcaaaagctgaatcctctagtgacgaagcagtcgctgacacctcacggcgggtgggaggcgcactcgcgaggaagtctgccctaaaaactaggctttcggacgccgtcaaacaattgcaagcagccgagagaggtgacgcgcagcagagactcggccagtcaaggctgattactgaagaggctaatagaactacaatggaggtgcaacaggccaccgccccaatggccaacaatctaacaaactggagccagaacctgcaacattttgactctagcgcgtacaatacagccgtgaactcagccagggacgccgtgcgaaatctgaccgaagtggttccccagctcctcgaccaactgcgcacagtggaacaaaaacggccagcctctaatgtctctgcatcaatacaaaggattcgggaactgatagcacagacaagatccgtcgcctcaaaaatccaagttagcatgatgtttgacgggcaatccgccgtcgaagtgcattcgcgaacctctatggatgacctgaaagcatttacatcactgagtctgtatatgaagccccccgttaagcgacccgagctcaccgagacagctgaccaattcatcctttatctggggtccaagaacgctaaaaaggaatacatggggctggcaataaaaaacgacaatcttgtgtacgtctataacttagggactaaagacgtggagatccctctagacagtaaacccgtgtcgtcttggcctgcatatttctcaattgtcaaaatcgaaagagttggcaaacacgggaaagtttttttgaccgttccctcattaagcagcactgccgaggagaaatttattaaaaagggcgaattttctggtgacgattccctactggatcttgaccctgaagacacagtattttacgttggtggcgttccttctaacttcaaactgcccacctctctgaacctgcctggatttgttggctgtctcgaactggcaaccctgaataacgatgtaatatcactatacaacttcaagcatatttataatatggacccaagcaccagtgtcccatgcgcccgagataagctggcctttacccagtctagagcagccagctacttttttgacggctcaggctacgctgtagtaagagacataacccgcagaggaaagttcggacaagttacgagattcgatatcgaggtaagaactcctgcagacaatgggttaatcctcctgatggttaacggatctatgttcttcagactggagatgaggaacggatatctgcatgtattctacgacttcggcttcagcgggggaccggtccacctcgaagacacacttaaaaaggcacaaataaacgatgcgaagtaccacgaaataagcatcatttatcacaacgacaagaagatgatcctggtggtggatcgacggcacgtcaagagtatggacaatgaaaagatgaaaatccctttcacggatatctacatcggcggcgcaccccccgaaatcctccaatcgcgagcacttagagcacatcttccactggatatcaactttagaggatgtatgaaggggttccaattccagaaaaaagactttaacctgcttgaacaaactgaaaccctcggtgttggttacggatgtcccgaagattccttaatttcccgtagagcatacttcaacggccaaagtttcattgcatccatccagaaaatcagcttctttgacgggttcgaaggggggtttaactttagaacactgcagcctaatggactactcttttactacgcgagcggctcggatgtgtttagcatatcactcgacaacgggactgtcatcatggacgttaagggcataaaggtgcagtccgttgataaacagtacaatgatggcctgtcacactttgtaatctcttcagtctctcccactcggtacgagctaatcgttgataaatccagggttggaagcaagaaccccacaaaaggcaaaattgagcagactcaagcctccgaaaaaaaattttactttggcgggtctccaatctccgcacagtacgcaaactttacagggtgcatatcgaatgcatactttacgagagtcgacagggatgtcgaggtcgaagatttccagagatacacagaaaaggtccacacttcattgtatgagtgccctatagaatcttctcccctttttctgctgcacaaaaaaggcaaaaacctcagcaagcctaaagcaagccaaaacaagaaaggcgggaagagcaaagacgccccgagctgggatcctgtggctctgaagctgcccgagagaaatacacccaggaatagtcattgtcacctatccaactcgcccagggctattgagcacgcctatcaatacggaggaacggcaaactctcgtcaagaatttgagcatctcaaaggagattttggagccaaaagccagtttagcataaggctacgaacacgctcatcacatggaatgattttctacgtctcagatcaagaagagaatgactttatgactttgttcctggctcacggaagattggtgtatatgttcaacgtgggtcacaagaagctaaagattcggtcacaagaaaaatacaatgatggtctatggcatgatgttatcttcatacgtgaacggtcaagtggacgcctcgttattgatggcctgagagtacttgaggagtccttacctcctaccgaagctacatggaagatcaaaggccctatctatctgggcggggtcgctcccggaaaagccgtgaaaaacgtgcagatcaattctatctattctttttcaggatgccttagtaacctgcagttaaatggagcctctataactagcgcaagccagactttttcagtcactccatgcttcgaggggcctatggaaaccggcacgtacttttccacagagggcggctacgtagtgttggatgagtccttcaatatcggcctcaagtttgaaattgcattcgaagtccgacccaggtcatcttcaggaactctagtgcatggccattctgtcaatggcgaatatctcaacgtccacatgaagaacggccaggtaatagtgaaagttaataacggtattagggatttcagcacttccgtaacacctaagcagtccctgtgcgacggaagatggcaccgaatcaccgtgattcgtgacagtaatgttgtccagctcgacgtagacagcgaggtgaaccatgtagtaggtccattaaaccctaaacccatcgatcatcgcgagccagtctttgtcggcggtgtgcctgaatccctgctcacaccccgccttgctccctccaaaccttttaccggctgtattcgccactttgtgatcgacggtcaccctgtctccttctctaaagcagcccttgttagcggagccgtgtctatcaattcatgtccagcagcctag

SEQ ID NO: 127269 - DNA, 5451 bp, Artificial Sequence
  derived and/or modified sequence
atggccctgagttcagcttggcgaagtgttctcccactgtggcttttatggtctgcggcatgctcccgcgctgcctcaggagacgataatgcatttccttttgatatcgagggctcatctgccgtgggccggcaggacccccccgaaacttccgagcctcgcgtggcacttggtcgccttccccctgccgctgaaaagtgtaatgctggattcttccatactctgtctggtgaatgtgtgccttgcgactgtaatggaaattctaacgaatgtctcgatgggtcaggttattgtgtacactgccaacgaaacactacgggagagcactgcgaaaagtgcctggacggatatatcggtgattctatcaggggagcccctcaattttgccagccgtgcccatgtccactgccacatttagctaatttcgccgaatcatgttatagaaaaaacggagccgtccgctgcatttgtaatgagaactatgccggccctaactgtgaacgatgtgcccctggttactatggaaaccccctgttaattggttctacttgcaagaaatgtgattgcagtgggaactccgatcccaatctcattttcgaagactgtgacgaagtaacagggcaatgtagaaattgtctgagaaataccactgggtttaaatgtgaaagatgcgccccgggatactatggagatgcgagaatcgcgaagaattgtgcagtctgtaattgtggtggtggtccatgtgactcagtcactggtgaatgtctcgaagagggttttgaaccccctaccggatgcgataaatgcgtctgggatttgactgacgctctgcgactggccgctctgagcattgaggagggcaaaagcggagtactttctgtgagcagtggggcggctgcgcatagacacgtaaacgagatcaacgcgaccatatatctcctgaagaccaagctttccgagcgtgagaaccagtatgctttaaggaaaatacagataaataatgccgaaaacacaatgaagtccctgctctccgacgtggaagaacttgtcgagaaagaaaaccaagctagcagaaagggccaacttgtccagaaagagtctatggacacaattaaccacgcgtcccaattagttgaacaggctcatgatatgcgagataagatacaggaaattaataacaagatgctgtactacggcgaagaacacgaactaagcccgaaggaaatctcggagaaacttgtacttgcccagaagatgttggaagagattcggagcaggcaaccattttttacacaaagagaactcgtcgacgaggaggcagacgaagcttatgagctgctttcccaggctgagagctggcagcgcctgcacaatgagactagaactctgttccctgtggtgctcgaacagctggacgattataacgcaaaactctcagatctccaggaggcgctggatcaggctctgaactatgtgagggatgctgaggatatgaatcgcgccaccgccgcacgccaaagagaccacgagaaacaacaggaacgggtaagagagcagatggaggtggtgaacatgtcactgagcacttcagccgacagcttgacaacccccaggctcacactgagtgaattggacgatataattaaaaacgctagcggtatatatgctgaaattgatggagcaaagtctgaacttcaagtaaagctgtccaatctttccaatttaagccacgaccttgtgcaagaagccattgatcacgctcaggatctgcagcaggaagccaacgagctgagccgtaagctgcactcatcagatatgaacggactggttcagaaagcccttgatgcctcaaatgtgtacgagaacatagttaactacgtctctgaggcaaacgagacagctgagtttgctctcaataccaccgaccggatatacgatgctgtgagcggaatcgacacacagatcatctatcacaaggatgaatcggaaaacttactcaatcaggcaagagaactacaagccaaagccgaaagctcctctgacgaagcagtggccgatacttcgagacgggtgggcggcgccctcgcacggaaatcagcgctaaaaacgcgactgtcagacgccgtcaagcaactgcaggctgctgagcgaggagatgctcaacaacgcctaggacaaagcagattgatcacagaagaagctaacagaacaacaatggaagtgcaacaggctacagcaccaatggcaaacaatctgaccaactggagccagaacctgcaacatttcgattcatccgcctataacacggcagtcaacagcgcacgggatgccgttcgaaatctgaccgaagtggtccctcaattattagatcagttaaggaccgtggaacagaaaaggcccgcaagcaacgtctccgcatccatccagagaataagagaactaatcgcgcaaacacggtctgttgcaagcaaaatccaggtgtcaatgatgtttgacggccaatccgctgtcgaagtgcacagtcgaaccagcatggacgatttgaaagctttcacatcgctgagtttgtacatgaaacctcctgtaaaacgtcctgagctcacagaaacagccgaccaatttatcctgtacctcggctcgaagaatgctaagaaggaatacatggggctcgccatcaagaacgataatctcgtctacgtgtacaatctgggcaccaaagacgtagaaatccccctggactcaaaacctgtaagcagctggcccgcttacttcagcattgtgaagatcgaacgcgtaggaaaacacggaaaagtgttcttgactgtcccttcactttcttccactgccgaagaaaaatttatcaagaaaggtgaattctcaggagatgactcgttactcgaccttgaccccgaagacactgtcttttatgttggcggcgtgcccagcaattttaaactccccacaagcttaaatctgcctggattcgtcgggtgtctggagctcgccacactaaacaacgacgtgatctccctctacaactttaagcacatctacaacatggacccctccacctcagtgccatgtgcgcgggataaattggccttcacacagagtagggcggcctcttacttcttcgacggatctggctatgctgttgtccgagacataacacgcagaggtaagtttggacaggttactagattcgacattgaggttagaactcctgcagacaacggcttgatccttcttatggtaaatggcagtatgttcttcagactggaaatgcggaacggatacctccatgtgttttatgattttgggttcagtggaggccccgttcacttggaagatacacttaaaaaagcacaaataaacgacgctaaataccatgaaatctctatcatataccataacgataagaagatgatcttggtcgtggatcgcagacacgttaaatcgatggacaacgaaaagatgaagatcccatttaccgacatctacattggcggagccccgcctgaaatcctgcagtcccgggcccttcgcgcgcatttaccccttgacattaattttagaggctgtatgaaaggattccagttccagaaaaaggacttcaacctgctcgaacaaacagaaacactgggggtgggttatgggtgccccgaagattctctgattagccgccgggcgtacttcaacggccagtctttcattgccagcatccagaaaattagcttctttgatggcttcgagggcgggttcaacttccggacacttcaacctaatggtttgctgttttactacgcctctggatccgacgtattctctatctcactggataatggaactgttattatggacgtcaaaggcattaaggtacagtcagtagacaaacagtacaacgacggtctgagccacttcgtgatttcctccgtgagcccaactagatacgaattgatcgtagacaagagccgcgttggttcgaagaatcctactaaaggtaagatagaacaaacacaggcctccgagaaaaagttctacttcggcggatcaccaatctctgctcagtacgccaactttaccgggtgcatctcgaatgcctactttaccagagtggatcgcgatgtcgaagttgaggattttcaaaggtataccgaaaaggtacacacatctctgtacgaatgtccgatcgaaagtagccctctgtttctgttgcataagaagggaaagaacctctcaaaacctaaagcttcgcaaaacaagaagggaggaaagagcaaggacgccccctcatgggacccagtggccctgaaattacccgaacggaatacacccaggaactcgcattgccacttgtctaactccccccgcgccatcgaacacgcttaccagtatgggggcacagccaattctagacaagagttcgagcatttaaagggagactttggagcgaaaagccaattttctattagactaagaacaaggagctcccacggcatgatcttttacgtctccgatcaggaggagaacgactttatgacgttatttctcgctcatggacgcctcgtgtacatgttcaatgttgggcataagaagttaaagatcagaagccaggagaaatacaacgatgggctgtggcacgacgtgatctttatcagagagaggagctccggtaggctggtcatcgacggactgcgtgtcttagaagagtctttacctcccacagaggccacatggaaaataaaaggcccaatctatctgggtggcgtggcccccggcaaagcagtaaaaaatgttcagattaacagcatttactccttctccggatgtttgtcgaacctccagctcaatggagcgagtatcacctccgccagtcagaccttttcagtgactccttgcttcgaaggcccgatggagaccggcacctatttttcaacagaaggcggttacgtggtcttggatgaaagcttcaacataggcctcaagttcgaaattgcattcgaggtaagacctagaagtagctcggggacactcgtgcacggccacagtgtgaatggagagtacttaaatgtgcatatgaagaacggtcaagtcattgtgaaagtgaacaatggcattagagatttctctaccagcgtgaccccaaaacagtccttatgcgacgggcgatggcaccgaataacagtcatccgggactcaaacgtagtccagctggatgtagactctgaagtgaaccacgtcgttggcccactgaatcctaaaccaatcgaccaccgtgaacctgtctttgtcggaggcgtgcctgaatctctgttaacaccacgtctggcaccttcgaaacccttcacaggttgtattaggcatttcgttattgatggacaccctgtctcttttagcaaagctgccttggtctctggcgctgtttccatcaattcttgtcccgccgcttag

SEQ ID NO: 127270 - DNA, 5451 bp, Artificial Sequence
  derived and/or modified sequence
atggccctgagcagcgcctggagaagcgtgctgcccctgtggctgctgtggagcgccgcctgcagcagagccgccagcggcgacgacaacgccttccccttcgacatcgagggcagcagcgccgtgggcagacaggacccccccgagaccagcgagcccagagtggccctgggcagactgccccccgccgccgagaagtgcaacgccggcttcttccacaccctgagcggcgagtgcgtgccctgcgactgcaacggcaacagcaacgagtgcctggacggcagcggctactgcgtgcactgccagagaaacaccaccggcgagcactgcgagaagtgcctggacggctacatcggcgacagcatcagaggcgccccccagttctgccagccctgcccctgccccctgccccacctggccaacttcgccgagagctgctacagaaagaacggcgccgtgagatgcatctgcaacgagaactacgccggccccaactgcgagagatgcgcccccggctactacggcaaccccctgctgatcggcagcacctgcaagaagtgcgactgcagcggcaacagcgaccccaacctgatcttcgaggactgcgacgaggtgaccggccagtgcagaaactgcctgagaaacaccaccggcttcaagtgcgagagatgcgcccccggctactacggcgacgccagaatcgccaagaactgcgccgtgtgcaactgcggcggcggcccctgcgacagcgtgaccggcgagtgcctggaggagggcttcgagccccccaccggctgcgacaagtgcgtgtgggacctgaccgacgccctgagactggccgccctgagcatcgaggagggcaagagcggcgtgctgagcgtgagcagcggcgccgccgcccacagacacgtgaacgagatcaacgccaccatctacctgctgaagaccaagctgagcgagagagagaaccagtacgccctgagaaagatccagatcaacaacgccgagaacaccatgaagagcctgctgagcgacgtggaggagctggtggagaaggagaaccaggccagcagaaagggccagctggtgcagaaggagagcatggacaccatcaaccacgccagccagctggtggagcaggcccacgacatgagagacaagatccaggagatcaacaacaagatgctgtactacggcgaggagcacgagctgagccccaaggagatcagcgagaagctggtgctggcccagaagatgctggaggagatcagaagcagacagcccttcttcacccagagagagctggtggacgaggaggccgacgaggcctacgagctgctgagccaggccgagagctggcagagactgcacaacgagaccagaaccctgttccccgtggtgctggagcagctggacgactacaacgccaagctgagcgacctgcaggaggccctggaccaggccctgaactacgtgagagacgccgaggacatgaacagagccaccgccgccagacagagagaccacgagaagcagcaggagagagtgagagagcagatggaggtggtgaacatgagcctgagcaccagcgccgacagcctgaccacccccagactgaccctgagcgagctggacgacatcatcaagaacgccagcggcatctacgccgagatcgacggcgccaagagcgagctgcaggtgaagctgagcaacctgagcaacctgagccacgacctggtgcaggaggccatcgaccacgcccaggacctgcagcaggaggccaacgagctgagcagaaagctgcacagcagcgacatgaacggcctggtgcagaaggccctggacgccagcaacgtgtacgagaacatcgtgaactacgtgagcgaggccaacgagaccgccgagttcgccctgaacaccaccgacagaatctacgacgccgtgagcggcatcgacacccagatcatctaccacaaggacgagagcgagaacctgctgaaccaggccagagagctgcaggccaaggccgagagcagcagcgacgaggccgtggccgacaccagcagaagagtgggcggcgccctggccagaaagagcgccctgaagaccagactgagcgacgccgtgaagcagctgcaggccgccgagagaggcgacgcccagcagagactgggccagagcagactgatcaccgaggaggccaacagaaccaccatggaggtgcagcaggccaccgcccccatggccaacaacctgaccaactggagccagaacctgcagcacttcgacagcagcgcctacaacaccgccgtgaacagcgccagagacgccgtgagaaacctgaccgaggtggtgccccagctgctggaccagctgagaaccgtggagcagaagagacccgccagcaacgtgagcgccagcatccagagaatcagagagctgatcgcccagaccagaagcgtggccagcaagatccaggtgagcatgatgttcgacggccagagcgccgtggaggtgcacagcagaaccagcatggacgacctgaaggccttcaccagcctgagcctgtacatgaagccccccgtgaagagacccgagctgaccgagaccgccgaccagttcatcctgtacctgggcagcaagaacgccaagaaggagtacatgggcctggccatcaagaacgacaacctggtgtacgtgtacaacctgggcaccaaggacgtggagatccccctggacagcaagcccgtgagcagctggcccgcctacttcagcatcgtgaagatcgagagagtgggcaagcacggcaaggtgttcctgaccgtgcccagcctgagcagcaccgccgaggagaagttcatcaagaagggcgagttcagcggcgacgacagcctgctggacctggaccccgaggacaccgtgttctacgtgggcggcgtgcccagcaacttcaagctgcccaccagcctgaacctgcccggcttcgtgggctgcctggagctggccaccctgaacaacgacgtgatcagcctgtacaacttcaagcacatctacaacatggaccccagcaccagcgtgccctgcgccagagacaagctggccttcacccagagcagagccgccagctacttcttcgacggcagcggctacgccgtggtgagagacatcaccagaagaggcaagttcggccaggtgaccagattcgacatcgaggtgagaacccccgccgacaacggcctgatcctgctgatggtgaacggcagcatgttcttcagactggagatgagaaacggctacctgcacgtgttctacgacttcggcttcagcggcggccccgtgcacctggaggacaccctgaagaaggcccagatcaacgacgccaagtaccacgagatcagcatcatctaccacaacgacaagaagatgatcctggtggtggacagaagacacgtgaagagcatggacaacgagaagatgaagatccccttcaccgacatctacatcggcggcgccccccccgagatcctgcagagcagagccctgagagcccacctgcccctggacatcaacttcagaggctgcatgaagggcttccagttccagaagaaggacttcaacctgctggagcagaccgagaccctgggcgtgggctacggctgccccgaggacagcctgatcagcagaagagcctacttcaacggccagagcttcatcgccagcatccagaagatcagcttcttcgacggcttcgagggcggcttcaacttcagaaccctgcagcccaacggcctgctgttctactacgccagcggcagcgacgtgttcagcatcagcctggacaacggcaccgtgatcatggacgtgaagggcatcaaggtgcagagcgtggacaagcagtacaacgacggcctgagccacttcgtgatcagcagcgtgagccccaccagatacgagctgatcgtggacaagagcagagtgggcagcaagaaccccaccaagggcaagatcgagcagacccaggccagcgagaagaagttctacttcggcggcagccccatcagcgcccagtacgccaacttcaccggctgcatcagcaacgcctacttcaccagagtggacagagacgtggaggtggaggacttccagagatacaccgagaaggtgcacaccagcctgtacgagtgccccatcgagagcagccccctgttcctgctgcacaagaagggcaagaacctgagcaagcccaaggccagccagaacaagaagggcggcaagagcaaggacgcccccagctgggaccccgtggccctgaagctgcccgagagaaacacccccagaaacagccactgccacctgagcaacagccccagagccatcgagcacgcctaccagtacggcggcaccgccaacagcagacaggagttcgagcacctgaagggcgacttcggcgccaagagccagttcagcatcagactgagaaccagaagcagccacggcatgatcttctacgtgagcgaccaggaggagaacgacttcatgaccctgttcctggcccacggcagactggtgtacatgttcaacgtgggccacaagaagctgaagatcagaagccaggagaagtacaacgacggcctgtggcacgacgtgatcttcatcagagagagaagcagcggcagactggtgatcgacggcctgagagtgctggaggagagcctgccccccaccgaggccacctggaagatcaagggccccatctacctgggcggcgtggcccccggcaaggccgtgaagaacgtgcagatcaacagcatctacagcttcagcggctgcctgagcaacctgcagctgaacggcgccagcatcaccagcgccagccagaccttcagcgtgaccccctgcttcgagggccccatggagaccggcacctacttcagcaccgagggcggctacgtggtgctggacgagagcttcaacatcggcctgaagttcgagatcgccttcgaggtgagacccagaagcagcagcggcaccctggtgcacggccacagcgtgaacggcgagtacctgaacgtgcacatgaagaacggccaggtgatcgtgaaggtgaacaacggcatcagagacttcagcaccagcgtgacccccaagcagagcctgtgcgacggcagatggcacagaatcaccgtgatcagagacagcaacgtggtgcagctggacgtggacagcgaggtgaaccacgtggtgggccccctgaaccccaagcccatcgaccacagagagcccgtgttcgtgggcggcgtgcccgagagcctgctgacccccagactggcccccagcaagcccttcaccggctgcatcagacacttcgtgatcgacggccaccccgtgagcttcagcaaggccgccctggtgagcggcgccgtgagcatcaacagctgccccgccgcctag

SEQ ID NO: 127271 - protein, 1786 aa, Artificial Sequence
  derived and/or modified sequence
MGLLQLLAFSFLALCRARVRAQEPEFSYGCAEGSCYPATGDLLIGRAQKLSVTSTCGLHKPEPYCIVSHLQEDKKCFICNSQDPYHETLNPDSHLIENVVTTFAPNRLKIWWQSENGVENVTIQLDLEAEFHFTHLIMTFKTFRPAAMLIERSSDFGKTWGVYRYFAYDCEASFPGISTGPMKKVDDIICDSRYSDIEPSTEGEVIFRALDPAFKIEDPYSPRIQNLLKITNLRIKFVKLHTLGDNLLDSRMEIREKYYYAVYDMVVRGNCFCYGHASECAPVDGFNEEVEGMVHGHCMCRHNTKGLNCELCMDFYHDLPWRPAEGRNSNACKKCNCNEHSISCHFDMAVYLATGNVSGGVCDDCQHNTMGRNCEQCKPFYYQHPERDIRDPNFCERCTCDPAGSQNEGICDSYTDFSTGLIAGQCRCKLNVEGEHCDVCKEGFYDLSSEDPFGCKSCACNPLGTIPGGNPCDSETGHCYCKRLVTGQHCDQCLPEHWGLSNDLDGCRPCDCDLGGALNNSCFAESGQCSCRPHMIGRQCNEVEPGYYFATLDHYLYEAEEANLGPGVSIVERQYIQDRIPSWTGAGFVRVPEGAYLEFFIDNIPYSMEYDILIRYEPQLPDHWEKAVITVQRPGRIPTSSRCGNTIPDDDNQVVSLSPGSRYVVLPRPVCFEKGTNYTVRLELPQYTSSDSDVESPYTLIDSLVLMPYCKSLDIFTVGGSGDGVVTNSAWETFQRYRCLENSRSVVKTPMTDVCRNIIFSISALLHQTGLACECDPQGSLSSVCDPNGGQCQCRPNVVGRTCNRCAPGTFGFGPSGCKPCECHLQGSVNAFCNPVTGQCHCFQGVYARQCDRCLPGHWGFPSCQPCQCNGHADDCDPVTGECLNCQDYTMGHNCERCLAGYYGDPIIGSGDHCRPCPCPDGPDSGRQFARSCYQDPVTLQLACVCDPGYIGSRCDDCASGYFGNPSEVGGSCQPCQCHNNIDTTDPEACDKETGRCLKCLYHTEGEHCQFCRFGYYGDALQQDCRKCVCNYLGTVQEHCNGSDCQCDKATGQCLCLPNVIGQNCDRCAPNTWQLASGTGCDPCNCNAAHSFGPSCNEFTGQCQCMPGFGGRTCSECQELFWGDPDVECRACDCDPRGIETPQCDQSTGQCVCVEGVEGPRCDKCTRGYSGVFPDCTPCHQCFALWDVIIAELTNRTHRFLEKAKALKISGVIGPYRETVDSVERKVSEIKDILAQSPAAEPLKNIGNLFEEAEKLIKDVTEMMAQVEVKLSDTTSQSNSTAKELDSLQTEAESLDNTVKELAEQLEFIKNSDIRGALDSITKYFQMSLEAEERVNASTTEPNSTVEQSALMRDRVEDVMMERESQFKEKQEEQARLLDELAGKLQSLDLSAAAEMTCGTPPGASCSETECGGPNCRTDEGERKCGGPGCGGLVTVAHNAWQKAMDLDQDVLSALAEVEQLSKMVSEAKLRADEAKQSAEDILLKTNATKEKMDKSNEELRNLIKQIRNFLTQDSADLDSIEAVANEVLKMEMPSTPQQLQNLTEDIRERVESLSQVEVILQHSAADIARAEMLLEEAKRASKSATDVKVTADMVKEALEEAEKAQVAAEKAIKQADEDIQGTQNLLTSIESETAASEETLFNASQRISELERNVEELKRKAAQNSGEAEYIEKVVYTVKQSAEDVKKTLDGELDEKYKKVENLIAKKTEESADARRKAEMLQNEAKTLLAQANSKLQLLKDLERKYEDNQRYLEDKAQELARLEGEVRSLLKDISQKVAVYSTCL

SEQ ID NO: 127272 - protein, 91 aa, Artificial Sequence
  derived and/or modified sequence
MGLLQLLAFSFLALCRARVRAQEPEFSYGCAEGSCYPATGDLLIGRAQKLSVTSTCGLHKPEPYCIVSHLQEDKKCFICNSQDPYHETLNP

SEQ ID NO: 127273 - protein, 850 aa, Artificial Sequence
  derived and/or modified sequence
MGLLQLLAFSFLALCRARVRAQEPEFSYGCAEGSCYPATGDLLIGRAQKLSVTSTCGLHKPEPYCIVSHLQEDKKCFICNSQDPYHETLNPDSHLIENVVTTFAPNRLKIWWQSENGVENVTIQLDLEAEFHFTHLIMTFKTFRPAAMLIERSSDFGKTWGVYRYFAYDCEASFPGISTGPMKKVDDIICDSRYSDIEPSTEGEVIFRALDPAFKIEDPYSPRIQNLLKITNLRIKFVKLHTLGDNLLDSRMEIREKYYYAVYDMVVRGNCFCYGHASECAPVDGFNEEVEGMVHGHCMCRHNTKGLNCELCMDFYHDLPWRPAEGRNSNACKKCNCNEHSISCHFDMAVYLATGNVSGGVCDDCQHNTMGRNCEQCKPFYYQHPERDIRDPNFCERCTCDPAGSQNEGICDSYTDFSTGLIAGQCRCKLNVEGEHCDVCKEGFYDLSSEDPFGCKSCACNPLGTIPGGNPCDSETGHCYCKRLVTGQHCDQCLPEHWGLSNDLDGCRPCDCDLGGALNNSCFAESGQCSCRPHMIGRQCNEVEPGYYFATLDHYLYEAEEANLGPGVSIVERQYIQDRIPSWTGAGFVRVPEGAYLEFFIDNIPYSMEYDILIRYEPQLPDHWEKAVITVQRPGRIPTSSRCGNTIPDDDNQVVSLSPGSRYVVLPRPVCFEKGTNYTVRLELPQYTSSDSDVESPYTLIDSLVLMPYCKSLDIFTVGGSGDGVVTNSAWETFQRYRCLENSRSVVKTPMTDVCRNIIFSISALLHQTGLACECDPQGSLSSVCDPNGGQCQCRPNVVGRTCNRCAPGTFGFGPSGCKRRFLKSIVMHSFRLTQPLWQGSIAAEPMLPS

SEQ ID NO: 127274 - DNA, 5361 bp, Artificial Sequence
  derived and/or modified sequence
atgggcctgctgcagctgctggccttcagcttcctggccctgtgcagagccagagtgagagcccaggagcccgagttcagctacggctgcgccgagggcagctgctaccccgccaccggcgacctgctgatcggcagagcccagaagctgagcgtgaccagcacctgcggcctgcacaagcccgagccctactgcatcgtgagccacctgcaggaggacaagaagtgcttcatctgcaacagccaggacccctaccacgagaccctgaaccccgacagccacctgatcgagaacgtggtgaccaccttcgcccccaacagactgaagatctggtggcagagcgagaacggcgtggagaacgtgaccatccagctggacctggaggccgagttccacttcacccacctgatcatgaccttcaagaccttcagacccgccgccatgctgatcgagagaagcagcgacttcggcaagacctggggcgtgtacagatacttcgcctacgactgcgaggccagcttccccggcatcagcaccggccccatgaagaaggtggacgacatcatctgcgacagcagatacagcgacatcgagcccagcaccgagggcgaggtgatcttcagagccctggaccccgccttcaagatcgaggacccctacagccccagaatccagaacctgctgaagatcaccaacctgagaatcaagttcgtgaagctgcacaccctgggcgacaacctgctggacagcagaatggagatcagagagaagtactactacgccgtgtacgacatggtggtgagaggcaactgcttctgctacggccacgccagcgagtgcgcccccgtggacggcttcaacgaggaggtggagggcatggtgcacggccactgcatgtgcagacacaacaccaagggcctgaactgcgagctgtgcatggacttctaccacgacctgccctggagacccgccgagggcagaaacagcaacgcctgcaagaagtgcaactgcaacgagcacagcatcagctgccacttcgacatggccgtgtacctggccaccggcaacgtgagcggcggcgtgtgcgacgactgccagcacaacaccatgggcagaaactgcgagcagtgcaagcccttctactaccagcaccccgagagagacatcagagaccccaacttctgcgagagatgcacctgcgaccccgccggcagccagaacgagggcatctgcgacagctacaccgacttcagcaccggcctgatcgccggccagtgcagatgcaagctgaacgtggagggcgagcactgcgacgtgtgcaaggagggcttctacgacctgagcagcgaggaccccttcggctgcaagagctgcgcctgcaaccccctgggcaccatccccggcggcaacccctgcgacagcgagaccggccactgctactgcaagagactggtgaccggccagcactgcgaccagtgcctgcccgagcactggggcctgagcaacgacctggacggctgcagaccctgcgactgcgacctgggcggcgccctgaacaacagctgcttcgccgagagcggccagtgcagctgcagaccccacatgatcggcagacagtgcaacgaggtggagcccggctactacttcgccaccctggaccactacctgtacgaggccgaggaggccaacctgggccccggcgtgagcatcgtggagagacagtacatccaggacagaatccccagctggaccggcgccggcttcgtgagagtgcccgagggcgcctacctggagttcttcatcgacaacatcccctacagcatggagtacgacatcctgatcagatacgagccccagctgcccgaccactgggagaaggccgtgatcaccgtgcagagacccggcagaatccccaccagcagcagatgcggcaacaccatccccgacgacgacaaccaggtggtgagcctgagccccggcagcagatacgtggtgctgcccagacccgtgtgcttcgagaagggcaccaactacaccgtgagactggagctgccccagtacaccagcagcgacagcgacgtggagagcccctacaccctgatcgacagcctggtgctgatgccctactgcaagagcctggacatcttcaccgtgggcggcagcggcgacggcgtggtgaccaacagcgcctgggagaccttccagagatacagatgcctggagaacagcagaagcgtggtgaagacccccatgaccgacgtgtgcagaaacatcatcttcagcatcagcgccctgctgcaccagaccggcctggcctgcgagtgcgacccccagggcagcctgagcagcgtgtgcgaccccaacggcggccagtgccagtgcagacccaacgtggtgggcagaacctgcaacagatgcgcccccggcaccttcggcttcggccccagcggctgcaagccctgcgagtgccacctgcagggcagcgtgaacgccttctgcaaccccgtgaccggccagtgccactgcttccagggcgtgtacgccagacagtgcgacagatgcctgcccggccactggggcttccccagctgccagccctgccagtgcaacggccacgccgacgactgcgaccccgtgaccggcgagtgcctgaactgccaggactacaccatgggccacaactgcgagagatgcctggccggctactacggcgaccccatcatcggcagcggcgaccactgcagaccctgcccctgccccgacggccccgacagcggcagacagttcgccagaagctgctaccaggaccccgtgaccctgcagctggcctgcgtgtgcgaccccggctacatcggcagcagatgcgacgactgcgccagcggctacttcggcaaccccagcgaggtgggcggcagctgccagccctgccagtgccacaacaacatcgacaccaccgaccccgaggcctgcgacaaggagaccggcagatgcctgaagtgcctgtaccacaccgagggcgagcactgccagttctgcagattcggctactacggcgacgccctgcagcaggactgcagaaagtgcgtgtgcaactacctgggcaccgtgcaggagcactgcaacggcagcgactgccagtgcgacaaggccaccggccagtgcctgtgcctgcccaacgtgatcggccagaactgcgacagatgcgcccccaacacctggcagctggccagcggcaccggctgcgacccctgcaactgcaacgccgcccacagcttcggccccagctgcaacgagttcaccggccagtgccagtgcatgcccggcttcggcggcagaacctgcagcgagtgccaggagctgttctggggcgaccccgacgtggagtgcagagcctgcgactgcgaccccagaggcatcgagaccccccagtgcgaccagagcaccggccagtgcgtgtgcgtggagggcgtggagggccccagatgcgacaagtgcaccagaggctacagcggcgtgttccccgactgcaccccctgccaccagtgcttcgccctgtgggacgtgatcatcgccgagctgaccaacagaacccacagattcctggagaaggccaaggccctgaagatcagcggcgtgatcggcccctacagagagaccgtggacagcgtggagagaaaggtgagcgagatcaaggacatcctggcccagagccccgccgccgagcccctgaagaacatcggcaacctgttcgaggaggccgagaagctgatcaaggacgtgaccgagatgatggcccaggtggaggtgaagctgagcgacaccaccagccagagcaacagcaccgccaaggagctggacagcctgcagaccgaggccgagagcctggacaacaccgtgaaggagctggccgagcagctggagttcatcaagaacagcgacatcagaggcgccctggacagcatcaccaagtacttccagatgagcctggaggccgaggagagagtgaacgccagcaccaccgagcccaacagcaccgtggagcagagcgccctgatgagagacagagtggaggacgtgatgatggagagagagagccagttcaaggagaagcaggaggagcaggccagactgctggacgagctggccggcaagctgcagagcctggacctgagcgccgccgccgagatgacctgcggcaccccccccggcgccagctgcagcgagaccgagtgcggcggccccaactgcagaaccgacgagggcgagagaaagtgcggcggccccggctgcggcggcctggtgaccgtggcccacaacgcctggcagaaggccatggacctggaccaggacgtgctgagcgccctggccgaggtggagcagctgagcaagatggtgagcgaggccaagctgagagccgacgaggccaagcagagcgccgaggacatcctgctgaagaccaacgccaccaaggagaagatggacaagagcaacgaggagctgagaaacctgatcaagcagatcagaaacttcctgacccaggacagcgccgacctggacagcatcgaggccgtggccaacgaggtgctgaagatggagatgcccagcaccccccagcagctgcagaacctgaccgaggacatcagagagagagtggagagcctgagccaggtggaggtgatcctgcagcacagcgccgccgacatcgccagagccgagatgctgctggaggaggccaagagagccagcaagagcgccaccgacgtgaaggtgaccgccgacatggtgaaggaggccctggaggaggccgagaaggcccaggtggccgccgagaaggccatcaagcaggccgacgaggacatccagggcacccagaacctgctgaccagcatcgagagcgagaccgccgccagcgaggagaccctgttcaacgccagccagagaatcagcgagctggagagaaacgtggaggagctgaagagaaaggccgcccagaacagcggcgaggccgagtacatcgagaaggtggtgtacaccgtgaagcagagcgccgaggacgtgaagaagaccctggacggcgagctggacgagaagtacaagaaggtggagaacctgatcgccaagaagaccgaggagagcgccgacgccagaagaaaggccgagatgctgcagaacgaggccaagaccctgctggcccaggccaacagcaagctgcagctgctgaaggacctggagagaaagtacgaggacaaccagagatacctggaggacaaggcccaggagctggccagactggagggcgaggtgagaagcctgctgaaggacatcagccagaaggtggccgtgtacagcacctgcctgtag

SEQ ID NO: 127275 - DNA, 5361 bp, Artificial Sequence
  derived and/or modified sequence
atgggactgctccagctgctggcattctcctttcttgccctgtgtcgcgcgcgtgtgagagcccaggagccagagttttcatacgggtgcgcggaaggctcgtgttaccccgccacaggcgatctcctcataggtagggcacagaaactgtccgtcacctccacttgtggtctgcataagcctgagccatattgtatcgtgtcccacctacaggaagacaagaaatgctttatttgcaatagccaagacccttaccatgagaccctgaatccagattcacacctcattgagaatgttgtgaccacttttgcccccaatagactcaaaatttggtggcagagtgaaaacggggtggagaatgttaccattcaactggaccttgaggccgagttccatttcacccaccttatcatgacatttaaaacctttaggccagcagcaatgttgattgagcggagcagcgacttcggtaaaacctggggcgtatataggtactttgcttacgattgcgaggcctccttcccaggtatttccaccggcccgatgaagaaagtagatgacatcatatgcgattctcgatatagtgatatcgaaccgtctactgagggggaggtgatctttagagcgctggacccagcctttaaaatcgaagatccctacagtccccgcatccagaatctactgaagataaccaacctcagaataaaattcgtcaagctgcacacacttggcgacaacctgttggactccaggatggaaattagagaaaagtattactacgccgtgtatgatatggtggtccggggaaactgcttttgttatgggcatgcaagtgaatgcgctcctgtggatgggttcaacgaggaggtggagggcatggtccatggccactgtatgtgccgtcataacacaaagggcctaaactgcgaattgtgtatggacttttatcatgacctgccatggaggcctgccgagggacggaatagcaatgcttgcaagaaatgcaattgcaacgaacatagcatctcctgtcactttgatatggcagtttatctcgccaccgggaacgtttcaggcggagtatgcgatgactgccaacataataccatgggtcgcaattgtgaacagtgcaagcccttctactaccagcatccagaacgggatataagggatcctaatttctgcgagaggtgtacctgtgaccctgctggttcccagaacgagggaatttgtgactcctacacagatttttccactggcctgattgccggacaatgcagatgcaagctgaacgtcgagggggaacattgtgacgtctgcaaagaagggttttacgatttatcttccgaggatccttttggctgcaaatcatgcgcatgtaacccattgggcacgattcccggcggcaacccatgtgactccgagacaggtcattgctactgtaagaggctggtcactggccagcattgcgaccaatgtctccccgagcactggggcctgagtaacgacttggatggctgccggccttgtgattgcgacttgggcggcgcgctgaataatagctgttttgcagaatctggacagtgttcgtgccggcctcacatgatcggaagacaatgtaacgaagttgaaccgggttattacttcgccaccctggatcactatctttatgaggctgaagaagccaatctgggacccggagtcagcatcgtggagcgtcagtacattcaggatagaatcccgtcctggaccggagcaggatttgtgcgggttccagagggagcctacctggaattcttcattgataatattccttattcgatggagtatgatatactaataaggtacgagccccagcttccagaccattgggagaaggcagtgatcactgtccagaggcctggtcggatcccaacaagctcgcgatgcggcaacactatccccgacgacgataatcaagttgtcagtttgtcaccaggctcgcgatacgtggtgttgccccgacctgtgtgctttgagaaggggacaaactacacagtgaggctggagcttcctcagtacacatcaagcgacagcgacgtagaaagcccctatacactgatagactccctcgttctgatgccttattgcaagagcctggatatctttaccgtggggggcagcggggacggcgtggtgaccaattcggcttgggagacctttcagagatatcggtgtttggagaactcacgcagtgtggtgaagactcccatgaccgacgtgtgcaggaatattatcttctctattagcgcgctcctccaccagaccggacttgcctgtgaatgtgatccccagggtagtctgtcatccgtgtgtgaccctaatggcggacagtgccagtgtagaccaaatgttgttggaaggacttgcaatcgatgcgctcctgggacatttggcttcgggccatccggctgcaaaccttgtgaatgccatttacagggcagcgttaacgccttctgcaatcccgttacggggcagtgtcattgctttcagggagtatacgccaggcaatgtgacaggtgtctgcccggtcactggggcttcccctcttgtcagccatgtcaatgtaacggccatgcagatgattgcgatcctgtgactggagagtgccttaactgccaggattataccatgggacacaattgtgagagatgcctggcaggctattatggagacccaatcatcggtagtggagatcattgtcgcccatgcccatgccccgatggaccagattctgggcgccagtttgcccgcagctgttatcaggaccctgtcacactgcaattggcatgcgtctgtgaccctggttatatcggctccaggtgcgacgactgcgcctcaggctatttcgggaacccctcagaagtcggcggctcctgtcagccatgtcaatgccataacaacattgataccacagaccctgaggcctgtgataaagaaaccggccgctgtcttaaatgcttgtaccacacagaaggagagcattgccaattctgccgctttggatactatggagacgccctccagcaagactgtcggaaatgtgtctgcaattacctgggaacagtacaggagcactgcaacgggtcagactgccaatgcgacaaagccactgggcagtgtctctgtttacccaacgtgatcggacagaactgtgacaggtgcgcccctaatacctggcagctggcttcagggacggggtgtgatccgtgcaactgcaacgcagcacactcctttgggccatcttgcaatgagtttacaggacaatgtcaatgcatgcctggattcggcggccggacttgctctgaatgccaggagctgttttggggagacccggacgtagagtgccgtgcctgcgattgcgatcccaggggcatcgagacaccgcaatgtgatcagtcaaccgggcaatgtgtgtgtgtggagggcgttgagggccctagatgcgataagtgtacccgggggtactcaggggtgtttcccgattgtacaccatgtcaccagtgctttgcactctgggatgtcatcatcgccgagcttaccaatagaacacaccggttcttagagaaggccaaggccctgaagatttcaggagtgataggcccctatcgagagaccgtggactccgttgagagaaaagttagcgaaattaaggacatcctcgcacagtcacccgccgcagagccccttaagaacatcggaaatctgttcgaagaggcggagaaactaatcaaagacgttaccgagatgatggcccaggtggaggtcaaactgagcgataccaccagccagtccaattctaccgctaaagagctcgattcactccagactgaggctgaaagtttggacaatacagtgaaagaactggctgaacaactggaatttattaagaacagtgatattaggggggcccttgatagcataaccaaatatttccagatgagtctcgaggctgaggagagagtcaatgctagcaccacggaaccaaactcgacagtcgaacaatctgctctgatgcgtgatagggttgaggacgtgatgatggagcgcgaaagccagtttaaagaaaagcaggaggaacaggcgcggctcctcgacgagctcgccggcaagctgcagagcctcgatctttcagcagcggccgagatgacctgcgggaccccacctggggcatcttgcagcgaaaccgaatgtggcggacccaactgtagaaccgatgagggcgagagaaagtgtgggggaccaggatgtggagggctggtcacagtggcacacaatgcctggcaaaaggccatggacctggaccaagatgtgttgtcggcattggctgaggtcgagcagctgtccaaaatggtttccgaggcgaaactgcgggccgatgaggcaaagcagtccgcggaggatattctcctgaagaccaacgctacaaaagagaagatggacaaaagtaatgaggagctgagaaacctgattaagcagattaggaactttctcactcaggactctgcagacctcgatagcattgaggcggtcgcgaatgaagtcttgaaaatggagatgccctcaactccgcagcagctgcagaatctgaccgaggacattcgcgagcgtgtcgagtcactgtcgcaggttgaagtgattctccagcacagtgccgctgacatcgctagagccgagatgttattggaggaagccaagcgggcctctaagtccgccacagatgtaaaggtgaccgcagacatggtgaaagaagcactggaggaagctgagaaagcacaggtggcagctgagaaagctatcaagcaggctgacgaagacattcaggggacacaaaatctcctgactagcattgagtcggagacagccgcgtcggaagagacattgtttaatgcttcgcagagaatttcagagctagagaggaacgtggaggaattgaagagaaaggctgcgcaaaattctggagaggccgaatatatagaaaaggtagtctatacagttaagcaaagcgctgaggatgtgaaaaagacactggatggtgagctggacgaaaagtataagaaggtggaaaatctgatcgcaaagaaaaccgaggagtctgccgacgcccggaggaaagccgagatgctgcagaatgaagcaaagaccctcttggctcaggcgaactcgaagttgcaattacttaaggacctcgagcgaaagtacgaggacaatcagcgctacctggaggacaaggcccaggaactggctcgactggaaggagaggtgcggtccctgctcaaagacatctcccagaaggtggcggtgtactctacttgcctctag

SEQ ID NO: 127276 - DNA, 5361 bp, Artificial Sequence
  derived and/or modified sequence
atgggcctgctgcagctgctggccttctccttcctggccctgtgccgggcccgggtgcgggcccaggagcctgagttctcctatggctgtgccgagggcagctgctacccagccactggagacctgctgattggccgggcccagaagctgtctgtgaccagcacctgtggcctgcacaagccagagccctactgcatcgtgagccacctgcaggaggacaagaagtgcttcatctgcaacagccaggacccctaccacgagaccctgaacccagacagccacctgattgaaaatgtggtgaccacctttgcccccaaccggctgaagatctggtggcagagtgaaaatggagtggagaatgtgaccatccagctggacctggaggccgagttccacttcacccacctgatcatgaccttcaagaccttccggcctgctgccatgctgattgaaagaagcagtgactttgggaagacctggggcgtgtaccgctactttgcctatgactgtgaggccagcttccctggcatcagcacaggccccatgaagaaggtggatgacatcatctgtgacagccgctacagcgacatcgagcccagcacagaaggagaggtgatcttccgggccctggaccctgccttcaagattgaggacccctacagcccccgcatccagaacctgctgaagatcaccaacctgcgcatcaagtttgtgaagctgcacaccctgggggacaacctgctggacagcaggatggagatccgggagaagtactactatgctgtgtatgacatggtggtgcggggcaactgcttctgctacggccacgcctctgaatgtgcccctgtggatggcttcaatgaggaggtggagggcatggtgcacggccactgcatgtgccgccacaacaccaagggcctgaactgtgagctgtgcatggacttctaccatgacctgccctggaggcctgctgagggcaggaacagcaatgcctgcaagaagtgcaactgcaatgagcacagcatcagctgccactttgacatggctgtgtacctggccactggaaatgtgtctgggggcgtgtgtgatgactgccagcacaacaccatgggcaggaactgtgagcagtgcaagcccttctactaccagcaccctgagcgggacatccgggaccccaacttctgtgagcgctgcacctgtgaccctgctggcagccagaatgaaggcatctgtgacagctacacagacttcagcacaggcctgattgctggccagtgccgctgcaagctgaatgtggagggggagcactgtgatgtgtgcaaggagggcttctatgacctgagcagcgaggaccccttcggctgcaagagctgtgcctgcaaccccctgggcaccatccctgggggcaacccctgtgacagcgagaccggccactgctactgcaagaggctggtgacaggccagcactgtgaccagtgcctgcctgagcactggggcctgagcaatgacctggatggctgccggccctgtgactgtgacctgggcggggccctgaacaacagctgctttgctgagagcggccagtgcagctgccggccccacatgattggccggcagtgcaatgaggtggagcccggctactactttgccaccctggaccactacctgtatgaagctgaggaggccaacctgggccctggggtgtccatcgtggagcggcagtacatccaggaccgcatccccagctggacaggagctggctttgtgcgggtgcctgagggcgcctacctggagttcttcatcgacaacatcccctacagcatggagtatgacatcctgatccgctatgagccccagctgcctgaccactgggagaaggctgtgatcaccgtgcagaggcctggccgcatccccaccagcagccgctgtggcaacaccatcccagatgatgacaaccaggtggtgtccctgagccctggcagccgctacgtggtgctgcccaggcctgtgtgctttgagaagggcaccaactacacagtgcggctggagctgccccagtacaccagcagtgacagtgatgtggagagcccctacaccctgattgacagcctggtgctgatgccctactgcaagagcctggacatcttcaccgtgggcggcagcggagatggagtggtgaccaacagcgcctgggagaccttccagcgctaccgctgcctggagaacagccgctctgtggtgaagacccccatgacagatgtgtgcaggaacatcatcttcagcatcagcgccctgctgcaccagacaggcctggcctgtgaatgtgacccccagggcagcctgagctctgtgtgtgaccccaacggcggccagtgccagtgccggcccaacgtggtgggccgcacctgcaacagatgtgcccctggcacctttggatttggccccagcggctgcaagccctgtgagtgccacctgcagggctctgtgaatgccttctgcaaccctgtgacaggccagtgccactgcttccagggcgtgtatgcccggcagtgtgaccgctgcctgcccggccactggggcttccccagctgccagccctgccagtgcaatggacatgctgatgactgtgaccctgtgactggagagtgcctgaactgccaggactacaccatgggccacaactgtgagcgctgcctggccggctactatggagaccccatcatcggcagcggggaccactgccggccctgcccctgcccagatggcccagattctggccggcagtttgcccggagctgctaccaggaccctgtgaccctgcagctggcctgtgtgtgtgaccccggctacatcggcagccgctgtgatgactgtgccagcggctactttggaaaccccagcgaggtgggcggcagctgccagccctgccagtgccacaacaacatcgacaccacagatcctgaggcctgtgacaaggagaccggccgctgcctgaagtgcctgtaccacacagaaggagagcactgccagttctgccgcttcggctactatggagatgccctgcagcaggactgcaggaaatgtgtgtgcaactacctgggcaccgtgcaggagcactgcaatggaagtgactgccagtgtgacaaggccaccggccagtgcctgtgcctgcccaacgtgattggccagaactgtgacagatgtgcccccaacacctggcagctggccagcggcaccggctgtgacccctgcaactgcaatgctgcccacagctttggccccagctgcaatgagttcaccggccagtgccagtgcatgcctggctttggaggccgcacctgcagcgagtgccaggagctgttctggggagaccctgatgtggagtgccgggcctgtgactgtgacccccggggcatcgagaccccccagtgtgaccagagcacaggccagtgtgtgtgtgtggagggcgtggagggcccccgctgtgacaagtgcacccggggctacagcggggtcttcccagactgcaccccctgccaccagtgctttgccctgtgggatgtgatcatcgccgagctgaccaacagaacccaccgcttcctggagaaggccaaggccctgaagatcagcggcgtgattggcccctaccgggagaccgtggacagcgtggagaggaaggtgtctgagatcaaggacatcctggcccagagccctgctgctgagcccctgaagaacatcggcaacctgtttgaggaggccgagaagctgatcaaggatgtgacagagatgatggcccaggtggaggtgaagctgagtgacaccaccagccagagcaacagcacagccaaggagctggacagcctgcagacagaggccgagagcctggacaacacagtgaaggagctggccgagcagctggagttcatcaagaacagcgacatccggggggccctggacagcatcaccaagtacttccagatgagcctggaggccgaggagcgggtgaatgccagcaccacagagcccaacagcacagtggagcagagcgccctgatgagggacagagtggaggatgtgatgatggagcgggagagccagttcaaggagaagcaggaggagcaggcccggctgctggatgagctggccggcaagctgcagagcctggacctgtctgctgctgctgagatgacctgtggcaccccacctggggccagctgcagcgagacagaatgtggcggccccaactgcaggacagatgaaggagagaggaaatgtggcggccctggctgcggcggcctggtgacagtggcccacaatgcctggcagaaggccatggacctggaccaggatgtgctgagcgccctggccgaggtggagcagctgagcaagatggtgtctgaggccaagctgcgggcagatgaggccaagcagagcgctgaggacatcctgctgaagaccaatgccaccaaggagaagatggacaagagcaatgaggagctgaggaacctgatcaagcagatccggaacttcctgacccaggacagcgctgacctggacagcattgaagctgtggccaatgaggtgctgaagatggagatgcccagcaccccccagcagctgcagaacctgacagaggacatccgggagcgggtggagagcctgagccaggtggaggtgatcctgcagcacagcgctgctgacatcgcccgggcagagatgctgctggaggaggccaagagggccagcaagagcgccacagatgtgaaggtgacagctgacatggtgaaggaggccctggaggaggccgagaaggcccaggtggccgctgagaaggccatcaagcaggctgatgaggacatccagggcacccagaacctgctgaccagcattgagagcgagacagctgccagcgaggagaccctcttcaatgccagccagaggatcagcgagctggagagaaatgtggaggagctgaagaggaaggccgcccagaacagcggggaggccgagtacatcgagaaggtggtgtacacagtgaagcagagcgcagaagatgtgaagaagaccctggatggagagctggatgagaagtacaagaaggtggagaacctgattgccaagaagacagaggagagcgcagatgcccggaggaaggccgagatgctgcagaatgaggccaagaccctgctggcccaggccaacagcaagctgcagctgctgaaggacctggagaggaaatatgaggacaaccagcgctacctggaggacaaggcccaggagctggcccggctggagggggaggtgcgcagcctgctgaaggacatcagccagaaggtggccgtgtacagcacctgcctgtag

SEQ ID NO: 127277 - DNA, 5361 bp, Artificial Sequence
  derived and/or modified sequence
atgggcctgctgcagctgctggccttcagcttcctggccctgtgccgagcccgcgtgagggctcaagagcccgaattctcttacggttgtgcggagggttcttgttacccagccaccggcgacctgcttatcggcagagcacagaagcttagtgtcacgagtacctgcggactccataagcctgaaccgtactgtatcgtgagtcacctgcaggaagataaaaaatgctttatttgcaattctcaggatccttatcatgaaacccttaaccccgacagccacttgattgagaatgtggtgacaacttttgcgcccaaccggttaaaaatatggtggcagtcggaaaacggggttgaaaatgttactatacagctcgacctggaggccgagttccattttacccaccttataatgacatttaaaacgtttcggcctgctgctatgctgattgagcggagctctgattttgggaagacttggggcgtctaccgatactttgcctacgactgtgaggcctccttcccagggatttccaccggcccgatgaaaaaggtagacgatattatatgtgacagcagatactctgatatcgaacctagcacagagggtgaagtgatatttcgggctttagatcccgctttcaagattgaggacccatacagcccacggattcaaaacctgctgaagataacaaatctgagaattaaattcgtaaagcttcacaccctcggcgacaacctcttggacagccggatggagatccgcgagaaatactattatgcagtttacgacatggtggtgcggggcaactgtttctgctatggtcatgcttcggagtgcgcccctgtcgatggattcaacgaggaagtcgaaggaatggtccacggccactgtatgtgcaggcacaatactaaagggttgaattgtgagctctgcatggacttctatcatgacctcccttggaggcctgcggagggtcgcaatagtaatgcctgtaagaagtgcaattgcaatgagcattccatctcctgccattttgacatggcagtgtaccttgccactgggaatgtgtcaggcggtgtgtgcgatgattgccagcacaacaccatgggacgcaactgtgaacagtgtaaacccttctattatcagcatccagaacgagacatcagggatccaaatttttgtgagcgctgtacttgcgacccagcaggtagtcagaatgagggaatctgtgattcctatactgattttagcacaggcctgatagccgggcagtgcagatgtaagttaaacgtggagggagaacactgtgacgtctgtaaagagggtttctacgacctctcatctgaggacccctttgggtgtaagtcttgtgcctgcaatccattaggaaccatccctggaggcaatccctgtgactcggaaacaggtcattgttattgcaagagactggtgacgggccaacactgcgaccaatgcctaccggagcactggggtctgtccaacgatctggatggctgtcggccttgcgactgcgacttagggggggccctgaacaattcgtgtttcgcagaaagtgggcagtgctcctgtagaccgcacatgattggacgacaatgcaacgaagtcgagcccggatactactttgccacactggatcattatctgtatgaggctgaggaggcaaatctgggacctggagtctcaatcgtggaacgccagtacatccaggaccgcattccttcatggaccggagctggatttgttagagttcccgagggagcttacttggagtttttcatagacaatatcccttacagcatggaatacgatattcttattcggtacgaaccacagcttcctgatcactgggaaaaagccgtgatcactgtgcagagaccgggcagaattccaacgagcagccgctgcggcaatacaattccagatgacgacaaccaggttgtgagcctaagtccgggctcacgttacgtggttctgccccgtcccgtgtgcttcgagaaggggactaattacacagtgcgcttggagcttcctcagtatacctctagcgacagcgacgtcgaaagcccatacacgctcatcgattccctcgtcttaatgccgtactgcaagtctctcgatatctttactgtgggcgggagcggtgacggggtcgttacaaatagtgcctgggaaaccttccagagataccggtgcctcgaaaatagccggagcgtagtgaaaacgcccatgactgatgtatgcaggaacatcatattttctatctcagcactcctccatcaaaccggtctggcctgcgaatgtgacccgcagggcagcctctcttcagtttgcgaccctaacggaggccagtgtcaatgtcgcccaaacgttgtagggagaacctgtaatcgttgcgcaccaggtaccttcggtttcgggccatcaggctgtaagccatgcgaatgccacttacagggaagcgtcaacgccttttgtaatccggtgaccggccagtgccattgctttcagggtgtctacgcccgacagtgtgaccggtgcctgccgggccattggggttttccatcatgtcaaccatgccaatgcaatggccatgccgacgactgtgaccccgtgactggagagtgccttaattgccaggactacactatgggccacaactgtgagcggtgtctagcagggtactacggggatcccattatcggatccggtgatcactgccggccttgtccatgccctgacggtccagactctggaagacagttcgcccggtcgtgttaccaagatccagtgaccctgcagctcgcttgcgtttgcgatccgggctatattggcagccgctgtgacgactgcgcctctggttattttggtaaccccagcgaggtgggcggatcttgccaaccttgccaatgccacaacaatatagacaccacagatccggaggcttgtgataaagagaccggaaggtgtttaaagtgtttgtaccatactgagggcgagcattgccagttctgtcggtttggatattacggtgatgctctacagcaggactgtcggaagtgcgtgtgtaattacctcgggacagtacaagagcactgcaatggctctgactgccagtgcgataaagctactggacagtgcctctgcctgcccaatgtgattggccagaattgcgacagatgcgcaccaaacacctggcagctcgcctctggcaccggctgtgatccttgcaattgcaatgccgcacactccttcggcccgagctgtaacgaattcaccggtcagtgccaatgtatgcctggctttggcggacggacatgcagcgaatgtcaggagctgttttggggcgaccccgacgtagaatgtcgggcctgtgattgcgacccaaggggcatcgaaaccccccagtgtgaccaatcaaccggacagtgtgtgtgcgtggagggggtcgaaggtccacggtgcgataagtgcacacggggctattctggggtgtttcccgattgtactccctgccaccagtgcttcgctctctgggacgtcatcattgctgagctgactaacaggacccacaggtttctggagaaggcgaaggccctgaaaatttctggggtcatcggtccgtatagggagaccgtagactccgttgaacgaaaagtgtccgaaattaaggacatactagctcagtcaccagccgcggaacctttgaaaaatatcggcaatcttttcgaggaagccgagaagctgattaaagatgtcactgagatgatggcccaggtggaagtgaaactgtctgataccacgtcccagtctaacagtacagccaaggagctcgattctctgcaaactgaggctgagagtttggacaacacggtcaaagaactagccgagcagctggaatttatcaagaactctgatattagaggagccttggatagcattaccaaatactttcaaatgtccttggaagctgaagaaagagtgaatgccagcaccacagagcctaactctacagtggagcaatcagccctgatgcgggaccgagttgaggacgttatgatggaaagggagagtcagtttaaggaaaagcaggaggagcaggctcgcctccttgatgagctggcaggaaagctacagagtcttgacctgagcgcagctgctgagatgacttgcggaacaccaccaggcgcgtcatgttcagaaaccgaatgtggaggccccaactgtcggactgacgagggagagagaaagtgtgggggccccgggtgcggcggactggtgacagtggctcacaacgcttggcaaaaggctatggacctggatcaggacgtgctatctgccctcgcagaagttgagcagttgtccaagatggtgagcgaggcaaaattaagagctgatgaagccaaacagtctgccgaggacatcttgcttaagacaaatgccacaaaagaaaaaatggacaagtctaatgaagaactaaggaacctgatcaagcagatccggaacttcctgactcaagactcggcagaccttgacagtatagaagcggtagccaatgaggtgttgaaaatggagatgccatctactccccagcagctgcagaatctgactgaagatatcagggagcgcgtcgagtcactttcacaagttgaagtcatactgcagcattctgccgccgatatcgcgagagccgagatgctgcttgaagaagccaagagggccagcaaaagcgccaccgatgtgaaagtgactgcagacatggtgaaagaggccctggaggaagccgagaaggctcaagtcgccgcagaaaaggcaatcaagcaagcggacgaggacatacagggaacacaaaatctgcttacttccattgaatctgaaaccgccgcctccgaagagaccctgttcaacgcaagccagcgcatatctgagcttgagcgcaatgtagaagagctgaagcgcaaggcagcccaaaatagcggcgaagcagagtacattgaaaaagttgtgtacactgtgaaacagtcagccgaggacgtcaagaaaactctcgacggggagctggatgaaaaatacaagaaggtggaaaacctgatcgccaagaagacagaggagagcgcggatgcccgacgcaaggctgagatgctgcagaatgaagccaaaactctgctggcgcaggcgaattcgaaactccaactcttaaaggatctggagagaaagtatgaggacaatcaacggtatctcgaagacaaggcccaagaactcgctcgactggagggtgaggtgcggagcctcctcaaagatatctcacaaaaggtggccgtttactccacatgtctgtag

SEQ ID NO: 127278 - DNA, 5360 bp, Artificial Sequence
  derived and/or modified sequence
atggggctcctgcagctgttagctttcagttttttagccctctgcagggcaagagtcagagcccaggagccggagttctcttacggctgcgctgagggctcctgttaccctgccaccggagacctgctgatcggaagggcacagaaactgtcagtgaccagtacctgtggacttcacaagcctgaaccttactgtattgtgtcccacttgcaggaggataagaagtgcttcatttgcaactctcaagatccttatcacgaaaccctcaacccagattcacaccttatcgaaaacgtggttacaacatttgccccaaataggctcaagatttggtggcagtcagaaaatggcgttgagaacgtgaccatccagctggacctggaggctgaattccattttacacatctaatcatgacctttaagacttttagaccagcagcgatgcttattgagcgcagttcagactttggaaagacctggggcgtgtaccggtacttcgcctacgactgcgaggcctccttcccgggaatctctactgggccaatgaaaaaagtcgacgatattatatgtgattcccgctattcggacatcgaacccagcaccgagggggaggttatatttcgggcactggatccggctttcaagattgaggacccttactctccacgcatccaaaacttgctaaaaattacgaatctacgcatcaaatttgtcaagctgcacaccttgggagataacctccttgactcacggatggagataagggaaaagtactactacgccgtgtatgatatggtagtccggggaaactgtttttgctatggacatgcatctgaatgtgcaccagtggacgggtttaacgaagaggttgaagggatggtacatggacactgtatgtgtcgccataatactaaagggctgaactgtgaactctgcatggatttttaccatgacctgccatggagacccgcagagggaagaaacagtaacgcttgcaagaagtgtaattgtaacgaacacagcatctcttgtcatttcgatatggccgtgtacttagccactggtaacgtgtccggcggagtgtgcgatgactgtcaacacaacacaatggggcgaaactgtgaacagtgcaagccgttctactatcagcacccagaacgggacattagagaccccaatttttgcgaaagatgtacatgtgaccccgctggctcacagaacgagggcatatgtgattcatacaccgattttagtaccggtcttatcgctggccagtgccgctgcaagttgaatgttgagggggagcattgcgacgtgtgtaaggagggattttatgatcttagctcagaggacccatttggatgcaagagctgcgcctgtaacccactgggaacaattcccggtggcaatccctgtgactccgagacaggtcattgctactgtaagcggttggtgaccggtcagcactgtgaccaatgcctgcctgagcattggggtctcagcaacgacctcgatgggtgtagaccctgtgattgtgatctgggaggtgccttgaataactcatgttttgccgagtctggtcagtgcagctgtcggccacacatgataggacgtcagtgtaatgaggtggagcccggatactactttgcaacactggaccattatctgtacgaggctgaggaagctaacttgggtccaggggtttctatcgtggagagacagtatatccaagataggatacccagctggacgggcgcaggctttgtgagagtgcctgagggtgcttacttggagttctttatcgataatattccctactctatggaatatgacatactcatcaggtacgaaccccagctgcccgaccactgggaaaaagccgtgattacagtgcagcggccagggagaatcccgacctcttcccgatgtgggaacactatccccgatgatgataaccaggtcgtatctttgagtcctggaagccgatatgttgtccttccccgaccagtctgcttcgagaaaggcacaaattacacggttcgcctagagctgccgcagtatacttcatccgactcggacgttgagagcccgtacactctcatcgatagccttgtgctgatgccttactgcaagtccctggacatttttaccgtcggaggctctggagatggcgtcgtcacaaattcagcttgggagacattccaaaggtatcggtgcttggagaatagtaggagcgtggtgaaaacccctatgacggatgtgtgtcgcaatataatcttcagcatctccgccctgctccaccagaccggattagcgtgcgagtgcgacccccaaggatcactgtccagcgtttgtgaccccaacggaggccagtgtcaatgccgccctaacgtcgtcgggcgtacttgtaaccgttgtgccccaggcaccttcgggtttggtccaagcgggtgtaagccctgtgagtgccaccttcagggctctgtaaacgccttttgtaaccctgtgacaggccagtgccactgttttcagggggtctacgccagacagtgcgaccgttgcctgcctggacattggggcttcccctcgtgtcagccctgccagtgcaatggtcatgccgatgactgtgacccagttacaggagaatgcctgaactgccaggattacacgatgggccacaattgcgaacgctgccttgcagggtactacggagatccaatcatcggatctggagaccactgcagaccctgtccatgtcccgacggacctgatagcgggagacagttcgcacgaagctgctatcaggatcccgtgacactgcagctcgcctgtgtctgcgatcctggctacattggctcaagatgcgacgactgcgcctccggctacttcgggaatccgtctgaggtgggtggctcgtgtcagccatgccaatgccacaataacatcgatactactgatccagaagcctgtgataaagagaccggacggtgcctgaaatgtctataccataccgagggagaacactgtcagttttgtaggtttggctactatggggatgccctgcagcaagactgccgtaagtgcgtgtgtaattacctgggcactgtgcaggaacactgcaacggtagtgattgccaatgtgataaggccaccggacagtgcctttgtcttccaaacgttataggtcagaactgcgatcgatgcgcgcctaacacatggcaactggcctctgggacaggatgcgatccgtgtaattgtaacgctgctcatagctttggccctagttgcaacgaattcacaggacagtgtcagtgcatgccaggctttggcggaagaacatgtagcgaatgccaagagttattctggggagaccctgatgtggaatgccgagcgtgcgattgcgatccgaggggaattgagacccctcaatgcgatcagtcaaccggccagtgtgtgtgcgtggagggggtggagggacctaggtgtgacaagtgcaccagaggctacagcggggtgttcccagactgcacgccatgccatcagtgcttcgctttatgggatgtgatcatagcagaacttacaaatcgaacccatcgattcttggaaaaggctaaagccctgaaaatcagcggagtgatcggcccatatagggagaccgtggacagcgtcgaacgtaaagtctctgagattaaagatatcctggctcagtcaccagccgctgagcctctcaagaatatcggcaatcttttcgaagaggccgaaaaactgatcaaagatgtcacagaaatgatggcccaagttgaagtcaagctttccgacacaacgtctcagagtaatagcacagctaaggagttggattccctgcagacggaagcagagtctctggacaacaccgtgaaagaacttgctgaacagcttgaattcattaagaattctgacataaggggcgctctggatagcatcacaaaatacttccagatgtctctggaagccgaagagcgtgtcaacgcatccaccactgaacctaattccacagtagagcagtcagctctgatgagagaccgagtcgaggacgttatgatggagcgggagtcacaattcaaggaaaagcaagaagagcaggcgcgactgcttgatgagctggcgggaaaactgcagagcctggatctctccgccgcagccgagatgacttgtggcactccaccaggagcttcctgcagcgaaacggagtgcggaggccctaactgtcgtaccgacgaaggagagcgtaaatgtggcggtcctggctgcgggggactcgtgaccgtggctcacaatgcctggcagaaagcaatggacctcgaccaggatgtactctccgcgctggccgaggtcgaacaactttccaagatggtgtccgaagccaaactgcgggctgacgaagcaaagcagagtgctgaggacatactcctgaagacgaacgcgaccaaggagaaaatggacaagagcaatgaggagttgcggaacctcatcaagcagattcggaatttcctcactcaggactcagcagatctggatagcattgaggccgtggcaaacgaggtgcttaagatggagatgccttccacccctcaacagctgcagaacctcacagaggacatccgggagcgtgtggaatctctgtcccaagtcgaagtcatcttgcagcatagtgccgcagacattgccagagccgaaatgctgcttgaggaggccaagagagcctccaaatccgcaacagacgtaaaggtcacagccgatatggtgaaggaggcattagaagaagcagaaaaagctcaggtggctgccgaaaaagcaattaaacaagcagacgaggacattcagggcacacagaacctgctgacttccattgagagtgagactgcagcctctgaagagacactcttcaatgcatcccagcgaattagtgagctggagcgcaatgtcgaagagctgaagagaaaggccgctcaaaactcgggggaagccgaatacatagagaaagtggtatacactgtgaagcaatccgccgaagatgtaaagaaaacactggacggcgaactagacgaaaaatacaaaaaagttgaaaatctgatcgctaagaagacggaggaatcagcggatgcacgacgaaaagccgagatgctgcagaacgaggccaagaccctcctagctcaggccaacagtaaacttcaattgttgaaagacctggagagaaaatatgaggataatcaaagatacctggaggacaaagcccaagagctggcgcgattggaaggggaggtgcgtagtctactgaaggacatatctcaaaaggtggctgtgtattctacttgtctgta

SEQ ID NO: 127279 - DNA, 5361 bp, Artificial Sequence
  derived and/or modified sequence
atgggcctcctacaactgctggctttttccttcctcgcgctctgtcgcgctcgggtccgcgcccaggagccagagttttcgtacgggtgtgcagaggggagttgctatcccgcgactggcgacctcctcatcgggcgagctcagaaactatctgtgacctctacctgcggcttacataagccagagccttactgtatcgtctcacacttacaggaagacaaaaagtgtttcatctgcaatagccaggatccttaccatgagaccctgaaccccgactcccacttgatagaaaacgtagtcacaaccttcgctccgaatagactcaaaatctggtggcaatcagaaaatggggtggagaacgtgaccatccagctcgaccttgaagcggagttccatttcacgcaccttattatgacgttcaagacattcagacctgcagctatgctgattgagaggtcgtcagactttggaaagacctggggcgtgtataggtacttcgcatacgactgtgaagccagctttccaggcatatctaccggtccgatgaaaaaagttgatgatattatatgcgactctagatacagcgacatcgaaccctccacagaaggtgaggttatcttccgcgctctggaccccgcctttaaaattgaagacccttactcaccgagaatccagaacctcctcaagataacaaatttgcggattaaattcgtcaagctccacactcttggcgacaatctgttggactcacgcatggagattcgggagaaatactactacgctgtgtacgatatggttgtgcgaggcaactgcttttgctatggtcacgcctccgaatgcgcacctgtggatggcttcaatgaagaggtcgaagggatggtccacggtcattgcatgtgtaggcacaatacaaagggtctgaattgtgagctatgtatggacttttatcatgatttaccctggaggcctgcagaaggacgtaactctaacgcctgtaaaaaatgtaattgcaatgaacacagcattagttgccacttcgacatggccgtatatctagcgaccggcaacgtgtctggcggcgtatgtgatgactgtcagcacaatacgatgggacgtaattgcgaacagtgtaagcctttctactatcagcaccccgagcgcgatattcgggaccccaacttctgcgagagatgtacttgtgatcctgcggggtcccagaatgagggcatctgcgacagttacaccgacttcagtaccgggttgatcgccgggcagtgccggtgcaaactaaacgtggagggagaacattgtgatgtgtgcaaggagggattctatgacctcagttccgaagacccattcggttgcaagtcatgtgcatgtaatcccctggggactatccctggaggcaacccatgcgatagtgagactggtcactgttactgtaaaagacttgtgactggccagcactgcgatcagtgtcttcccgaacattggggattatctaacgacctggacggatgcagaccctgcgattgcgacctgggtggggcgttgaacaacagctgcttcgctgaatcaggccaatgtagttgccgtcctcatatgatcggcagacagtgtaacgaagtggagccaggatattatttcgcaacattggatcattacctctatgaggcggaagaagcaaacctgggccccggcgtgtccatcgtggaacgccaatacattcaggaccgcatcccttcgtggaccggcgctggattcgttagggtgcctgagggcgcctatcttgaattctttatcgacaatataccttacagcatggagtatgatattctgatccggtacgaaccacaactccccgaccactgggaaaaggctgtcatcaccgtacagaggcctggtcgaatccctactagcagtagatgcggtaacacaatccccgacgatgacaaccaggtcgtgtctctctccccgggaagccgatacgtcgtcttaccaagacccgtgtgctttgaaaaggggacgaactacaccgtccggctggagctcccccagtatacctcctctgactcggacgtagaatcaccgtacacattaatagactcactggtgctcatgccatactgcaaaagcctggacatctttactgtcggtggatccggcgatggcgttgtcacaaacagcgcttgggagaccttccagcgataccgctgtcttgaaaacagccgatccgtggtgaaaacaccaatgacagatgtgtgccggaacattatcttttccatttcagctttactgcaccagaccgggctcgcttgtgaatgtgacccacagggatccctgtccagtgtctgcgaccccaatggcgggcagtgtcagtgccgcccaaacgtggtgggtcgcacctgtaataggtgtgctcctggaacctttggctttggaccaagtgggtgtaaaccttgcgaatgtcatctccaaggctctgtaaatgccttctgcaacccagtgaccgggcaatgccattgttttcagggcgtgtatgccagacagtgcgaccgctgtttaccggggcattggggtttcccctcctgtcaaccctgtcagtgcaatggccatgcagacgattgcgatcctgtgacaggggaatgccttaactgtcaggattacaccatgggccataactgcgagagatgtctggcagggtattatggagaccctataattgggtcaggagaccactgcagaccatgcccatgcccagacggcccagactcggggcggcaatttgcaaggagttgttaccaggatccagtgaccctacagcttgcctgtgtgtgcgaccctgggtacataggaagccggtgtgacgactgcgcaagcggatattttgggaacccatctgaagtcgggggatcttgccagccctgtcagtgccataataatatagacacaactgatccagaagcatgtgataaggagaccggaaggtgcctgaagtgtctctaccatacagagggtgaacattgccagttttgccggtttggttattatggtgatgctctacagcaagactgtaggaagtgtgtctgtaactacctcggtacagttcaggaacattgcaatggcagcgattgccagtgtgacaaggcgactgggcaatgtctgtgcttgccaaacgtcatcggccagaactgtgatcgctgtgcccctaacacctggcaattagcctctgggactggctgtgacccgtgcaactgtaatgccgcacacagcttcggccccagctgcaatgagttcacagggcagtgtcagtgcatgcccgggtttggtggacgtacatgtagtgagtgtcaagaactcttttggggggatccggacgtcgaatgccgagcttgtgattgcgacccacgggggatagaaacacctcagtgcgaccagtccactggtcagtgtgtgtgcgtcgagggcgtggagggtcctaggtgtgacaaatgcacccgggggtatagcggagtctttccagactgcaccccatgtcaccagtgttttgccctgtgggacgtgatcatcgccgaactgacaaacaggacgcacaggtttttagaaaaggccaaagccctgaaaatttcaggggtgatcggcccctatcgcgaaaccgtagattctgtggaacggaaggtgagtgagattaaagacatcctggcccaaagtcccgcagcagagccactgaagaacatcggcaacctgttcgaagaggccgaaaagctgatcaaggatgttacagagatgatggcacaggtggaagttaaattgtccgataccacttctcagtctaatagcacagcaaaggagcttgactctctgcagaccgaggcagagtcattagacaacaccgtaaaggagctggctgaacaactggagttcatcaaaaattccgacattcggggagccctggactccattacgaagtatttccagatgagtttggaagcagaagaaagagttaacgcctctacaaccgagccaaatagtacagttgagcaaagtgcactcatgagggacagggtggaggacgttatgatggaacgagaatcacaattcaaggaaaaacaagaggaacaggctcggctgctagacgagttggccggcaagctacagtccctagacctaagtgctgccgccgagatgacatgcgggacaccacccggagcctcctgttcggaaaccgaatgtggaggccctaattgccgtacggacgagggggaaaggaagtgtggcgggcctggatgtgggggactagttacagtggcccataacgcgtggcagaaagctatggacctagatcaggatgtgctgagtgccttggctgaagtcgaacagttgtctaagatggtgtctgaggcaaaactgcgagcagacgaagcgaaacaatctgccgaggatattctcctgaaaaccaacgctacaaaggagaagatggacaagagtaatgaggagctgaggaatctgattaaacaaatacgaaactttctgactcaagattcggctgatttagattccattgaagccgtggccaatgaagtgctgaagatggagatgccatccaccccccaacagctgcagaacttgacagaagatatacgggagagagtagaaagcctgagtcaggtggaagtaatcctccagcattccgccgctgacatcgcccgagccgagatgcttttagaagaagcgaagcgggcgtccaaatccgccacagatgtgaaggtgacagctgatatggtgaaggaggccctggaggaggcagagaaggctcaggtggcagcggagaaagcaattaaacaagctgacgaggatatccaaggcacacagaacctcctcacaagcatcgagtcagagaccgctgccagtgaagaaaccctgtttaacgcctctcagcgcatctccgaattggagcggaacgtggaggaactgaagaggaaggccgctcagaactccggcgaggcagagtatatcgagaaggtggtgtacactgttaagcagtctgcagaagatgtgaaaaaaactcttgacggcgagctggatgaaaagtacaaaaaggtggaaaacctgatcgccaagaagacggaagagagtgccgacgcccgcagaaaggctgaaatgcttcagaacgaagccaaaaccctactggcacaggcgaactccaaactccaacttttgaaggacctagagcgcaaatacgaagataaccaaagatacctagaggataaggcccaggaattagctcggctagagggtgaagtaagatcacttcttaaggacataagccaaaaagttgcagtgtactctacttgcttgtag

SEQ ID NO: 127280 - DNA, 5361 bp, Artificial Sequence
  derived and/or modified sequence
atgggcctgctgcagctactcgccttctcattcctcgccctatgcagagccagagtgcgagcacaggaacctgaattcagctacggttgtgccgaaggctcttgctatcccgctacaggcgacctgttgattggccgcgcccaaaaactttccgtgacatctacatgcggcttacacaagccagagccctactgcattgtaagtcatctacaagaagataagaaatgcttcatctgtaattcccaggatccataccacgagaccctaaacccagacagccacctaatcgagaacgtcgttaccaccttcgcaccaaacagactgaagatctggtggcagtccgagaatggggttgagaacgtaactatacaacttgatttggaggctgaatttcactttacacatttaatcatgacattcaaaacattcagacccgccgctatgctgatcgagcgcagctcagattttgggaaaacttggggcgtatacaggtacttcgcctatgactgcgaagctagtttccccggtatctcaactggccccatgaaaaaggtagacgatataatttgtgactccaggtatagtgatattgaaccctccacggagggagaagtgatattccgcgcactggatcctgcattcaaaatcgaagatccgtacagccctagaatacagaatctgctcaaaataacaaaccttcgaatcaagttcgtaaaattgcacactctgggtgacaatcttttagattctagaatggagatcagagagaagtattactacgccgtgtacgacatggttgtccgcgggaactgtttctgttacggtcatgcgtctgagtgtgctccggtggatgggttcaacgaggaggtagagggaatggtacacggccattgtatgtgtcgccacaacactaaaggcctcaactgtgagctctgtatggacttttaccacgatttgccttggcggcccgcagaaggacggaatagcaatgcctgcaaaaaatgcaattgcaatgagcatagtatctcttgtcacttcgatatggctgtgtatctcgctacggggaatgtatccggaggagtctgcgatgactgtcagcataatacaatgggacgtaattgtgagcaatgcaagcctttttactatcagcatccagagcgggatattagagatccaaatttctgtgaaagatgtacatgcgatccggccgggagccagaacgagggaatctgtgattcatacaccgacttcagcaccggtttgattgctggccaatgccgctgtaaactgaatgtggagggcgaacattgcgacgtttgtaaagaggggttctacgatctgtcctcagaagatccttttgggtgcaaatcatgtgcttgcaacccactgggaaccattcctggcggtaatccgtgcgactcagagactggccattgttattgcaaacgtcttgtcaccggacagcactgcgaccaatgtctgccggagcactgggggctgtctaacgaccttgacggatgtagaccgtgcgactgtgacttgggaggagcccttaacaactcttgctttgccgagagcggccagtgttcttgtcgacctcacatgattggccgacagtgcaacgaggttgaacctggttactatttcgcaacattagatcattacctgtacgaagccgaagaggccaacttagggcccggagtgtcaattgtagaacgccagtacatccaggaccgtatacccagttggacaggcgcgggcttcgtgcgtgttcctgagggagcatacctggaattcttcattgataatattccatactctatggagtacgatattcttatacgatacgagccccagcttcccgaccactgggagaaagctgtgattacagtacaacggccaggacgaattcccacctcctcacgctgcggcaataccatcccggacgatgataatcaagtggtcagccttagccccggatcccgctatgtggtgctaccccgccccgtgtgctttgagaagggaacaaactacaccgtcagattggaactcccccagtacacatcttctgacagcgacgtggaatccccctacacactgatcgactccctggtcctaatgccttactgtaaaagcctagatatatttactgtgggaggttcgggggacggcgtagtaacaaattctgcttgggaaaccttccagcgttatcggtgcctcgaaaacagcagaagtgtggttaagacgcccatgacagatgtgtgcaggaacattatcttctctatttccgctttgcttcaccagacagggctagcctgcgagtgcgatccacagggctctctgagtagtgtatgcgatcctaacggtggtcaatgccaatgccggcccaacgtagtgggcagaacctgtaatagatgtgcccctggaaccttcggctttgggccctccggctgtaagccctgtgagtgtcacctgcaaggctctgtgaacgcattctgcaatccagttactggacaatgtcactgttttcaaggagtatacgcgagacagtgcgatcgatgtttgccagggcattggggcttcccatcatgccagccctgccagtgtaatggccatgcggacgactgcgaccccgtcactggggaatgtttgaactgccaggattatactatgggacataactgtgaacgctgcctggcgggctattacggcgaccctataatcggatctggtgaccattgtcgcccttgcccctgtccagacggccctgattccggcagacagtttgctcgttcgtgttaccaggacccggtcacactccagctggcatgtgtatgcgatccagggtatatcggttctagatgtgatgattgtgctagcggatacttcgggaacccatctgaagttggaggttcctgccagccctgccagtgccacaataacatcgacacgaccgacccagaagcttgtgataaggagaccgggagatgtctcaagtgcctgtatcacacagaaggagaacactgccaattttgtcgcttcggctactatggggatgcattgcagcaggattgcaggaaatgtgtgtgcaactacctgggcaccgtccaagaacattgtaatggatctgattgccagtgcgataaagctacaggtcaatgtttgtgtctgccaaatgtgatcggccaaaattgtgataggtgcgctcccaatacatggcaactggcttctggcaccgggtgcgacccctgcaactgcaacgcagcacacagctttggaccatcctgcaacgaattcacagggcaatgtcagtgtatgcctggatttgggggaaggacctgttcagaatgtcaagaactattttggggagatccagatgttgagtgcagggcttgcgattgcgatcctagaggaattgaaactccacaatgtgaccagagtactggccaatgtgtgtgcgtcgagggcgtggaggggcctaggtgtgacaagtgcacccggggctatagcggagttttcccagattgtacaccatgtcatcagtgttttgcactgtgggacgtgataattgctgaactaactaatcggacacatagattcctcgagaaagcaaaggccctcaaaataagcggtgtcataggaccatatagagaaacagtcgacagtgtggagcgaaaagtgagcgaaataaaagatatcttggctcagtccccagctgcggagcccctcaagaacatagggaacctgttcgaagaagcggaaaaactgataaaggatgtaaccgaaatgatggctcaggtggaagttaaactctccgatacaacatcccagtctaactcaacagctaaagagcttgattcattgcagacggaagccgagtccttggataatactgtcaaggaattagctgaacagctggaattcataaaaaactcagacatacggggtgctctcgattcaattactaaatattttcaaatgtcactggaagcagaggagagggttaacgctagtaccacagagcctaactccacagtggagcagagcgcacttatgagagaccgcgttgaagacgttatgatggaacgagagtctcaatttaaggaaaagcaggaggagcaggcaagattgctggacgagcttgccggaaaacttcaatccctggatctgtcagccgcagccgaaatgacttgcggaacgccccccggagcctcctgcagtgagacagaatgcggaggacctaattgtaggactgatgaaggagagcgtaaatgtggaggacccggatgtgggggacttgttaccgtggcccataacgcatggcagaaggccatggatttggatcaagatgtgctgagcgctctcgcagaggtggaacagctgagcaagatggtttccgaagcaaaactgagagcagatgaagcaaagcagtcggcggaggatatactcctcaaaaccaatgcgaccaaagaaaaaatggacaaatcaaatgaggagttacgaaatctaattaaacagatcagaaactttctgacccaggactctgccgatttggattccatcgaagctgttgctaatgaagttctgaaaatggagatgccgtccaccccccagcagttgcaaaacttgaccgaggatattcgagaacgtgtagagagtctgagtcaggttgaagtgattttgcagcactcagcagctgatatcgctcgtgccgaaatgctcctcgaggaagcgaaaagggccagtaagagcgctaccgacgtcaaggtgaccgccgatatggtcaaggaggctctggaagaagccgagaaagcccaagtggccgccgaaaaagccattaaacaggcagacgaggacatccaaggcacccagaacctgctcacaagcattgaatccgagactgctgcctccgaagagactctgtttaacgcatcacagcgcattagtgagttggaacgtaacgttgaggaacttaaaagaaaggccgctcagaacagcggagaagccgaatatattgagaaagtcgtgtatactgttaagcaatctgccgaggatgtgaagaaaacattggacggagaattagacgagaagtataagaaggtcgaaaatctcatcgctaaaaaaacagaagaatcggctgacgcgcggaggaaagcagagatgctgcagaacgaagccaagaccctgctcgctcaggctaatagtaagctgcaactcttgaaggatctagagaggaaatacgaagacaaccaacgttatcttgaagataaagcacaggaacttgcaaggctagaaggagaagtgcggagcctgctgaaagatatctcacagaaagtcgccgtgtattctacatgtttgtag

SEQ ID NO: 127281 - DNA, 276 bp, Artificial Sequence
  derived and/or modified sequence
atgggattactgcaattgctagcattctccttcctggcattgtgccgcgctagggtgcgggctcaagagcccgaattctcttatggctgcgccgaaggctcttgctatcctgcgactggggatctgcttattggaagggctcaaaagttgagcgtgaccagtacttgtggtctgcacaaacctgagccgtattgcatcgtatcgcacctgcaggaagacaagaagtgtttcatctgcaattcccaagatccatatcacgaaactctgaatccctag

SEQ ID NO: 127282 - DNA, 2553 bp, Artificial Sequence
  derived and/or modified sequence
atgggtctgttacaactcctcgctttttcatttctggccctctgccgggcccgggtgcgcgcgcaggagcctgaatttagttacgggtgtgccgaaggttcatgttaccccgcaacgggcgatttgttgatagggagagctcagaagctgtctgtaacctctacatgcggtcttcacaagcctgagccctactgtatcgtgtcccatttacaggaggataagaagtgttttatttgcaattcacaggacccatatcatgagaccctcaacccagactcccacctgattgaaaatgtggtcactactttcgccccaaacagactgaagatctggtggcagtctgagaatggcgttgaaaatgtgacaatccaactcgatttggaggcagaatttcacttcacgcatttgatcatgacgttcaagacattcaggcctgcagctatgctgatagaacgcagctctgactttggcaagacctggggcgtgtatagatactttgcctatgattgtgaagcgtcttttccaggaatttctaccggaccaatgaagaaagttgatgatattatttgcgatagcaggtactctgatattgagcctagcaccgagggcgaggtgatcttccgggcgctcgaccctgccttcaaaatcgaggacccatattcacctaggatccagaatctcctgaagataacaaatttacggattaaattcgtgaagcttcacacactgggagacaatcttctagacagcagaatggagataagagagaagtattattacgctgtgtatgatatggtagtgcggggcaactgcttttgctacggccacgcctccgaatgcgcaccggttgatggtttcaacgaggaggtggaagggatggtccatggtcactgtatgtgtaggcacaacacgaagggtctgaattgtgaactgtgtatggatttttaccatgacttgccatggaggcccgctgaagggaggaacagcaatgcttgcaagaaatgtaactgcaatgaacattctatatcatgccacttcgatatggcagtgtatctggccaccgggaacgtgagcggtggtgtctgtgacgattgccaacataatacaatgggccgcaattgcgagcaatgtaaacctttctactaccagcacccagagcgggacatacgtgatcccaatttttgcgaaaggtgcacttgtgatcccgctggaagccagaacgagggtatctgcgactcctatacagatttctccaccggactgattgccggccaatgccggtgcaagctgaacgtagagggagagcattgcgatgtgtgcaaagaaggtttttatgacctgagtagcgaggacccttttggatgcaagtcatgtgcctgtaaccctcttgggaccattccagggggcaatccctgcgattcggaaaccggtcactgttattgcaagaggttagtgactggacagcactgcgaccagtgtctgcccgagcactggggtctgtccaacgacctcgacggctgcagaccgtgtgactgcgatctcggaggcgccctgaataacagctgtttcgccgagagtggacagtgtagctgtaggccgcatatgatcggacgtcagtgtaatgaggtggaaccaggatactatttcgctacactcgaccattacttgtacgaggccgaggaggccaatttaggccccggtgttagcatcgtagaaaggcagtacattcaagataggatcccttcttggaccggtgcagggtttgtaagagtcccagagggggcctatttagagttctttatcgataatatcccgtattcaatggaatatgacattttaattagatatgaaccacagttgccggaccactgggaaaaagccgttattaccgtccaacgcccggggcgcatccctacgagcagcaggtgcggcaacactataccagatgacgacaatcaagtcgtgagcttgtctcctggcagccgctacgtcgtgctgccccggcctgtgtgcttcgagaaaggtacgaactacactgtgcgcctcgagctccctcaatataccagctctgactcggatgtggagtctccttacacgctaatagattccttggtgcttatgccctattgcaagagtctggacatctttactgtcgggggatccggggatggggtggtgaccaattctgcatgggagacattccagcggtatcgatgcctggagaatagcagatcagtggtcaagacacctatgacagatgtctgtcgcaacatcatcttctcaatttctgctctgctccaccagaccggcctagcatgcgagtgtgatcctcagggatcacttagctcagtgtgtgatcccaatggcgggcagtgtcaatgtaggccaaacgttgttggacgtacctgcaacaggtgcgctcctggtactttcggattcggcccatccggctgtaagcggcgcttccttaagtcaatcgtgatgcattctttcaggctcacgcagcctctgtggcagggatccatagcagcagaaccaatgcttccctcatag

SEQ ID NO: 127283 - DNA, 5725 bp, Artificial Sequence
  derived and/or modified sequence
ttgcggccgcccgccccttcagccccggctctccgtatgcgcatgagcagaggcgcctccctctgttcctcccaaggctaaactttctaattcccttctttgggctcgggggctcccggagcagggcgagagctcgcgtcgccggaaaggaagacgggaagaaagggcaggcggctcggcgggcgtcttctccactcctctgccgcgtccccgtggctgcagggagccggcatggggcttctccagttgctagctttcagtttcttagccctgtgcagagcccgagtgcgcgctcaggaacccgagttcagctacggctgcgcagaaggcagctgctatcccgccacgggcgaccttctcatcggccgagcacagaagctttcggtgacctcgacgtgcgggctgcacaagcccgaaccctactgtatcgtcagccacttgcaggaggacaaaaaatgcttcatatgcaattcccaagatccttatcatgagaccctgaatcctgacagccatctcattgaaaatgtggtcactacatttgctccaaaccgccttaagatttggtggcaatctgaaaatggtgtggaaaatgtaactatccaactggatttggaagcagaattccattttactcatctcataatgactttcaagacattccgtccagctgctatgctgatagaacgatcgtccgactttgggaaaacctggggtgtgtatagatacttcgcctatgactgtgaggcctcgtttccaggcatttcaactggccccatgaaaaaagtcgatgacataatttgtgattctcgatattctgacattgaaccctcaactgaaggagaggtgatatttcgtgctttagatcctgctttcaaaatagaagatccttatagcccaaggatacagaatttattaaaaattaccaacttgagaatcaagtttgtgaaactgcatactttgggagataaccttctggattccaggatggaaatcagagaaaagtattattatgcagtttatgatatggtggttcgaggaaattgcttctgctatggtcatgccagcgaatgtgcccctgtggatggattcaatgaagaagtggaaggaatggttcacggacactgcatgtgcaggcataacaccaagggcttaaactgtgaactctgcatggatttctaccatgatttaccttggagacctgctgaaggccgaaacagcaacgcctgtaaaaaatgtaactgcaatgaacattccatctcttgtcactttgacatggctgtttacctggccacggggaacgtcagcggaggcgtgtgtgatgactgtcagcacaacaccatggggcgcaactgtgagcagtgcaagccgttttactaccagcacccagagagggacatccgagatcctaatttctgtgaacgatgtacgtgtgacccagctggctctcaaaatgagggaatttgtgacagctatactgatttttctactggtctcattgctggccagtgtcggtgtaaattaaatgtggaaggagaacattgtgatgtttgcaaagaaggcttctatgatttaagcagtgaagatccatttggttgtaaatcttgtgcttgcaatcctctgggaacaattcctggagggaatccttgtgattccgagacaggtcactgctactgcaagcgtctggtgacaggacagcattgtgaccagtgcctgccagagcactggggcttaagcaatgatttggatggatgtcgaccatgtgactgtgaccttgggggagccttaaacaacagttgctttgcggagtcaggccagtgctcatgccggcctcacatgattggacgtcagtgcaacgaagtggaacctggttactactttgccaccctggatcactacctctatgaagcggaggaagccaacttggggcctggggttagcatagtggagcggcaatatatccaggaccggattccctcctggactggagccggcttcgtccgagtgcctgaaggggcttatttggagtttttcattgacaacataccatattccatggagtacgacatcctaattcgctacgagccacagctacccgaccactgggaaaaagctgtcatcacagtgcagcgacctggaaggattccaaccagcagccgatgtggtaataccatccccgatgatgacaaccaggtggtgtcattatcaccaggctcaagatatgtcgtccttcctcggccggtgtgctttgagaagggaacaaactacacggtgaggttggagctgcctcagtacacctcctctgatagcgacgtggagagcccctacacgctgatcgattctcttgttctcatgccatactgtaaatcactggacatcttcaccgtgggaggttcaggagatggggtggtcaccaacagtgcctgggaaacctttcagagataccgatgtctagagaacagcagaagcgttgtgaaaacaccgatgacagatgtttgcagaaacatcatctttagcatttctgccctgttacaccagacaggcctggcttgtgaatgcgaccctcagggttcgttaagttccgtgtgtgatcccaacggaggccagtgccagtgccggcccaacgtggttggaagaacctgcaacagatgtgcacctggaacttttggctttggccccagtggatgcaaaccttgtgagtgccatctgcaaggatctgtcaatgccttctgcaatcccgtcactggccagtgccactgtttccagggagtgtatgctcggcagtgtgatcggtgcttacctgggcactggggctttccaagttgccagccctgccagtgcaatggccacgccgatgactgcgacccagtgactggggagtgcttgaactgccaggactacaccatgggtcataactgtgaaaggtgcttggctggttactatggcgaccccatcattgggtcaggagatcactgccgcccttgcccttgcccagatggtcccgacagtggacgccagtttgccaggagctgctaccaagatcctgttactttacagcttgcctgtgtttgtgatcctggatacattggttccagatgtgacgactgtgcctcaggatactttggcaatccatcagaagttggggggtcgtgtcagccttgccagtgtcacaacaacattgacacgacagacccagaagcctgtgacaaggagactgggaggtgtctcaagtgcctgtaccacacggaaggggaacactgtcagttctgccggtttggatactatggtgatgccctccagcaggactgtcgaaagtgtgtctgtaattacctgggcaccgtgcaagagcactgtaacggctctgactgccagtgcgacaaagccactggtcagtgcttgtgtcttcctaatgtgatcgggcagaactgtgaccgctgtgcgcccaatacctggcagctggccagtggcactggctgtgacccatgcaactgcaatgctgctcattccttcgggccatcttgcaatgagttcacggggcagtgccagtgcatgcctgggtttggaggccgcacctgcagcgagtgccaggaactcttctggggagaccccgacgtggagtgccgagcctgtgactgtgaccccaggggcattgagacgccacagtgtgaccagtccacgggccagtgtgtctgcgttgagggtgttgagggtccacgctgtgacaagtgcacgcgagggtactcgggggtcttccctgactgcacaccctgccaccagtgctttgctctctgggatgtgatcattgccgagctgaccaacaggacacacagattcctggagaaagccaaggccttgaagatcagtggtgtgatcgggccttaccgtgagactgtggactcggtggagaggaaagtcagcgagataaaagacatcctggcgcagagccccgcagcagagccactgaaaaacattgggaatctctttgaggaagcagagaaactgattaaagatgttacagaaatgatggctcaagtagaagtgaaattatctgacacaacttcccaaagcaacagcacagccaaagaactggattctctacagacagaagccgaaagcctagacaacactgtgaaagaacttgctgaacaactggaatttatcaaaaactcagatattcggggtgccttggatagcattaccaagtatttccagatgtctcttgaggcagaggagagggtgaatgcctccaccacagaacccaacagcactgtggagcagtcagccctcatgagagacagagtagaagacgtgatgatggagcgagaatcccagttcaaggaaaaacaagaggagcaggctcgcctccttgatgaactggcaggcaagctacaaagcctagacctttcagccgctgccgaaatgacctgtggaacacccccaggggcctcctgttccgagactgaatgtggcgggccaaactgcagaactgacgaaggagagaggaagtgtggggggcctggctgtggtggtctggttactgttgcacacaacgcctggcagaaagccatggacttggaccaagatgtcctgagtgccctggctgaagtggaacagctctccaagatggtctctgaagcaaaactgagggcagatgaggcaaaacaaagtgctgaagacattctgttgaagacaaatgctaccaaagaaaaaatggacaagagcaatgaggagctgagaaatctaatcaagcaaatcagaaactttttgacccaggatagtgctgatttggacagcattgaagcagttgctaatgaagtattgaaaatggagatgcctagcaccccacagcagttacagaacttgacagaagatatacgtgaacgagttgaaagcctttctcaagtagaggttattcttcagcatagtgctgctgacattgccagagctgagatgttgttagaagaagctaaaagagcaagcaaaagtgcaacagatgttaaagtcactgcagatatggtaaaggaagctctggaagaagcagaaaaggcccaggtcgcagcagagaaggcaattaaacaagcagatgaagacattcaaggaacccagaacctgttaacttcgattgagtctgaaacagcagcttctgaggaaaccttgttcaacgcgtcccagcgcatcagcgagttagagaggaatgtggaagaacttaagcggaaagctgcccaaaactccggggaggcagaatatattgaaaaagtagtatatactgtgaagcaaagtgcagaagatgttaagaagactttagatggtgaacttgatgaaaagtataaaaaagtagaaaatttaattgccaaaaaaactgaagagtcagctgatgccagaaggaaagccgaaatgctacaaaatgaagcaaaaactcttttagctcaagcaaatagcaagctgcaactgctcaaagatttagaaagaaaatatgaagacaatcaaagatacttagaagataaagctcaagaattagcaagactggaaggagaagtccgttcactcctaaaggatataagccagaaagttgctgtgtatagcacatgcttgtaacagaggagaataaaaaatggctgaggtgaacaaggtaaaacaactacattttaaaaactgacttaatgctcttcaaaataaaacatcacctatttaatgtttttaatcacattttgtatggagttaaataaag

SEQ ID NO: 127284 - DNA, 2806 bp, Artificial Sequence
  derived and/or modified sequence
ctcccaaggctaaactttctaattcccttctttgggctcgggggctcccggagcagggcgagagctcgcgtcgccggaaaggaagacgggaagaaagggcaggcggctcggcgggcgtcttctccactcctctgccgcgtccccgtggctgcagggagccggcatggggcttctccagttgctagctttcagtttcttagccctgtgcagagcccgagtgcgcgctcaggaacccgagttcagctacggctgcgcagaaggcagctgctatcccgccacgggcgaccttctcatcggccgagcacagaagctttcggtgacctcgacgtgcgggctgcacaagcccgaaccctactgtatcgtcagccacttgcaggaggacaaaaaatgcttcatatgcaattcccaagatccttatcatgagaccctgaatcctgacagccatctcattgaaaatgtggtcactacatttgctccaaaccgccttaagatttggtggcaatctgaaaatggtgtggaaaatgtaactatccaactggatttggaagcagaattccattttactcatctcataatgactttcaagacattccgtccagctgctatgctgatagaacgatcgtccgactttgggaaaacctggggtgtgtatagatacttcgcctatgactgtgaggcctcgtttccaggcatttcaactggccccatgaaaaaagtcgatgacataatttgtgattctcgatattctgacattgaaccctcaactgaaggagaggtgatatttcgtgctttagatcctgctttcaaaatagaagatccttatagcccaaggatacagaatttattaaaaattaccaacttgagaatcaagtttgtgaaactgcatactttgggagataaccttctggattccaggatggaaatcagagaaaagtattattatgcagtttatgatatggtggttcgaggaaattgcttctgctatggtcatgccagcgaatgtgcccctgtggatggattcaatgaagaagtggaaggaatggttcacggacactgcatgtgcaggcataacaccaagggcttaaactgtgaactctgcatggatttctaccatgatttaccttggagacctgctgaaggccgaaacagcaacgcctgtaaaaaatgtaactgcaatgaacattccatctcttgtcactttgacatggctgtttacctggccacggggaacgtcagcggaggcgtgtgtgatgactgtcagcacaacaccatggggcgcaactgtgagcagtgcaagccgttttactaccagcacccagagagggacatccgagatcctaatttctgtgaacgatgtacgtgtgacccagctggctctcaaaatgagggaatttgtgacagctatactgatttttctactggtctcattgctggccagtgtcggtgtaaattaaatgtggaaggagaacattgtgatgtttgcaaagaaggcttctatgatttaagcagtgaagatccatttggttgtaaatcttgtgcttgcaatcctctgggaacaattcctggagggaatccttgtgattccgagacaggtcactgctactgcaagcgtctggtgacaggacagcattgtgaccagtgcctgccagagcactggggcttaagcaatgatttggatggatgtcgaccatgtgactgtgaccttgggggagccttaaacaacagttgctttgcggagtcaggccagtgctcatgccggcctcacatgattggacgtcagtgcaacgaagtggaacctggttactactttgccaccctggatcactacctctatgaagcggaggaagccaacttggggcctggggttagcatagtggagcggcaatatatccaggaccggattccctcctggactggagccggcttcgtccgagtgcctgaaggggcttatttggagtttttcattgacaacataccatattccatggagtacgacatcctaattcgctacgagccacagctacccgaccactgggaaaaagctgtcatcacagtgcagcgacctggaaggattccaaccagcagccgatgtggtaataccatccccgatgatgacaaccaggtggtgtcattatcaccaggctcaagatatgtcgtccttcctcggccggtgtgctttgagaagggaacaaactacacggtgaggttggagctgcctcagtacacctcctctgatagcgacgtggagagcccctacacgctgatcgattctcttgttctcatgccatactgtaaatcactggacatcttcaccgtgggaggttcaggagatggggtggtcaccaacagtgcctgggaaacctttcagagataccgatgtctagagaacagcagaagcgttgtgaaaacaccgatgacagatgtttgcagaaacatcatctttagcatttctgccctgttacaccagacaggcctggcttgtgaatgcgaccctcagggttcgttaagttccgtgtgtgatcccaacggaggccagtgccagtgccggcccaacgtggttggaagaacctgcaacagatgtgcacctggaacttttggctttggccccagtggatgcaaacgtaggttcctcaaaagcattgttatgcattcattcagattaactcagccattgtggcagggttccattgctgcagagccgatgcttccctcctgaagttgatcacaccaacccatgagcattctgaattggggacagggtgcttataaaaggagcatgtttccattgaatgagtttctcaaggca

SEQ ID NO: 127285 - DNA, 276 bp, Artificial Sequence
  derived and/or modified sequence
atgggcctgctgcagctgctggccttctccttcctggccctgtgccgggcccgggtgcgggcccaggagcctgagttctcctatggctgtgccgagggcagctgctacccagccactggagacctgctgattggccgggcccagaagctgtctgtgaccagcacctgtggcctgcacaagccagagccctactgcatcgtgagccacctgcaggaggacaagaagtgcttcatctgcaacagccaggacccctaccacgagaccctgaacccctag

SEQ ID NO: 127286 - DNA, 2553 bp, Artificial Sequence
  derived and/or modified sequence
atgggcctgctgcagctgctggccttctccttcctggccctgtgccgggcccgggtgcgggcccaggagcctgagttctcctatggctgtgccgagggcagctgctacccagccactggagacctgctgattggccgggcccagaagctgtctgtgaccagcacctgtggcctgcacaagccagagccctactgcatcgtgagccacctgcaggaggacaagaagtgcttcatctgcaacagccaggacccctaccacgagaccctgaacccagacagccacctgattgaaaatgtggtgaccacctttgcccccaaccggctgaagatctggtggcagagtgaaaatggagtggagaatgtgaccatccagctggacctggaggccgagttccacttcacccacctgatcatgaccttcaagaccttccggcctgctgccatgctgattgaaagaagcagtgactttgggaagacctggggcgtgtaccgctactttgcctatgactgtgaggccagcttccctggcatcagcacaggccccatgaagaaggtggatgacatcatctgtgacagccgctacagcgacatcgagcccagcacagaaggagaggtgatcttccgggccctggaccctgccttcaagattgaggacccctacagcccccgcatccagaacctgctgaagatcaccaacctgcgcatcaagtttgtgaagctgcacaccctgggggacaacctgctggacagcaggatggagatccgggagaagtactactatgctgtgtatgacatggtggtgcggggcaactgcttctgctacggccacgcctctgaatgtgcccctgtggatggcttcaatgaggaggtggagggcatggtgcacggccactgcatgtgccgccacaacaccaagggcctgaactgtgagctgtgcatggacttctaccatgacctgccctggaggcctgctgagggcaggaacagcaatgcctgcaagaagtgcaactgcaatgagcacagcatcagctgccactttgacatggctgtgtacctggccactggaaatgtgtctgggggcgtgtgtgatgactgccagcacaacaccatgggcaggaactgtgagcagtgcaagcccttctactaccagcaccctgagcgggacatccgggaccccaacttctgtgagcgctgcacctgtgaccctgctggcagccagaatgaaggcatctgtgacagctacacagacttcagcacaggcctgattgctggccagtgccgctgcaagctgaatgtggagggggagcactgtgatgtgtgcaaggagggcttctatgacctgagcagcgaggaccccttcggctgcaagagctgtgcctgcaaccccctgggcaccatccctgggggcaacccctgtgacagcgagaccggccactgctactgcaagaggctggtgacaggccagcactgtgaccagtgcctgcctgagcactggggcctgagcaatgacctggatggctgccggccctgtgactgtgacctgggcggggccctgaacaacagctgctttgctgagagcggccagtgcagctgccggccccacatgattggccggcagtgcaatgaggtggagcccggctactactttgccaccctggaccactacctgtatgaagctgaggaggccaacctgggccctggggtgtccatcgtggagcggcagtacatccaggaccgcatccccagctggacaggagctggctttgtgcgggtgcctgagggcgcctacctggagttcttcatcgacaacatcccctacagcatggagtatgacatcctgatccgctatgagccccagctgcctgaccactgggagaaggctgtgatcaccgtgcagaggcctggccgcatccccaccagcagccgctgtggcaacaccatcccagatgatgacaaccaggtggtgtccctgagccctggcagccgctacgtggtgctgcccaggcctgtgtgctttgagaagggcaccaactacacagtgcggctggagctgccccagtacaccagcagtgacagtgatgtggagagcccctacaccctgattgacagcctggtgctgatgccctactgcaagagcctggacatcttcaccgtgggcggcagcggagatggagtggtgaccaacagcgcctgggagaccttccagcgctaccgctgcctggagaacagccgctctgtggtgaagacccccatgacagatgtgtgcaggaacatcatcttcagcatcagcgccctgctgcaccagacaggcctggcctgtgaatgtgacccccagggcagcctgagctctgtgtgtgaccccaacggcggccagtgccagtgccggcccaacgtggtgggccgcacctgcaacagatgtgcccctggcacctttggatttggccccagcggctgcaagaggcgcttcctgaagagcatcgtgatgcacagcttccggctgacccagcccctgtggcagggcagcattgctgctgagcccatgctgcccagctag

SEQ ID NO: 127287 - DNA, 276 bp, Artificial Sequence
  derived and/or modified sequence
atgggcctgctgcagctgctggccttcagcttcctggccctgtgcagggcccgggtgagggctcaggagcctgagttttcctacgggtgcgcagaggggtcttgctaccccgcaacaggagatctgttgatcgggagagcccaaaaactcagtgttacatcaacatgcggactgcataagcctgaaccctactgtatcgtgagccatctgcaggaggacaagaagtgcttcatctgcaactcacaggacccataccatgagactctgaatccatag

SEQ ID NO: 127288 - DNA, 2553 bp, Artificial Sequence
  derived and/or modified sequence
atgggcctgctgcagctgctggccttcagcttcctggccctgtgccgggcccgggtaagggcccaggaaccggagtttagctacgggtgtgcggaggggtcctgctatccagccacaggcgatttgctcattggcagagcccaaaagctgagtgttacttccacgtgtggcctgcataaacccgagccctattgcatcgtgagccaccttcaggaggacaaaaaatgctttatatgtaactcacaggacccttatcacgagacgctaaacccagatagccacctgatcgagaacgtggtgacgacctttgctcctaaccgactgaagatttggtggcagtcagaaaatggcgtggagaatgtgaccattcaactggatttggaagcagaattccatttcacgcacttaattatgaccttcaagacttttcggccagctgccatgctgatcgagcgcagctcagatttcggaaagacctggggagtgtacagatactttgcatacgactgtgaagctagcttcccgggcatctctacagggccaatgaagaaagttgacgacatcatttgtgattcgcgatattctgacattgagccgtcaaccgagggcgaagtgatctttagagcactggatccagcgttcaagattgaagacccatactccccccgcatccaaaacttactgaaaattactaatcttcgaattaagttcgtgaagctgcacacgctgggcgacaatctcctggactcgcggatggagatccgcgagaaatactattacgcggtgtacgatatggttgtaaggggtaattgcttttgttacggccatgcttcagagtgtgctcccgtggatgggttcaacgaagaagtcgaggggatggtgcatggacactgcatgtgtaggcataacacgaaggggctaaattgtgaactctgcatggacttttaccacgatctgccttggcgtcctgccgaaggccgtaattctaacgcctgcaaaaaatgtaattgcaatgaacactccatctcctgccatttcgacatggccgtttacctggccacagggaacgtgagcgggggcgtgtgcgacgactgccagcataacactatgggtagaaactgtgaacaatgcaagccgttttattaccagcaccccgaaagagacatcagggatcccaatttctgcgaacgctgtacttgcgaccctgccgggtcacagaacgaaggcatctgcgactcatacaccgatttttctacgggcctgattgccgggcagtgtcgatgcaagctgaacgtagagggcgaacattgcgatgtatgcaaggaaggcttctacgacctgtctagcgaggacccttttgggtgcaagtcttgcgcctgtaacccgcttggcaccattcccggcggcaacccatgtgactcggaaaccggccattgctactgtaaacgcctggtgactgggcagcactgcgatcagtgcttgcctgagcactggggtctctctaatgacctggacgggtgcaggccctgtgactgtgacttgggtggcgccctcaacaattcctgtttcgctgaatcaggccaatgttcgtgccgcccccatatgataggcagacagtgtaatgaagtggagccaggctattactttgcgacccttgaccactacctgtatgaggccgaggaagcgaacctcggacccggggtgagcatagtagagcggcagtatatccaagacaggatcccctcgtggaccggggccggttttgtccgggtgcctgagggagcatacctggaattttttatagataacatcccgtactctatggaatatgatattctgatccgctatgagccacagctcccagaccactgggagaaagctgttatcacagttcagcggcctggccggattcccacctcatcacgctgcggaaatactatccctgacgatgacaaccaggtggttagccttagccctggctcccgctacgtagtattgcctaggcctgtctgttttgagaaaggcactaattatacagttagactggagctgccacagtacacaagttcagatagcgatgtcgagtctccatacaccctaatcgatagccttgtattgatgccatattgtaagagcctggatatcttcaccgtcggaggttcaggggacggtgtggtgactaactcagcttgggaaacgtttcagcgatatcgctgcttggagaactcccgctccgttgttaaaacacctatgactgatgtctgccgcaacattatattttccatcagtgccctcctgcaccagacaggtctggcctgtgagtgcgacccccagggctccttgagcagtgtgtgtgatccaaacggcgggcaatgtcaatgcaggcccaacgtcgtaggccgaacttgcaataggtgcgctcccgggaccttcggctttgggccgagcggctgtaagagaagatttttgaaatcgatagtgatgcatagttttcggctaacccagcccctgtggcaaggaagtattgccgcagaaccaatgttgccatcttag

SEQ ID NO: 127289 - DNA, 276 bp, Artificial Sequence
  derived and/or modified sequence
atgggtctactccaacttcttgcgttctccttcctggccctctgccgtgctcgcgtccgggcacaggagccggaattttcatacggctgcgcggagggctcatgctacccggctactggagatctcctgattggacgagcgcaaaaattgtcggtgacgtctacgtgtgggttacataaacccgagccctattgtatcgtatcgcacctgcaggaggataaaaagtgctttatctgtaatagccaggacccttatcacgagactttgaacccttag

SEQ ID NO: 127290 - DNA, 2553 bp, Artificial Sequence
  derived and/or modified sequence
atggggctgctgcagctcctggcatttagctttctggctttatgtcgggctcgcgtcagagctcaggaacccgagttcagctacgggtgtgcagaggggtcttgttatcccgcaacaggagatctactcataggcagggctcaaaagctgtcagtcacaagtacctgcggcctgcataagcctgagccttattgtatagtttcacatctgcaggaggacaagaaatgtttcatttgtaattcacaggatccatatcatgaaacactgaaccctgattcacatctgattgaaaacgtggtcaccacctttgctcccaacaggttaaaaatttggtggcagtccgagaacggcgttgagaatgtaactattcaactggatttagaggctgagttccattttacgcatctcatcatgacattcaaaacttttcgacccgcagccatgttgatcgagaggtcatctgattttggaaagacgtggggcgtttaccggtactttgcctatgactgcgaagcctcttttcctgggatctcaactggaccgatgaaaaaggtggacgacatcatctgtgacagcagatactccgacatcgagccttcgaccgagggggaagtgatcttccgggctctcgaccccgctttcaaaattgaggacccttacagccccagaatccagaatctgcttaaaataacaaatttgcggattaagttcgtaaagcttcatacattaggtgataacctgctcgatagtcggatggagatacgagaaaaatattactacgccgtgtatgatatggtcgttcgaggaaattgcttctgttacggacacgccagcgagtgtgcacccgtggatggcttcaacgaggaagtagaaggcatggtccacggccactgcatgtgcagacacaacaccaaaggcctgaactgcgagctttgcatggacttttaccacgaccttccatggagaccagccgaggggcgtaattcaaatgcatgtaagaaatgtaactgcaacgagcactctattagctgccactttgacatggcggtgtacctggcaaccggtaacgtctctgggggtgtttgcgacgattgccagcacaataccatgggcaggaattgtgagcagtgtaaacccttctattaccaacaccccgaacgtgacattcgcgatcccaatttttgcgagagatgcacatgtgatccagcaggctcccaaaacgaagggatttgtgattcgtacactgacttcagcacgggtctgatagcagggcagtgcaggtgcaagctcaacgtcgagggagaacattgtgatgtgtgtaaggagggcttctacgatttgagctcagaagatccattcggttgcaagtcatgcgcatgtaatccgctgggaacgattccagggggaaatccctgcgactccgaaacgggccactgttattgcaagcgactggtcacgggacagcactgtgaccagtgcctgccggagcactggggcctgtctaacgacctggatgggtgtagaccatgtgactgtgatttagggggagcgcttaataattcttgctttgcggaatcgggacagtgctcctgcagaccacatatgatcgggaggcagtgtaatgaagtggaaccaggttattatttcgcaacattggaccactatttgtacgaagccgaagaggcaaatttgggcccaggagtgtcaatagtggagagacagtacatacaggacagaataccttcttggaccggcgctggttttgtgcgggtccccgaaggtgcctaccttgagttcttcattgacaatattccctattctatggaatacgacattctgattcgatatgagccacagctacccgatcattgggagaaagcagttatcaccgtgcagaggcctggtcgcatacccacatcatcccggtgcggaaatacaatcccagatgacgacaatcaggtggtatcactgagtcccggatctaggtacgtggttctgccacgacccgtgtgctttgagaagggcactaactatacagtcagactggaactgccacagtacacttccagtgacagcgatgtggagtctccttacaccctgattgactcccttgtgctgatgccttattgtaagagcttggatatattcactgtcgggggaagcggcgacggagtggttaccaatagtgcatgggagacctttcaaagataccgctgtctggagaacagcaggtccgtggtgaagaccccaatgaccgacgtgtgtcgcaatattatatttagtatctctgccctcctccatcagaccggcttggcatgcgagtgcgacccacaaggaagcctgtcttctgtgtgcgaccccaatgggggtcaatgtcagtgccgcccaaatgtcgtgggtaggacttgcaataggtgcgccccaggcacattcggttttggaccctctggatgcaaaagacggttcctcaaatccatcgtgatgcacagcttcagacttacccaacccttgtggcaaggctctatcgcggctgaacccatgctgcctagctag

SEQ ID NO: 127291 - DNA, 276 bp, Artificial Sequence
  derived and/or modified sequence
atgggtctgctccaactgctggccttctcatttcttgctttgtgcagagctcgcgttcgcgcccaggagcccgagttctcctacggttgtgccgagggctcttgttatcctgctacaggtgatctgttaatcggccgcgcccagaaacttagtgtcaccagcacatgcggattacacaaaccagaaccttattgcattgtgtctcacttacaagaggataaaaagtgcttcatctgcaactcccaggacccttaccatgagacactgaacccttag

SEQ ID NO: 127292 - DNA, 2553 bp, Artificial Sequence
  derived and/or modified sequence
atgggactgctacaactgctagccttttctttcctggccctatgtcgggcccgtgtcagagcgcaggaaccggaattttcctatgggtgcgccgaagggagctgttacccagcaaccggagatttactgatcggccgggcacagaaactcagcgtcactagcacctgcggtctccataagcctgagccatactgtatagtatctcatctgcaagaagacaagaagtgcttcatctgcaattcccaggatccctatcacgagacactcaatcctgacagccatctcatcgaaaacgttgttaccacctttgctccaaacaggttgaaaatctggtggcagtccgagaacggtgttgagaacgtcactatccagttagatttggaggctgagtttcacttcacccatcttattatgaccttcaagactttcaggccagcagctatgcttatcgaaagaagttcagacttcggcaagacttggggtgtgtataggtattttgcttatgattgtgaggcgtcgttccctgggatatccactggacctatgaaaaaagttgatgatattatctgcgactctcggtactccgacattgagccttccactgaaggcgaggttattttccgggcactggaccccgcattcaaaatagaggatccttattctcctaggattcaaaacctgctgaaaatcactaatctcagaattaagttcgtgaaactccacacactgggggataacttgctggattcaagaatggaaattcgtgagaaatattactacgctgtatatgacatggtggttcgagggaattgcttctgttacggtcacgcctctgagtgcgcacccgttgacggttttaacgaggaagtagaggggatggtccatggccactgcatgtgtcgccacaacacaaagggcttgaattgcgagctatgtatggatttttaccatgacttgccctggagacccgcagaaggccgcaacagtaatgcctgcaagaagtgtaattgcaacgaacatagcattagttgccacttcgatatggccgtgtacctggccactggcaatgtctctggtggtgtctgtgacgattgccagcataataccatgggccggaattgcgagcagtgcaaacccttctactatcagcaccccgaaagagatattcgggaccctaatttctgtgagcggtgcacttgcgatcctgccggctcccagaacgaaggaatatgtgactcctacaccgattttagtactggtcttatcgctggacagtgccggtgcaaattgaacgtggagggggagcactgtgatgtatgtaaggaaggattttatgatttatcatctgaggacccattcggctgcaaatcctgcgcctgtaatccactgggaacaatacctggtggcaacccctgcgacagcgagaccgggcattgttattgcaagcgactggtcacgggtcagcattgtgaccagtgcctacctgagcattgggggctgtccaacgatttggacggttgtagaccctgcgattgcgatcttggaggggccctcaataacagttgctttgccgagagcggacagtgttcatgccggcctcatatgatcgggcggcagtgcaacgaggtcgaacctggctactactttgccactttggaccactacctttacgaggctgaggaggcaaacctcggtccaggtgtgagtatcgtggaaaggcagtacattcaggataggatcccctcctggactggagccggattcgtcagggtgccagaaggtgcctatctggagtttttcattgataacatcccttatagcatggaatacgacatcctcataagatacgagcctcagctacccgatcactgggagaaagcagttataaccgtgcagcggcccggaaggatccctacgtcatcccggtgcggcaacactatccctgacgatgacaaccaagtcgtgtccctgtcaccaggcagccgctacgttgtattgcctagaccagtatgcttcgagaaaggtaccaattatacggtcaggttagagttgccccagtatacatccagtgacagcgacgtagaaagtccttatactctcatcgattcactggtcctgatgccatactgtaagagcttagatatttttactgtggggggttcaggcgatggtgtagttactaattccgcctgggaaacctttcagcggtacagatgccttgagaactctcgctctgtcgtgaaaacaccaatgactgacgtatgcagaaacatcatctttagtatctctgctctgcttcaccagaccggactggcctgtgagtgcgatccccagggatctctgtcttctgtctgtgatcccaatggaggacagtgtcaatgtagaccgaatgtggtcgggcgcacctgcaatcggtgtgctccgggtaccttcggctttggcccctccggctgtaaaaggcggtttctgaagtcaatagtcatgcactctttcagactcacgcagccgctgtggcagggctccattgctgcagaaccaatgcttcctagttag

SEQ ID NO: 127293 - DNA, 2553 bp, Artificial Sequence
  derived and/or modified sequence
atgggactgctacaactgctagccttttctttcctggccctatgtcgggcccgtgtcagagcgcaggaaccggaattttcctatgggtgcgccgaagggagctgttacccagcaaccggagatttactgatcggccgggcacagaaactcagcgtcactagcacctgcggtctccataagcctgagccatactgtatagtatctcatctgcaagaagacaagaagtgcttcatctgcaattcccaggatccctatcacgagacactcaatcctgacagccatctcatcgaaaacgttgttacgacattcgctccaaaccgactgaaaatctggtggcagtctgaaaatggcgttgagaacgtgaccatccaactggatctggaagctgaattccatttcacacaccttatcatgacgtttaaaacattccggccagccgctatgctgatagaacggtcctcagatttcggcaagacatggggggtctataggtactttgcttacgattgcgaggcatcctttcccggaatatccactggcccaatgaagaaggtcgacgatattatttgcgactcaagatacagtgatattgaacccagtaccgaaggcgaggttattttccgtgcattggatccagcgtttaagatagaggacccgtactcacctagaatccaaaatctgttaaaaattaccaatttgcgtatcaaattcgttaagctgcacactttgggagataatctcctcgatagtaggatggagatcagagaaaaatattattatgcggtatacgatatggtcgtccgaggaaattgtttctgctatggtcacgcttccgaatgcgctccagtcgacggctttaacgaggaggttgaaggtatggtccatggacactgtatgtgtaggcacaatacaaaaggtctgaactgcgagctctgtatggacttctaccacgatttaccttggagacctgctgaaggcagaaatagtaacgcatgtaagaagtgcaactgtaatgaacattcaatctcttgtcactttgatatggccgtctatttagctaccgggaatgtgtcaggcggcgtgtgcgacgattgtcagcacaataccatgggccggaattgcgagcagtgcaagcccttctactatcagcacccagagagggatatccgcgatcctaacttctgcgagcgatgcacctgcgaccccgccggaagccagaacgagggcatctgcgattcctatactgatttctcaactggactgatagccgggcaatgtagatgtaaactgaatgttgagggcgaacattgcgatgtgtgtaaagaaggtttctatgatctatcaagtgaggacccattcgggtgtaagtcttgcgcctgcaaccctctgggtaccattcctgggggcaacccctgtgactctgaaaccggccactgttattgcaaacgactagtaaccggccagcattgcgaccagtgtctgccagaacactggggcctgtccaatgatttagacggatgtcggccttgcgattgcgatctgggcggcgcactcaataacagttgtttcgccgaatctggccagtgttcttgcagacctcacatgatcggcagacagtgtaatgaggttgaaccaggctattacttcgccactctggaccactacctatacgaggccgaagaagcaaatctgggaccgggggtctcaattgtggagcgacagtacattcaggaccggatcccatcgtggacgggcgcagggtttgtgagagtcccagagggggcttatctagagttcttcatagataacataccctacagtatggaatacgacattctgattcgatacgagcctcagctgcctgaccactgggagaaagcagttataaccgttcaaaggcccggtagaattcccactagttccaggtgcggtaacacaattccagatgatgacaatcaggtggtttcacttagccccggttctcgttatgtggtcctaccacgccccgtatgcttcgagaagggcactaactatacggtgcgtttagagctccctcaatacactagcagcgactctgatgtggaatccccctacaccctgatcgattccctggttctcatgccgtattgcaaaagcctggatatttttaccgtaggaggctccggtgacggtgtcgtcacgaacagtgcgtgggagaccttccagagatatagatgtctcgagaactctagatcagtagtaaagacccccatgaccgatgtctgccgaaacattatattcagcatcagtgcacttctgcaccagaccggactagcttgtgaatgcgatccccaaggatcactcagcagtgtctgtgaccctaatggcggccaatgccagtgtcggcccaacgtcgtaggtcgaacttgcaaccgttgtgcgccgggaacatttggatttggaccttccggttgtaaaaggagattcctgaaatccatcgtcatgcactctttcagactgacacaaccattgtggcaaggatccattgctgctgaacccatgctgccttcatag

SEQ ID NO: 127294 - DNA, 276 bp, Artificial Sequence
  derived and/or modified sequence
atgggcctgctgcagctgctggccttcagcttcctggccctgtgcagagccagagtgagagcccaggagcccgagttcagctacggctgcgccgagggcagctgctaccccgccaccggcgacctgctgatcggcagagcccagaagctgagcgtgaccagcacctgcggcctgcacaagcccgagccctactgcatcgtgagccacctgcaggaggacaagaagtgcttcatctgcaacagccaggacccctaccacgagaccctgaacccctag

SEQ ID NO: 127295 - DNA, 2553 bp, Artificial Sequence
  derived and/or modified sequence
atgggcctgctgcagctgctggccttcagcttcctggccctgtgcagagccagagtgagagcccaggagcccgagttcagctacggctgcgccgagggcagctgctaccccgccaccggcgacctgctgatcggcagagcccagaagctgagcgtgaccagcacctgcggcctgcacaagcccgagccctactgcatcgtgagccacctgcaggaggacaagaagtgcttcatctgcaacagccaggacccctaccacgagaccctgaaccccgacagccacctgatcgagaacgtggtgaccaccttcgcccccaacagactgaagatctggtggcagagcgagaacggcgtggagaacgtgaccatccagctggacctggaggccgagttccacttcacccacctgatcatgaccttcaagaccttcagacccgccgccatgctgatcgagagaagcagcgacttcggcaagacctggggcgtgtacagatacttcgcctacgactgcgaggccagcttccccggcatcagcaccggccccatgaagaaggtggacgacatcatctgcgacagcagatacagcgacatcgagcccagcaccgagggcgaggtgatcttcagagccctggaccccgccttcaagatcgaggacccctacagccccagaatccagaacctgctgaagatcaccaacctgagaatcaagttcgtgaagctgcacaccctgggcgacaacctgctggacagcagaatggagatcagagagaagtactactacgccgtgtacgacatggtggtgagaggcaactgcttctgctacggccacgccagcgagtgcgcccccgtggacggcttcaacgaggaggtggagggcatggtgcacggccactgcatgtgcagacacaacaccaagggcctgaactgcgagctgtgcatggacttctaccacgacctgccctggagacccgccgagggcagaaacagcaacgcctgcaagaagtgcaactgcaacgagcacagcatcagctgccacttcgacatggccgtgtacctggccaccggcaacgtgagcggcggcgtgtgcgacgactgccagcacaacaccatgggcagaaactgcgagcagtgcaagcccttctactaccagcaccccgagagagacatcagagaccccaacttctgcgagagatgcacctgcgaccccgccggcagccagaacgagggcatctgcgacagctacaccgacttcagcaccggcctgatcgccggccagtgcagatgcaagctgaacgtggagggcgagcactgcgacgtgtgcaaggagggcttctacgacctgagcagcgaggaccccttcggctgcaagagctgcgcctgcaaccccctgggcaccatccccggcggcaacccctgcgacagcgagaccggccactgctactgcaagagactggtgaccggccagcactgcgaccagtgcctgcccgagcactggggcctgagcaacgacctggacggctgcagaccctgcgactgcgacctgggcggcgccctgaacaacagctgcttcgccgagagcggccagtgcagctgcagaccccacatgatcggcagacagtgcaacgaggtggagcccggctactacttcgccaccctggaccactacctgtacgaggccgaggaggccaacctgggccccggcgtgagcatcgtggagagacagtacatccaggacagaatccccagctggaccggcgccggcttcgtgagagtgcccgagggcgcctacctggagttcttcatcgacaacatcccctacagcatggagtacgacatcctgatcagatacgagccccagctgcccgaccactgggagaaggccgtgatcaccgtgcagagacccggcagaatccccaccagcagcagatgcggcaacaccatccccgacgacgacaaccaggtggtgagcctgagccccggcagcagatacgtggtgctgcccagacccgtgtgcttcgagaagggcaccaactacaccgtgagactggagctgccccagtacaccagcagcgacagcgacgtggagagcccctacaccctgatcgacagcctggtgctgatgccctactgcaagagcctggacatcttcaccgtgggcggcagcggcgacggcgtggtgaccaacagcgcctgggagaccttccagagatacagatgcctggagaacagcagaagcgtggtgaagacccccatgaccgacgtgtgcagaaacatcatcttcagcatcagcgccctgctgcaccagaccggcctggcctgcgagtgcgacccccagggcagcctgagcagcgtgtgcgaccccaacggcggccagtgccagtgcagacccaacgtggtgggcagaacctgcaacagatgcgcccccggcaccttcggcttcggccccagcggctgcaagagaagattcctgaagagcatcgtgatgcacagcttcagactgacccagcccctgtggcagggcagcatcgccgccgagcccatgctgcccagctag

SEQ ID NO: 127296 - RNA, 276 nt, Artificial Sequence
  derived and/or modified sequence
augggucugcuccaacugcuggccuucucauuucuugcuuugugcagagcucgcguucgcgcccaggagcccgaguucuccuacgguugugccgagggcucuuguuauccugcuacaggugaucuguuaaucggccgcgcccagaaacuuagugucaccagcacaugcggauuacacaaaccagaaccuuauugcauugugucucacuuacaagaggauaaaaagugcuucaucugcaacucccaggacccuuaccaugagacacugaacccuuag

SEQ ID NO: 127297 - protein, 1798 aa, Artificial Sequence
  derived and/or modified sequence
MELTSRERGRGQPLPWELRLGLLLSVLAATLAQAPAPDVPGCSRGSCYPATGDLLVGRADRLTASSTCGLNGPQPYCIVSHLQDEKKCFLCDSRRPFSARDNPHSHRIQNVVTSFAPQRRAAWWQSENGIPAVTIQLDLEAEFHFTHLIMTFKTFRPAAMLVERSADFGRTWHVYRYFSYDCGADFPGVPLAPPRHWDDVVCESRYSEIEPSTEGEVIYRVLDPAIPIPDPYSSRIQNLLKITNLRVNLTRLHTLGDNLLDPRREIREKYYYALYELVVRGNCFCYGHASECAPAPGAPAHAEGMVHGACICKHNTRGLNCEQCQDFYRDLPWRPAEDGHSHACRKCECHGHTHSCHFDMAVYLASGNVSGGVCDGCQHNTAGRHCELCRPFFYRDPTKDLRDPAVCRSCDCDPMGSQDGGRCDSHDDPALGLVSGQCRCKEHVVGTRCQQCRDGFFGLSISDRLGCRRCQCNARGTVPGSTPCDPNSGSCYCKRLVTGRGCDRCLPGHWGLSHDLLGCRPCDCDVGGALDPQCDEGTGQCHCRQHMVGRRCEQVQPGYFRPFLDHLIWEAEDTRGQVLDVVERLVTPGETPSWTGSGFVRLQEGQTLEFLVASVPKAMDYDLLLRLEPQVPEQWAELELIVQRPGPVPAHSLCGHLVPKDDRIQGTLQPHARYLIFPNPVCLEPGISYKLHLKLVRTGGSAQPETPYSGPGLLIDSLVLLPRVLVLEMFSGGDAAALERQATFERYQCHEEGLVPSKTSPSEACAPLLISLSTLIYNGALPCQCNPQGSLSSECNPHGGQCLCKPGVVGRRCDLCAPGYYGFGPTGCQACQCSHEGALSSLCEKTSGQCLCRTGAFGLRCDRCQRGQWGFPSCRPCVCNGHADECNTHTGACLGCRDHTGGEHCERCIAGFHGDPRLPYGGQCRPCPCPEGPGSQRHFATSCHQDEYSQQIVCHCRAGYTGLRCEACAPGHFGDPSRPGGRCQLCECSGNIDPMDPDACDPHTGQCLRCLHHTEGPHCAHCKPGFHGQAARQSCHRCTCNLLGTNPQQCPSPDQCHCDPSSGQCPCLPNVQGPSCDRCAPNFWNLTSGHGCQPCACHPSRARGPTCNEFTGQCHCRAGFGGRTCSECQELHWGDPGLQCHACDCDSRGIDTPQCHRFTGHCSCRPGVSGVRCDQCARGFSGIFPACHPCHACFGDWDRVVQDLAARTQRLEQRAQELQQTGVLGAFESSFWHMQEKLGIVQGIVGARNTSAASTAQLVEATEELRREIGEATEHLTQLEADLTDVQDENFNANHALSGLERDRLALNLTLRQLDQHLDLLKHSNFLGAYDSIRHAHSQSAEAERRANTSALAVPSPVSNSASARHRTEALMDAQKEDFNSKHMANQRALGKLSAHTHTLSLTDINELVCGAPGDAPCATSPCGGAGCRDEDGQPRCGGLSCNGAAATADLALGRARHTQAELQRALAEGGSILSRVAETRRQASEAQQRAQAALDKANASRGQVEQANQELQELIQSVKDFLNQEGADPDSIEMVATRVLELSIPASAEQIQHLAGAIAERVRSLADVDAILARTVGDVRRAEQLLQDARRARSWAEDEKQKAETVQAALEEAQRAQGIAQGAIRGAVADTRDTEQTLYQVQERMAGAERALSSAGERARQLDALLEALKLKRAGNSLAASTAEETAGSAQGRAQEAEQLLRGPLGDQYQTVKALAERKAQGVLAAQARAEQLRDEARDLLQAAQDKLQRLQELEGTYEENERALESKAAQLDGLEARMRSVLQAINLQVQIYNTCQ

SEQ ID NO: 127298 - protein, 380 aa, Artificial Sequence
  derived and/or modified sequence
MQEKLGIVQGIVGARNTSAASTAQLVEATEELRREIGEATEHLTQLEADLTDVQDENFNANHALSGLERDRLALNLTLRQLDQHLDLLKHSNFLGAYDSIRHAHSQSAEAERRANTSALAVPSPVSNSASARHRTEALMDAQKEDFNSKHMANQRALGKLSAHTHTLSLTDINELVCGAPGDAPCATSPCGGAGCRDEDGQPRCGGLSCNGAAATADLALGRARHTQAELQRALAEGGSILSRVAETRRQASEAQQRAQAALDKANASRGQVEQANQELQELIQSVKDFLNQEGADPDSIEMVATRVLELSIPASAEQIQHLAGAIAERVRSLADVDAILAQGIAQGAIRGAVADTRDTEQPVPGTGEDGRCRAGTELCR

SEQ ID NO: 127299 - DNA, 5397 bp, Artificial Sequence
  derived and/or modified sequence
atggagctgacctctagggagagaggtaggggtcaacccctgccctgggaactgaggcttggtctcctcctgagcgtgcttgcagctactttagcccaggcccctgcccctgacgtgcccggctgctcccgaggatcgtgctacccggccaccggggacctgttggtcggtagagccgaccggctgaccgcatctagtacttgcggactgaatggtccccagccttactgcattgtgagccatctacaggatgaaaaaaaatgttttctgtgcgactctcgcaggccattctcagctagagataatccccactcccataggattcagaatgtggtcacttccttcgctcctcagaggagggccgcctggtggcagtcagaaaacggtattcctgccgtaaccatacagctcgatctcgaggccgagttccattttactcacctcatcatgacctttaagacctttcggccggccgcaatgctggtggagcgcagcgccgatttcggacggacttggcacgtgtatagatacttctcctacgattgcggagccgacttcccaggcgtgcctctcgcaccccctcggcattgggatgacgtggtgtgcgagtcgagatactcagaaatcgaaccgtctaccgaaggcgaggtgatttaccgtgtgctcgatcctgctatcccaattccagatccctactcctcaagaattcagaaccttttgaagatcacaaatctccgagtgaatttaactagattgcataccctgggtgacaatctcctcgacccacggcgggagattagggagaagtattactatgccctctacgaattagtcgtcaggggcaactgcttctgttacgggcacgcatcagaatgcgcccccgctccaggagcaccggcgcacgcagagggtatggtccacggtgcttgtatctgtaaacacaacacaaggggtctcaactgcgagcaatgccaggatttttatcgggacttaccttggaggccggcagaggacggacattcccacgcctgtaggaagtgcgaatgtcacggccacactcattcctgccattttgacatggccgtttaccttgcctctggcaatgtgtccgggggggtgtgcgacggctgccagcacaacaccgccgggcgccactgcgaactgtgtagaccttttttctacagggatccaactaaggacctacgggatcctgcggtgtgccgatcttgcgactgtgaccccatgggctctcaggacggaggccgctgcgacagccacgacgatcctgcactggggctggtcagcggacagtgtagatgtaaagagcacgtggtgggaacccggtgccagcagtgtcgagatggatttttcgggctgagcatcagtgatcggctaggctgccggcgctgccagtgcaacgccaggggcaccgtgcctggcagcactccatgcgaccctaatagcgggtcctgctattgcaagaggctggtaacaggaagagggtgcgatcgctgcttacctgggcattggggactctcacatgatctgctcgggtgtcgaccctgcgattgcgatgtcggtggggccctagacccccagtgtgacgaaggtacagggcagtgccactgcagacaacatatggtcggccgccgttgtgagcaggtacagcctggttacttccggccctttttggaccacctgatatgggaggcagaagacactagaggacaggtacttgacgttgtggaacgcctcgtgacacctggcgagacgccatcatggacaggatcgggattcgtgcggctgcaggagggacagacattggagtttctagtggcctcagtgcccaaagccatggactacgaccttttactccgcctggagccacaggtgccagagcaatgggccgagttggagctcatcgtgcagagacccgggcccgtgcctgctcactctttgtgtgggcacttagttccaaaagatgatcggatccagggcacattacaaccccacgcccgctacctgattttcccaaacccagtttgtttggaaccgggtatttcctataaactgcacctgaagctggtccgcacaggtgggtccgcccagcctgagactccttattccggacctgggttgcttatcgattccttagtgctgttgccccgggtccttgtgttagaaatgttcagcggcggcgacgcagccgctttggagaggcaggcaacattcgagcgttaccaatgccacgaagaagggcttgtgccttcaaagacttcaccatcagaggcctgcgctcctctgttgatctccctttcaacgctgatttataacggcgcacttccttgccagtgcaaccctcaaggctctctttcttcggaatgtaatccacatggaggccagtgtctatgcaaacctggagttgtgggacgacgttgcgatctctgtgcccctggctactatggattcgggcctacaggttgccaagcctgtcagtgctcccacgaaggcgcattgtcttcactttgcgagaagacctccggccagtgtctatgtcgcaccggtgcctttggactacgctgcgatcggtgccagagaggccaatggggcttccctagctgtcggccatgtgtgtgcaacgggcacgcggatgaatgtaacacccataccggcgcatgtttgggttgccgtgaccataccgggggggagcactgcgagaggtgtattgccggtttccacggggatcctaggttgccctatggaggccagtgtaggccttgcccctgtcctgaaggtccaggatcacagcggcactttgcgacatcttgccaccaagacgagtattcacagcaaatcgtctgccactgccgtgcggggtacacagggctgcgttgcgaagcgtgcgccccaggccacttcggagatccctctaggccgggggggcgctgtcagctttgcgagtgcagtggcaacatcgaccctatggaccccgacgcgtgtgatccccatacaggccagtgtctccgctgcttgcaccacacagagggcccccactgtgcccactgcaaacccggattccatgggcaggccgcccgacagtcttgtcaccgctgcacctgcaatctcctcggaacgaacccacagcagtgtcccagcccagatcaatgccactgcgatcccagttctggacagtgcccttgcctgcccaacgtccagggcccatcctgtgatcggtgcgccccaaatttttggaatttaacatctgggcacggctgccagccatgcgcatgtcatccctcccgggctcgaggtccaacctgtaacgagttcactgggcagtgtcattgcagggctggctttgggggtcgaacctgtagtgaatgtcaagagctgcactggggggacccagggctacagtgccacgcctgcgactgtgattcccgaggaattgacactcctcagtgtcatcggttcacaggccattgctcatgtagacctggcgtgtccggcgtccgttgcgaccagtgcgcgcggggcttctctggcattttccctgcctgtcatccctgtcatgcctgtttcggagactgggatagggtcgtgcaggacctcgccgcgagaactcaaagacttgagcagcgggcccaggaactacagcaaactggggtcctcggcgcctttgaaagctctttttggcatatgcaggagaagctcggcattgtgcaagggattgtgggcgctcgcaacacttcggccgcctctactgctcagctggtcgaggccactgaggagttgcgaagagagatcggcgaagcaactgagcacctcacacagctagaagccgatttgacggacgtgcaggatgagaacttcaatgccaatcatgctctatcaggcctggagagggataggcttgccctgaacctcaccttgcgtcagttggaccaacacttggacctgctgaaacactccaactttttgggcgcctacgattcaatccgccacgcgcatagccagagtgccgaggcggagcgccgcgctaacacttccgccctggctgtgccatcacctgtgtccaatagtgcgtccgcacgccatcggaccgaggccttgatggatgctcagaaggaggatttcaactccaaacacatggctaatcagcgcgccctggggaagttgtccgcccacacacacaccctctccttaacagacataaatgagcttgtgtgcggcgcaccgggcgatgcaccctgcgctacctctccctgtgggggagcgggatgcagagatgaggacggccagccccggtgcggcggcctgtcgtgtaatggagctgccgccacggccgacctggctctagggcgggcacggcatacgcaggccgagctccagagagcccttgccgagggaggttcaatcctgagccgcgtggctgagacgcgaagacaggctagtgaagctcagcagcgggcgcaagctgcccttgataaggctaatgcctctcggggccaggttgaacaagcaaatcaggaactgcaagagcttatccagtctgttaaggatttcttaaaccaggagggggctgaccccgatagtatcgaaatggtggctactcgcgtactggagttatctatacccgcctccgccgaacagatccaacatctagctggcgccattgctgaaagggtcagatccctggccgatgtggacgccatactggccaggacagtcggcgatgtgaggagagccgaacagttactccaggacgccaggcgggccagatcctgggcagaagacgagaagcaaaaagccgaaactgtacaggcagccctcgaagaagcccagcgagctcagggcatcgcccagggagccatccgcggggccgttgctgacaccagggacacagaacagacactataccaagtgcaagagcggatggccggagctgagagagcactaagctccgccggggagcgcgcacgccaactggacgcactgctggaggctcttaagcttaagcgggccggaaattccctcgcagcctcaactgccgaagagacggccggaagcgcacagggtagggcccaagaagctgaacagctcctgcgcggccctttaggagatcagtaccaaaccgtcaaggcactggccgagcggaaagctcagggggtcctcgctgctcaggcccgggctgagcaactaagggacgaagctcgggatcttctgcaggccgcccaagacaagctgcagcgattgcaggagctggagggtacatacgaggagaacgaaagagccctggaatctaaagctgcccagcttgatggcttggaagcccggatgagatccgtgctgcaggcaataaacttgcaggtgcagatttacaacacctgccagtag

SEQ ID NO: 127300 - DNA, 1143 bp, Artificial Sequence
  derived and/or modified sequence
atgcaagaaaagctgggcatcgttcagggcatcgttggcgcacgcaatacgagcgccgccagcactgcccagctcgttgaggctactgaggagttgcgcagagaaattggcgaggccactgagcacttaacccaattggaggccgatctgaccgatgtgcaggacgaaaattttaacgcaaatcatgccctgagcgggctagagcgtgatagacttgcgctgaacctaacactgcggcagctggatcagcacctggatttactaaaacactccaactttttgggagcctacgacagcatccgacatgcacactcccagtcagcggaagccgagagacgggctaacacatctgcactcgccgttccatcacccgtatccaattcggcctcggctaggcatcggaccgaagctcttatggatgcccagaaagaagatttcaacagcaagcacatggcaaaccagcgggcacttggtaaactctccgctcatacccacaccctgtctctgaccgacatcaacgaactagtgtgcggagcccccggtgatgctccctgcgctacgtcgccttgtgggggcgcgggttgccgcgacgaagacggccaaccaaggtgcgggggcctctcctgcaacggcgccgccgccactgcggacttggccctcgggagagccaggcatacccaggcagagttgcagcgcgccctggccgagggcggttccattctctccagggtcgccgagaccaggcgacaggcctccgaggcccagcaaagggcccaggcagccctcgacaaagccaatgcctcaaggggacaagtcgaacaggccaaccaggaattgcaagagctgattcagagcgtcaaggacttcctcaatcaggaaggtgcagaccccgacagcatcgagatggtggcaactcgcgtcttggagctttccattccagcttctgctgaacaaattcagcacctcgccggggcgatagcagaaagggtgaggtctctcgctgacgtcgacgccatactcgcccagggcattgcgcagggagccatccggggggctgtagccgacacacgagataccgaacagccggtcccggggaccggcgaggacggccgatgccgggctggtaccgagttgtgtcgctag

SEQ ID NO: 127301 - DNA, 5397 bp, Artificial Sequence
  derived and/or modified sequence
atggagcttacctctagggaaaggggtagaggacaacctctgccctgggagctccgtttgggccttctgctcagtgtactggccgccacactggcccaggcaccagccccagatgtccccggctgtagcagaggcagctgctaccccgccactggggacctgctggtcggccgcgccgacaggttgactgcttcaagcacttgtggtttgaatggaccacaaccgtattgcattgtaagtcatctacaagatgagaaaaagtgttttttgtgcgattcgcgccggcctttcagcgctagggataaccctcattcccacagaatacagaacgtggtcacatcattcgccccccagagacgcgccgcatggtggcagtccgagaatggaatcccggccgttaccattcagctggacctggaggccgaattccatttcacacacttaatcatgacgtttaagaccttcagacccgctgccatgttggtggaacggtcagcagacttcgggaggacctggcacgtttatcgctatttttcctacgactgtggggcggattttcccggcgtcccgctggcccctcctcggcattgggacgacgtggtgtgcgagtcaagatactcagaaatcgagccaagcacagagggagaggtcatctatcgggtgctcgatccggcgatccccatccctgatccatacagctcacgaatccaaaacctgctgaaaatcactaatctgagagtaaatctgacccgcttacacacactgggggacaatctgttggacccaagaagggagatcagggagaaatattattacgccctttatgagctcgtggtgcggggtaactgcttttgctacggacatgcctctgagtgcgccccggcccccggagctcctgcccatgcggaagggatggtgcatggtgcttgcatatgcaagcacaacaccagggggttaaactgcgagcagtgtcaggatttttaccgggacttaccatggaggcctgccgaagacggccactcacacgcctgccggaagtgcgaatgtcatgggcacacacactcatgccatttcgatatggcagtgtatctggcctccggcaacgtgtccggcggagtgtgtgacggctgtcagcataatactgcgggtcggcattgtgagctgtgccgtccatttttttaccgtgacccaactaaggacctgagggatccagcagtgtgcagaagttgcgactgtgatcccatgggatctcaggatggcggaaggtgcgacagccacgacgacccagctttaggactcgtgtcaggtcagtgccgttgtaaggaacatgttgtcggaaccagatgccagcagtgcagggacggcttttttggactctcaatttctgataggctaggctgtaggcggtgccagtgtaatgcacgtggtactgtccccggcagcacaccttgcgaccccaactctgggagctgttattgtaaaagactggttaccggccgcggatgtgacaggtgtcttccaggacactgggggctgtcacatgaccttttaggatgcaggccttgcgattgcgatgtgggcggggccctcgatccccaatgcgacgagggaacggggcagtgtcactgtcggcagcatatggtaggcaggcgctgtgaacaagtccagcccggttactttcgccccttcctagaccacttaatctgggaggccgaggataccagaggccaggtgctggacgtggttgaacgcctggttacccccggcgagacaccttcttggacagggtctggctttgtccggctgcaggaggggcaaaccctggagtttcttgtagcctctgtgcccaaggccatggattatgatctcctcctgaggctggaaccacaggtgcccgaacagtgggcagagcttgaactaatcgtgcagaggccaggaccggtacccgcccacagtttatgtggtcatctggtgccaaaagacgacaggattcaggggactttgcagccccatgctcggtatctcatattcccgaatcccgtgtgtctggaacccggtatctcatataaactccacctgaagctggttcgcacaggaggatcagcacagccagagacaccatacagtgggccgggcctactcattgactccctcgttctcttgccccgggtactggtcctggaaatgttttcaggaggggacgcggcagccttggaaagacaagctacctttgaacggtatcagtgccacgaggagggtctcgtgccttccaaaacatcgccttcagaagcctgtgcccctctgctgattagcctaagtactctgatctataatggagcattgccatgccagtgcaatccgcagggaagcctttcaagtgagtgcaacccccacgggggccagtgtctgtgcaaacctggagtggttggacggaggtgcgacctgtgcgcacctggctactacggttttggaccaacagggtgtcaggcctgccagtgctcacatgaaggagctcttagctccctgtgcgaaaaaacttccgggcaatgtctgtgccggacaggggcttttggtctgaggtgtgatcggtgtcagaggggacagtgggggttcccgtcatgtagaccctgcgtctgtaacggtcacgccgacgagtgcaacactcatacaggcgcttgtctcggctgcagggaccataccggaggagagcactgtgagcggtgtatagccggattccatggtgaccctcggctcccctacgggggccagtgcaggccctgtccatgtcccgaagggcctggctcacaacgacattttgctacctcctgtcatcaagacgagtactcccagcagatcgtttgccactgtcgtgccggctataccgggctccgatgcgaagcgtgcgcacccggacattttggtgatccatccaggccaggtgggaggtgtcagttgtgcgagtgttcggggaacatagatccaatggaccctgacgcatgtgatccacacaccggacagtgtctgcgttgtttgcaccacaccgaaggaccgcactgtgcgcactgtaagcctggttttcacggacaagcggctcgccagagctgtcatcgttgcacatgcaatctgctcggtacaaatccccagcagtgtccctcacccgatcagtgccactgtgacccttcctcaggccagtgcccatgtctgccaaatgtgcaaggcccctcttgcgaccgctgtgctcctaatttctggaaccttacctcaggacatggctgtcagccctgtgcgtgtcaccctagccgggcaaggggacctacgtgcaatgaatttactggtcagtgccattgcagggctggctttggggggcgtacatgctctgagtgccaggaattgcactggggagaccctggtctccagtgccacgcctgcgactgtgatagccgtgggatcgacaccccgcagtgtcaccgcttcaccggccattgtagctgccgccccggcgtctccggcgtcaggtgtgatcagtgtgccagggggttctcgggcattttccccgcctgccatccctgtcatgcttgttttggggattgggatcgggtcgtccaggaccttgccgcgcggacacagcgcctagagcaaagggcccaggaactccagcaaaccggggtcctaggagcctttgaaagtagcttttggcatatgcaggagaagctggggatagtgcagggcattgtcggtgctagaaacacaagcgcagcgagcaccgctcagctggtagaggctaccgaggagctgcgtcgtgagatcggagaggcaaccgagcacctgactcaactggaggcagacctgaccgacgtgcaagacgagaacttcaacgcgaaccatgccctgagcggactcgaaagagatcgcctcgcccttaatttgaccctgaggcaactggaccagcacctggatcttcttaaacattctaacttccttggggcctatgacagcattcgccatgcccacagccagtccgccgaggcggagcgcagagcgaacacatcggctctggccgtgccctcaccagtcagtaactcagcttccgcgcgccatcgcaccgaggcattaatggacgctcaaaaagaagatttcaattctaagcatatggccaaccagagagccctggggaagttgagcgcccatacacataccctgtctctgactgacataaacgagttagtctgtggagccccgggggacgcaccatgtgccacatccccttgtgggggcgcaggctgccgagacgaggatgggcagcctagatgcgggggactcagttgtaacggggcggctgcaactgctgacctcgcactgggcagggcgcgtcatactcaagccgaactgcagagagccctggcggaaggaggatctattctgtccagagtcgccgagaccaggaggcaggcctctgaggcacaacaacgcgcgcaggcagccctagacaaagcaaatgcatctagagggcaggtcgagcaggccaaccaagagctgcaagagcttatacagtctgttaaggactttctcaatcaggaaggcgctgacccagactccattgagatggtggccacacgggtcctggagctcagtattcccgcgtctgccgaacagatccagcacctggcaggcgctatcgccgaacgtgtgcggagtctggccgacgttgatgcgatcctcgcgcgtactgttggcgacgtgcgccgcgctgaacagcttctgcaagatgccaggcgggctagaagttgggcagaagacgaaaaacagaaagccgagacagttcaggctgcccttgaggaggcacagagggctcagggaatcgcccagggtgcaatccggggagctgtggccgacacacgtgataccgaacagacactgtatcaggtgcaggagagaatggccggggcagagcgggcactgagctctgccggcgagcgcgcacgacagctcgacgccctgctcgaggcgcttaaactgaagagggcgggcaatagtctggctgccagtaccgctgaggaaaccgcaggaagtgcacagggacgtgcgcaggaagcggagcagctgctgagagggcctctgggtgaccagtaccaaaccgtgaaagcccttgctgaacgcaaagcacaaggagtcctggcagctcaggctcgcgctgagcagctccgggacgaagccagagacctcctgcaggccgctcaagacaaactgcagagattacaggagctggaagggacctacgaggaaaatgagcgcgccctggaatccaaggcagctcagcttgatgggttagaagctcgaatgcgatctgtcctgcaagcaattaatctccaggttcagatatacaacacctgccagtag

SEQ ID NO: 127302 - DNA, 5643 bp, Artificial Sequence
  derived and/or modified sequence
agggaccgctggacagacctgggaactgacagagggcctggagggaaacaggccaaagacccacaggcagagttgacacggaaccccaaagcaaggaggagggctcgggcccgagaccgttcacctccccttatccctgttcccctcttcaggatggagctgacctcaagggaaagagggaggggacagcctctgccctgggaacttcgactgggcctactgctaagcgtgctggctgccacactggcacaggcccctgccccggatgtgcctggctgttccaggggaagctgctaccccgccacgggcgacctgctggtgggccgagctgacagactgactgcctcatccacttgtggcctgaatggcccccagccctactgcatcgtcagtcacctgcaggacgaaaagaagtgcttcctttgtgactcccggcgccccttctctgctagagacaacccacacagccatcgcatccagaatgtagtcaccagctttgcaccacagcggcgggcagcctggtggcagtcagagaatggtatccctgcggtcaccatccagctggacctggaggctgagtttcatttcacacacctcattatgaccttcaagacatttcgccctgctgccatgctggtggaacgctcagcagactttggccgcacctggcatgtgtaccgatatttctcctatgactgtggggctgacttcccaggagtcccactagcacccccacggcactgggatgatgtagtctgtgagtcccgctactcagagattgagccatccactgaaggcgaggtcatctatcgtgtgctggaccctgccatccctatcccagacccctacagctcacggattcagaacctgttgaagatcaccaacctacgggtgaacctgactcgtctacacacgttgggagacaacctactcgacccacggagggagatccgagagaagtactactatgccctctatgagctggttgtacgtggcaactgcttctgctacggacacgcctcagagtgtgcacccgccccaggggcaccagcccatgctgagggcatggtgcacggagcttgcatctgcaaacacaacacacgtggcctcaactgcgagcagtgtcaggatttctatcgtgacctgccctggcgtccggctgaggacggccatagtcatgcctgtaggaagtgtgagtgccatgggcacacccacagctgccacttcgacatggccgtatacctggcatctggcaatgtgagtggaggtgtgtgtgatggatgtcagcataacacagctgggcgccactgtgagctctgtcggcccttcttctaccgtgacccaaccaaggacctgcgggatccggctgtgtgccgctcctgtgattgtgaccccatgggttctcaagacggtggtcgctgtgattcccatgatgaccctgcactgggactggtctccggccagtgtcgctgcaaagaacatgtggtgggcactcgctgccagcaatgccgtgatggcttctttgggctcagcatcagtgaccgtctgggctgccggcgatgtcaatgtaatgcacggggcacagtgcctgggagcactccttgtgaccccaacagtggatcctgttactgcaaacgtctagtgactggacgtggatgtgaccgctgcctgcctggccactggggcctgagccacgacctgctcggctgccgcccctgtgactgcgacgtgggtggtgctttggatccccagtgtgatgagggcacaggtcaatgccactgccgccagcacatggttgggcgacgctgtgagcaggtgcaacctggctacttccggcccttcctggaccacctaatttgggaggctgaggacacccgagggcaggtgctcgatgtggtggagcgcctggtgacccccggggaaactccatcctggactggctcaggcttcgtgcggctacaggaaggtcagaccctggagttcctggtggcctctgtgccgaaggctatggactatgacctgctgctgcgcttagagccccaggtccctgagcaatgggcagagttggaactgattgtgcagcgtccagggcctgtgcctgcccacagcctgtgtgggcatttggtgcccaaggatgatcgcatccaagggactctgcaaccacatgccaggtacttgatatttcctaatcctgtctgccttgagcctggtatctcctacaagctgcatctgaagctggtacggacagggggaagtgcccagcctgagactccctactctggacctggcctgctcattgactcgctggtgctgctgccccgtgtcctggtgctagagatgtttagtgggggtgatgctgctgccctggagcgccaggccacctttgaacgctaccaatgccatgaggagggtctggtgcccagcaagacttctccctctgaggcctgcgcacccctcctcatcagcctgtccaccctcatctacaatggtgccctgccatgtcagtgcaaccctcaaggttcactgagttctgagtgcaaccctcatggtggtcagtgcctgtgcaagcctggagtggttgggcgccgctgtgacctctgtgcccctggctactatggctttggccccacaggctgtcaagcctgccagtgcagccacgagggggcactcagcagtctctgtgaaaagaccagtgggcaatgtctctgtcgaactggtgcctttgggcttcgctgtgaccgctgccagcgtggccagtggggattccctagctgccggccatgtgtctgcaatgggcatgcagatgagtgcaacacccacacaggcgcttgcctgggctgccgtgatcacacagggggtgagcactgtgaaaggtgcattgctggtttccacggggacccacggctgccatatgggggccagtgccggccctgtccctgtcctgaaggccctgggagccaacggcactttgctacttcttgccaccaggatgaatattcccagcagattgtgtgccactgccgggcaggctatacggggctgcgatgtgaagcttgtgcccctgggcactttggggacccatcaaggccaggtggccggtgccaactgtgtgagtgcagtgggaacattgacccaatggatcctgatgcctgtgacccccacacggggcaatgcctgcgctgtttacaccacacagagggtccacactgtgcccactgcaagcctggcttccatgggcaggctgcccgacagagctgtcaccgctgcacatgcaacctgctgggcacaaatccgcagcagtgcccatctcctgaccagtgccactgtgatccaagcagtgggcagtgcccatgcctccccaatgtccagggccctagctgtgaccgctgtgcccccaacttctggaacctcaccagtggccatggttgccagccttgtgcctgccacccaagccgggccagaggccccacctgcaacgagttcacagggcagtgccactgccgtgccggctttggagggcggacttgttctgagtgccaagagctccactggggagaccctgggttgcagtgccatgcctgtgattgtgactctcgtggaatagatacacctcagtgtcaccgcttcacaggtcactgcagctgccgcccaggggtgtctggtgtgcgctgtgaccagtgtgcccgtggcttctcaggaatctttcctgcctgccatccctgccatgcatgcttcggggattgggaccgagtggtgcaggacttggcagcccgtacacagcgcctagagcagcgggcgcaggagttgcaacagacgggtgtgctgggtgcctttgagagcagcttctggcacatgcaggagaagctgggcattgtgcagggcatcgtaggtgcccgcaacacctcagccgcctccactgcacagcttgtggaggccacagaggagctgcggcgtgaaattggggaggccactgagcacctgactcagctcgaggcagacctgacagatgtgcaagatgagaacttcaatgccaaccatgcactaagtggtctggagcgagataggcttgcacttaatctcacactgcggcagctcgaccagcatcttgacttgctcaaacattcaaacttcctgggtgcctatgacagcatccggcatgcccatagccagtctgcagaggcagaacgtcgtgccaatacctcagccctggcagtacctagccctgtgagcaactcggcaagtgctcggcatcggacagaggcactgatggatgctcagaaggaggacttcaacagcaaacacatggccaaccagcgggcacttggcaagctctctgcccatacccacaccctgagcctgacagacataaatgagctggtgtgtggggcaccaggggatgcaccctgtgctacaagcccttgtgggggtgccggctgtcgagatgaggatgggcagccgcgctgtgggggcctcagctgcaatggggcagcggctacagcagacctagcactgggccgggcccggcacacacaggcagagctgcagcgggcactggcagaaggtggtagcatcctcagcagagtggctgagactcgtcggcaggcaagcgaggcacagcagcgggcccaggcagccctggacaaggctaatgcttccaggggacaggtggaacaggccaaccaggaacttcaagaacttatccagagtgtgaaggacttcctcaaccaggagggggctgatcctgatagcattgaaatggtggccacacgggtgctagagctctccatcccagcttcagctgagcagatccagcacctggcgggtgcgattgcagagcgagtccggagcctggcagatgtggatgcgatcctggcacgtactgtaggagatgtgcgtcgtgccgagcagctactgcaggatgcacggcgggcaaggagctgggctgaggatgagaaacagaaggcagagacagtacaggcagcactggaggaggcccagcgggcacagggtattgcccagggtgccatccggggggcagtggctgacacacgggacacagagcagaccctgtaccaggtacaggagaggatggcaggtgcagagcgggcactgagctctgcaggtgaaagggctcggcagttggatgctctcctggaggctctgaaattgaaacgggcaggaaatagtctggcagcctctacagcagaagaaacggcaggcagtgcccagggtcgtgcccaggaggctgagcagctgctacgcggtcctctgggtgatcagtaccagacggtgaaggccctagctgagcgcaaggcccaaggtgtgctggctgcacaggcaagggcagaacaactgcgggatgaggctcgggacctgttgcaagccgctcaggacaagctgcagcggctacaggaattggaaggcacctatgaggaaaatgagcgggcactggagagtaaggcagcccagttggacgggttggaggccaggatgcgcagcgtgcttcaagccatcaacttgcaggtgcagatctacaacacctgccagtgacccctgcccaaggcctaccccagttcctagcactgccccacatgcatgtctgcctatgcactgaagagctcttggcccggcagggcccccaat

SEQ ID NO: 127303 - DNA, 1356 bp, Artificial Sequence
  derived and/or modified sequence
atgcaggagaagctgggcattgtgcagggcatcgtaggtgcccgcaacacctcagccgcctccactgcacagcttgtggaggccacagaggagctgcggcgtgaaattggggaggccactgagcacctgactcagctcgaggcagacctgacagatgtgcaagatgagaacttcaatgccaaccatgcactaagtggtctggagcgagataggcttgcacttaatctcacactgcggcagctcgaccagcatcttgacttgctcaaacattcaaacttcctgggtgcctatgacagcatccggcatgcccatagccagtctgcagaggcagaacgtcgtgccaatacctcagccctggcagtacctagccctgtgagcaactcggcaagtgctcggcatcggacagaggcactgatggatgctcagaaggaggacttcaacagcaaacacatggccaaccagcgggcacttggcaagctctctgcccatacccacaccctgagcctgacagacataaatgagctggtgtgtggggcaccaggggatgcaccctgtgctacaagcccttgtgggggtgccggctgtcgagatgaggatgggcagccgcgctgtgggggcctcagctgcaatggggcagcggctacagcagacctagcactgggccgggcccggcacacacaggcagagctgcagcgggcactggcagaaggtggtagcatcctcagcagagtggctgagactcgtcggcaggcaagcgaggcacagcagcgggcccaggcagccctggacaaggctaatgcttccaggggacaggtggaacaggccaaccaggaacttcaagaacttatccagagtgtgaaggacttcctcaaccaggagggggctgatcctgatagcattgaaatggtggccacacgggtgctagagctctccatcccagcttcagctgagcagatccagcacctggcgggtgcgattgcagagcgagtccggagcctggcagatgtggatgcgatcctggcacagggtattgcccagggtgccatccggggggcagtggctgacacacgggacacagagcagcctgtaccaggtacaggagaggatggcaggtgcagagcgggcactgagctctgcaggtgaaagggctcggcagttggatgctctcctggaggctctgaaattgaaacgggcaggaaatagtctggcagcctctacagcagaagaaacggcaggcagtgcccagggtcgtgcccaggaggctgagcagctgctacgcggtcctctgggtgatcagtaccagacggtgaaggccctagctgagcgcaaggcccaaggtgtgctggctgcacaggc

SEQ ID NO: 127304 - DNA, 5674 bp, Artificial Sequence
  derived and/or modified sequence
ccgcccggtgttgcgctccttcccagaatccgctccggcctttccttcctgccgcgattcccaactttgctcaaagtcgctggactctaagctgtcggagggaccgctggacagacctgggaactgacagagggcctggagggaaacaggccaaagacccacaggatggagctgacctcaagggaaagagggaggggacagcctctgccctgggaacttcgactgggcctactgctaagcgtgctggctgccacactggcacaggcccctgccccggatgtgcctggctgttccaggggaagctgctaccccgccacgggcgacctgctggtgggccgagctgacagactgactgcctcatccacttgtggcctgaatggcccccagccctactgcatcgtcagtcacctgcaggacgaaaagaagtgcttcctttgtgactcccggcgccccttctctgctagagacaacccacacagccatcgcatccagaatgtagtcaccagctttgcaccacagcggcgggcagcctggtggcagtcagagaatggtatccctgcggtcaccatccagctggacctggaggctgagtttcatttcacacacctcattatgaccttcaagacatttcgccctgctgccatgctggtggaacgctcagcagactttggccgcacctggcatgtgtaccgatatttctcctatgactgtggggctgacttcccaggagtcccactagcacccccacggcactgggatgatgtagtctgtgagtcccgctactcagagattgagccatccactgaaggcgaggtcatctatcgtgtgctggaccctgccatccctatcccagacccctacagctcacggattcagaacctgttgaagatcaccaacctacgggtgaacctgactcgtctacacacgttgggagacaacctactcgacccacggagggagatccgagagaagtactactatgccctctatgagctggttgtacgtggcaactgcttctgctacggacacgcctcagagtgtgcacccgccccaggggcaccagcccatgctgagggcatggtgcacggagcttgcatctgcaaacacaacacacgtggcctcaactgcgagcagtgtcaggatttctatcgtgacctgccctggcgtccggctgaggacggccatagtcatgcctgtaggaagtgtgagtgccatgggcacacccacagctgccacttcgacatggccgtatacctggcatctggcaatgtgagtggaggtgtgtgtgatggatgtcagcataacacagctgggcgccactgtgagctctgtcggcccttcttctaccgtgacccaaccaaggacctgcgggatccggctgtgtgccgctcctgtgattgtgaccccatgggttctcaagacggtggtcgctgtgattcccatgatgaccctgcactgggactggtctccggccagtgtcgctgcaaagaacatgtggtgggcactcgctgccagcaatgccgtgatggcttctttgggctcagcatcagtgaccgtctgggctgccggcgatgtcaatgtaatgcacggggcacagtgcctgggagcactccttgtgaccccaacagtggatcctgttactgcaaacgtctagtgactggacgtggatgtgaccgctgcctgcctggccactggggcctgagccacgacctgctcggctgccgcccctgtgactgcgacgtgggtggtgctttggatccccagtgtgatgagggcacaggtcaatgccactgccgccagcacatggttgggcgacgctgtgagcaggtgcaacctggctacttccggcccttcctggaccacctaatttgggaggctgaggacacccgagggcaggtgctcgatgtggtggagcgcctggtgacccccggggaaactccatcctggactggctcaggcttcgtgcggctacaggaaggtcagaccctggagttcctggtggcctctgtgccgaaggctatggactatgacctgctgctgcgcttagagccccaggtccctgagcaatgggcagagttggaactgattgtgcagcgtccagggcctgtgcctgcccacagcctgtgtgggcatttggtgcccaaggatgatcgcatccaagggactctgcaaccacatgccaggtacttgatatttcctaatcctgtctgccttgagcctggtatctcctacaagctgcatctgaagctggtacggacagggggaagtgcccagcctgagactccctactctggacctggcctgctcattgactcgctggtgctgctgccccgtgtcctggtgctagagatgtttagtgggggtgatgctgctgccctggagcgccaggccacctttgaacgctaccaatgccatgaggagggtctggtgcccagcaagacttctccctctgaggcctgcgcacccctcctcatcagcctgtccaccctcatctacaatggtgccctgccatgtcagtgcaaccctcaaggttcactgagttctgagtgcaaccctcatggtggtcagtgcctgtgcaagcctggagtggttgggcgccgctgtgacctctgtgcccctggctactatggctttggccccacaggctgtcaagcctgccagtgcagccacgagggggcactcagcagtctctgtgaaaagaccagtgggcaatgtctctgtcgaactggtgcctttgggcttcgctgtgaccgctgccagcgtggccagtggggattccctagctgccggccatgtgtctgcaatgggcatgcagatgagtgcaacacccacacaggcgcttgcctgggctgccgtgatcacacagggggtgagcactgtgaaaggtgcattgctggtttccacggggacccacggctgccatatgggggccagtgccggccctgtccctgtcctgaaggccctgggagccaacggcactttgctacttcttgccaccaggatgaatattcccagcagattgtgtgccactgccgggcaggctatacggggctgcgatgtgaagcttgtgcccctgggcactttggggacccatcaaggccaggtggccggtgccaactgtgtgagtgcagtgggaacattgacccaatggatcctgatgcctgtgacccccacacggggcaatgcctgcgctgtttacaccacacagagggtccacactgtgcccactgcaagcctggcttccatgggcaggctgcccgacagagctgtcaccgctgcacatgcaacctgctgggcacaaatccgcagcagtgcccatctcctgaccagtgccactgtgatccaagcagtgggcagtgcccatgcctccccaatgtccagggccctagctgtgaccgctgtgcccccaacttctggaacctcaccagtggccatggttgccagccttgtgcctgccacccaagccgggccagaggccccacctgcaacgagttcacagggcagtgccactgccgtgccggctttggagggcggacttgttctgagtgccaagagctccactggggagaccctgggttgcagtgccatgcctgtgattgtgactctcgtggaatagatacacctcagtgtcaccgcttcacaggtcactgcagctgccgcccaggggtgtctggtgtgcgctgtgaccagtgtgcccgtggcttctcaggaatctttcctgcctgccatccctgccatgcatgcttcggggattgggaccgagtggtgcaggacttggcagcccgtacacagcgcctagagcagcgggcgcaggagttgcaacagacgggtgtgctgggtgcctttgagagcagcttctggcacatgcaggagaagctgggcattgtgcagggcatcgtaggtgcccgcaacacctcagccgcctccactgcacagcttgtggaggccacagaggagctgcggcgtgaaattggggaggccactgagcacctgactcagctcgaggcagacctgacagatgtgcaagatgagaacttcaatgccaaccatgcactaagtggtctggagcgagataggcttgcacttaatctcacactgcggcagctcgaccagcatcttgacttgctcaaacattcaaacttcctgggtgcctatgacagcatccggcatgcccatagccagtctgcagaggcagaacgtcgtgccaatacctcagccctggcagtacctagccctgtgagcaactcggcaagtgctcggcatcggacagaggcactgatggatgctcagaaggaggacttcaacagcaaacacatggccaaccagcgggcacttggcaagctctctgcccatacccacaccctgagcctgacagacataaatgagctggtgtgtggggcaccaggggatgcaccctgtgctacaagcccttgtgggggtgccggctgtcgagatgaggatgggcagccgcgctgtgggggcctcagctgcaatggggcagcggctacagcagacctagcactgggccgggcccggcacacacaggcagagctgcagcgggcactggcagaaggtggtagcatcctcagcagagtggctgagactcgtcggcaggcaagcgaggcacagcagcgggcccaggcagccctggacaaggctaatgcttccaggggacaggtggaacaggccaaccaggaacttcaagaacttatccagagtgtgaaggacttcctcaaccaggagggggctgatcctgatagcattgaaatggtggccacacgggtgctagagctctccatcccagcttcagctgagcagatccagcacctggcgggtgcgattgcagagcgagtccggagcctggcagatgtggatgcgatcctggcacgtactgtaggagatgtgcgtcgtgccgagcagctactgcaggatgcacggcgggcaaggagctgggctgaggatgagaaacagaaggcagagacagtacaggcagcactggaggaggcccagcgggcacagggtattgcccagggtgccatccggggggcagtggctgacacacgggacacagagcagaccctgtaccaggtacaggagaggatggcaggtgcagagcgggcactgagctctgcaggtgaaagggctcggcagttggatgctctcctggaggctctgaaattgaaacgggcaggaaatagtctggcagcctctacagcagaagaaacggcaggcagtgcccagggtcgtgcccaggaggctgagcagctgctacgcggtcctctgggtgatcagtaccagacggtgaaggccctagctgagcgcaaggcccaaggtgtgctggctgcacaggcaagggcagaacaactgcgggatgaggctcgggacctgttgcaagccgctcaggacaagctgcagcggctacaggaattggaaggcacctatgaggaaaatgagcgggcactggagagtaaggcagcccagttggacgggttggaggccaggatgcgcagcgtgcttcaagccatcaacttgcaggtgcagatctacaacacctgccagtgacccctgcccaaggcctaccccagttcctagcactgccccacatgcatgtctgcctatgcactgaagagctcttggcccggcagggcccccaataaaccagtgtgaaccccca

SEQ ID NO: 127305 - DNA, 5397 bp, Artificial Sequence
  derived and/or modified sequence
atggagctgaccagccgggagcggggccggggccagcccctgccctgggagctgcggctgggcctgctgctgtctgtgctggccgccaccctggcccaggccccagccccagatgtgcccggctgcagccggggcagctgctacccagccactggagacctgctggtgggccgggctgaccggctgacagccagcagcacctgtggcctgaatggcccccagccctactgcatcgtgagccacctgcaggatgagaagaagtgcttcctgtgtgacagccggcggcccttcagcgcccgggacaacccccacagccaccgcatccagaatgtggtgaccagctttgccccccagaggagagctgcctggtggcagagtgaaaatggcatcccagctgtgaccatccagctggacctggaggccgagttccacttcacccacctgatcatgaccttcaagaccttccggcctgctgccatgctggtggagaggtctgctgactttggccgcacctggcacgtgtaccgctacttctcctatgactgtggggctgacttccctggggtgcccctggccccacccaggcactgggatgatgtggtgtgtgagagccgctacagcgagattgagcccagcacagaaggagaggtgatctacagagtgctggaccctgccatccccatcccagacccctacagcagccgcatccagaacctgctgaagatcaccaacctgcgggtgaacctgacccggctgcacaccctgggggacaacctgctggacccccggcgggagatccgggagaagtactactatgccctgtatgagctggtggtgcggggcaactgcttctgctacggccacgcctctgaatgtgccccagcccctggggccccagcccacgccgagggcatggtgcatggagcctgcatctgcaagcacaacacccggggcctgaactgtgagcagtgccaggacttctacagagacctgccctggaggcctgcagaagatggccacagccacgcctgcaggaaatgtgagtgccacggccacacccacagctgccactttgacatggctgtgtacctggccagcggaaatgtgtctgggggcgtgtgtgatggctgccagcacaacacagctggccgccactgtgagctgtgccggcccttcttctacagagaccccaccaaggacctgcgggaccctgctgtgtgccgcagctgtgactgtgaccccatgggcagccaggacggcggccgctgtgacagccatgatgatcctgccctgggcctggtgtctggccagtgccgctgcaaggagcacgtggtgggcacccgctgccagcagtgcagagatggcttcttcggcctgagcatcagtgaccggctgggctgccgccgctgccagtgcaatgcccggggcaccgtgcccggcagcaccccctgtgaccccaacagcggcagctgctactgcaagaggctggtgacaggccggggctgtgaccgctgcctgcccggccactggggcctgagccatgacctgctgggctgccggccctgtgactgtgatgtgggcggggccctggacccccagtgtgatgagggcaccggccagtgccactgccggcagcacatggtgggccgccgctgtgagcaggtgcagcccggctacttccggcccttcctggaccacctgatctgggaggccgaggacacccggggccaggtgctggatgtggtggagcggctggtgaccccaggagagacccccagctggacaggcagcggctttgtgcggctgcaggagggccagaccctggagttcctggtggcctctgtgcccaaggccatggactatgacctgctgctgcggctggagccccaggtgcctgagcagtgggccgagctggagctgattgtgcagaggcctggccctgtgcctgcccacagcctgtgtggccacctggtgcccaaggatgaccgcatccagggcaccctgcagccccacgcccgctacctgatcttccccaaccctgtgtgcctggagcccggcatctcctacaagctgcacctgaagctggtgaggactggaggcagcgcccagcctgagaccccctacagcggccctggcctgctgattgacagcctggtgctgctgccccgggtgctggtgctggagatgttttctggaggagatgctgctgccctggagcggcaggccacctttgagcgctaccagtgccacgaggagggcctggtgcccagcaagaccagccccagcgaggcctgtgcccccctgctgatcagcctgagcaccctcatctacaacggggccctgccctgccagtgcaacccccagggcagcctgagcagcgagtgcaacccccacggcggccagtgcctgtgcaagccaggagtggtgggcagaagatgtgacctgtgtgcccctggctactacggcttcggccccaccggctgccaggcctgccagtgcagccatgaaggagccctgagcagcctgtgtgagaagaccagcggccagtgcctgtgcaggactggagccttcggcctgcgctgtgaccgctgccagaggggccagtggggcttccccagctgccggccctgtgtgtgcaatggacatgctgatgagtgcaacacccacactggagcctgcctgggctgccgggaccacactggaggagagcactgtgagcgctgcatcgccggcttccatggagacccccggctgccctacggcggccagtgccggccctgcccctgcccagagggccctggcagccagaggcactttgccaccagctgccaccaggatgagtacagccagcagatcgtgtgccactgccgggccggctacacaggcctgcgctgtgaggcctgtgcccctggccactttggagaccccagcaggcctgggggccgctgccagctgtgtgaatgttctggcaacatcgaccccatggaccctgatgcctgtgacccccacacaggccagtgcctgcgctgcctgcaccacacagagggcccccactgtgcccactgcaagccaggcttccacggccaggccgcccggcagagctgccaccgctgcacctgcaacctgctgggcaccaacccccagcagtgccccagcccagaccagtgccactgtgaccccagcagcggccagtgcccctgcctgcccaacgtgcagggccccagctgtgacagatgtgcccccaacttctggaacctgaccagcggccacggctgccagccctgtgcctgccaccccagccgggcccggggccccacctgcaatgagttcaccggccagtgccactgccgggccggctttggaggccgcacctgcagcgagtgccaggagctgcactggggagaccccggcctgcagtgccacgcctgtgactgtgacagccggggcatcgacaccccccagtgccaccgcttcaccggccactgcagctgcaggcctggggtgtctggagtgcgctgtgaccagtgtgcccggggcttcagcggcatcttccctgcctgccacccctgccacgcctgcttcggggactgggacagagtggtgcaggacctggccgcccggacccagaggctggagcagagggcccaggagctgcagcagacaggagtgctgggcgcctttgagagcagcttctggcacatgcaggagaagctgggcatcgtgcagggcatcgtgggcgccaggaacaccagcgctgccagcacagcccagctggtggaggccacagaggagctgcggcgggagattggagaggccacagagcacctgacccagctggaggccgacctgacagatgtgcaggatgagaacttcaatgccaaccacgccctgagcggcctggagcgggaccggctggccctgaacctgaccctgcggcagctggaccagcacctggacctgctgaagcacagcaacttcctgggcgcctatgacagcatcagacatgcccacagccagagcgctgaggccgagcggcgggccaacaccagcgccctggccgtgcccagccctgtgagcaacagcgccagcgcccggcacaggacagaggccctgatggatgcccagaaggaggacttcaacagcaagcacatggccaaccagagggccctgggcaagctgagcgcccacacccacaccctgagcctgacagacatcaatgagctggtgtgtggggcccctggagatgccccctgtgccaccagcccctgtggcggggccggctgcagagatgaagatggccagccccgctgtggcggcctgagctgcaatggagctgctgccacagctgacctggccctgggccgggcccggcacacccaggccgagctgcagagggccctggccgagggcggcagcatcctgagccgggtggccgagacccggcggcaggccagcgaggcccagcagagggcccaggccgccctggacaaggccaatgccagccggggccaggtggagcaggccaaccaggagctgcaggagctgatccagagcgtgaaggacttcctgaaccaggagggcgctgaccctgacagcattgagatggtggccaccagggtgctggagctgagcatcccagccagcgctgagcagatccagcacctggccggggccatcgccgagcgggtgcgcagcctggctgatgtggatgccatcctggccaggacagtgggagatgtgagaagagctgagcagctgctgcaggatgcccggcgggcccgctcctgggccgaggatgagaagcagaaggccgagaccgtgcaggccgccctggaggaggcccagagggcccagggcatcgcccagggcgccatcagaggagctgtggccgacacccgggacacagagcagaccctgtaccaggtgcaggagaggatggccggggctgagcgggccctgagcagcgctggggagcgggcccggcagctggatgccctgctggaggccctgaagctgaagagagctggcaacagcctggccgccagcacagctgaggagacagctggcagcgcccagggccgggcccaggaggccgagcagctgctgcggggccccctgggggaccagtaccagacagtgaaggccctggccgagaggaaggcccagggcgtgctggccgcccaggcccgggcagagcagctgagagatgaggcccgggacctgctgcaggccgcccaggacaagctgcagaggctgcaggagctggagggcacctatgaagaaaatgaaagagccctggagagcaaggccgcccagctggatggcctggaggccaggatgaggtctgtgctgcaggccatcaacctgcaggtgcagatctacaacacctgccagtag

SEQ ID NO: 127306 - DNA, 1143 bp, Artificial Sequence
  derived and/or modified sequence
atgcaggagaagctgggcatcgtgcagggcatcgtgggcgccaggaacaccagcgctgccagcacagcccagctggtggaggccacagaggagctgcggcgggagatcggggaggccacagagcacctgacccagctggaggccgacctgacagatgtgcaggatgagaacttcaatgccaaccacgccctgagcggcctggagcgggaccggctggccctgaacctgaccctgcggcagctggaccagcacctggacctgctgaagcacagcaacttcctgggcgcctatgacagcatcagacatgcccacagccagagcgctgaggccgagcggcgggccaacaccagcgccctggccgtgcccagccctgtgagcaacagcgccagcgcccggcacaggacagaggccctgatggatgcccagaaggaggacttcaacagcaagcacatggccaaccagagggccctgggcaagctgagcgcccacacccacaccctgagcctgacagacatcaatgagctggtgtgtggggcccctggagatgccccctgtgccaccagcccctgtggcggggccggctgcagagatgaagatggccagccccgctgtggcggcctgagctgcaatggagctgctgccacagctgacctggccctgggccgggcccggcacacccaggccgagctgcagagggccctggccgagggcggcagcatcctgagccgggtggccgagacccggcggcaggccagcgaggcccagcagagggcccaggccgccctggacaaggccaatgccagccggggccaggtggagcaggccaaccaggagctgcaggagctgatccagagcgtgaaggacttcctgaaccaggagggcgctgaccctgacagcattgagatggtggccaccagggtgctggagctgagcatcccagccagcgctgagcagatccagcacctggccggggccatcgccgagcgggtgcgcagcctggctgatgtggatgccatcctggcccagggcatcgcccagggcgccatcagaggagctgtggccgacacccgggacacagagcagcctgtgcccggcaccggggaggatggccgctgccgggccggcacagagctgtgcaggtag

SEQ ID NO: 127307 - DNA, 5397 bp, Artificial Sequence
  derived and/or modified sequence
atggagctgaccagccgggagcggggccggggccagcccctgccctgggagctgcggttgggcctgcttctgtccgtgctggccgccacactggctcaggcccccgcccctgacgtgccaggatgcagtagaggctcttgctaccctgccacaggcgatttactggtcggaagagctgatcgtctcactgctagctctacttgtgggctgaacggcccccaaccctactgcatcgtcagccatctacaggacgaaaagaagtgcttcctgtgcgactctcgtaggcccttctcagccagagataatccgcactcccatcgaatacagaatgtggtaacaagctttgcaccacagagaagagctgcctggtggcagagcgagaatggaatacccgccgtcaccattcagctcgaccttgaagctgagtttcacttcacccatttgatcatgaccttcaaaaccttcagacccgctgcaatgttagtggaacggtcagccgatttcggccggacttggcacgtgtatcggtatttttcgtacgactgtggggccgatttccctggcgtccctcttgcaccaccgaggcactgggacgacgtggtttgtgaatcgcgttatagtgagattgagccctcaacagagggtgaagtgatctatagggtgctcgaccctgcaattccgatcccagacccttactcttctcgcattcagaatctgttgaagattacaaacttgagagtgaatctgactaggctgcacacgctaggggataaccttctggatcctcggcgcgaaatacgcgagaagtactattacgctctgtacgagcttgtggtgcgcgggaattgtttctgttacggtcacgctagtgagtgtgctcccgccccaggggctcctgctcacgcagagggcatggtccacggcgcgtgtatctgcaagcacaacactagggggctgaattgtgagcaatgccaagatttctacagagatctcccttggcgccctgctgaagatggacatagccatgcatgcagaaagtgtgagtgccatgggcacacacactcctgtcacttcgatatggcggtttatctcgctagcggcaatgtcagcggaggagtctgcgacgggtgtcagcataataccgcgggacggcactgtgaactgtgccggccttttttttacagagatccaacaaaagacctgcgcgatccagccgtttgtcgcagttgtgactgtgaccccatgggctcccaggatggaggcaggtgtgactcccacgatgaccctgcgctcggtttggtctcagggcagtgccggtgcaaggagcacgtcgtcggaacgcgttgtcaacaatgtcgcgatggtttctttggtctgtctatctccgacagattgggctgccgcagatgtcagtgtaacgccagaggaacagtgccagggtcgacgccttgtgacccgaacagcggatcttgttactgtaagcgactggtgaccggccggggatgtgacaggtgcctccccggtcactggggactcagccacgacttgctgggctgccgcccctgcgactgcgatgtcggcggggccctggatccacagtgtgacgaggggactgggcagtgtcactgtcgtcagcacatggtgggtcggagatgcgagcaagttcaacccggctattttcgcccgttcttggatcatctgatctgggaagcagaggacacacgcggacaggtgctcgacgtcgtggagcgcctggtcacccccggagagaccccatcatggactggcagcggctttgtgcgcctccaagaaggtcaaactttggaattcctcgttgccagtgtgccaaaagcaatggattatgatctattgcttaggctagagccccaggtgcctgaacagtgggctgaattggagttaattgtacagcgccccgggcctgtgccagcgcattcgctgtgcgggcatcttgtgcccaaggatgatagaattcaaggcacactccagcctcatgcccgctatttaatcttccctaaccctgtgtgccttgaaccgggcattagttataaactgcacttaaaactagtgcgcaccggcggaagcgctcagcccgagaccccctattctggacctggcttattgattgactccctcgtcctgctgccacgtgtcttggtgttagagatgttctccgggggggacgctgctgcactagaacgccaggctacctttgaaagatatcaatgccatgaggagggcctcgtcccgtctaagaccagtcctagcgaagcctgcgcccccctgctgatctccctgtctacactgatatacaatggcgccctaccgtgccagtgcaatcctcaagggtctctgtcatcagaatgcaatccacacggcggccagtgtttgtgtaagcctggggtcgtgggaagaaggtgcgatctgtgcgcccctggttactatggctttggcccaacagggtgccaggcatgtcagtgtagccacgaaggtgcattaagctctctgtgcgaaaaaacctcggggcagtgcctgtgtcgtacaggagcctttggccttcggtgtgaccgctgccagcggggccagtggggcttcccttcttgtagaccttgcgtgtgtaatggccatgccgatgaatgcaacactcatacaggggcttgcctcgggtgccgggatcatacaggaggagagcactgcgaaagatgtatagctggcttccacggcgatcctagactgccctatggcggtcaatgccggccctgtccctgcccggaaggaccagggtcacagcggcacttcgcaacctcatgccatcaggacgagtactctcagcagattgtgtgccactgtcgggccgggtacacaggcctgaggtgtgaggcatgtgctccagggcacttcggggacccgtccaggccaggaggcaggtgccagctgtgcgaatgctcgggaaatattgatcccatggatccagatgcttgcgaccctcacacgggccagtgcctgcgatgtctccatcatactgaggggcctcactgtgcccattgtaaacctggcttccatggccaggctgcgcgccaaagctgccaccgctgtacgtgtaacctgctgggcaccaatccccaacagtgtcccagtcccgatcagtgccactgcgatccgtcatcgggccagtgtccatgccttccaaatgtacaaggcccaagctgcgaccgatgtgcccccaatttttggaatctcacttccgggcacgggtgtcagccatgcgcatgccaccctagccgtgctaggggccctacctgcaacgaattcaccgggcagtgccattgtcgagccggattcggtggacggacctgttctgagtgccaggaactgcactggggagatcctggactccagtgtcacgcatgcgattgcgattcgcgaggcatcgatacaccacagtgccacaggttcaccgggcactgctcctgtcggcctggagtaagtggcgtgaggtgcgaccaatgtgcgaggggcttcagcgggatttttccggcatgtcacccttgccacgcctgctttggtgactgggacagagttgttcaggacctggctgctaggactcagagacttgaacagcgtgcccaggagctgcagcagactggggtgctgggagcattcgaatcttctttttggcacatgcaagaaaagttggggattgtgcaaggtatagtgggagctcggaacactagcgccgctagcacagcccagctggtcgaagcaactgaagagctgcgcagggaaattggcgaggcaactgagcatttgacacagttagaggctgatctcacagatgtccaggacgagaattttaatgccaaccacgccctgagcggactggaaagagacaggttagccctgaatttaactctgcgccaactggaccagcacctggatctgctgaagcactcaaactttctcggcgcctacgactctatccgtcatgctcattcccagtctgcagaggccgagagaagggcgaatacatcagcgctggccgttccatcccccgtgagcaatagtgcctcagcaagacatagaacagaagccttgatggacgcccaaaaagaggattttaactctaaacacatggctaatcagcgggccctcgggaaattaagcgctcacacacacaccctgtccctcactgacattaacgaattagtgtgcggggccccaggggacgcaccttgcgccacgagcccgtgcgggggcgccgggtgcagagacgaggacggccagccccgatgcggaggtctttcctgcaatggcgctgccgcaactgccgatctggcactaggccgggcaaggcatactcaggcagagctccagcgagccttggccgaagggggatccatccttagccgagtggcagaaaccagaaggcaggcctccgaagcccaacaacgagcccaggcagccctcgacaaggcaaatgccagcagaggccaagttgaacaggcaaatcaggagctgcaagaactgatacaatctgtcaaggatttccttaaccaagagggtgcggatcctgattcaatcgagatggtcgccacgcgggtcctggagttgtccatcccagctagcgccgagcagatacagcatctggcaggcgccatcgcggagagagtgaggagtctggctgatgtggacgccatattggcccgcacagtcggagacgtccgaagggctgaacagttgttacaggatgctcggcgcgcccgcagttgggcagaagatgaaaagcagaaggctgaaacagtacaagccgctctcgaagaagcacagcgggcccagggcatagcccagggcgccatccgcggagcggtggccgatacgagagataccgagcagacactgtaccaggtgcaggagcggatggcaggggcagagagagcactgtcctccgcaggggaaagggctcgtcagctcgacgcactactggaagccctaaagctgaagagagctggcaattcgctggccgccagcacagccgaggagaccgcaggatccgcccaggggcgcgcacaggaggccgagcagctgctcagggggccactaggcgaccagtaccagaccgtgaaggccttggcagagcgcaaggcacagggggtgcttgcagcccaggcccgcgccgaacagttacgtgacgaggcccgagatttattgcaggccgcccaggataagctgcaacggctgcaggagcttgagggaacatatgaggagaatgaacgggcactggagagtaaggcagctcaactggatgggcttgaggcgcgaatgagatccgttctccaggccatcaacctgcaagtgcagatttataatacatgtcagtag

SEQ ID NO: 127308 - DNA, 1143 bp, Artificial Sequence
  derived and/or modified sequence
atgcaggagaagctgggcatcgtgcagggcatcgtgggcgcccggaacacttctgcagcgagcacggcgcagttggtggaagctaccgaagagctgcgtcgagagataggcgaggctaccgagcacctgacacagctggaagctgacctcactgatgtccaagacgagaacttcaacgcaaatcatgctctgtccggactggagagggataggctcgctctcaatctcaccctccggcaactggatcaacacttggatttgctgaaacacagtaactttctcggcgcatacgattctatcaggcacgcgcactcacaatccgccgaggccgagcgaagagccaatactagtgctctggcagtaccttctcccgtgagcaacagcgcgtctgctagacaccggaccgaggcactcatggacgcccagaaggaggacttcaattctaagcatatggccaatcaaagagcattgggtaaacttagtgctcacactcatacactcagcctgacagatattaatgagctcgtgtgtggcgcacctggcgatgccccatgcgccacgtccccctgtggaggggccgggtgcagggacgaagacgggcagccacggtgcgggggccttagctgtaacggggcagccgcgacagcagatcttgccctgggaagagcccgtcacactcaagccgagctgcagcgggccctggccgaagggggaagcatcctgagcagagtggccgaaacgcggcgtcaggcttcagaggctcaacagcgagcacaagcagcattggataaagcaaacgcgtctcggggtcaggtcgagcaggctaaccaggagctccaggagttgattcaatccgtgaaggatttcttaaaccaagagggcgcagatccagatagcatcgaaatggtggccacccgcgtactggagctgagcatacctgccagtgccgagcagattcagcatctagcaggcgcgatcgccgaaagagtgcgctccctggcagatgtggatgccatcttggctcaaggaattgcccagggcgcgattaggggagccgtggcagacacacgggataccgaacagcccgtgcccgggactggagaggacggacgatgcagagccggcacagagctttgtcggtag

SEQ ID NO: 127309 - DNA, 5397 bp, Artificial Sequence
  derived and/or modified sequence
atggagctgaccagccgggagcggggccggggccagcccctgccctgggaactccgcctgggcctgcttctctccgtactagcggcaaccctggcgcaggcccccgctcctgacgtgcctggttgctctaggggatcctgctatcctgccaccggcgacctactagtcggaagggctgacaggctcaccgcaagcagcacatgcggactgaacgggccacagccctattgtattgtgagtcatctgcaggacgagaagaagtgcttcctgtgcgactccaggcgaccattctcagcccgtgataatccccactcacatagaatccagaatgtggtgactagtttcgcccctcagcgtcgcgcagcctggtggcagagtgagaacggaatccctgcagttactatacagctggacctcgaggcggaatttcactttacgcatttgatcatgacatttaaaacctttaggcccgctgctatgttagtggagcgatccgctgatttcggaagaacgtggcacgtctatcgatattttagttatgactgcggcgcggattttcctggagtgccgcttgcaccaccccgtcactgggatgatgtcgtctgtgagtcgaggtactctgaaattgagcctagtacggagggagaggtgatttacagagttttggaccctgcgattccgatacctgacccatactcctctcggatacagaatctgttgaaaataaccaatttaagggttaatctaaccagactgcacacactgggagacaacctcttagatcctcgacgtgaaatcagggagaagtactactatgcactctatgaacttgtggtacgggggaactgtttctgctatggccacgcaagtgaatgtgctcccgcccctggggccccagctcacgccgaaggcatggtccatggcgcctgcatttgcaaacacaatacgcgaggtctgaattgcgaacaatgccaggatttctatagggatttaccatggcgtcccgcagaagacggacatagccacgcttgccgcaaatgcgagtgtcatggccacacacattcctgtcattttgacatggccgtttacctcgcgtcagggaatgtgtccggaggagtttgtgacgggtgccaacacaataccgctgggcgccattgtgagctgtgccgcccatttttttacagagacccgaccaaggatttgagggatcctgcagtgtgccgctcttgcgactgcgatcccatggggtcccaagatggtggtcggtgtgactctcatgatgaccccgctctcgggctcgtgagtggccaatgccgatgcaaggagcatgtagtgggtacacgatgccagcagtgtcgcgacggttttttcggcttgtccatcagtgacagactcggatgtcgccggtgtcagtgcaatgccagaggaactgttccaggcagtaccccatgcgacccgaacagcggcagctgctactgtaagcgcctcgttaccggacgcggctgtgatcggtgcctgcccggtcattggggcttgtctcacgatttactaggctgtagaccctgtgactgtgatgtgggaggagctctggacccccagtgtgatgaaggtactggccagtgccactgtaggcaacatatggttggccgacgctgtgagcaggtgcaacctggatacttccgccctttcttggaccacctcatctgggaggcagaagacacgagggggcaagtgctcgacgtggtggaacgacttgtgacccccggagagactccttcttggactgggtccggctttgtcagattgcaggaggggcagacgctggaattcttggtggcatctgttcctaaggccatggattacgacctgttattacggctggagccgcaggtgcctgaacagtgggctgagctcgaactgattgtacaacgacccggccccgtccccgctcacagcctctgtggccacctggtgcctaaggacgatcggatccagggtactctgcagccacatgctcgttaccttatcttccccaaccctgtgtgcctggagccggggatctcctacaaacttcacttgaaattggtgaggaccggcggaagtgcacagccagaaacaccctacagcgggcctggactgctgattgactctctggtactgctcccccgggtgctggttttagagatgtttagcggcggtgacgctgcggctctggaacggcaagctactttcgagcgataccaatgtcacgaggaaggcttggtcccctcgaagacctcaccaagcgaggcttgtgcaccgcttctaattagcctctcgaccttgatctataatggtgcgctcccatgtcaatgtaatcctcaaggtagccttagcagcgagtgtaacccccatggaggacaatgcctatgcaagccaggtgtcgtgggtaggcggtgtgatctgtgtgctcccgggtactacggctttggtccaactgggtgtcaggcttgtcagtgctcacacgaaggagcattgtcatcgctctgcgagaagacctccggccagtgcctctgtcgaacaggggccttcggcctgaggtgtgaccgatgccagaggggacagtggggcttccctagttgccgcccttgcgtgtgcaacggccatgcagacgagtgtaatacccacactggtgcttgcttgggatgtcgggaccacactggcggtgagcactgtgagagatgtattgccgggttccacggggatccaaggctcccatacgggggccaatgcaggccctgtccatgtcctgagggccctggttcccagcggcattttgcaacctcatgtcatcaggatgaatattcccagcagatcgtctgtcattgccgtgccgggtataccggcctgcggtgcgaggcctgtgccccggggcattttggcgatccttcccgacccggcggcagatgccagctgtgcgagtgttctgggaacatcgatcccatggaccccgatgcgtgtgacccacataccggacagtgcctgagatgtctgcatcacactgagggcccacactgcgctcattgcaagccaggctttcatgggcaggctgctaggcaaagttgccatagatgcacatgcaatctgctcggaactaatccacagcagtgtccaagccccgatcagtgccattgtgatcccagctcaggacagtgcccttgtctgccaaatgtgcagggtccctcctgcgaccgatgtgccccaaatttttggaacttgacctctggccacggatgtcagccttgcgcctgccatcccagtagggcccgcggtcccacatgcaatgagtttacaggccaatgccattgcagagcgggcttcggcggccgcacctgcagcgagtgtcaggagctccactggggggaccccggcctccagtgtcatgcttgcgattgtgacagtcgcggaatcgatacaccccaatgtcaccgcttcacggggcattgctcctgtcgacctggcgtctctggtgtgagatgtgatcagtgtgcccggggcttcagcggcatcttcccagcatgccacccctgtcacgcctgtttcggagactgggaccgtgtggtgcaggatctcgcagcccggacccagcgcctcgagcagcgggcacaggagttgcagcagaccggcgtcctgggcgccttcgagtcctccttctggcatatgcaagagaagctcggcatagtgcagggtatcgtaggagcccgcaatacttccgctgcatctactgcccaactggtggaagccacagaggagttacgcagggaaatcggcgaggccacagagcacctcacccagttggaggctgatctgaccgacgttcaggatgagaactttaacgcaaaccatgcgctgtccgggctcgagcgggacaggttggcgttgaacctgactctgagacagttggaccagcaccttgatctactgaagcacagcaactttttgggagcctacgactctatacgtcacgcgcattcccagagcgcagaagcagagcggagggcaaacacttcagcacttgccgtgccatctccggtgtccaactcagctagtgcacggcacaggacggaggcactgatggacgcacagaaagaagacttcaatagcaaacacatggctaaccagcgggcccttgggaagctgagcgcacatacacataccctctcacttacagacatcaacgaactggtgtgcggagctcctggcgacgctccgtgcgctacatctccgtgcggcggcgctggctgcagagacgaggatggacagccaaggtgtggcggccttagctgcaacggggctgccgccacagctgatctggccctaggccgcgctcggcacactcaggccgaattacaacgagctctggcagaagggggatctatcctgtctagagtggccgaaaccagaaggcaggccagcgaggcccagcaaagagctcaggcggcactggataaggctaacgcttctaggggacaggtggagcaagcaaaccaagaacttcaggaactgatccagagtgtcaaagactttttgaaccaggaaggtgccgatcctgattccatcgagatggtggcaaccagggtactggaactatcgatccctgctagcgctgagcagattcaacacctggctggcgcaatcgccgaacgggtacggtccctggccgacgtggacgctatcctggctaggacggtgggggatgtgcgtcgcgcagaacagttgctgcaggacgcaagacgagccaggtcttgggcagaggacgagaaacagaaagccgagacagtgcaggcggccttagaggaagcgcagcgggcacagggcattgcgcagggagccatccgtggagccgttgccgataccagagatacggagcagaccctctaccaggtccaagagcgtatggctggggccgaacgggccctgagttcggccggtgagcgggctcgccagttggacgccctgcttgaagcgttaaaactcaaaagagcaggcaattctctcgcagctagcacagccgaggaaaccgccggctcggcccaaggtcgggcacaggaagcagagcagctactcagggggcccctgggtgatcagtaccaaaccgtaaaagctctggctgaaaggaaggctcagggggtcctagcagctcaagccagggcagagcagctgagagatgaagccagggatctattgcaagctgctcaggacaagctgcagaggctccaagaacttgagggcacctacgaagaaaacgagagagccctggaaagtaaggcagcccagctggacgggctggaggcccggatgcgcagcgtacttcaggctatcaacctccaggtgcaaatctacaatacttgtcagtag

SEQ ID NO: 127310 - DNA, 5396 bp, Artificial Sequence
  derived and/or modified sequence
atggagctgaccagtcgggagaggggacgcggtcaacctctcccttgggagctccgcctggggctacttctgtcagtgcttgcagctactctcgcccaggccccagctcccgacgtgccaggatgcagcagaggaagttgctaccccgctaccggggatcttctggtggggcgagcagacagactcaccgcttcttccacgtgcggacttaacggccctcagccctattgtattgtgtcccacctccaggacgagaaaaagtgcttcctgtgcgactcaagacgaccattttctgctagggacaaccctcattcccacaggatccaaaatgtggtgacttcctttgcaccccagcgccgagccgcatggtggcaatcagaaaatggaatccctgccgttactatccagctggacctcgaagctgagttccatttcacacatttgatcatgacattcaaaacatttcggcctgccgctatgctggttgagaggtccgctgactttggacgtacttggcacgtataccgctactttagctacgattgtggtgccgatttccctggcgtccccctggcccctcctagacactgggacgatgtggtttgtgagtcccggtactctgagattgaaccatcgactgaaggagaagttatctaccgggtgctcgatcccgcaattccaattccggacccttacagtagcagaatccagaacctgttgaagataaccaaccttcgggtcaatctcaccagactgcacaccctcggcgataacctgctggaccctcgcagagaaatcagagagaagtactactacgccctttacgagcttgttgttcggggtaactgtttttgctacggccatgcaagcgagtgcgcccctgcgccaggggctccagcccatgctgaaggtatggttcacggggcatgtatctgcaagcataacacacgcggactgaactgcgagcagtgtcaagacttctacagagatctcccttggcgcccagccgaagatgggcacagtcacgcctgccgcaaatgtgaatgtcacggacacactcatagctgccattttgatatggccgtgtatctggcctccggcaacgtatctgggggagtatgtgacggctgtcaacacaatactgcaggccgtcattgtgaactctgccgaccattcttctacagggacccaactaaagatcttcgtgatcccgcagtttgcaggagctgcgattgtgaccctatggggtctcaggatggtggacgctgtgacagccacgacgacccggcactgggactagtgtctggccagtgtagatgtaaagagcacgtggtgggtactagatgccagcaatgtagggatggtttcttcggcctcagtattagtgaccggttaggatgccggcgttgccagtgtaatgcacgtggcacagtaccagggagtacaccctgtgaccccaattccggatcatgttattgcaagaggcttgtgaccgggaggggctgcgacagatgcttacctggacattgggggctcagccacgacttactgggctgcagaccatgtgattgtgacgttggcggagccttggatcctcagtgcgacgaaggcacaggccagtgtcactgtagacagcatatggtcggtcggcgttgtgagcaagtgcagcctggctacttccggcctttcctcgaccacttaatctgggaggcagaagatacacggggacaggtccttgatgttgtagaacggctcgtgacacccggagaaaccccatcttggactggcagtggcttcgtgcggttgcaagaaggccaaaccttggagttcctggtcgccagcgtaccaaaggcaatggattacgacctgttgctcagattagagccacaggtgcctgagcaatgggcagagcttgagctgatagtccagcgcccaggccctgtgcccgctcacagtctctgcgggcacctcgtgccaaaagatgatcgaatccagggtaccttgcagccacacgctcgctatctgatctttcctaatcctgtctgtttggagcccggaatttcctacaagttgcacttgaagctggtgcgcaccggtgggtcagctcagccagaaacaccttactccggaccaggactgcttatcgactccctggttctgctgcccagggtgctggtgctggaaatgtttagcgggggagacgccgctgccctggaacggcaggccaccttcgagagataccagtgccatgaagagggactcgtgcctagcaaaacctctccaagtgaggcctgtgctcccttgcttatctctctcagcaccctcatatacaacggagcgctcccgtgtcagtgtaacccacagggcagtctatcatccgagtgcaacccccacgggggacagtgtctgtgtaaaccaggcgttgttggacggcgatgcgatttatgcgctccagggtactatgggttcgggccaaccggctgtcaggcatgtcagtgcagtcatgagggggcactctcaagcctgtgcgaaaagacaagcggacaatgcctgtgtaggacaggtgccttcggattgcggtgcgatagatgtcagcgaggacagtggggctttccatcatgtagaccttgtgtgtgtaatggccacgctgatgaatgtaacacgcacactggggcatgtctcggttgccgagaccacactggcggtgagcactgcgaaagatgcatagccggattccatggagaccccaggctcccatacggtgggcagtgcagaccctgcccctgccccgaaggacccggtagtcagcgccattttgctacctcctgccaccaggacgaatattctcagcagatcgtgtgtcattgcagagctggctacacagggttgcgctgcgaagcctgtgctcccggacatttcggagacccctctagaccaggtggaaggtgtcagctgtgcgagtgtagcggcaacatcgatcccatggatcccgatgcttgtgatccacacacaggccagtgccttaggtgtttacaccatacggaggggcctcactgtgcgcattgtaaaccaggattccatggacaggccgctaggcagtcctgccacagatgcacttgtaatcttctgggaacgaacccacagcagtgtccgtcgccagaccagtgccactgtgaccccagctcaggccagtgcccctgtctgcctaatgtgcagggtccttcgtgtgacagatgcgcacccaatttttggaatctgaccagcgggcatgggtgccagccttgtgcctgccacccatccagagctcggggacccacctgtaatgaattcacaggccagtgccattgtcgcgcaggatttggaggtaggacctgtagcgagtgtcaggagttgcactggggcgaccccggtttgcaatgccatgcttgcgactgcgactctcgaggtattgacactccccagtgtcataggtttacaggacactgttcttgccgacctggagtgtctggagtgcgctgcgatcagtgcgccagaggcttctctggtatcttcccagcctgccacccatgccacgcttgctttggcgactgggatcgggtcgtgcaagacctggcagcccgaactcagagactggaacagcgggcacaggagttgcagcagactggagtgctaggcgctttcgaaagcagcttttggcacatgcaggaaaagctggggatagtgcagggcatagtgggcgctcgcaacacctctgcggcatccaccgcacagctggtagaagcaaccgaagaactccgacgcgagatcggtgaggccacagagcacctgactcagctagaggctgatctgacggacgtgcaagatgagaattttaatgcaaaccacgcactgagtggcctggagcgggatcggctcgcactaaacctgacgctcaggcagctggatcaacatttagacctgttgaaacacagtaattttctaggggcatacgactccattcgacatgcccatagccagagcgccgaggctgaacgtcgagcgaacactagcgcactggccgtgcccagcccagtcagtaattcagcctccgctcgacatcgcacagaggctctaatggatgcgcagaaagaagatttcaattctaaacatatggccaatcagcgcgcactggggaagctttctgcccatacacacaccttatcactgacagatatcaatgaactggtttgtggagcaccgggagacgccccttgcgcaacctccccatgtggcggagcgggatgtcgggatgaggatggccagccacggtgcgggggtctctcttgtaacggcgcagccgcaaccgcagacctggccctgggacgcgctcgacacactcaagcggaactgcagagggccctcgccgagggcggttctatattgtctcgggtcgctgagacccgcaggcaggcttctgaggcacaacagagggctcaggctgcgctcgataaagccaatgcatccagaggccaggtggagcaggctaatcaggagctgcaggagctgatacagtcagtcaaggatttccttaaccaagagggcgctgaccctgactccattgaaatggttgcaactcgggtactggagctgtcgattcccgcttccgcagagcagattcaacacctcgctggcgcaatcgcggagagggtacgtagtcttgcagatgtggatgccatcctcgccaggacggtaggtgacgtcagacgggcagagcagcttctgcaggatgcccgaagggccagaagctgggccgaggatgagaagcagaaggctgaaaccgtacaggcagcactggaagaggctcagcgcgcacagggcatagcgcagggcgcaataagaggagctgtcgccgacactcgtgacaccgaacaaaccttatatcaagtacaagaaagaatggccggagcagagcgcgctttgagttcagccggtgaaagagcgcgacagttagacgccttgttggaggctctgaaactcaagagggctggcaacagtctggccgctagcaccgctgaggaaactgccggatctgctcaaggtcgagcccaggaagcagagcagttactccggggacctttaggggaccagtatcagactgtcaaagcactggccgagaggaaagcgcaaggcgtactggccgctcaggcacgggcagaacagctgagagatgaggctagggacctgcttcaagccgctcaggacaagcttcagagactccaggaactggaggggacatatgaagagaatgagcgcgctctggaatccaaggcagcccagctagatggactagaagcgagaatgcggtctgttctgcaggcaataaatctgcaggtgcaaatttataatacttgccagta

SEQ ID NO: 127311 - DNA, 1143 bp, Artificial Sequence
  derived and/or modified sequence
atgcaggaaaaactggggattgtccaaggcattgttggggcacggaatacgtccgccgcttcaactgcgcagctggtcgaggctacagaagaattgcgcagagaaatcggtgaagcaacagagcacctgacgcagctagaggccgatttgaccgatgtgcaggacgaaaattttaacgcgaaccatgcacttagcggcctagaacgggatcgcctcgccctgaatctcactttgcgtcaactggaccagcatctggacttgctgaagcactcaaacttcctgggcgcatacgactctattcgtcacgcacattcccagagtgcggaagccgagcgaagagcaaacacttcagcacttgcagttccttctcccgttagtaacagcgcttcggctagacatcgcacagaagccctgatggatgctcagaaagaggacttcaattcgaagcacatggctaatcagcgcgcactaggcaagctttctgcacacactcacaccctgtccttaacagacattaacgagttggtctgcggcgcacctggcgacgcaccatgcgccaccagcccatgcggaggcgcagggtgtcgtgatgaggacggacaaccacgctgtgggggactcagctgtaacggagccgctgctaccgccgaccttgccctgggacgcgctaggcatacccaggccgagctgcaaagggcactcgcggagggaggctccattcttagcagagtggcggagaccaggagacaggcgtctgaggcccagcagagggctcaagctgcacttgataaggccaatgcttcccggggtcaagttgaacaggctaatcaggagctgcaggagcttatacagtccgtaaaggacttccttaatcaggagggcgctgatcctgactctattgagatggtcgcgacacgggtactcgagctgtctatcccagcctctgccgaacagatccagcatctggccggtgctatagctgagcgtgtcagaagcctggcagacgtggacgccattttagcccaaggaattgcccagggggctattagaggagcagtagccgacacccgagacacagaacagccagtgcccggaactggagaagacgggcgttgtagagcaggaactgagttgtgtagatag

SEQ ID NO: 127312 - DNA, 5396 bp, Artificial Sequence
  derived and/or modified sequence
atggagctgacatctagggagaggggacgtggccagcccctgccatgggaactccgcttggggttgttgctttctgtgctcgcagccaccctcgcccaggcacccgcaccagacgtgcctggatgtagccgcggtagctgttatccggcaacaggtgatctgcttgtgggacgggctgaccgactcacggcatcatccacctgcgggctaaacggaccgcagccctattgcatagtcagtcacctgcaggatgaaaaaaaatgtttcctgtgtgatagcaggcggccattcagcgcaagggataacccccatagccatagaattcaaaacgtggtcacatcctttgcaccgcaacggagagctgcttggtggcagagtgagaatggcattccagcagtcaccattcagttggatctcgaggcggagttccattttacccatctcataatgaccttcaagacatttagacctgccgctatgctggtggagaggagtgctgactttggaaggacctggcacgtctataggtattttagttacgattgcggcgctgattttcccggagtccctcttgcacctcctcgacattgggacgacgtcgtctgtgaaagtcgttattccgaaatcgagcccagcactgagggtgaagtcatctatagagtgctagatcccgctataccaatccccgacccatacagtagcagaatccaaaatttacttaagatcacaaatcttcgcgtgaaccttacacggttgcacacactgggcgataatctactggatcccaggagagaaatcagagagaagtactactatgcgctgtacgagttggttgtgagagggaattgcttttgttacggacatgcctcggaatgcgctcctgcaccgggtgcccctgcacacgcagagggaatggttcacggagcatgcatctgcaaacacaatacgcggggattgaactgcgagcagtgtcaggacttttatcgggatctaccgtggcgtcccgctgaagatgggcactcacatgcttgtcgtaagtgcgaatgtcatggccacactcactcctgtcactttgatatggcagtatacctggccagtgggaacgtgtctggcggtgtgtgcgacggctgtcaacacaacacggcagggaggcactgcgagctttgtcggccatttttctaccgcgatcctacgaaagatctgagagatccagcagtatgcaggtcttgcgactgtgaccctatggggagtcaggatgggggtcgctgtgatagccatgatgatcccgcactcggcctggtaagcggccagtgccgctgtaaggagcatgtggtggggacccggtgtcagcaatgccgcgatgggtttttcggtcttagcattagcgatcgcctgggctgccggagatgtcaatgtaacgcacggggtacagtgcctggtagcactccttgcgaccccaattccggctcctgttattgcaaaaggttggtgacagggcgtggctgcgatcggtgcttacccggtcactggggactctcacacgacctgctgggttgcagaccttgcgattgcgacgtcggcggagctctggaccctcagtgtgacgaagggacagggcaatgccactgtcgtcagcacatggtgggacgtcggtgcgagcaggttcaacctggctatttcagaccattcctcgaccacctgatatgggaagcagaggacaccaggggacaagtgctggatgtggtggaacgcctcgttacgccgggtgagacgccaagttggaccggctcaggtttcgttcgtctccaggaggggcaaaccctggaatttctagtggcctccgtgccaaaggccatggattatgatttattgctccgtctcgagccacaagtgcctgagcagtgggcagagctcgagctcatagtgcaaaggccaggtccagtgccagcacatagtctgtgcggacatctggtccccaaagacgaccgaatccagggaaccctccagccgcacgcaagataccttatcttcccaaatccagtgtgcctcgagccgggtatttcatataagctccatctgaagctggtgaggacgggaggatctgcacagccagaaactccgtattcaggcccaggcctgctgatcgactccctggtcttactccccagggtattagtcttagagatgttctctgggggagacgcagctgcgctcgaacgccaggctacttttgaacggtaccaatgtcacgaggaagggctcgtacccagtaagacatctccaagtgaagcgtgtgccccactcctcatcagcctgtccacgcttatctacaatggagccctgccttgtcagtgtaaccctcagggttccctgtcttcagagtgtaatccgcacggcggacaatgtctctgcaaaccaggggtagtggggcgaagatgcgacctgtgtgcacctggctactatgggtttggacctacaggctgccaggcttgccagtgctcccatgagggagcccttagcagcctgtgcgaaaaaacatcaggacaatgcctgtgtcgcacgggtgctttcggcctgagatgtgatagatgtcagcgagggcagtggggcttcccgtcttgccgcccatgcgtgtgtaatgggcacgcagacgaatgcaatacacatactggagcctgcctaggatgtagagatcatactggcggagagcattgtgaaaggtgcattgcaggctttcacggcgaccctaggctgccctatggcggacaatgcaggccatgcccatgtccagagggtcctggatcccagagacacttcgccacatcttgccaccaggatgaatactctcaacagatcgtgtgccactgcagagctggctataccggcctgaggtgtgaggcttgtgccccaggccatttcggggatccgagtaggccaggtgggaggtgccaactgtgcgaatgctccggcaacatcgatcctatggaccccgacgcctgtgatccccacacaggccaatgtctaagatgccttcatcacactgaggggcctcactgtgcccactgtaaacctggttttcatggacaggcagctcgacaatcttgtcacaggtgtacatgtaacctcctgggcaccaaccctcagcagtgtccatccccagaccagtgtcactgcgacccatccagcggacagtgtccatgtcttcccaacgtgcagggaccaagctgcgatagatgcgccccaaacttctggaatctaacatcgggacatgggtgtcagccttgcgcttgccacccaagccgagcacgcggaccaacatgtaatgagtttaccgggcaatgtcactgccgggcaggattcgggggaagaacctgttctgagtgtcaagaactgcactggggcgaccctgggttgcagtgccatgcatgtgactgtgatagtcggggaatcgacacacctcagtgccacagatttaccggccactgctcatgtcgaccaggagtctctggagttcgatgcgaccagtgtgcgagaggatttagcggcatattcccggcttgtcatccatgtcatgcttgcttcggcgactgggatagggtggtccaagacctcgccgctcgaacccagcggctggagcagagggcacaggagcttcagcaaaccggcgtgctgggtgcgttcgagtcctccttttggcatatgcaggagaagctgggtatcgtgcagggaattgttggcgcaaggaacaccagtgccgcaagcactgcccagctggttgaggccactgaggagttaagacgcgagattggagaggccaccgagcacctgacgcagctggaagccgacttgaccgatgtgcaggatgagaacttcaacgccaatcacgccttaagtggtctggagcgtgatcgactggccctcaacctgacacttaggcaactcgaccagcacctggacctgctgaaacattcaaacttcctcggagcatatgacagcatccggcacgctcactcccagtccgccgaagcggagcgtagagccaatacatctgcactggcagtgccctctcctgtatcaaattccgcttctgctaggcaccgaaccgaggccttgatggacgcgcagaaagaggacttcaatagcaagcacatggccaaccagagagcgctcgggaagttatccgcccacacccatactctgagcctcaccgacatcaacgagctggtgtgcggagctccaggtgatgcgccttgtgccactagtccctgtggcggagctggttgccgggacgaagatggccaaccccgttgtggcggattaagctgcaacggggctgcggcaactgctgatctcgcccttgggagagccaggcacactcaggccgagctccagcgagccttggccgaaggagggagtatcttgagcagggtggcagagacccgcaggcaagcatcggaagcacagcagcgtgcccaggctgcactcgataaggccaatgcaagtcgcggacaggtcgaacaagccaaccaggaactgcaagaactcattcagtctgtcaaggattttcttaaccaagagggggctgaccccgattcaatcgagatggtggccacaagggtactggaactgagcatcccggcttctgcagagcagattcagcatttggccggagctatagcagaacgggttcgctccctggcagacgtagacgcaatcctcgccaggaccgttggggacgtgagacgcgctgagcagctgctgcaggatgctaggcgagcacggtcttgggcggaggacgaaaagcagaaggccgaaactgtgcaggccgctttggaggaggcccagagagcgcaaggtatagctcagggggcaatccgcggagcagtggccgatactcgggacacagagcaaacgctttatcaggtgcaagagcgaatggccggtgctgaacgggctctgagctcagctggcgagcgagctcggcaactggacgcgctgctggaagccctgaaactcaaaagagccggtaatagcttggccgcttctaccgccgaagaaaccgcgggatccgcccaaggacgggcacaggaggcagagcagcttttgcgcggtcctctgggggaccagtaccaaacagtcaaagcgctcgccgagagaaaggcgcagggggtcctcgccgcacaggcccgtgcggagcaacttcgcgacgaggcgagagacctgctccaggccgctcaggacaaattgcagcgcctgcaggaactggaaggcacttatgaggaaaacgagcgtgccctggagtcgaaggctgcccagctggacggtcttgaggctcggatgcggtcagtactgcaagcgatcaatctgcaggtccagatttataacacctgccagta

SEQ ID NO: 127313 - DNA, 5397 bp, Artificial Sequence
  derived and/or modified sequence
atggagctgaccagcagagagagaggcagaggccagcccctgccctgggagctgagactgggcctgctgctgagcgtgctggccgccaccctggcccaggcccccgcccccgacgtgcccggctgcagcagaggcagctgctaccccgccaccggcgacctgctggtgggcagagccgacagactgaccgccagcagcacctgcggcctgaacggcccccagccctactgcatcgtgagccacctgcaggacgagaagaagtgcttcctgtgcgacagcagaagacccttcagcgccagagacaacccccacagccacagaatccagaacgtggtgaccagcttcgccccccagagaagagccgcctggtggcagagcgagaacggcatccccgccgtgaccatccagctggacctggaggccgagttccacttcacccacctgatcatgaccttcaagaccttcagacccgccgccatgctggtggagagaagcgccgacttcggcagaacctggcacgtgtacagatacttcagctacgactgcggcgccgacttccccggcgtgcccctggccccccccagacactgggacgacgtggtgtgcgagagcagatacagcgagatcgagcccagcaccgagggcgaggtgatctacagagtgctggaccccgccatccccatccccgacccctacagcagcagaatccagaacctgctgaagatcaccaacctgagagtgaacctgaccagactgcacaccctgggcgacaacctgctggaccccagaagagagatcagagagaagtactactacgccctgtacgagctggtggtgagaggcaactgcttctgctacggccacgccagcgagtgcgcccccgcccccggcgcccccgcccacgccgagggcatggtgcacggcgcctgcatctgcaagcacaacaccagaggcctgaactgcgagcagtgccaggacttctacagagacctgccctggagacccgccgaggacggccacagccacgcctgcagaaagtgcgagtgccacggccacacccacagctgccacttcgacatggccgtgtacctggccagcggcaacgtgagcggcggcgtgtgcgacggctgccagcacaacaccgccggcagacactgcgagctgtgcagacccttcttctacagagaccccaccaaggacctgagagaccccgccgtgtgcagaagctgcgactgcgaccccatgggcagccaggacggcggcagatgcgacagccacgacgaccccgccctgggcctggtgagcggccagtgcagatgcaaggagcacgtggtgggcaccagatgccagcagtgcagagacggcttcttcggcctgagcatcagcgacagactgggctgcagaagatgccagtgcaacgccagaggcaccgtgcccggcagcaccccctgcgaccccaacagcggcagctgctactgcaagagactggtgaccggcagaggctgcgacagatgcctgcccggccactggggcctgagccacgacctgctgggctgcagaccctgcgactgcgacgtgggcggcgccctggacccccagtgcgacgagggcaccggccagtgccactgcagacagcacatggtgggcagaagatgcgagcaggtgcagcccggctacttcagacccttcctggaccacctgatctgggaggccgaggacaccagaggccaggtgctggacgtggtggagagactggtgacccccggcgagacccccagctggaccggcagcggcttcgtgagactgcaggagggccagaccctggagttcctggtggccagcgtgcccaaggccatggactacgacctgctgctgagactggagccccaggtgcccgagcagtgggccgagctggagctgatcgtgcagagacccggccccgtgcccgcccacagcctgtgcggccacctggtgcccaaggacgacagaatccagggcaccctgcagccccacgccagatacctgatcttccccaaccccgtgtgcctggagcccggcatcagctacaagctgcacctgaagctggtgagaaccggcggcagcgcccagcccgagaccccctacagcggccccggcctgctgatcgacagcctggtgctgctgcccagagtgctggtgctggagatgttcagcggcggcgacgccgccgccctggagagacaggccaccttcgagagataccagtgccacgaggagggcctggtgcccagcaagaccagccccagcgaggcctgcgcccccctgctgatcagcctgagcaccctgatctacaacggcgccctgccctgccagtgcaacccccagggcagcctgagcagcgagtgcaacccccacggcggccagtgcctgtgcaagcccggcgtggtgggcagaagatgcgacctgtgcgcccccggctactacggcttcggccccaccggctgccaggcctgccagtgcagccacgagggcgccctgagcagcctgtgcgagaagaccagcggccagtgcctgtgcagaaccggcgccttcggcctgagatgcgacagatgccagagaggccagtggggcttccccagctgcagaccctgcgtgtgcaacggccacgccgacgagtgcaacacccacaccggcgcctgcctgggctgcagagaccacaccggcggcgagcactgcgagagatgcatcgccggcttccacggcgaccccagactgccctacggcggccagtgcagaccctgcccctgccccgagggccccggcagccagagacacttcgccaccagctgccaccaggacgagtacagccagcagatcgtgtgccactgcagagccggctacaccggcctgagatgcgaggcctgcgcccccggccacttcggcgaccccagcagacccggcggcagatgccagctgtgcgagtgcagcggcaacatcgaccccatggaccccgacgcctgcgacccccacaccggccagtgcctgagatgcctgcaccacaccgagggcccccactgcgcccactgcaagcccggcttccacggccaggccgccagacagagctgccacagatgcacctgcaacctgctgggcaccaacccccagcagtgccccagccccgaccagtgccactgcgaccccagcagcggccagtgcccctgcctgcccaacgtgcagggccccagctgcgacagatgcgcccccaacttctggaacctgaccagcggccacggctgccagccctgcgcctgccaccccagcagagccagaggccccacctgcaacgagttcaccggccagtgccactgcagagccggcttcggcggcagaacctgcagcgagtgccaggagctgcactggggcgaccccggcctgcagtgccacgcctgcgactgcgacagcagaggcatcgacaccccccagtgccacagattcaccggccactgcagctgcagacccggcgtgagcggcgtgagatgcgaccagtgcgccagaggcttcagcggcatcttccccgcctgccacccctgccacgcctgcttcggcgactgggacagagtggtgcaggacctggccgccagaacccagagactggagcagagagcccaggagctgcagcagaccggcgtgctgggcgccttcgagagcagcttctggcacatgcaggagaagctgggcatcgtgcagggcatcgtgggcgccagaaacaccagcgccgccagcaccgcccagctggtggaggccaccgaggagctgagaagagagatcggcgaggccaccgagcacctgacccagctggaggccgacctgaccgacgtgcaggacgagaacttcaacgccaaccacgccctgagcggcctggagagagacagactggccctgaacctgaccctgagacagctggaccagcacctggacctgctgaagcacagcaacttcctgggcgcctacgacagcatcagacacgcccacagccagagcgccgaggccgagagaagagccaacaccagcgccctggccgtgcccagccccgtgagcaacagcgccagcgccagacacagaaccgaggccctgatggacgcccagaaggaggacttcaacagcaagcacatggccaaccagagagccctgggcaagctgagcgcccacacccacaccctgagcctgaccgacatcaacgagctggtgtgcggcgcccccggcgacgccccctgcgccaccagcccctgcggcggcgccggctgcagagacgaggacggccagcccagatgcggcggcctgagctgcaacggcgccgccgccaccgccgacctggccctgggcagagccagacacacccaggccgagctgcagagagccctggccgagggcggcagcatcctgagcagagtggccgagaccagaagacaggccagcgaggcccagcagagagcccaggccgccctggacaaggccaacgccagcagaggccaggtggagcaggccaaccaggagctgcaggagctgatccagagcgtgaaggacttcctgaaccaggagggcgccgaccccgacagcatcgagatggtggccaccagagtgctggagctgagcatccccgccagcgccgagcagatccagcacctggccggcgccatcgccgagagagtgagaagcctggccgacgtggacgccatcctggccagaaccgtgggcgacgtgagaagagccgagcagctgctgcaggacgccagaagagccagaagctgggccgaggacgagaagcagaaggccgagaccgtgcaggccgccctggaggaggcccagagagcccagggcatcgcccagggcgccatcagaggcgccgtggccgacaccagagacaccgagcagaccctgtaccaggtgcaggagagaatggccggcgccgagagagccctgagcagcgccggcgagagagccagacagctggacgccctgctggaggccctgaagctgaagagagccggcaacagcctggccgccagcaccgccgaggagaccgccggcagcgcccagggcagagcccaggaggccgagcagctgctgagaggccccctgggcgaccagtaccagaccgtgaaggccctggccgagagaaaggcccagggcgtgctggccgcccaggccagagccgagcagctgagagacgaggccagagacctgctgcaggccgcccaggacaagctgcagagactgcaggagctggagggcacctacgaggagaacgagagagccctggagagcaaggccgcccagctggacggcctggaggccagaatgagaagcgtgctgcaggccatcaacctgcaggtgcagatctacaacacctgccagtag

SEQ ID NO: 127314 - DNA, 1143 bp, Artificial Sequence
  derived and/or modified sequence
atgcaggagaagctgggcatcgtgcagggcatcgtgggcgccagaaacaccagcgccgccagcaccgcccagctggtggaggccaccgaggagctgagaagagagatcggcgaggccaccgagcacctgacccagctggaggccgacctgaccgacgtgcaggacgagaacttcaacgccaaccacgccctgagcggcctggagagagacagactggccctgaacctgaccctgagacagctggaccagcacctggacctgctgaagcacagcaacttcctgggcgcctacgacagcatcagacacgcccacagccagagcgccgaggccgagagaagagccaacaccagcgccctggccgtgcccagccccgtgagcaacagcgccagcgccagacacagaaccgaggccctgatggacgcccagaaggaggacttcaacagcaagcacatggccaaccagagagccctgggcaagctgagcgcccacacccacaccctgagcctgaccgacatcaacgagctggtgtgcggcgcccccggcgacgccccctgcgccaccagcccctgcggcggcgccggctgcagagacgaggacggccagcccagatgcggcggcctgagctgcaacggcgccgccgccaccgccgacctggccctgggcagagccagacacacccaggccgagctgcagagagccctggccgagggcggcagcatcctgagcagagtggccgagaccagaagacaggccagcgaggcccagcagagagcccaggccgccctggacaaggccaacgccagcagaggccaggtggagcaggccaaccaggagctgcaggagctgatccagagcgtgaaggacttcctgaaccaggagggcgccgaccccgacagcatcgagatggtggccaccagagtgctggagctgagcatccccgccagcgccgagcagatccagcacctggccggcgccatcgccgagagagtgagaagcctggccgacgtggacgccatcctggcccagggcatcgcccagggcgccatcagaggcgccgtggccgacaccagagacaccgagcagcccgtgcccggcaccggcgaggacggcagatgcagagccggcaccgagctgtgcagatag

SEQ ID NO: 127315 - protein, 1609 aa, Artificial Sequence
  derived and/or modified sequence
MRGSHRAAPALRPRGRLWPVLAVLAAAAAAGCAQAAMDECTDEGGRPQRCMPEFVNAAFNVTVVATNTCGTPPEEYCVQTGVTGVTKSCHLCDAGQPHLQHGAAFLTDYNNQADTTWWQSQTMLAGVQYPSSINLTLHLGKAFDITYVRLKFHTSRPESFAIYKRTREDGPWIPYQYYSGSCENTYSKANRGFIRTGGDEQQALCTDEFSDISPLTGGNVAFSTLEGRPSAYNFDNSPVLQEWVTATDIRVTLNRLNTFGDEVFNDPKVLKSYYYAISDFAVGGRCKCNGHASECMKNEFDKLVCNCKHNTYGVDCEKCLPFFNDRPWRRATAESASECLPCDCNGRSQECYFDPELYRSTGHGGHCTNCQDNTDGAHCERCRENFFRLGNNEACSSCHCSPVGSLSTQCDSYGRCSCKPGVMGDKCDRCQPGFHSLTEAGCRPCSCDPSGSIDECNIETGRCVCKDNVEGFNCERCKPGFFNLESSNPRGCTPCFCFGHSSVCTNAVGYSVYSISSTFQIDEDGWRAEQRDGSEASLEWSSERQDIAVISDSYFPRYFIAPAKFLGKQVLSYGQNLSFSFRVDRRDTRLSAEDLVLEGAGLRVSVPLIAQGNSYPSETTVKYVFRLHEATDYPWRPALTPFEFQKLLNNLTSIKIRGTYSERSAGYLDDVTLASARPGPGVPATWVESCTCPVGYGGQFCEMCLSGYRRETPNLGPYSPCVLCACNGHSETCDPETGVCNCRDNTAGPHCEKCSDGYYGDSTAGTSSDCQPCPCPGGSSCAVVPKTKEVVCTNCPTGTTGKRCELCDDGYFGDPLGRNGPVRLCRLCQCSDNIDPNAVGNCNRLTGECLKCIYNTAGFYCDRCKDGFFGNPLAPNPADKCKACNCNLYGTMKQQSSCNPVTGQCECLPHVTGQDCGACDPGFYNLQSGQGCERCDCHALGSTNGQCDIRTGQCECQPGITGQHCERCEVNHFGFGPEGCKPCDCHPEGSLSLQCKDDGRCECREGFVGNRCDQCEENYFYNRSWPGCQECPACYRLVKDKVADHRVKLQELESLIANLGTGDEMVTDQAFEDRLKEAEREVMDLLREAQDVKDVDQNLMDRLQRVNNTLSSQISRLQNIRNTIEETGNLAEQARAHVENTERLIEIASRELEKAKVAAANVSVTQPESTGDPNNMTLLAEEARKLAERHKQEADDIVRVAKTANDTSTEAYNLLLRTLAGENQTAFEIEELNRKYEQAKNISQDLEKQAARVHEEAKRAGDKAVEIYASVAQLSPLDSETLENEANNIKMEAENLEQLIDQKLKDYEDLREDMRGKELEVKNLLEKGKTEQQTADQLLARADAAKALAEEAAKKGRDTLQEANDILNNLKDFDRRVNDNKTAAEEALRKIPAINQTITEANEKTREAQQALGSAAADATEAKNKAHEAERIASAVQKNATSTKAEAERTFAEVTDLDNEVNNMLKQLQEAEKELKRKQDDADQDMMMAGMASQAAQEAEINARKAKNSVTSLLSIINDLLEQLGQLDTVDLNKLNEIEGTLNKAKDEMKVSDLDRKVSDLENEAKKQEAAIMDYNRDIEEIMKDIRNLEDIRKTLPSGCFNTPSIEKP

SEQ ID NO: 127316 - DNA, 4830 bp, Artificial Sequence
  derived and/or modified sequence
atgcgcggcagtcatagagccgcgccagctctgcgtccacgtgggaggctgtggccggtgttagcagttctggcagcagctgcagctgctggctgcgcccaggctgcaatggacgaatgcactgacgaaggcggcaggcctcagcgttgcatgcccgaattcgtgaacgcggcatttaacgtgactgtggttgctacaaacacctgtgggacacctcctgaggagtactgtgtgcagaccggggtgaccggtgtgacaaagagttgccatctctgcgacgcaggtcaaccccaccttcagcacggcgcggcattcctcaccgactacaacaatcaggctgacactacttggtggcaaagtcagaccatgctggccggggtgcagtacccaagttcaatcaatcttaccctgcatctcgggaaggcttttgatatcacttacgtgcgcctgaaattccacacttcacggcctgaaagcttcgctatatataaacgcacaagggaggacggaccttggatcccttaccagtattatagtggctcttgtgagaatacatactctaaagccaatcgcgggttcatacggacggggggagacgagcagcaggcgctgtgcaccgatgagttttcagatatcagcccactaacaggaggcaacgtcgccttctccacgttagagggacggccatcagcctataacttcgacaattctccagtactacaggaatgggtgactgcaactgatattcgcgtgactctaaaccgtctgaacacctttggtgacgaggtatttaatgatcccaaggtccttaaatcctactactacgcaatcagtgacttcgctgttggcggtcgctgcaaatgcaatggtcacgctagcgaatgcatgaagaatgagtttgataagctggtctgtaattgtaaacacaatacttacggcgtggattgcgaaaaatgcctccccttttttaacgataggccatggcgcagggccactgcagagtccgcctccgagtgcctcccctgtgattgcaatggaagatcccaggaatgctatttcgaccccgaactgtataggagtacaggccacggaggacactgtaccaattgccaggataacaccgatggcgcccattgcgaaagatgcagagagaactttttcaggcttggaaataacgaggcctgctcgagttgccattgctcccctgtgggtagcctatccacacaatgtgattcctatggaagatgcagctgcaagccaggcgtgatgggagataagtgtgaccgatgtcagcctggcttccactctttaacagaggccggatgtaggccctgttcctgcgatccctcagggtccatagacgagtgtaatatagaaaccggccggtgcgtatgcaaagataacgtagaaggatttaattgcgagagatgtaaaccaggcttctttaacttggaaagttctaatcccagaggctgtaccccatgcttttgtttcggccattcttctgtgtgcaccaacgccgtgggatatagcgtctactctatttcctccaccttccagattgacgaggatgggtggcgggcagagcaaagagacggatcagaagcgtcactggagtggtcctcagagcggcaagacatcgcagtcatcagtgattcctattttccccgctatttcatcgcccccgctaaattcctcgggaagcaggtcctgtcctacggccagaatctgtcatttagtttccgcgtggaccgaagagatacaaggctcagcgccgaagatttggtattagaaggcgccggcctgagggtgagcgtgcctctgatcgcccagggaaactcatatccttctgagactaccgtgaagtacgtcttcaggctgcatgaggccacagactacccatggcgtccagctctgactccgttcgaattccagaagctcctaaacaacttaaccagcatcaagatccggggtacctacagcgagaggagtgccggctacctagatgacgtgaccctggcttccgctagacccggtcctggcgtccctgctacatgggtcgagtcatgcacttgtccagtcggatacggcggtcagttttgcgagatgtgccttagcggataccgccgggagacccccaacctgggcccatattcaccatgtgtactttgtgcctgcaatgggcactctgaaacctgcgatcccgaaactggagtatgcaactgtagagacaacacagctggaccccactgtgaaaaatgctctgacggctactatggtgattcaacagccggtacatcttcagattgtcagccgtgtccttgccctgggggaagctcttgtgctgttgtaccaaaaactaaggaggtggtttgtactaattgccccactggtactacgggaaagcgctgtgagctgtgtgacgatggctatttcggcgatcctctgggccggaatggtcccgtgaggctatgtcggctgtgtcagtgcagcgacaacattgatccaaatgctgtaggaaactgcaaccgcctgactggagaatgtctgaagtgcatttacaacacagccgggttttattgcgatcgatgtaaagatgggttctttggtaatccgctcgcaccaaatcctgcagataaatgtaaggcctgcaattgtaatctgtatggcaccatgaaacagcaatcatcctgtaatcctgttaccggacagtgcgaatgcctcccacacgtcaccggacaggactgcggggcttgcgaccctgggttctataatttacagtctgggcagggctgcgagcgctgcgactgtcatgctctgggctctacaaatggccagtgcgatattcgcactgggcaatgcgagtgccagccgggaatcactggccagcactgcgaacgatgcgaggttaaccacttcgggttcggccccgaagggtgcaaaccttgtgactgccacccagaaggctccctgagcttgcaatgcaaagatgatggccgttgcgagtgcagggaggggtttgtggggaatagatgcgaccagtgcgaagagaattacttctataatcgtagctggccagggtgccaggagtgtcctgcctgctaccgtttagtgaaagacaaggtggccgaccatcgggtgaaactgcaagagttggagagtcttattgctaacctcggcactggggacgagatggttactgaccaggcctttgaagatcggctgaaggaggccgagagggaagtgatggatcttctcagggaggctcaggatgttaaggatgttgatcagaacctcatggatcgcctgcagagagtgaacaacaccctttcatcacagattagtcgactacagaatatcagaaataccatagaggagacagggaatcttgctgagcaagctagggcgcatgtggaaaatacagaaaggttgatcgagatcgcgtctcgtgaactggaaaaggccaaagtggctgcagccaatgtttccgttacacagccggaatctaccggagatcctaataatatgacactccttgcggaggaggccagaaagctggctgaacgacataaacaggaggccgacgacattgtgagagtcgctaagactgccaatgacacgtccaccgaggcttacaacctcctactgagaacgctcgctggagaaaaccagacagcattcgaaatagaggagctgaacagaaagtacgaacaggcaaagaatatcagtcaggacctggaaaaacaggccgccagggtacacgaagaagccaagagggcaggcgacaaagcggtggagatttatgcctccgttgctcagctttctccgttggacagcgaaacactcgaaaacgaggctaataacattaagatggaagccgaaaatttggaacagctcatagatcagaaactgaaagactatgaagacctccgcgaggatatgagaggaaaagagctagaagtgaaaaatcttttagaaaaaggcaagactgagcagcagaccgctgaccagctgctggcaagagccgatgcagcgaaggcccttgccgaggaggcagccaagaaaggtagagacactctccaggaagcaaacgacatcctgaacaacctgaaggacttcgacaggcgcgtgaatgataacaaaaccgccgccgaggaggcgttgcgtaaaattccagctatcaatcaaacgatcacagaggccaatgaaaagacccgcgaagcacaacaggccctcggaagcgctgctgccgatgcaactgaagccaagaacaaggcccacgaagctgagcggattgccagcgctgtgcagaaaaacgcaactagtacaaaagccgaggccgagcgaacattcgccgaggtcactgacctcgataacgaggtgaataatatgctcaagcagcttcaggaagctgaaaaagaactgaagagaaagcaggacgacgcagatcaggatatgatgatggcggggatggccagccaggcagcccaagaagctgagattaacgcacggaaggctaagaattcggttacatccctgctgagcatcatcaacgacctcctggagcagcttggtcagttggacacagtcgacttgaataagttgaatgaaattgaaggcactttgaataaagcaaaggacgaaatgaaggtttccgatctcgatagaaaggtttcagacctggaaaatgaggccaagaagcaggaagcagccatcatggactataaccgggacattgaggagatcatgaaggatattcggaacctcgaggatatcagaaagacgctccctagcggatgcttcaacactccctccatcgagaaaccttag

SEQ ID NO: 127317 - DNA, 7887 bp, Artificial Sequence
  derived and/or modified sequence
gcaggctgctcccggggtaggtgagggaagcgcggaggcggcgcgcgggggcagtggtcggcgagcagcgcggtcctcgctaggggcgcccacccgtcagtctctccggcgcgagccgccgccaccgcccgcgccggagtcaggcccctgggcccccaggctcaagcagcgaagcggcctccgggggacgccgctaggcgagaggaacgcgccggtgcccttgccttcgccgtgacccagcgtgcgggcggcgggatgagagggagccatcgggccgcgccggccctgcggccccgggggcggctctggcccgtgctggccgtgctggcggcggccgccgcggcgggctgtgcccaggcagccatggacgagtgcacggacgagggcgggcggccgcagcgctgcatgcccgagttcgtcaacgccgccttcaacgtgactgtggtggccaccaacacgtgtgggactccgcccgaggaatactgtgtgcagaccggggtgaccggggtcaccaagtcctgtcacctgtgcgacgccgggcagccccacctgcagcacggggcagccttcctgaccgactacaacaaccaggccgacaccacctggtggcaaagccagaccatgctggccggggtgcagtaccccagctccatcaacctcacgctgcacctgggaaaagcttttgacatcacctatgtgcgtctcaagttccacaccagccgcccggagagctttgccatttacaagcgcacacgggaagacgggccctggattccttaccagtactacagtggttcctgtgagaacacctactccaaggcaaaccgcggcttcatcaggacaggaggggacgagcagcaggccttgtgtactgatgaattcagtgacatttctcccctcactgggggcaacgtggccttttctaccctggaaggaaggcccagcgcctataactttgacaatagccctgtgctgcaggaatgggtaactgccactgacatcagagtaactcttaatcgcctgaacacttttggagatgaagtgtttaacgatcccaaagttctcaagtcctattattatgccatctctgattttgctgtaggtggcagatgtaaatgtaatggacacgcaagcgagtgtatgaagaacgaatttgataagctggtgtgtaattgcaaacataacacatatggagtagactgtgaaaagtgtcttcctttcttcaatgaccggccgtggaggagggcaactgcggaaagtgccagtgaatgcctgccctgtgattgcaatggtcgatcccaggaatgctacttcgaccctgaactctatcgttccactggccatgggggccactgtaccaactgccaggataacacagatggcgcccactgtgagaggtgccgagagaacttcttccgccttggcaacaatgaagcctgctcttcatgccactgtagtcctgtgggctctctaagcacacagtgtgatagttacggcagatgcagctgtaagccaggagtgatgggggacaaatgtgaccgttgccagcctggattccattctctcactgaagcaggatgcaggccatgctcttgtgatccctctggcagcatagatgaatgtaatattgaaacaggaagatgtgtttgcaaagacaatgtcgaaggcttcaattgtgaaagatgcaaacctggattttttaatctggaatcatctaatcctcggggttgcacaccctgcttctgctttgggcattcttctgtctgtacaaacgctgttggctacagtgtttattctatctcctctacctttcagattgatgaggatgggtggcgtgcggaacagagagatggctctgaagcatctctcgagtggtcctctgagaggcaagatatcgccgtgatctcagacagctactttcctcggtacttcattgctcctgcaaagttcttgggcaagcaggtgttgagttatggtcagaacctctccttctcctttcgagtggacaggcgagatactcgcctctctgcagaagaccttgtgcttgagggagctggcttaagagtatctgtacccttgatcgctcagggcaattcctatccaagtgagaccactgtgaagtatgtcttcaggctccatgaagcaacagattacccttggaggcctgctcttaccccttttgaatttcagaagctcctaaacaacttgacctctatcaagatacgtgggacatacagtgagagaagtgctggatatttggatgatgtcaccctggcaagtgctcgtcctgggcctggagtccctgcaacttgggtggagtcctgcacctgtcctgtgggatatggagggcagttttgtgagatgtgcctctcaggttacagaagagaaactcctaatcttggaccatacagtccatgtgtgctttgcgcctgcaatggacacagcgagacctgtgatcctgagacaggtgtttgtaactgcagagacaatacggctggcccgcactgtgagaagtgcagtgatgggtactatggagattcaactgcaggcacctcctccgattgccaaccctgtccgtgtcctggaggttcaagttgtgctgttgttcccaagacaaaggaggtggtgtgcaccaactgtcctactggcaccactggtaagagatgtgagctctgtgatgatggctactttggagaccccctgggtagaaacggccctgtgagactttgccgcctgtgccagtgcagtgacaacatcgatcccaatgcagttggaaattgcaatcgcttgacgggagaatgcctgaagtgcatctataacactgctggcttctattgtgaccggtgcaaagacggattttttggaaatcccctggctcccaatccagcagacaaatgcaaagcctgcaattgcaatctgtatgggaccatgaagcagcagagcagctgtaaccccgtgacggggcagtgtgaatgtttgcctcacgtgactggccaggactgtggtgcttgtgaccctggattctacaatctgcagagtgggcaaggctgtgagaggtgtgactgccatgccttgggctccaccaatgggcagtgtgacatccgcaccggccagtgtgagtgccagcccggcatcactggtcagcactgtgagcgctgtgaggtcaaccactttgggtttggacctgaaggctgcaaaccctgtgactgtcatcctgagggatctctttcacttcagtgcaaagatgatggtcgctgtgaatgcagagaaggctttgtgggaaatcgctgtgaccagtgtgaagaaaactatttctacaatcggtcttggcctggctgccaggaatgtccagcttgttaccggctggtaaaggataaggttgctgatcatagagtgaagctccaggaattagagagtctcatagcaaaccttggaactggggatgagatggtgacagatcaagccttcgaggatagactaaaggaagcagagagggaagttatggacctccttcgtgaggcccaggatgtcaaagatgttgaccagaatttgatggatcgcctacagagagtgaataacactctgtccagccaaattagccgtttacagaatatccggaataccattgaagagactggaaacttggctgaacaagcgcgtgcccatgtagagaacacagagcggttgattgaaatcgcatccagagaacttgagaaagcaaaagtcgctgctgccaatgtgtcagtcactcagccagaatctacaggggacccaaacaacatgactcttttggcagaagaggctcgaaagcttgctgaacgtcataaacaggaagctgatgacattgttcgagtggcaaagacagccaatgatacgtcaactgaggcatacaacctgcttctgaggacactggcaggagaaaatcaaacagcatttgagattgaagagcttaataggaagtatgaacaagcgaagaacatctcacaggatctggaaaaacaagctgcccgagtacatgaggaggccaaaagggccggtgacaaagctgtggagatctatgccagcgtggctcagctgagccctttggactctgagacactggagaatgaagcaaataacataaagatggaagctgagaatctggaacaactgattgaccagaaattaaaagattatgaggacctcagagaagatatgagagggaaggaacttgaagtcaagaaccttctggagaaaggcaagactgaacagcagaccgcagaccaactcctagcccgagctgatgctgccaaggccctcgctgaagaagctgcaaagaagggacgggataccttacaagaagctaatgacattctcaacaacctgaaagattttgataggcgtgtgaacgataacaagacggccgcagaggaggcactaaggaagattcctgccatcaaccagaccatcactgaagccaatgaaaagaccagagaagcccagcaggccctgggcagtgctgcggcggatgccacagaggccaagaacaaggcccatgaggcggagaggatcgcgagcgctgtccaaaagaatgccaccagcaccaaggcagaagctgaaagaacttttgcagaagttacagatctggataatgaggtgaacaatatgttgaagcaactgcaggaagcagaaaaagagctaaagagaaaacaagatgacgctgaccaggacatgatgatggcagggatggcttcacaggctgctcaagaagccgagatcaatgccagaaaagccaaaaactctgttactagcctcctcagcattattaatgacctcttggagcagctggggcagctggatacagtggacctgaataagctaaacgagattgaaggcaccctaaacaaagccaaagatgaaatgaaggtcagcgatcttgataggaaagtgtctgacctggagaatgaagccaagaagcaggaggctgccatcatggactataaccgagatatcgaggagatcatgaaggacattcgcaatctggaggacatcaggaagaccttaccatctggctgcttcaacaccccgtccattgaaaagccctagtgtctttagggctggaaggcagcatccctctgacaggggggcagttgtgaggccacagagtgccttgacacaaagattacatttttcagacccccactcctctgctgctgtccatgactgtccttttgaaccaggaaaagtcacagagtttaaagagaagcaaattaaacatcctgaatcgggaacaaagggttttatctaataaagtgtctcttccattcacgttgctaccttacccacactttcccttctgatttgcgtgaggacgtggcatcctacgttactgtacagtggcataagcacatcgtgtgagcccatgtatgctggggtagagcaagtagccctcccctgtctcatcgataccagcagaacctcctcagtctcagtactcttgtttctatgaaggaaaagtttggctactaacagtagcattgtgatggccagtatatccagtccatggataaagaaaatgcatctgcatctcctacccctcttccttctaagcaaaaggaaataaacatcctgtgccaaaggtattggtcatttagaatgtcggtagccatccatcagtgcttttagttattatgagtgtaggacactgagccatccgtgggtcaggatgcaattatttataaaagtctccaggtgaacatggctgaagatttttctagtatattaataattgactaggaagatgaactttttttcagatctttgggcagctgataatttaaatctggatgggcagcttgcactcaccaatagaccaaaagacatcttttgatattcttataaatggaacttacacagaagaaatagggatatgataaccactaaaattttgttttcaaaatcaaactaattcttacagcttttttattagttagtcttggaactagtgttaagtatctggcagagaacagttaatccctaaggtcttgacaaaacagaagaaaaacaagcctcctcgtcctagtcttttctagcaaagggataaaacttagatggcagcttgtactgtcagaatcccgtgtatccatttgttcttctgttggagagatgagacatttgacccttagctccagttttcttctgatgtttccatcttccagaatccctcaaaaaacattgtttgccaaatcctggtggcaaatacttgcactcagtatttcacacagctgccaacgctatcgagttcctgcactttgtgatttaaatccactctaaaccttccctctaagtgtagagggaagacccttacgtggagtttcctagtgggcttctcaacttttgatcctcagctctgtggttttaagaccacagtgtgacagttccctgccacacacccccttcctcctaccaacccacctttgagattcatatatagcctttaacactatgcaactttgtactttgcgtagcaggggcggggtggggggaaagaaactattatctgacacactggtgctattaattatttcaaatttatatttttgtgtgaatgttttgtgttttgtttatcatgattatagaataaggaatttatgtaaatatacttagtcctatttctagaatgacactctgttcactttgctcaatttttcctcttcactggcacaatgtatctgaatacctccttccctcccttctagaattctttggattgtactccaaagaattgtgccttgtgtttgcagcatctccattctctaaaattaatataattgctttcctccacacccagccactgtaaagaggtaacttgggtcctcttccattgcagtcctgatgatcctaacctgcagcacggtggttttacaatgttccagagcaggaacgccaggttgacaagctatggtaggattaggaaagtttgctgaagaggatctttgacgccacagtgggactagccaggaatgagggagaaatgccctttctggcaattgttggagctggataggtaagttttataagggagtacattttgactgagcacttagggcatcaggaacagtgctacttactgatgggtagactgggagaggtggtgtaacttagttcttgatgatcccacttcctgtttccatctgcttgggatataccagagtttaccacaagtgttttgacgatatactcctgagctttcactctgctgcttctcccaggcctcttctactatggcaggagatgtggcgtgctgttgcaaagttttcacgtcattgtttcctggctagttcatttcattaagtggctacatcctaacatatgcatttggtcaaggttgcagaagaggactgaagattgactgccaagctagtttgggtgaagttcactccagcaagtctcaggccacaatggggtggtttggtttggtttccttttaactttctttttgttatttgcttttctcctccacctgtgtggtatattttttaagcagaattttattttttaaaataaaaggttctttacaagatgataccttaattacactcccgcaacacagccattattttattgtctagctccagttatctgtattttatgtaatgtaattgacaggatggctgctgcagaatgctggttgacacagggattattatactgctatttttccctgaatttttttcctttgaattccaactgtggaccttttatatgtgccttcactttagctgtttgccttaatctctacagccttgctctccggggtggttaataaaatgcaacacttggcatttttatgttttaagaaaaacagtattttatttataataaaatctgaatatttgtaacccttta

SEQ ID NO: 127318 - DNA, 4830 bp, Artificial Sequence
  derived and/or modified sequence
atgaggggcagccacagagctgccccagccctgcggccccggggccgcctgtggcctgtgctggccgtgctggccgctgctgctgctgctggctgtgcccaggccgccatggatgaatgtacagatgagggcggccggccccagcgctgcatgcctgagtttgtgaatgctgccttcaacgtgacagtggtggccaccaacacctgtggcaccccacctgaggagtactgtgtgcagacaggagtgactggagtgaccaagagctgccacctgtgtgatgctggccagccccacctgcagcacggggccgccttcctgacagactacaacaaccaggccgacaccacctggtggcagagccagaccatgctggccggcgtgcagtaccccagcagcatcaacctgaccctgcacctgggcaaggcctttgacatcacctacgtgcggctgaagttccacaccagcaggcctgagagctttgccatctacaagaggacccgggaggatggcccctggatcccctaccagtactacagcggcagctgtgagaacacctacagcaaggccaacagaggcttcatcagaactggaggagatgagcagcaggccctgtgcacagatgagttcagtgacatcagccccctgaccggcggcaatgtggccttcagcaccctggagggccggcccagcgcctacaactttgacaacagccctgtgctgcaggagtgggtgacagccacagacatccgggtgaccctgaaccggctgaacacctttggagatgaggtgttcaatgaccccaaggtgctgaagagctactactatgccatcagtgactttgctgtgggcggccgctgcaagtgcaatggacatgccagcgagtgcatgaagaatgaatttgacaagctggtgtgcaactgcaagcacaacacctacggcgtggactgtgagaagtgcctgcccttcttcaatgaccggccctggaggcgggccacagctgagagcgccagcgagtgcctgccctgtgactgcaatggccgcagccaggagtgctactttgatcctgagctgtaccgcagcactggacatggaggccactgcaccaactgccaggacaacacagatggagcccactgtgagcgctgccgggagaacttcttccggctgggcaacaatgaggcctgcagcagctgccactgcagccctgtgggcagcctgagcacccagtgtgacagctatggccgctgcagctgcaagccaggagtgatgggagacaagtgtgaccgctgccagcccggcttccacagcctgacagaggccggctgccggccctgcagctgtgaccccagcggcagcattgatgagtgcaacatcgagaccggccgctgtgtgtgcaaggacaacgtggagggcttcaactgtgagcgctgcaagccaggcttcttcaacctggagagcagcaacccccggggctgcaccccctgcttctgcttcggccacagctctgtgtgcaccaatgctgtgggctacagcgtgtacagcatcagcagcaccttccagattgatgaagatggctggagggctgagcagagagatggcagcgaggccagcctggagtggagcagcgagcggcaggacattgctgtgatcagtgacagctacttcccccgctacttcatcgccccagccaagttcctgggcaagcaggtgctgtcctatggccagaacctgtccttctccttccgggtggacagaagagacacccggctgtctgctgaggacctggtgctggagggcgccggcctgcgggtgtctgtgcccctgattgcccagggcaacagctaccccagcgagaccaccgtgaagtatgtgttccggctgcacgaggccacagactacccctggaggcctgccctgaccccatttgagttccagaagctgctgaacaacctgaccagcatcaagatccggggcacctacagcgagaggtctgctggctacctggatgatgtgaccctggccagcgcccggcccggccctggggtgcctgccacctgggtggagagctgcacctgccctgtgggctacggcggccagttctgtgagatgtgcctgagcggctacagaagagagacccccaacctgggcccctacagcccctgtgtgctgtgtgcctgcaatggccacagcgagacctgtgaccctgagactggagtgtgcaactgccgggacaacacagctggcccccactgtgagaagtgcagtgatggctactatggagacagcacagctggcaccagcagtgactgccagccctgcccctgccctgggggcagcagctgtgctgtggtgcccaagaccaaggaggtggtgtgcaccaactgccccaccggcaccaccgggaagagatgtgagctgtgtgatgatggctactttggagaccccctgggcagaaatggacctgtgcggctgtgccgcctgtgccagtgcagcgacaacatcgaccccaatgctgtgggcaactgcaaccggctgaccggggagtgcctgaagtgcatctacaacacagctggcttctactgtgaccgctgcaaggatggcttctttggaaaccccctggcccccaacccagctgacaagtgcaaggcctgcaactgcaacctgtatggcaccatgaagcagcagagcagctgcaaccctgtgacaggccagtgtgagtgcctgccccacgtgacaggccaggactgtggggcctgtgaccccggcttctacaacctgcagagcggccagggctgtgagcgctgtgactgccacgccctgggcagcaccaacggccagtgtgacatcagaacaggccagtgtgagtgccagcccggcatcaccggccagcactgtgagcgctgtgaggtgaaccactttggatttggacctgagggctgcaagccctgtgactgccaccctgagggcagcctgagcctgcagtgcaaggatgatggccgctgtgagtgccgggagggctttgtgggcaacagatgtgaccagtgtgaggagaactacttctacaacagatcctggccaggctgccaggagtgcccagcctgctaccgcctggtgaaggacaaggtggccgaccaccgggtgaagctgcaggagctggagagcctcatcgccaacctgggcactggagatgagatggtgacagaccaggcctttgaggaccggctgaaggaggccgagcgggaggtgatggacctgctgcgggaggcccaggatgtgaaggatgtggaccagaacctgatggaccggctgcagagggtgaacaacaccctgagcagccagatcagccggctgcagaacatccggaacaccatcgaggagactggaaacctggccgagcaggcccgggcccacgtggagaacacagagcggctgattgaaattgccagccgggagctggagaaggccaaggtggccgccgccaacgtgtctgtgacccagcctgagagcactggagaccccaacaacatgaccctgctggccgaggaggccaggaagctggccgagcggcacaagcaggaggctgatgacatcgtgcgggtggccaagacagccaatgacaccagcacagaggcctacaacctgctgctgcggaccctggccggggagaaccagacagcctttgaaattgaggagctgaacagaaaatatgagcaggccaagaacatcagccaggacctggagaagcaggccgcccgggtgcatgaggaggccaagagagctggggacaaggctgtggagatctatgcctctgtggcccagctgagccccctggacagcgagaccctggagaatgaggccaacaacatcaagatggaggccgagaacctggagcagctgattgaccagaagctgaaggactatgaggacctgcgggaggacatgaggggcaaggagctggaggtgaagaacctgctggagaagggcaagacagagcagcagacagctgaccagctgctggcccgggcagatgctgccaaggccctggccgaggaggccgccaagaagggccgggacaccctgcaggaggccaatgacatcctgaacaacctgaaggactttgacagaagagtgaatgacaacaagacagctgctgaggaggccctgaggaagatcccagccatcaaccagaccatcacagaggccaatgagaagacccgggaggcccagcaggccctgggcagcgctgctgctgatgccacagaggccaagaacaaggcccatgaagctgagcgcatcgccagcgctgtgcagaagaatgccaccagcaccaaggccgaggccgagaggacctttgctgaggtgacagacctggacaatgaggtgaacaacatgctgaagcagctgcaggaggccgagaaggagctgaagaggaagcaggatgatgctgaccaggacatgatgatggccggcatggccagccaggccgcccaggaggccgagatcaatgccaggaaggccaagaacagcgtgaccagcctgctgagcatcatcaatgacctgctggagcagctgggccagctggacacagtggacctgaacaagctgaatgaaattgagggcaccctgaacaaggccaaggatgagatgaaggtgtctgacctggacaggaaggtgtctgacctggagaatgaggccaagaagcaggaggccgccatcatggactacaacagagacatcgaggagatcatgaaggacatccggaacctggaggacatcaggaagaccctgcccagcggctgcttcaacacccccagcattgagaagccctag

SEQ ID NO: 127319 - DNA, 4830 bp, Artificial Sequence
  derived and/or modified sequence
atgcggggcagccaccgggccgcccccgccctgcggccccggggccgtctctggccagtccttgccgtccttgccgccgccgcagccgctggatgtgctcaggccgccatggatgaatgcactgacgagggaggtaggcctcagaggtgcatgcccgagtttgttaacgccgcatttaatgtaaccgtggtcgccacgaatacttgcggcactcctcctgaagaatattgcgtacagacaggcgtgaccggggtgaccaaatcctgccacctctgtgatgccggccaaccacatttgcagcacggcgccgcttttttgacagattataataaccaggcggatacaacctggtggcagtctcagactatgcttgccggtgtgcagtaccctagttctattaatctcactctgcatctgggaaaagccttcgatattacctacgtcaggctgaagttccatacctctcggcctgagtcatttgcaatctataagagaacaagagaagatgggccttggattccgtaccaatactattctgggtcctgcgaaaacacctactctaaagcgaatcgtggcttcattcgtacaggtggtgatgagcaacaggctttgtgtactgacgagtttagcgacattagccccctgaccggcggcaacgtcgctttttctacgctcgagggacgaccatctgcgtacaatttcgataatagtcccgtgttgcaggagtgggtcactgccacggatattcgggtaaccttaaataggctgaacacattcggcgacgaggtattcaacgaccctaaggtattgaagtcctactattatgccatttccgactttgccgtgggaggccgttgcaagtgcaatggacacgcttcagaatgtatgaagaacgaatttgacaaacttgtgtgtaactgtaaacacaatacgtatggggtggattgcgaaaagtgtctgccatttttcaacgacaggccttggcggagggcaaccgcagaaagcgccagcgagtgtcttccctgtgactgcaacggacgatctcaggaatgctattttgacccagaactgtatcgatccaccggtcatggaggacattgtacaaattgtcaggacaacacagacggtgcacattgtgaaagatgccgggaaaatttcttcagactgggcaataatgaagcttgctcaagctgtcactgttctcctgtcggatcacttagtacgcagtgcgactcctacgggaggtgcagctgtaagcctggtgtcatgggcgacaagtgtgaccgatgtcagccaggcttccactcccttaccgaagctggctgcagaccctgctcttgtgatccaagcggaagcattgacgagtgcaacatcgaaacaggtcggtgcgtgtgcaaggacaatgtagaaggatttaattgtgagcgctgcaagccgggttttttcaacctcgaaagctccaaccctcgcgggtgcacaccctgcttttgttttggccacagctccgtgtgtacgaacgccgtcggctacagcgtctactctatatcctctaccttccaaatcgatgaagacggatggcgcgctgaacagcgggatgggtcggaagccagtttagaatggagtagcgaacgccaagatatcgccgtgatatctgattcgtacttccccagatatttcatcgctcccgcgaaattcttggggaagcaggtgctttcttacggacagaatctgtcatttagctttcgagtcgaccggcgggatactagactgagcgccgaagatctcgttttagaaggagctggcctccgagtgagcgtaccgctgatagcccaaggtaactcctatccttctgaaactaccgtaaagtacgtgttccggctgcacgaagcaacagattacccgtggaggcccgccctcacaccgtttgagttccagaagctcctgaataatctcacgagtatcaagatcagaggaacatatagtgagagaagcgccggttaccttgatgacgtcacactggccagcgcccggccgggcccaggcgtccccgctacttgggttgagtcttgcacctgccccgtcggctacggaggacaattttgcgaaatgtgcttatctggctaccgccgggagaccccaaatctggggccatatagtccgtgtgttctctgcgcatgcaacggccatagtgagacctgtgaccccgagacaggggtctgcaactgcagagacaataccgctgggccgcactgtgaaaaatgttcagatgggtattatggtgactctacagcgggtaccagtagtgactgtcaaccttgtccttgtcctggtggcagttcatgcgcggtggtgcctaaaacaaaggaggtagtctgcactaattgcccgactggcacaactggcaagagatgtgaactgtgtgatgacgggtatttcggcgatcccctgggccggaacggccccgtgcggctgtgccggttgtgtcagtgctctgacaatattgaccccaacgctgtgggcaattgcaatcgcttaaccggcgaatgcctcaaatgcatttacaatacagctgggttttattgtgacaggtgcaaagatggctttttcgggaaccctcttgctcccaacccagccgataagtgcaaagcctgcaactgcaatctgtatgggaccatgaagcaacaatcatcgtgtaaccctgttacagggcagtgtgagtgcttaccacatgttaccggacaggactgtggcgcctgcgaccctggcttctataatctgcaaagtgggcagggatgtgagcgctgcgattgccatgctctgggatccacgaacgggcaatgcgacataagaacgggacagtgtgaatgccagcccgggatcactggtcaacactgtgagcgctgcgaagtgaaccacttcggcttcggcccagaaggatgcaagccgtgcgattgccacccagaggggtcactgtctttacaatgtaaagatgacgggcgatgtgagtgtcgcgaaggatttgtggggaaccgctgtgaccaatgtgaggagaactacttttacaatcgtagctggccaggctgtcaggaatgccctgcctgctaccgattggtcaaggacaaggtggccgaccatagggtgaagctgcaggagttggagagtctgatcgctaatctcggaaccggtgatgagatggtgaccgatcaggcatttgaggataggttaaaagaggctgaacgtgaggtaatggatttgttgcgggaggcccaagacgtgaaggacgtggaccagaatttgatggatcgcctgcagagggtaaataacactctctcttctcaaatctccaggctgcagaatataaggaatacgatcgaagaaactgggaatctggctgaacaggccagggcgcatgtcgagaatactgaacggctgattgagatcgcatctagagagttggagaaagcgaaggtggcagctgccaatgtcagcgtgacccaaccagagtccaccggggacccgaacaacatgacattattagcggaagaggccaggaagctggctgagaggcacaagcaggaagccgacgatattgttcgggtcgccaagacagccaatgatacctctacagaggcctataatctgctccttcgtaccttagccggcgaaaaccagaccgctttcgaaattgaagaactgaaccggaaatacgagcaagctaaaaacatctctcaggatcttgagaaacaggccgcccgtgttcacgaggaggccaagcgagcaggcgacaaagccgtggaaatttatgcaagcgtcgctcagctatcgcctctcgatagtgagactctggaaaacgaggctaataacattaaaatggaggcagagaacttggagcaactgatcgaccagaagctgaaggattatgaggatctgagagaggatatgcgtggtaaggagctcgaagttaagaatctcttggaaaaagggaagaccgagcagcagacggccgatcaattgctggcccgggctgatgccgccaaggcattagctgaagaggctgcaaagaagggccgggatactttgcaggaggcaaacgacatcttgaacaatttaaaagatttcgatagaagagtgaatgacaacaaaaccgctgccgaggaagccctgagaaagatccccgcgatcaaccagacgataacggaggcgaatgagaaaacccgggaagcacagcaggctcttggaagtgctgcggcagatgcaaccgaagccaaaaacaaagcacatgaagccgaacggatcgcctcagctgtgcagaagaatgctaccagcacgaaggccgaggcagaacgtacattcgcagaggtgaccgatctggacaacgaggttaacaacatgctgaaacagctccaggaggctgagaaagagctgaaacgcaaacaggacgatgccgaccaggacatgatgatggccgggatggcgtcgcaggctgcccaggaggctgagatcaacgcacggaaagccaaaaactctgtgacaagcctgctgtcaatcatcaacgacctcctcgagcagctggggcaacttgacactgttgacctcaataaattgaatgaaattgaggggactttaaataaggcaaaggacgagatgaaggtgtcggacctggaccgcaaggtttctgatttagaaaacgaggctaaaaagcaagaggcagcaatcatggattataatcgagacattgaggagattatgaaagacatccgcaacctggaggatattcggaaaaccttaccctccggatgctttaataccccctcaatcgagaagccctag

SEQ ID NO: 127320 - DNA, 4830 bp, Artificial Sequence
  derived and/or modified sequence
atgcggggaagccaccgtgcggcacccgcactgcggcctcgaggtcgtctctggccggtgctcgctgtgctcgcagccgctgcagccgcaggatgtgcccaggcggctatggacgagtgcaccgacgagggaggacggccacagcggtgcatgccagaatttgtgaatgctgcctttaatgtcaccgtcgttgcgactaatacctgtggcactcctcccgaagagtattgtgtccagaccggagttacaggagtgaccaagtcctgccacctgtgtgacgctggccagccccacctgcagcacggcgctgcctttctaacggactataataatcaggccgataccacctggtggcagagccagaccatgttggcgggtgtgcagtacccgtcatcaattaacctcactctccacctcgggaaggcattcgacattacctacgtgagattgaaattccatacctccagaccagagtcatttgctatttataagcgcactcgggaagacggtccctggattccctaccagtattattcaggctcttgtgagaatacctactctaaggcaaacagaggattcattcggactggcggagacgagcaacaggccctctgcacagatgagtttagcgacatcagccccctcaccggcggaaatgtagcattttcgactctggaaggacggccttcagcctacaactttgacaattcgcccgtgctacaagaatgggtgacggccactgacattcgcgtgactctgaaccgcctaaatacttttggcgacgaagtgttcaatgatccaaaggtgctcaaatcttattattacgctatcagcgatttcgcagtgggcggtcggtgcaagtgtaacggccatgcctccgagtgtatgaaaaatgaatttgataaactcgtatgtaactgtaaacacaatacctatggagtcgactgcgagaagtgtctcccattcttcaatgaccgcccttggagaagggctaccgccgaaagtgcatctgagtgcttgccatgcgactgtaatggaaggtcccaggagtgttacttcgacccggagttgtaccgatctacaggccatggcggacattgcacgaattgtcaggataacactgatggagctcattgtgaaaggtgtcgcgaaaactttttccggcttggaaacaacgaagcgtgttccagctgtcactgttcacctgttggaagcttgagtacccagtgtgactcttatggacggtgctcctgtaaacccggagtgatgggggataagtgcgaccgctgccagccagggttccactccctgacagaggccggttgccgaccctgcagttgcgaccctagtggcagtatcgatgagtgcaacattgagactggtagatgcgtgtgcaaggacaatgtggagggattcaattgtgaacgatgtaagcctggtttcttcaatctggagtcaagtaacccgagggggtgtactccatgcttttgtttcggtcattcctccgtgtgcacaaatgccgtaggttatagtgtgtactcaatctcgtccactttccagattgacgaggatggctggcgagccgagcagcgcgacggaagcgaggcgtccctggaatggagctctgaaaggcaggacatagctgtgattagcgatagctacttccctcggtactttatcgccccagctaagttcctaggaaaacaagtgttgtcatatggacagaacctgagttttagtttcagggttgatagaagagatacgagactgagcgctgaagatctcgtcctggaaggcgctgggttgcgcgtgtcagtgccattgatagcccagggaaactcttatccatccgaaaccactgtaaaatacgtcttccgtctgcacgaggctaccgattatccgtggcgaccagccctcactccgtttgaatttcagaagctgcttaacaacctgactagcattaagattcgaggaacatactccgaaaggtccgctgggtacctggacgacgttacactggcatctgctcgcccagggccaggtgtgcccgctacttgggtggagtcttgtacatgtcccgtcggctacgggggacaattctgcgagatgtgcctatcaggctatcggcgagaaacaccaaatctcggaccgtattcaccgtgtgtcctctgcgcctgtaacgggcacagcgagacatgcgaccccgaaacgggagtgtgcaactgtcgagataacaccgctggtccccactgcgagaagtgtagtgatggctattatggcgacagcaccgccggtacatcgtccgattgccagccctgcccatgtccaggaggttctagttgcgccgtggtgcctaaaactaaagaagttgtgtgtacaaattgtccgaccgggactaccgggaagcgttgtgaactgtgtgacgacggatattttggagaccccctgggaaggaacggcccagtgcgtctctgtcgattatgccagtgtagcgacaatattgatccaaatgcagtaggcaattgcaaccgcctcacaggtgaatgtctgaaatgtatctacaataccgccggtttttactgtgacagatgtaaggatggcttttttggaaaccctttggcacctaatccggctgataagtgtaaggcttgcaattgcaacctttatggcacaatgaaacagcagtcatcctgcaatcctgtgaccgggcagtgcgagtgcctgccccatgttacaggccaggactgcggcgcatgtgacccagggttctacaacctccaaagcgggcagggctgcgagcgctgcgattgtcacgccctgggttcgacaaacggacaatgcgacattaggacagggcaatgcgagtgccaacccggaatcactgggcagcactgcgaacgctgcgaggttaatcacttcggcttcggccctgaggggtgtaagccctgtgactgccatcccgaaggctcgctgagcctccagtgtaaggatgacggaaggtgcgagtgcagggagggctttgtcggcaacaggtgcgatcaatgcgaggagaactacttctacaaccgttcctggcctgggtgtcaggaatgccccgcatgctatcgtttggtgaaggataaggtggccgaccatcgtgtgaagctccaggagcttgagtcactgattgctaatctggggaccggggacgaaatggtgaccgaccaggcatttgaggaccggctgaaggaagccgaacgagaggttatggatttgctgcgggaggcccaggacgtcaaggatgtggaccagaaccttatggaccggctgcagcgtgtgaataacacactgtcttcccaaatatcccgcttgcagaacattcgaaataccatagaggaaaccggaaacctggctgaacaggctagagcacacgtcgaaaacactgagcgcttgattgagatcgccagcagggagctcgagaaggctaaagtggctgccgctaacgtctccgtcactcagccggagtcaaccggggaccccaataatatgacgcttctcgccgaggaggcaagaaagttggctgagcgacataaacaggaggccgacgacattgtgcgcgtcgctaaaaccgcaaacgacacatccacggaggcttacaatctattgcttaggacattggctggggagaaccagaccgctttcgaaattgaggaactgaatcggaagtacgaacaggcgaagaacatttcacaggacctggagaagcaggccgctcgcgttcacgaggaggcaaaacgggctggtgataaagcagtggagatctatgctagtgtggcacaactatcccccctggatagcgaaacgctcgagaacgaggccaataacattaaaatggaagcggaaaacctcgagcagttgatcgatcagaaactcaaggattacgaggacttacgggaggacatgcgcggtaaggagcttgaagtgaaaaatctcttggaaaagggcaagacagagcagcagacagcagatcagctcctcgccagggcagacgctgccaaggcccttgctgaggaagcagcaaaaaaagggagggatacactgcaggaggcaaatgatatactcaataacctgaaggacttcgacaggagagtaaacgataacaaaaccgcagcagaggaggcgctgcgaaaaattccagcaattaaccagacaatcacggaggccaatgaaaaaaccagggaagcacagcaagcactggggagtgcggcagctgatgctaccgaggcaaaaaataaagctcatgaggccgagcggattgcgagtgccgtgcagaagaacgccacctcaaccaaagccgaggctgagagaacttttgcagaagtgacagatttggacaatgaagtgaataatatgctcaagcaacttcaggaggccgagaaagagctgaagaggaagcaagacgatgccgatcaggacatgatgatggccggtatggcatcacaggccgcacaggaggccgagatcaatgctcgtaaggctaaaaactctgttacttcactgctgtcgatcatcaacgacctgttagagcagcttggccagcttgacaccgtcgatttaaataagcttaacgaaatagaggggactctgaacaaggccaaagatgagatgaaggtctctgacctggacaggaaagtttcagatctggagaatgaggccaaaaaacaggaggctgctatcatggattataaccgggacatcgaagagattatgaaagatattaggaacctggaagacatccggaaaactctaccttccgggtgttttaacacccccagcatagagaagccttag

SEQ ID NO: 127321 - DNA, 4830 bp, Artificial Sequence
  derived and/or modified sequence
atgagaggcagccacagagccgcccccgccctgagacccagaggcagactgtggcccgtgctggccgtgctggccgccgccgccgccgccggctgcgcccaggccgccatggacgagtgcaccgacgagggcggcagaccccagagatgcatgcccgagttcgtgaacgccgccttcaacgtgaccgtggtggccaccaacacctgcggcaccccccccgaggagtactgcgtgcagaccggcgtgaccggcgtgaccaagagctgccacctgtgcgacgccggccagccccacctgcagcacggcgccgccttcctgaccgactacaacaaccaggccgacaccacctggtggcagagccagaccatgctggccggcgtgcagtaccccagcagcatcaacctgaccctgcacctgggcaaggccttcgacatcacctacgtgagactgaagttccacaccagcagacccgagagcttcgccatctacaagagaaccagagaggacggcccctggatcccctaccagtactacagcggcagctgcgagaacacctacagcaaggccaacagaggcttcatcagaaccggcggcgacgagcagcaggccctgtgcaccgacgagttcagcgacatcagccccctgaccggcggcaacgtggccttcagcaccctggagggcagacccagcgcctacaacttcgacaacagccccgtgctgcaggagtgggtgaccgccaccgacatcagagtgaccctgaacagactgaacaccttcggcgacgaggtgttcaacgaccccaaggtgctgaagagctactactacgccatcagcgacttcgccgtgggcggcagatgcaagtgcaacggccacgccagcgagtgcatgaagaacgagttcgacaagctggtgtgcaactgcaagcacaacacctacggcgtggactgcgagaagtgcctgcccttcttcaacgacagaccctggagaagagccaccgccgagagcgccagcgagtgcctgccctgcgactgcaacggcagaagccaggagtgctacttcgaccccgagctgtacagaagcaccggccacggcggccactgcaccaactgccaggacaacaccgacggcgcccactgcgagagatgcagagagaacttcttcagactgggcaacaacgaggcctgcagcagctgccactgcagccccgtgggcagcctgagcacccagtgcgacagctacggcagatgcagctgcaagcccggcgtgatgggcgacaagtgcgacagatgccagcccggcttccacagcctgaccgaggccggctgcagaccctgcagctgcgaccccagcggcagcatcgacgagtgcaacatcgagaccggcagatgcgtgtgcaaggacaacgtggagggcttcaactgcgagagatgcaagcccggcttcttcaacctggagagcagcaaccccagaggctgcaccccctgcttctgcttcggccacagcagcgtgtgcaccaacgccgtgggctacagcgtgtacagcatcagcagcaccttccagatcgacgaggacggctggagagccgagcagagagacggcagcgaggccagcctggagtggagcagcgagagacaggacatcgccgtgatcagcgacagctacttccccagatacttcatcgcccccgccaagttcctgggcaagcaggtgctgagctacggccagaacctgagcttcagcttcagagtggacagaagagacaccagactgagcgccgaggacctggtgctggagggcgccggcctgagagtgagcgtgcccctgatcgcccagggcaacagctaccccagcgagaccaccgtgaagtacgtgttcagactgcacgaggccaccgactacccctggagacccgccctgacccccttcgagttccagaagctgctgaacaacctgaccagcatcaagatcagaggcacctacagcgagagaagcgccggctacctggacgacgtgaccctggccagcgccagacccggccccggcgtgcccgccacctgggtggagagctgcacctgccccgtgggctacggcggccagttctgcgagatgtgcctgagcggctacagaagagagacccccaacctgggcccctacagcccctgcgtgctgtgcgcctgcaacggccacagcgagacctgcgaccccgagaccggcgtgtgcaactgcagagacaacaccgccggcccccactgcgagaagtgcagcgacggctactacggcgacagcaccgccggcaccagcagcgactgccagccctgcccctgccccggcggcagcagctgcgccgtggtgcccaagaccaaggaggtggtgtgcaccaactgccccaccggcaccaccggcaagagatgcgagctgtgcgacgacggctacttcggcgaccccctgggcagaaacggccccgtgagactgtgcagactgtgccagtgcagcgacaacatcgaccccaacgccgtgggcaactgcaacagactgaccggcgagtgcctgaagtgcatctacaacaccgccggcttctactgcgacagatgcaaggacggcttcttcggcaaccccctggcccccaaccccgccgacaagtgcaaggcctgcaactgcaacctgtacggcaccatgaagcagcagagcagctgcaaccccgtgaccggccagtgcgagtgcctgccccacgtgaccggccaggactgcggcgcctgcgaccccggcttctacaacctgcagagcggccagggctgcgagagatgcgactgccacgccctgggcagcaccaacggccagtgcgacatcagaaccggccagtgcgagtgccagcccggcatcaccggccagcactgcgagagatgcgaggtgaaccacttcggcttcggccccgagggctgcaagccctgcgactgccaccccgagggcagcctgagcctgcagtgcaaggacgacggcagatgcgagtgcagagagggcttcgtgggcaacagatgcgaccagtgcgaggagaactacttctacaacagaagctggcccggctgccaggagtgccccgcctgctacagactggtgaaggacaaggtggccgaccacagagtgaagctgcaggagctggagagcctgatcgccaacctgggcaccggcgacgagatggtgaccgaccaggccttcgaggacagactgaaggaggccgagagagaggtgatggacctgctgagagaggcccaggacgtgaaggacgtggaccagaacctgatggacagactgcagagagtgaacaacaccctgagcagccagatcagcagactgcagaacatcagaaacaccatcgaggagaccggcaacctggccgagcaggccagagcccacgtggagaacaccgagagactgatcgagatcgccagcagagagctggagaaggccaaggtggccgccgccaacgtgagcgtgacccagcccgagagcaccggcgaccccaacaacatgaccctgctggccgaggaggccagaaagctggccgagagacacaagcaggaggccgacgacatcgtgagagtggccaagaccgccaacgacaccagcaccgaggcctacaacctgctgctgagaaccctggccggcgagaaccagaccgccttcgagatcgaggagctgaacagaaagtacgagcaggccaagaacatcagccaggacctggagaagcaggccgccagagtgcacgaggaggccaagagagccggcgacaaggccgtggagatctacgccagcgtggcccagctgagccccctggacagcgagaccctggagaacgaggccaacaacatcaagatggaggccgagaacctggagcagctgatcgaccagaagctgaaggactacgaggacctgagagaggacatgagaggcaaggagctggaggtgaagaacctgctggagaagggcaagaccgagcagcagaccgccgaccagctgctggccagagccgacgccgccaaggccctggccgaggaggccgccaagaagggcagagacaccctgcaggaggccaacgacatcctgaacaacctgaaggacttcgacagaagagtgaacgacaacaagaccgccgccgaggaggccctgagaaagatccccgccatcaaccagaccatcaccgaggccaacgagaagaccagagaggcccagcaggccctgggcagcgccgccgccgacgccaccgaggccaagaacaaggcccacgaggccgagagaatcgccagcgccgtgcagaagaacgccaccagcaccaaggccgaggccgagagaaccttcgccgaggtgaccgacctggacaacgaggtgaacaacatgctgaagcagctgcaggaggccgagaaggagctgaagagaaagcaggacgacgccgaccaggacatgatgatggccggcatggccagccaggccgcccaggaggccgagatcaacgccagaaaggccaagaacagcgtgaccagcctgctgagcatcatcaacgacctgctggagcagctgggccagctggacaccgtggacctgaacaagctgaacgagatcgagggcaccctgaacaaggccaaggacgagatgaaggtgagcgacctggacagaaaggtgagcgacctggagaacgaggccaagaagcaggaggccgccatcatggactacaacagagacatcgaggagatcatgaaggacatcagaaacctggaggacatcagaaagaccctgcccagcggctgcttcaacacccccagcatcgagaagccctag

SEQ ID NO: 127322 - protein, 410 aa, Artificial Sequence
  derived and/or modified sequence
MVCFRLFPVPGSGLVLVCLVLGAVRSYALELNLTDSENATCLYAKWQMNFTVRYETTNKTYKTVTISDHGTVTYNGSICGDDQNGPKIAVQFGPGFSWIANFTKAASTYSIDSVSFSYNTGDNTTFPDAEDKGILTVDELLAIRIPLNDLFRCNSLSTLEKNDVVQHYWDVLVQAFVQNGTVSTNEFLCDKDKTSTVAPTIHTTVPSPTTTPTPKEKPEAGTYSVNNGNDTCLLATMGLQLNITQDKVASVININPNTTHSTGSCRSHTALLRLNSSTIKYLDFVFAVKNENRFYLKEVNISMYLVNGSVFSIANNNLSYWDAPLGSSYMCNKEQTVSVSGAFQINTFDLRVQPFNVTQGKYSTAQDCSADDDNFLVPIAVGAALAGVLILVLLAYFIGLKHHHAGYEQF

SEQ ID NO: 127323 - DNA, 1233 bp, Artificial Sequence
  derived and/or modified sequence
atggtctgttttaggttgttcccagtgcccgggagtggtctggttttagtctgtctcgtcttgggggctgtgaggtcatacgccttagagctcaatcttacagactccgagaacgcaacctgtctctacgcaaagtggcagatgaactttactgtccgctacgaaacaaccaataaaacttataaaactgttactatcagtgaccacggaacagtgacgtacaacggctcaatctgtggcgatgaccaaaacggtcctaagatcgccgtgcagttcggccccggcttcagctggatagccaattttactaaggccgcctcaacatactccattgacagcgtgtcattttcctacaataccggcgacaacacaacctttcccgatgcggaggataaaggtattttgaccgtcgatgagttgttggccattagaatccctttgaatgatctgttcagatgcaatagcctctcaactctggaaaagaatgacgtcgtgcaacactactgggatgtgttggtgcaggctttcgtgcagaacggtacagtttctacaaatgagttcctttgtgataaagataagacaagtaccgttgcacctaccatccataccactgtgccctcccctaccacaactcccacaccaaaagagaagcctgaggctggcacttattctgtgaataacgggaacgatacctgcttgctcgccacgatgggactccaactgaacataacccaggacaaagtagcctccgtaattaatataaaccccaacactacacactctacaggcagctgtcgctcccatacggccctgttgcgcttgaattccagcaccataaagtatttggactttgtgtttgccgtaaaaaatgaaaaccgattctatctcaaagaagttaatatttctatgtatctggtaaacggtagtgtgttttctatcgccaataataatctatcctactgggacgcaccactggggtcctcgtacatgtgtaataaggagcagaccgtgtccgtgtctggggcctttcagataaacaccttcgacctgagggttcagccgtttaacgtcacccagggcaaatactcgactgctcaagactgcagcgctgacgacgataatttcctggtgccgatcgctgtcggcgccgccctggctggcgttctaattctggttctgcttgcttactttattgggttgaagcatcaccacgcaggctatgagcaattctag

SEQ ID NO: 127324 - DNA, 1233 bp, Artificial Sequence
  derived and/or modified sequence
atggtgtgcttccgcctcttccctgtgcccggcagcggcctggtgctggtgtgcctggtgctgggcgctgtgcgctcctatgccctggagctgaacctgacagacagtgaaaatgccacctgcctgtatgccaagtggcagatgaacttcaccgtgcgctatgagaccaccaacaagacctacaagacagtgaccatcagtgaccatggaacagtgacctacaacggcagcatctgtggagatgaccagaatggccccaagattgctgtgcagtttggacctggcttctcctggatcgccaacttcaccaaggccgccagcacctacagcattgattctgtgtccttctcctacaacacaggagacaacaccaccttcccagatgctgaggacaagggcatcctgactgtggatgagctgctggccatccgcatccccctgaatgacctcttccgctgcaacagcctgagcaccctggagaagaatgatgtggtgcagcactactgggatgtgctggtgcaggcctttgtgcagaatggaacagtgtccaccaatgagttcctgtgtgacaaggacaagaccagcacagtggcccccaccatccacaccaccgtgcccagccccaccaccacccccacccccaaggagaagccagaggccggcacctacagcgtgaacaatggaaatgacacctgcctgctggccaccatgggcctgcagctgaacatcacccaggacaaggtggccagcgtcatcaacatcaaccccaacaccacccacagcacaggcagctgccgcagccacacagccctgctgcggctgaacagcagcaccatcaagtacctggactttgtgtttgctgtgaagaatgaaaatcgcttctacctgaaggaggtgaacatctccatgtacctggtgaatggatctgtgttcagcatcgccaacaacaacctgagctactgggatgcccccctgggcagcagctacatgtgcaacaaggagcagacagtgtctgtgtctggggccttccagatcaacacctttgacctgcgggtgcagcccttcaacgtgacccagggcaagtacagcacagcccaggactgcagcgcagatgatgacaacttcctggtgcccatcgctgtgggcgccgccctggccggcgtgctgatcctggtgctgctggcctacttcatcggcctgaagcaccaccacgccggctatgagcagttctag

SEQ ID NO: 127325 - DNA, 1867 bp, Artificial Sequence
  derived and/or modified sequence
ccgattcctggcttttgcaaggctgtggtcggtggtcatcagtgctcttgacccaggtccagcgagccttttccctggtgttgcagctgttgttgtaccgccgccgtcgccgccgtcgccgcctgctctgcggggtcatggtgtgcttccgcctcttcccggttccgggctcagggctcgttctggtctgcctagtcctgggagctgtgcggtcttatgcattggaacttaatttgacagattcagaaaatgccacttgcctttatgcaaaatggcagatgaatttcacagtacgctatgaaactacaaataaaacttataaaactgtaaccatttcagaccatggcactgtgacatataatggaagcatttgtggggatgatcagaatggtcccaaaatagcagtgcagttcggacctggcttttcctggattgcgaattttaccaaggcagcatctacttattcaattgacagcgtctcattttcctacaacactggtgataacacaacatttcctgatgctgaagataaaggaattcttactgttgatgaacttttggccatcagaattccattgaatgacctttttagatgcaatagtttatcaactttggaaaagaatgatgttgtccaacactactgggatgttcttgtacaagcttttgtccaaaatggcacagtgagcacaaatgagttcctgtgtgataaagacaaaacttcaacagtggcacccaccatacacaccactgtgccatctcctactacaacacctactccaaaggaaaaaccagaagctggaacctattcagttaataatggcaatgatacttgtctgctggctaccatggggctgcagctgaacatcactcaggataaggttgcttcagttattaacatcaaccccaatacaactcactccacaggcagctgccgttctcacactgctctacttagactcaatagcagcaccattaagtatctagactttgtctttgctgtgaaaaatgaaaaccgattttatctgaaggaagtgaacatcagcatgtatttggttaatggctccgttttcagcattgcaaataacaatctcagctactgggatgcccccctgggaagttcttatatgtgcaacaaagagcagactgtttcagtgtctggagcatttcagataaatacctttgatctaagggttcagcctttcaatgtgacacaaggaaagtattctacagctcaagactgcagtgcagatgacgacaacttccttgtgcccatagcggtgggagctgccttggcaggagtacttattctagtgttgctggcttattttattggtctcaagcaccatcatgctggatatgagcaattttagaatctgcaacctgattgattatataaaaatacatgcaaataacaagattttcttacctctcagttgttgaaacactttgcttcttaaaattgatatgttgaaactttaattcttttatcaatcccagcattttgagatcagtctttattaataaaacctgttctctttaatcagcttaaaatccaaagtgtcatatttactggtcctggagacaaacttgttcaaaagaacatcaacgtgcaatgttttaaggtctatcttaagaagccctggccaaattttgatcctaaccttgaagtatgccttgaacttattaacatggccattataagaataaaatatgtagttgtgtcttaatggaattaataaatgtcatttcactactggtgttctgtttcaatgtataaggactatagtgatttaaactcatcaatgtgcctttgcataaagttcattaaataaatattgatgtggtataaatgcccatcagatatgct

SEQ ID NO: 127326 - DNA, 1233 bp, Artificial Sequence
  derived and/or modified sequence
atggtgtgcttccggctgttccccgtgcccggcagcggcctggtgctggtgtgcctggtactgggggccgttcgctcttacgccttggagttaaacctgaccgatagcgaaaatgcaacttgcctttacgccaagtggcagatgaacttcactgtgcgctatgaaaccaccaacaagacatacaaaactgtaaccatctcagatcacggaactgtaacgtataacggctccatctgtggggatgatcagaatggacctaagatagccgtgcagttcgggcctggtttttcatggatcgctaattttaccaaggccgcttccacctattccatcgattccgtcagtttcagctacaacaccggagacaataccacgttccctgatgccgaggataagggtatcctgactgtggatgagctgctcgccatcaggatccccctgaatgacttattccgctgcaattccttaagcacactggagaagaacgacgttgtgcagcattattgggacgtcctggtacaggcctttgtgcagaacgggacagtgagcactaacgaattcctttgtgataaggacaagacatccaccgttgccccaactattcataccacggtgccgagtcccaccactacgcctaccccgaaagagaagccagaggctggcacgtactcagttaataacggaaacgacacctgcctgctggccaccatgggcttgcagttaaacattactcaagataaggtggcctccgtgatcaacataaacccaaatacaacacattcgacgggttcctgccgctcacacacagcattactgcgactcaactcctctacaatcaagtatctcgacttcgtgttcgccgtgaagaatgaaaatagattctacttaaaagaagttaacatttctatgtacctggtcaatgggtccgtgttttcaattgccaacaacaatttgtcttactgggacgctccgctcggaagctcctacatgtgtaataaggaacagactgtgagtgtttccggtgcttttcagattaatacttttgatcttagggtgcagccgttcaacgtgacgcaggggaagtattcgacagcgcaggattgtagtgcggacgacgataattttctggtgccaatcgctgtgggagccgctctggcaggtgttctcattctcgtattgctagcatatttcatcgggctcaaacatcatcatgccggatatgaacagttttag

SEQ ID NO: 127327 - DNA, 1233 bp, Artificial Sequence
  derived and/or modified sequence
atggtgtgttttagacttttccccgttcccggaagcggactcgtgttggtgtgtctagtgctgggagctgtgaggagctacgctctggaattaaatctaacagattcagaaaacgccacatgtctgtatgctaagtggcaaatgaattttacggtgcggtatgagactaccaacaagacctacaagaccgtcaccatctcagatcacggaactgttacttacaatggatccatttgcggggatgaccagaacggccctaagatagcggttcagttcggacctgggttcagttggatagcgaactttactaaagctgcttccacatattctatcgattccgtgagtttttcttataataccggcgacaatacgacttttccagatgctgaagataagggcatcctcaccgtggatgaactgctggctatccgtatccccctgaacgacctcttcaggtgtaactctctcagtacccttgaaaaaaacgatgtcgtacagcactactgggatgtcctggtgcaggcattcgtgcagaatggtaccgtttcgacaaatgagttcctttgcgacaaggacaaaacttccactgtcgcacctacgatacataccaccgtgccaagtccaactacaacccctacccccaaagaaaaacccgaagcagggacctatagcgtcaacaacggcaacgacacatgtttgttggcaacaatgggcctgcagctgaacatcacacaggataaggtagctagtgtgattaacataaatcccaacactacccatagcacgggttcctgccgatcacacacagcactactgcggctaaattcctcgaccattaaatacctggatttcgtgttcgccgtaaaaaacgaaaatagattttatctaaaggaagttaatatcagcatgtatctggtcaacggctcagtcttctctatcgcaaataataacctatcttattgggacgctcccctcgggagctcttatatgtgtaacaaggaacagacggtatctgtgagcggggctttccagatcaataccttcgacttgagagtgcagccttttaacgtcacacagggcaagtactctaccgcccaggattgctccgcagacgacgacaactttcttgtaccaatcgcagttggcgcagcactcgcaggagtgctgatactggtgctgctcgcttactttattggtctgaagcatcatcacgcagggtacgaacagttctag

SEQ ID NO: 127328 - DNA, 1233 bp, Artificial Sequence
  derived and/or modified sequence
atggtgtgcttcagactgttccccgtgcccggcagcggcctggtgctggtgtgcctggtgctgggcgccgtgagaagctacgccctggagctgaacctgaccgacagcgagaacgccacctgcctgtacgccaagtggcagatgaacttcaccgtgagatacgagaccaccaacaagacctacaagaccgtgaccatcagcgaccacggcaccgtgacctacaacggcagcatctgcggcgacgaccagaacggccccaagatcgccgtgcagttcggccccggcttcagctggatcgccaacttcaccaaggccgccagcacctacagcatcgacagcgtgagcttcagctacaacaccggcgacaacaccaccttccccgacgccgaggacaagggcatcctgaccgtggacgagctgctggccatcagaatccccctgaacgacctgttcagatgcaacagcctgagcaccctggagaagaacgacgtggtgcagcactactgggacgtgctggtgcaggccttcgtgcagaacggcaccgtgagcaccaacgagttcctgtgcgacaaggacaagaccagcaccgtggcccccaccatccacaccaccgtgcccagccccaccaccacccccacccccaaggagaagcccgaggccggcacctacagcgtgaacaacggcaacgacacctgcctgctggccaccatgggcctgcagctgaacatcacccaggacaaggtggccagcgtgatcaacatcaaccccaacaccacccacagcaccggcagctgcagaagccacaccgccctgctgagactgaacagcagcaccatcaagtacctggacttcgtgttcgccgtgaagaacgagaacagattctacctgaaggaggtgaacatcagcatgtacctggtgaacggcagcgtgttcagcatcgccaacaacaacctgagctactgggacgcccccctgggcagcagctacatgtgcaacaaggagcagaccgtgagcgtgagcggcgccttccagatcaacaccttcgacctgagagtgcagcccttcaacgtgacccagggcaagtacagcaccgcccaggactgcagcgccgacgacgacaacttcctggtgcccatcgccgtgggcgccgccctggccggcgtgctgatcctggtgctgctggcctacttcatcggcctgaagcaccaccacgccggctacgagcagttctag

SEQ ID NO: 127329 - protein, 295 aa, Artificial Sequence [sequence omitted]

SEQ ID NO: 127330 - protein, 264 aa, Artificial Sequence
  derived and/or modified sequence
MSGALDVLQMKEEDVLKFLAAGTHLGGTNLDFQMEQYIYKRKSDGIYIINLKRTWEKLLLAARAIVAIENPADVSVISSRNTGQRAVLKFAAATGATPIAGRFTPGTFTNQIQAAFREPRLLVVTDPRADHQPLTEASYVNLPTIALCNTDSPLRYVDIAIPCNNKGAHSVGLMWWMLAREVLRMRGTISREHPWEVMPDLYFYRDPEEIEKEEQAAAEKAVTKEEFQGEWTAPAPEFTATQPEVADWSEGVQVPSVPIQQFPT

SEQ ID NO: 127331 - protein, 295 aa, Artificial Sequence
  derived and/or modified sequence
MSGALDVLQMKEEDVLKFLAAGTHLGGTNLDFQMEHYIYKRKSDGIYIINLKRTWEKLLLAARAIVAIENPADVSVISSRNTGQRAVLKFAAATGATPIAGRFTPGTFTNQIQAAFWEPRLLVVTDPRADHQPLTEASYVNLPTIALCNTDSPLRYVDIAIPCNNKGAHSVGLMWWMLAREVLRMRGTISREHPWEVMPDLYFYRDPEEIEKEEQAAAEKAVTKEEFQGEWTAPSPEFTATQPEVADWSEGVQVPSVPIQQFPTEDWSAQPATEDWSAAPTAQATEWVGATTDWS

SEQ ID NO: 127332 - DNA, 888 bp, Artificial Sequence
  derived and/or modified sequence
atgagcggcgccctggacgtgctgcagatgaaggaggaggacgtgctgaagttcctggccgccggcacccacctgggcggcaccaacctggacttccagatggagcagtacatctacaagagaaagagcgacggcatctacatcatcaacctgaagagaacctgggagaagctgctgctggccgccagagccatcgtggccatcgagaaccccgccgacgtgagcgtgatcagcagcagaaacaccggccagagagccgtgctgaagttcgccgccgccaccggcgccacccccatcgccggcagattcacccccggcaccttcaccaaccagatccaggccgccttcagagagcccagactgctggtggtgaccgaccccagagccgaccaccagcccctgaccgaggccagctacgtgaacctgcccaccatcgccctgtgcaacaccgacagccccctgagatacgtggacatcgccatcccctgcaacaacaagggcgcccacagcgtgggcctgatgtggtggatgctggccagagaggtgctgagaatgagaggcaccatcagcagagagcacccctgggaggtgatgcccgacctgtacttctacagagaccccgaggagatcgagaaggaggagcaggccgccgccgagaaggccgtgaccaaggaggagttccagggcgagtggaccgcccccgcccccgagttcaccgccacccagcccgaggtggccgactggagcgagggcgtgcaggtgcccagcgtgcccatccagcagttccccaccgaggactggagcgcccagcccgccaccgaggactggagcgccgcccccaccgcccaggccaccgagtgggtgggcgccaccaccgactggagctag

SEQ ID NO: 127333 - DNA, 795 bp, Artificial Sequence
  derived and/or modified sequence
atgagcggcgccctggacgtgctgcagatgaaggaggaggacgtgctgaagttcctggccgccggcacccacctgggcggcaccaacctggacttccagatggagcagtacatctacaagagaaagagcgacggcatctacatcatcaacctgaagagaacctgggagaagctgctgctggccgccagagccatcgtggccatcgagaaccccgccgacgtgagcgtgatcagcagcagaaacaccggccagagagccgtgctgaagttcgccgccgccaccggcgccacccccatcgccggcagattcacccccggcaccttcaccaaccagatccaggccgccttcagagagcccagactgctggtggtgaccgaccccagagccgaccaccagcccctgaccgaggccagctacgtgaacctgcccaccatcgccctgtgcaacaccgacagccccctgagatacgtggacatcgccatcccctgcaacaacaagggcgcccacagcgtgggcctgatgtggtggatgctggccagagaggtgctgagaatgagaggcaccatcagcagagagcacccctgggaggtgatgcccgacctgtacttctacagagaccccgaggagatcgagaaggaggagcaggccgccgccgagaaggccgtgaccaaggaggagttccagggcgagtggaccgcccccgcccccgagttcaccgccacccagcccgaggtggccgactggagcgagggcgtgcaggtgcccagcgtgcccatccagcagttccccacctag

SEQ ID NO: 127334 - DNA, 888 bp, Artificial Sequence
  derived and/or modified sequence
atgagtggagccctggacgtgttgcagatgaaagaggaggatgtcctcaagttcctggctgcaggcacccacttaggagggacaaatctcgattttcaaatggagcagtacatctacaaacgaaaaagcgacgggatatatatcattaatttgaaacgaacgtgggagaaactgttgctcgccgctcgagccatcgtagcaatcgaaaatccggccgatgtctcagtcatctcctccagaaacacaggtcagcgggccgttctaaagtttgcggccgccaccggagccaccccaatagctggacgtttcacgcccggcactttcacaaatcagattcaggctgcttttcgcgaaccaaggctgctcgtggtgactgatccaagagccgatcaccagccgcttactgaggctagctatgtaaatctgcccacaatcgcgttatgcaacaccgactccccactccgatatgtcgacatcgccatcccatgtaataacaagggagcccattctgtgggtctgatgtggtggatgctagcccgtgaagtacttagaatgaggggaaccatatcacgcgagcacccctgggaggttatgcctgacttatacttttatcgcgacccagaggaaatcgaaaaggaagagcaagccgcagccgaaaaggcagtgaccaaagaagagttccaaggagaatggaccgctcctgctcctgaatttacggcaacacagcccgaagtggctgactggtcagaaggagtgcaggtcccaagcgtgcccattcaacaattccccaccgaagattggtccgctcagccagctacggaagattggagcgccgcccctacagcacaggccaccgaatgggttggagcgactaccgactggtcctag

SEQ ID NO: 127335 - DNA, 795 bp, Artificial Sequence
  derived and/or modified sequence
atgtcaggcgctctggatgtccttcagatgaaggaagaagacgttctcaaatttttggctgcagggacccatctgggcgggacaaacctggattttcaaatggagcagtacatctataagcgcaaatctgatggaatatatattattaatttgaagaggacgtgggaaaaactgttgctcgcagcgagggctattgtggccattgaaaaccccgcagacgtgtctgtcatcagctcccggaacacaggacaaagggctgtgttgaagttcgctgcggccaccggcgctacccccatcgccggcaggttcacacccgggacttttactaaccaaatccaggccgccttccgagaaccacgcttgctggtggtcacggatcctcgggccgatcaccaaccccttacagaggcctcttatgtgaatctgccaaccatcgccctgtgtaatactgacagcccgttaaggtacgttgatattgctattccctgcaataacaaaggcgcccactccgtggggttgatgtggtggatgctggcccgggaggttcttcgcatgcgcggcaccatcagccgagagcacccctgggaagtcatgcctgatctgtacttttatagggatccagaggagatcgagaaggaggagcaagcagctgctgagaaagccgtcacaaaagaggaatttcaaggtgagtggactgcaccagcacccgagtttactgcgacgcaacctgaggtggcagactggtctgagggagtgcaagttccctccgttccgatacagcaatttccaacgtag

SEQ ID NO: 127336 - DNA, 888 bp, Artificial Sequence
  derived and/or modified sequence
atgtctggggccctggatgtgctgcagatgaaggaggaggatgtgctgaagttcctggccgccggcacccacctgggcggcaccaacctggacttccagatggagcagtacatctacaagaggaagagtgatggcatctacatcatcaacctgaagaggacctgggagaagctgctgctggccgcccgggccatcgtggccattgaaaatccagcagatgtgtctgtcatcagcagcaggaacacaggccagagagctgtgctgaagtttgctgctgccaccggggccacccccatcgccggccgcttcaccccaggcaccttcaccaaccagatccaggccgccttccgggagccccggctgctggtggtgacagaccccagggctgaccaccagcccctgacagaggccagctatgtgaacctgcccaccatcgccctgtgcaacacagacagccccctgcgctacgtggacatcgccatcccctgcaacaacaagggggcccacagcgtgggcctgatgtggtggatgctggcccgggaggtgctgaggatgaggggcaccatcagccgggagcacccctgggaggtgatgccagacctgtacttctacagagatcctgaggagattgagaaggaggagcaggccgctgctgagaaggctgtgaccaaggaggagttccagggcgagtggacagccccagcccctgagttcaccgccacccagcctgaggtggccgactggagcgagggcgtgcaggtgcccagcgtgcccatccagcagttccccacagaggactggagcgcccagcctgccacagaggactggagcgctgcccccacagcccaggccacagagtgggtgggcgccaccacagactggagctag

SEQ ID NO: 127337 - DNA, 795 bp, Artificial Sequence
  derived and/or modified sequence
atgtctggggccctggatgtgctgcagatgaaggaggaggatgtgctgaagttcctggccgccggcacccacctgggcggcaccaacctggacttccagatggagcagtacatctacaagaggaagagtgatggcatctacatcatcaacctgaagaggacctgggagaagctgctgctggccgcccgggccatcgtggccattgaaaatccagcagatgtgtctgtcatcagcagcaggaacacaggccagagagctgtgctgaagtttgctgctgccaccggggccacccccatcgccggccgcttcaccccaggcaccttcaccaaccagatccaggccgccttccgggagccccggctgctggtggtgacagaccccagggctgaccaccagcccctgacagaggccagctatgtgaacctgcccaccatcgccctgtgcaacacagacagccccctgcgctacgtggacatcgccatcccctgcaacaacaagggggcccacagcgtgggcctgatgtggtggatgctggcccgggaggtgctgaggatgaggggcaccatcagccgggagcacccctgggaggtgatgccagacctgtacttctacagagatcctgaggagattgagaaggaggagcaggccgctgctgagaaggctgtgaccaaggaggagttccagggcgagtggacagccccagcccctgagttcaccgccacccagcctgaggtggccgactggagcgagggcgtgcaggtgcccagcgtgcccatccagcagttccccacctag

SEQ ID NO: 127338 - DNA, 888 bp, Artificial Sequence
  derived and/or modified sequence
atgagcggcgccctggacgtgctgcagatgaaggaggaggacgtgcttaagtttctcgctgccggcacacatctgggcggcaccaacttagattttcaaatggaacagtacatatataaacgcaaatccgacgggatttatatcatcaaccttaagcgaacttgggaaaagctactgttggccgctagagcaatcgttgctatcgagaacccggctgacgtgagcgtcatctcaagccgaaataccggacagcgggccgtgctgaagtttgccgctgctacgggcgcaacacctatagccggcagattcacaccagggactttcaccaaccagattcaggccgcatttcgggagccaagactcctcgtggtcactgacccccgcgccgatcatcagccattgactgaagcttcctacgttaaccttcccaccatcgctttatgcaatactgacagtcctctgaggtacgtggacattgcaattccttgcaataataagggcgctcatagcgtgggcctgatgtggtggatgctggcaagagaagtcctgagaatgaggggcactatctctcgcgagcacccatgggaggtgatgccagacctgtatttctatcgagatcctgaagagattgagaaggaagagcaagccgccgctgagaaagccgtgacaaaagaggaattccaaggggaatggacagcccccgcgccagagtttacagcgacccagcctgaagtggccgactggtcagagggggttcaggtgcccagcgttcccatccaacagtttcccaccgaagactggtccgcccaacctgctaccgaagactggagcgccgcgcctaccgcacaggccactgaatgggtcggcgctacaaccgattggagctag

SEQ ID NO: 127339 - DNA, 795 bp, Artificial Sequence
  derived and/or modified sequence
atgagcggcgccctggacgtgctgcagatgaaggaggaggacgtgctcaaatttctggccgccggaacacatctgggtggtacaaacctggatttccagatggaacaatacatctataagagaaagagcgatgggatctatattatcaaccttaagaggacatgggaaaagctcctgctggctgcacgggccatagtggctatagagaatccggcagacgtaagcgtgatttcaagtagaaatacaggccagagagccgtgctgaagtttgccgcagcgaccggtgcgactcccattgccggccgattcacaccagggacattcacgaatcagattcaagctgcatttagggaaccacggctgctagttgtgactgatccgagggcagatcatcagcccctgacagaagcctcctatgtgaacctcccaacaatcgcgttgtgcaatactgacagccccttgaggtacgtggacattgctatcccatgcaacaacaagggagcgcacagtgtcggactcatgtggtggatgctcgcccgggaagtgttgaggatgcgcgggactatcagtagagagcatccgtgggaggttatgcccgatttgtacttttacagggaccccgaagagatcgagaaagaggagcaagccgcagcagagaaggcggtcacgaaagaggagtttcagggcgaatggaccgcccctgctcccgagttcactgccacgcagccagaggtcgccgactggagcgaaggggtccaggtcccaagcgttcccatccagcaatttccaacctag

SEQ ID NO: 127340 - DNA, 888 bp, Artificial Sequence
  derived and/or modified sequence
atgagcggagccctggatgtactgcaaatgaaagaagaggacgtcctaaagtttttggctgctggcactcatctgggtggtaccaacctggatttccagatggagcagtacatctacaaaagaaagtccgatggaatctacataatcaacttgaagcggacttgggaaaagctgctccttgcagcgagagctatcgtcgccattgagaaccctgcagacgtaagcgtaatcagttctcgcaacaccggccaacgggctgtactcaagttcgctgctgctaccggtgcgactcccatagcgggacgattcacacctggaacgttcacaaaccagattcaggctgccttccgagagcccaggctcctggtggtgactgatccgagggctgatcatcagcccctgaccgaagccagctacgttaatttaccaaccatcgctctgtgtaatactgacagtccattacggtacgtggacatagccataccctgtaacaataaaggggctcattctgtgggtctgatgtggtggatgctggccagggaagtgttgcgtatgcgtgggaccataagccgggagcacccatgggaagtcatgcctgatctgtacttttaccgggatcctgaggagattgagaaggaggagcaggccgctgctgagaaggccgtgaccaaagaggaatttcagggcgagtggactgctcctgcacctgaattcacggccactcagcctgaggtcgcggactggtccgagggagtccaagtgccttccgtgccaattcagcagtttccaacagaagactggagcgcacagccagccactgaggattggagcgctgccccaactgcccaggctacggagtgggttggagctaccacggattggtcttag

SEQ ID NO: 127341 - DNA, 795 bp, Artificial Sequence
  derived and/or modified sequence
atgtccggcgctctggacgtcctacagatgaaagaagaggatgtgctcaaatttcttgcagccggtacccatttgggaggcacgaatcttgatttccaaatggagcagtacatatataagcggaagagtgatggaatctacattatcaatctgaaacgcacatgggagaagctcttactagccgcacgcgctattgtagccatcgaaaatcccgctgatgtttcagtaatttcgagcagaaacactgggcagagggctgtcctgaagttcgcagcggcaaccggcgcaacccctatcgccggtaggtttacgcccggaacttttaccaatcagatccaagccgctttccgcgaaccacggttgctcgtggtcacagaccctagggccgaccatcagcccttaacagaagctagttatgttaaccttcctaccattgcgctgtgcaacactgacagtcctttaaggtatgtggacattgctattccttgcaataacaagggcgctcatagcgtagggctgatgtggtggatgctggcccgtgaagtactaaggatgcgcggtactattagccgcgaacacccttgggaggtgatgcccgacctgtatttttacagggatcctgaggagatcgagaaagaggagcaggctgccgcagagaaggcagtcactaaggaagaattccagggggaatggactgccccagctcctgagttcacagccacacagcccgaggtcgctgattggtccgaaggagtgcaagttccgagcgttcccatccagcagtttccgacctag

SEQ ID NO: 127342 - DNA, 1067 bp, Artificial Sequence
  derived and/or modified sequence
gtacataaggacgtcatttcctgccgcctgtcttttccgtgctacctgcagaggggtccatacggcgttgttctggattcccgtcgtaacttaaagggaaattttcacaatgtccggagcccttgatgtcctgcaaatgaaggaggaggatgtccttaagttccttgcagcaggaacccacttaggtggcaccaatcttgacttccagatggaacagtacatctataaaaggaaaagtgatggcatctatatcataaatctcaagaggacctgggagaagcttctgctggcagctcgtgcaattgttgccattgaaaaccctgctgatgtcagtgttatatcctccaggaatactggccagagggctgtgctgaagtttgctgctgccactggagccactccaattgctggccgcttcactcctggaaccttcactaaccagatccaggcagccttccgggagccacggcttcttgtggttactgaccccagggctgaccaccagcctctcacggaggcatcttatgttaacctacctaccattgcgctgtgtaacacagattctcctctgcgctatgtggacattgccatcccatgcaacaacaagggagctcactcagtgggtttgatgtggtggatgctggctcgggaagttctgcgcatgcgtggcaccatttcccgtgaacacccatgggaggtcatgcctgatctgtacttctacagagatcctgaagagattgaaaaagaagagcaggctgctgctgagaaggcagtgaccaaggaggaatttcagggtgaatggactgctcccgctcctgagttcactgctactcagcctgaggttgcagactggtctgaaggtgtacaggtgccctctgtgcctattcagcaattccctactgaagactggagcgctcagcctgccacggaagactggtctgcagctcccactgctcaggccactgaatgggtaggagcaaccactgactggtcttaagctgttcttgcataggctcttaagcagcatggaaaaatggttgatggaaaataaacatcagtttctaaaa

SEQ ID NO: 127343 - DNA, 874 bp, Artificial Sequence
  derived and/or modified sequence
cctgcagaggggtccatacggcgttgttctgggttgctctcttatttcagattcccgtcgtaacttaaagggaaattttcacaatgtccggagcccttgatgtcctgcaaatgaaggaggaggatgtccttaagttccttgcagcaggaacccacttaggtggcaccaatcttgacttccagatggaacagtacatctataaaaggaaaagtgatggcatctatatcataaatctcaagaggacctgggagaagcttctgctggcagctcgtgcaattgttgccattgaaaaccctgctgatgtcagtgttatatcctccaggaatactggccagagggctgtgctgaagtttgctgctgccactggagccactccaattgctggccgcttcactcctggaaccttcactaaccagatccaggcagccttccgggagccacggcttcttgtggttactgaccccagggctgaccaccagcctctcacggaggcatcttatgttaacctacctaccattgcgctgtgtaacacagattctcctctgcgctatgtggacattgccatcccatgcaacaacaagggagctcactcagtgggtttgatgtggtggatgctggctcgggaagttctgcgcatgcgtggcaccatttcccgtgaacacccatgggaggtcatgcctgatctgtacttctacagagatcctgaagagattgaaaaagaagagcaggctgctgctgagaaggcagtgaccaaggaggaatttcagggtgaatggactgctcccgctcctgagttcactgctactcagcctgaggttgcagactggtctgaaggtgtacaggtgccctctgtgcctattcagcaattccctac

SEQ ID NO: 127344 - DNA, 785 bp, Artificial Sequence
  derived and/or modified sequence
acaggaatctgaatttctgtgtttggaatttgatgaggtcaaagtcaaccaaattctgaagacgctgtcagaggtagaagaaagtatcagcacactgatcagccagcctaactgaagatgatgtatgaaggagttggagttgttgaaaccaaggaatactggccagagggccgtgctaaagtttgctgctgccactggagccactccaattgctggccgcttcactcctggaaccttcgctaaccagatccaggcagccttccgggagccacggcttcttgtggttactgaccccagggctgaccaccagcctctcatggaggcatcttatgttaacctacctaccattgcgctgtgtaacacagattctcctctgcactatgtggacattgccatcccatgcaacaacaagggagctcactcagtgggtttgatgtggtggatgctggctcgggaagttctgcgcatgcgtggcaccatttcctgtgaacacccatgggaggtcatgcctgatctgtacttctacagagatcctgaagagattgaaagagaagagcaggctgctgctgaaaaggcagtgaccaaggaggaatttcagggtgaatggactgctccagctcctgagttcactgttactcagcctgaggttgcagactggtctgaaggtgtacaggtgccctctgtgcctattccctactgaagacgggagcgctcagcctgccacggaagactggtctgcagctcccactgctcaggccactgaatgggtaggagcaaccactgac

SEQ ID NO: 127345 - DNA, 743 bp, Artificial Sequence
  derived and/or modified sequence
gtgtttggaatttgatgaggtcaaagtcaaccaaattctgaagacgctgtcagaggtagaagaaagtatcagcacactgatcagccagcctaactgaagatgatgtatgaaggagttggagttgttgaaaccaagaggggtccatacggcgttgttctggattcccatcgtaacttaaagggaaactttcacaatgtccggagcccttgatgtcctgcaaatgaaggaggaggatgtccttaagttccttgcagcaggaactcacttaggtggcaccaatcttgacttccagatggaacagtacatctataaaaggaaaagtgatggcatctatatcataaatctgaagaggacctgggagaagcttctgctggcagctcgtgctattgttgccattgaaaaccctgctgatgtcagtgttatatcctccaggaatactggccagagggccgtgctaaagtttgctgctgccactggagccactccaattgctggccgcttcactcctggaaccttcgctaaccagatccaggcagccttccgggagccacggcttcttgtggttactgaccccagggctgaccaccagcctctcatggaggcatcttatgttaacctacctaccattgcgctgtgtaacacagattctcctctgcactatgtggacattgccatcccatgcaacaacaagggagctcactcagtgggtttgatgtggtggatgctggctcgggaagttctgc

SEQ ID NO: 127346 - DNA, 770 bp, Artificial Sequence
  derived and/or modified sequence
acaggaatctgaatttctgtgtttggaatttgatgaggtcaaagtcaaccaaattctgaagacgctgtcagaggtagaagaaagtatcagcacactgatcagccagcctaactgaagatgatgtatgaaggagttggagttgttgaaaccaagtcctttccacgctacctgcagaggggtccatacggcgttgttctggattcccatcgtaacttaaagggaaactttcacaatgtccggagcccttgatgtcctgcaaatgaaggaggaggatgtccttaagttccttgcagcaggaactcacttaggtggcaccaatcttgacttccagatggaacagtacatctataaaaggaaaagtgatggcatctatatcataaatctgaagaggacctgggagaagcttctgctggcagctcgtgctattgttgccattgaaaaccctgctgatgtcagtgttatatcctccaggaatactggccagagggccgtgctaaagtttgctgctgccactggagccactccaattgctggccgcttcactcctggaaccttcgctaaccagatccaggcagccttccgggagccacggcttcttgtggttactgaccccagggctgaccaccagcctctcatggaggcatcttatgttaacctacctaccattgcgctgtgtaacacagattctcctctgcactatgtggacattgccatcccatgcaacaacaagggagctcactcagtgggtttgatgtggtggatgctggctc

SEQ ID NO: 127347 - DNA, 888 bp, Artificial Sequence
  derived and/or modified sequence
atgagcggcgccctggacgtgctgcagatgaaggaggaggacgtgctgaagttcctggccgccggcacccacctgggcggcaccaacctggacttccagatggagcactacatctacaagagaaagagcgacggcatctacatcatcaacctgaagagaacctgggagaagctgctgctggccgccagagccatcgtggccatcgagaaccccgccgacgtgagcgtgatcagcagcagaaacaccggccagagagccgtgctgaagttcgccgccgccaccggcgccacccccatcgccggcagattcacccccggcaccttcaccaaccagatccaggccgccttctgggagcccagactgctggtggtgaccgaccccagagccgaccaccagcccctgaccgaggccagctacgtgaacctgcccaccatcgccctgtgcaacaccgacagccccctgagatacgtggacatcgccatcccctgcaacaacaagggcgcccacagcgtgggcctgatgtggtggatgctggccagagaggtgctgagaatgagaggcaccatcagcagagagcacccctgggaggtgatgcccgacctgtacttctacagagaccccgaggagatcgagaaggaggagcaggccgccgccgagaaggccgtgaccaaggaggagttccagggcgagtggaccgcccccagccccgagttcaccgccacccagcccgaggtggccgactggagcgagggcgtgcaggtgcccagcgtgcccatccagcagttccccaccgaggactggagcgcccagcccgccaccgaggactggagcgccgcccccaccgcccaggccaccgagtgggtgggcgccaccaccgactggagctag

SEQ ID NO: 127348 - DNA, 888 bp, Artificial Sequence
  derived and/or modified sequence
atgtccggggcacttgatgtgctgcagatgaaagaagaagatgtgcttaagttccttgcggctggaacacacttgggcggaacaaatctggattttcaaatggagcattacatatataagcggaaatcagacggcatttatatcatcaatttgaaacggacctgggaaaagctcctgctcgctgcacgcgccattgtcgctattgaaaaccccgccgacgtgtccgtaatctcttcaaggaacacggggcagagggccgtgctcaagtttgctgcagcaacgggggctacgccaatcgcaggaaggttcacacctgggacctttaccaatcagattcaggccgctttctgggagccacgattactggtagttaccgatccccgtgcagaccaccagccactgactgaggcctcttatgttaatctgcctactattgctctgtgtaatacagactcccctctacggtatgtagatatagcaattccatgtaacaacaagggagctcattccgtgggccttatgtggtggatgctggctagggaggttttacgcatgaggggcactatctcccgggagcacccatgggaggtcatgcccgacctgtatttttatagagaccctgaagaaatcgaaaaagaagagcaggcagctgcggagaaagccgtgacaaaagaagaatttcaaggcgagtggactgccccctccccagaatttactgctactcaacccgaggtagccgactggtccgagggagtgcaggtgccatctgtaccgatacaacagtttcccaccgaagactggtctgcccagcctgccacggaagattggtcagccgctcctaccgcacaggctacggaatgggtgggcgcaactacagactggagttag

SEQ ID NO: 127349 - DNA, 888 bp, Artificial Sequence
  derived and/or modified sequence
atgtctggggccctggatgtgctgcagatgaaggaggaggatgtgctgaagttcctggccgccggcacccacctgggcggcaccaacctggacttccagatggagcactacatctacaagaggaagagtgatggcatctacatcatcaacctgaagaggacctgggagaagctgctgctggccgcccgggccatcgtggccattgaaaatccagcagatgtgtctgtcatcagcagcaggaacacaggccagagagctgtgctgaagtttgctgctgccaccggggccacccccatcgccggccgcttcaccccaggcaccttcaccaaccagatccaggccgccttctgggagccccggctgctggtggtgacagaccccagggctgaccaccagcccctgacagaggccagctatgtgaacctgcccaccatcgccctgtgcaacacagacagccccctgcgctacgtggacatcgccatcccctgcaacaacaagggggcccacagcgtgggcctgatgtggtggatgctggcccgggaggtgctgaggatgaggggcaccatcagccgggagcacccctgggaggtgatgccagacctgtacttctacagagatcctgaggagattgagaaggaggagcaggccgctgctgagaaggctgtgaccaaggaggagttccagggcgagtggacagcccccagccctgagttcaccgccacccagcctgaggtggccgactggagcgagggcgtgcaggtgcccagcgtgcccatccagcagttccccacagaggactggagcgcccagcctgccacagaggactggagcgctgcccccacagcccaggccacagagtgggtgggcgccaccacagactggagctag

SEQ ID NO: 127350 - DNA, 888 bp, Artificial Sequence
  derived and/or modified sequence
atgagcggcgccctggacgtgctgcagatgaaggaggaggacgtgctcaagtttctggccgctggcacccatctgggtgggacaaaccttgattttcagatggagcattacatctataagcggaagtcagacgggatatacattatcaacctgaaacggacatgggaaaagctcctgctcgcagcccgggctattgtggcaattgagaaccctgccgacgtaagtgttatctcgtctcgaaataccggccaacgggcagttctgaaatttgctgcagccacaggcgctactccaattgccggcagatttacccccgggactttcaccaaccagatccaagccgcattctgggagcctagattgttagtagtgaccgatccacgcgctgatcatcagcccctgaccgaagcttcatatgttaacctgcctaccatagctttatgcaacacagattccccactcaggtacgttgatatcgctatcccttgtaacaataagggcgcccactctgttggcctgatgtggtggatgctcgcccgagaagtgctgcgcatgaggggtaccataagtagagagcacccgtgggaggtcatgcccgatctttatttttatagagatcccgaagaaattgagaaggaggaacaggccgccgcagaaaaggcagtgacaaaggaggagtttcagggcgagtggactgccccatcgccggaatttacagcaacccagcctgaggtggccgattggagtgagggggtacaagtcccatccgtgcccatccagcagtttcccaccgaggattggagcgcacagcctgccaccgaagactggtctgccgccccaacggctcaggctaccgagtgggtcggggccaccacggactggtcctag

SEQ ID NO: 127351 - DNA, 888 bp, Artificial Sequence
  derived and/or modified sequence
atgagcggtgccctggacgtgctgcagatgaaagaagaggacgttctgaaattcctggcagcgggtacccacctgggtggcacgaacctggactttcagatggaacactatatttacaaacggaaatccgacgggatctacatcatcaatctcaaacggacctgggaaaagctgctcctagctgcaagagctatcgtggcaatagagaacccagccgacgtttcagtcatctcaagtaggaacacagggcagcgggctgtgttaaagtttgcggcagcaactggggctacgccaattgctggcaggtttacacctggcacattcacgaatcagatccaagctgcattttgggaaccccgactgctcgtggtgacagacccacgcgcagatcatcagcccctgaccgaagcatcctatgtgaatctgcctaccattgcactttgcaacacagattctccactgagatacgtggatattgctattccttgtaacaacaagggtgcccattcagttggcctcatgtggtggatgttggctcgagaggtgctaaggatgcgtggcaccatctcccgggagcacccttgggaggtgatgcccgatttgtacttctacagagacccggaagaaatcgaaaaggaagagcaggcggctgccgaaaaagctgtgacaaaggaggagtttcaaggagagtggaccgcaccaagtcctgaattcaccgctacacagcccgaagttgctgactggagcgagggcgtgcaagtgccttcagtgccaatccaacagttccctactgaggactggagcgcccagcctgcaaccgaggactggtccgccgcacccacggcacaggctacagagtgggtcggcgctactacagattggagttag

SEQ ID NO: 127352 - DNA, 997 bp, Artificial Sequence
  derived and/or modified sequence
gttgttctggattcccgtcgtaacttaaagggaaactttcacaatgtccggagcccttgatgtcctgcaaatgaaggaggaggatgtccttaagttccttgcagcaggaacccacttaggtggcaccaatcttgacttccagatggaacactacatctataaaaggaaaagtgatggcatctatatcataaatctcaagaggacctgggagaagcttctgctggcagctcgtgctattgttgccattgaaaaccctgctgatgtcagtgttatatcctccaggaatactggccagagggctgtgctgaagtttgctgctgccactggagccactccaattgctggccgcttcactcctggaaccttcactaaccagatccaggcagccttctgggagccacggcttcttgtggttactgaccccagggctgaccaccagcctctcacggaggcatcttatgttaacctacctaccattgcgctgtgtaacacagattctcctctgcgctatgtggacattgccatcccatgcaacaacaagggagctcactcagtgggtttgatgtggtggatgctggctcgggaagttctgcgcatgcgtggcaccatttcccgtgaacacccatgggaggtcatgcctgatctgtacttctacagagatcctgaagagattgaaaaagaagagcaggctgctgctgagaaggcagtgaccaaggaggaatttcagggtgaatggactgctccctctcctgagttcactgctactcagcctgaggttgcagactggtctgaaggtgtacaggtgccctctgtgcctattcagcaattccctactgaagactggagcgctcagcctgccacggaagactggtctgcagctcccactgctcaggccactgaatgggtaggagcaaccactgactggtcttaagctgttcttgcataggctcttaagcagcatggaaaaatggttgatggaaaataaacatcagtttct

SEQ ID NO: 127353 - protein, 1927 aa, Artificial Sequence
  derived and/or modified sequence
MELSWHVVFIALLSFSCWGSDWESDRNFISTAGPLTNDLLHNLSGLLGDQSSNFVAGDKDMYVCHQPLPTFLPEYFSSLHASQITHYKVFLSWAQLLPAGSTQNPDEKTVQCYRRLLKALKTARLQPMVILHHQTLPASTLRRTEAFADLFADYATFAFHSFGDLVGIWFTFSDLEEVIKELPHQESRASQLQTLSDAHRKAYEIYHESYAFQGGKLSVVLRAEDIPELLLEPPISALAQDTVDFLSLDLSYECQNEASLRQKLSKLQTIEPKVKVFIFNLKLPDCPSTMKNPASLLFSLFEAINKDQVLTIGFDINEFLSCSSSSKKSMSCSLTGSLALQPDQQQDHETTDSSPASAYQRIWEAFANQSRAERDAFLQDTFPEGFLWGASTGAFNVEGGWAEGGRGVSIWDPRRPLNTTEGQATLEVASDSYHKVASDVALLCGLRAQVYKFSISWSRIFPMGHGSSPSLPGVAYYNKLIDRLQDAGIEPMATLFHWDLPQALQDHGGWQNESVVDAFLDYAAFCFSTFGDRVKLWVTFHEPWVMSYAGYGTGQHPPGISDPGVASFKVAHLVLKAHARTWHHYNSHHRPQQQGHVGIVLNSDWAEPLSPERPEDLRASERFLHFMLGWFAHPVFVDGDYPATLRTQIQQMNRQCSHPVAQLPEFTEAEKQLLKGSADFLGLSHYTSRLISNAPQNTCIPSYDTIGGFSQHVNHVWPQTSSSWIRVVPWGIRRLLQFVSLEYTRGKVPIYLAGNGMPIGESENLFDDSLRVDYFNQYINEVLKAIKEDSVDVRSYIARSLIDGFEGPSGYSQRFGLHHVNFSDSSKSRTPRKSAYFFTSIIEKNGFLTKGAKRLLPPNTVNLPSKVRAFTFPSEVPSKAKVVWEKFSSQPKFERDLFYHGTFRDDFLWGVSSSAYQIEGAWDADGKGPSIWDNFTHTPGSNVKDNATGDIACDSYHQLDADLNMLRALKVKAYRFSISWSRIFPTGRNSSINSHGVDYYNRLINGLVASNIFPMVTLFHWDLPQALQDIGGWENPALIDLFDSYADFCFQTFGDRVKFWMTFNEPMYLAWLGYGSGEFPPGVKDPGWAPYRIAHAVIKAHARVYHTYDEKYRQEQKGVISLSLSTHWAEPKSPGVPRDVEAADRMLQFSLGWFAHPIFRNGDYPDTMKWKVGNRSELQHLATSRLPSFTEEEKRFIRATADVFCLNTYYSRIVQHKTPRLNPPSYEDDQEMAEEEDPSWPSTAMNRAAPWGTRRLLNWIKEEYGDIPIYITENGVGLTNPNTEDTDRIFYHKTYINEALKAYRLDGIDLRGYVAWSLMDNFEWLNGYTVKFGLYHVDFNNTNRPRTARASARYYTEVITNNGMPLAREDEFLYGRFPEGFIWSAASAAYQIEGAWRADGKGLSIWDTFSHTPLRVENDAIGDVACDSYHKIAEDLVTLQNLGVSHYRFSISWSRILPDGTTRYINEAGLNYYVRLIDTLLAASIQPQVTIYHWDLPQTLQDVGGWENETIVQRFKEYADVLFQRLGDKVKFWITLNEPFVIAYQGYGYGTAAPGVSNRPGTAPYIVGHNLIKAHAEAWHLYNDVYRASQGGVISITISSDWAEPRDPSNQEDVEAARRYVQFMGGWFAHPIFKNGDYNEVMKTRIRDRSLAAGLNKSRLPEFTESEKRRINGTYDFFGFNHYTTVLAYNLNYATAISSFDADRGVASIADRSWPDSGSFWLKMTPFGFRRILNWLKEEYNDPPIYVTENGVSQREETDLNDTARIYYLRTYINEALKAVQDKVDLRGYTVWSAMDNFEWATGFSERFGLHFVNYSDPSLPRIPKASAKFYASVVRCNGFPDPATGPHACLHQPDAGPTISPVRQEEVQFLGLMLGTTEAQTALYVLFSLVLLGVCGLAFLSYKYCKRSKQGKTQRSQQELSPVSSF

SEQ ID NO: 127354 - protein, 1003 aa, Artificial Sequence
  derived and/or modified sequence
KVAHLVLKAHARTWHHYNSHHRPQQQGHVGIVLNSDWAEPLSPERPEDLRASERFLHFMLGWFAHPVFVDGDYPATLRTQIQQMNRQCSHPVAQLPEFTEAEKQLLKGSADFLGLSHYTSRLISNAPQNTCIPSYDTIGGFSQHVNHVWPQTSSSWIRVVPWGIRRLLQFVSLEYTRGKVPIYLAGNGMPIGESENLFDDSLRVDYFNQYINEVLKAIKEDSVDVRSYIARSLIDGFEGPSGYSQRFGLHHVNFSDSSKSRTPRKSAYFFTSIIEKNGFLTKGAKRLLPPNTVNLPSKVRAFTFPSEVPSKAKVVWEKFSSQPKFERDLFYHGTFRDDFLWGVSSSAYQIEGAWDADGKGPSIWDNFTHTPGSNVKDNATGDIACDSYHQLDADLNMLRALKVKAYRFSISWSRIFPTGRNSSINSHGVDYYNRLINGLVASNIFPMVTLFHWDLPQALQDIGGWENPALIDLFDSYADFCFQTFGDRVKFWMTFNEPMYLAWLGYGSGEFPPGVKDPGWAPYRIAHAVIKAHARVYHTYDEKYRQEQKGVISLSLSTHWAEPKSPGVPRDVEAADRMLQFSLGWFAHPIFRNGDYPDTMKWKVGNRSELQHLATSRLPSFTEEEKRFIRATADVFCLNTYYSRIVQHKTPRLNPPSYEDDQEMAEEEDPSWPSTAMNRAAPWGTRRLLNWIKEEYGDIPIYITENGVGLTNPNTEDTDRIFYHKTYINEALKAYRLDGIDLRGYVAWSLMDNFEWLNGYTVKFGLYHVDFNNTNRPRTARASARYYTEVITNNGMPLAREDEFLYGRFPEGFIWSAASAAYQIEGAWRADGKGLSIWDTFSHTPLRVENDAIGDVACDSYHKIAEDLVTLQNLGVSHYRFSISWSRILPDGTTRYINEAGLNYYVRLIDTLLAASIQPQVTIYHWDLPQTLQDVGGWENETIVQRFKEYADVLFQRLGDKVKFWITLNEPFVIAYQGYGYGTAAPVHGRLVCTSYFQEWRLQ

SEQ ID NO: 127355 - DNA, 5784 bp, Artificial Sequence
  derived and/or modified sequence
atggaactgtcttggcacgtggttttcatcgcattgctctcattttcctgctgggggtccgactgggaaagtgatagaaatttcataagcactgctgggccccttacgaacgatttgcttcacaacctcagcgggctgctaggagatcagtccagcaattttgtcgcaggagataaggacatgtatgtatgccaccagcccctgcctaccttcctgcctgagtatttttccagccttcatgcctcccaaatcacacactacaaagtattcctctcttgggcccaactgctacccgccggatcgactcagaacccagatgagaaaactgtacagtgttaccgtagactcctaaaggcgcttaagacagcacggctgcaaccaatggtgatcttacatcaccagacactgcccgccagcactctgcggagaaccgaggctttcgctgacctgttcgccgactatgctacatttgcattccacagtttcggagacttagtcgggatctggtttaccttcagcgatctcgaagaagtgatcaaggagctccctcatcaggaaagccgagcatcacaattgcagactctgtcggacgctcatcggaaggcctatgagatctaccatgagagctatgcgttccagggagggaaactctcagtcgtgctgagagctgaggatatcccagagttgctcctggaaccccctatctcggctctggcccaagacactgtcgatttcctcagcctggacctgtcgtacgagtgtcagaacgaagcttcactgaggcagaaactatcgaagctgcagacaatagagcctaaggttaaagtcttcatcttcaatcttaaattaccagattgccctagtactatgaaaaatccggcatccctgctcttcagcctgtttgaggctattaataaagatcaggttcttaccattggctttgacataaatgaatttctcagttgctcctctagctcaaagaaaagtatgtcatgctcactgacaggttcgctcgccttgcaacctgatcaacaacaggatcacgaaaccactgactctagccctgctagtgcctatcagcggatttgggaggctttcgccaatcagagccgggctgaaagggatgcctttctgcaggataccttccccgaaggctttctgtggggcgccagtacaggtgcattcaacgtggagggggggtgggccgaaggcggtcgcggcgtgtctatctgggatccccgacgccccctcaatacgacggaggggcaggcgactctcgaggtagcctcggacagttatcataaagtggcttccgatgttgcattgctgtgtggattgcgagcccaggtgtataagttttccataagttggtctcggatctttcctatgggacatggctctagtcccagtctgcccggagtagcctactataacaagctgatcgacagactgcaagatgcaggtattgagcctatggctacgctcttccactgggatctccctcaggcccttcaagaccacggaggctggcaaaacgagagtgtggtcgatgcgtttctggattacgccgctttttgcttctcaaccttcggagatagggttaagctgtgggtcaccttccacgaaccttgggtgatgtcttacgccgggtacggaaccggtcaacatccccccggaatcagcgacccaggggtggcgagttttaaagtggcccatctggtgcttaaggctcacgcccggacctggcatcactacaactcacatcatcgcccacagcaacagggacacgtcgggattgtcctgaatagcgattgggccgaacctctgtccccagagaggcctgaggatttgagagccagtgagcggttcctccatttcatgctggggtggtttgcgcaccccgtctttgtagacggggactatcctgcgaccttgcggacacagattcaacaaatgaatcgccaatgttctcaccctgtggcccagttacccgagttcactgaggctgagaagcagctgctgaaagggtcggctgatttcttaggcctcagccattatacatcgcgcttgattagcaacgcaccgcagaacacgtgtatccctagttatgacaccatcggcggcttttcccagcatgtaaatcatgtttggccgcagacctccagctcgtggatccgtgtcgtaccttggggcatcaggcgtctgctgcagttcgtgagtcttgagtatactcggggcaaggtgccaatctacttagccggaaatggcatgcctatcggcgaaagtgagaatcttttcgatgattccttacgcgtggactactttaatcagtatataaatgaagtgcttaaagctatcaaggaggacagtgtggatgttaggtcttatatcgcgcgctctctcatcgacggttttgaaggcccatccggatacagccagcgctttggactgcaccatgtcaatttttccgatagcagcaaaagccgtactccaagaaagagcgcctactttttcacctcaataatagagaaaaatggctttctgacaaaaggcgccaaaaggctgcttcctccaaataccgtcaatcttccatcaaaggtccgtgcctttacatttcccagtgaggtccccagtaaggccaaggttgtctgggagaaattctcctcacagccaaaattcgagcgagacttgttttatcacggtacattcagagacgactttctctggggcgtttcctcttccgcttatcagatcgagggggcctgggatgcagatggaaagggaccaagcatctgggataattttactcatacccctggtagtaatgtgaaagacaacgcgaccggcgacatcgcctgcgactcctaccaccaactggatgcagatcttaacatgcttagggcgctgaaagtcaaggcctatcggttctccatctcctggtctaggatttttccaactggtagaaatagttccataaactcccatggtgtggactactacaatcggctgatcaacggactggtagccagcaatatcttcccaatggtgaccctctttcactgggatctaccgcaggctttacaggatatcggtggctgggagaaccccgcattgatcgatctctttgactcatatgccgatttttgcttccagaccttcggtgatagagtcaagttctggatgacctttaacgaaccgatgtatctagcttggttaggctatgggtccggggagtttccccccggtgttaaggaccccggttgggctccctacagaattgctcacgctgttattaaggcccatgcccgggtgtatcacacatatgatgagaagtaccgacaggagcagaagggagtcattagcttgtcgctgtctacccattgggcagaacccaagtcccctggagtccccagggatgtcgaagccgccgacaggatgctgcagttctctctaggctggtttgcccacccgattttccggaatggggactacccagacacaatgaaatggaaagtcggcaatagatctgagctgcagcacttggccacctctcgactgcctagtttcacagaggaggaaaaacggttcattcgtgccactgctgatgttttttgcctgaacacatactattcacggatcgtgcagcacaagacgccaagactgaacccaccatcctacgaagatgaccaggagatggctgaagaagaagatccctcgtggcccagcacggccatgaatcgtgcagccccatgggggacacggcgattgctgaattggattaaggaagaatatggagatatccccatatacatcacagagaacggggtgggtcttaccaatccaaataccgaggacacagatcggatcttctaccacaagacctatataaatgaagcactgaaggcctatcgactagacggcatagaccttcggggatacgtggcatggtcactcatggataatttcgaatggctgaatggctacacagtgaagtttgggctgtaccacgtcgacttcaacaatactaatagacccaggacagcacgcgccagcgctaggtattacacggaggttatcaccaataacgggatgcctttggcccgcgaagatgagtttctttatggaagatttccggagggattcatttggtctgcagcaagtgccgcctatcagatcgaaggcgcctggcgtgccgatgggaagggactgtccatttgggatacattttcacataccccacttcgggtagagaacgacgctatcggtgatgtagcctgcgactcttaccacaagatcgcggaggacctagtgaccctacagaatctcggcgtgagccactaccgcttctctatttcttggtcccgtatcttgcccgatgggacaacaagatatatcaacgaggcgggactcaactactacgtccgattaatagatactctcctggcagcatccatccagccccaggtcacaatctaccactgggatctaccccagacactgcaggatgttgggggatgggagaacgaaactattgtgcagagattcaaggagtacgctgatgtcctgtttcagagactaggcgacaaggtgaagttctggattaccctcaatgagccatttgtgattgcataccagggatacgggtacgggaccgctgctcctggcgtgagcaatcgtcccggtacggcaccgtatatcgtgggtcataatttaatcaaggcacatgccgaggcatggcacctgtacaatgatgtgtatcgcgcgtctcagggaggtgtgatctcaataacaatctcaagtgactgggctgaaccccgagacccgagtaatcaggaggacgttgaggctgcacgccgatacgtacaatttatgggcggctggttcgcacacccgatctttaaaaacggtgactacaacgaggtcatgaagacgcgtatccgcgatagatccttagccgccggcctcaataaaagccgccttcctgaattcacggaaagcgaaaaacgcagaattaatggcacctacgatttctttggctttaaccactataccactgtgttggcttacaatctaaattatgccactgccattagttcatttgatgcggataggggtgtggcatcaatcgctgaccgaagttggccagactccgggagcttttggctgaagatgaccccctttggctttagaaggatccttaactggctgaaagaggagtataatgatccacctatttatgtaacagaaaatggggtgagccaacgtgaggagacggatcttaacgataccgcaagaatctattatttacgtacgtacatcaatgaggcccttaaagcggtccaggacaaggtggacttgaggggctataccgtttggtcagcaatggacaactttgagtgggctactggctttagcgagaggtttggcctacattttgtgaactattccgacccatcactgccccggatcccaaaagcatctgcaaaattctacgcaagcgtggtgcgttgcaatggtttccctgatcccgccaccggacctcacgcatgtttgcaccagcccgacgccgggcccacgatatcacctgtaagacaggaggaagttcagttcctgggcctgatgctggggacaactgaagcccagacagccctgtatgtgctgtttagcctcgtactgctcggtgtctgcggattagcttttctgtcttataagtactgtaagcggtctaagcagggcaaaacacagagaagccagcaagagttgtcaccagtgagcagcttttag

SEQ ID NO: 127356 - DNA, 3012 bp, Artificial Sequence
  derived and/or modified sequence
aaggtggctcacctcgtgttaaaagctcatgccagaacttggcaccattacaactctcatcaccgccctcagcagcaaggccacgtgggcattgtgcttaatagtgattgggcagagcccctatctccggagcgcccggaggatctgagggcatcagagcggttcttacactttatgctgggatggtttgctcacccggtgttcgttgatggcgactatccggcaactctgcgaacccagattcagcagatgaacagacagtgctcacatcctgttgctcaacttcctgagtttactgaagctgagaaacaactgctgaagggcagcgcagatttcctgggactcagtcactacacctctcggctcattagcaatgccccacagaacacttgcatcccatcctacgatactatcgggggcttcagccagcacgttaatcacgtgtggccacaaacctctagcagctggattagagtagtgccctggggcataaggcggctcttgcagttcgtgagcctagagtacactcggggcaaagtaccgatttacctggccgggaatggaatgcctattggagagtctgagaacctgttcgatgattctctcagggtggattattttaatcaatacataaacgaagttctgaaagcgattaaagaggacagcgtcgatgtgcgctcgtacatagcacgtagtctcattgacggattcgagggcccttcagggtacagtcagagattcggactccaccatgtgaatttttccgactcgtctaagtccaggacacccaggaaatcggcatactttttcacatccattatcgagaagaacggttttttgaccaagggcgctaagcgcttactgccacccaacacagtaaacttaccgagcaaggttcgagcttttacattcccttctgaggtcccttccaaggctaaggtcgtgtgggaaaaattttcaagtcagcccaaatttgaacgtgatcttttttaccacggtacgttccgggatgactttctttggggcgtatcttctagcgcctatcaaattgaaggcgcttgggatgccgatgggaagggacctagcatctgggacaatttcacacacactcccggcagtaacgtgaaagacaatgcaactggggatattgcatgcgactcataccaccaacttgatgctgacttgaatatgcttagagcgctgaaagtgaaggcctatcgattctcaattagttggagccgcatattccccaccggacgaaacagctctatcaatagtcacggggtcgactattataaccgattgatcaatggcctagtcgcctcaaatatttttccaatggtcactctgtttcattgggacctgccacaggctctgcaagacattggagggtgggagaacccagcactgatcgatctctttgattcttacgcagatttctgttttcagacattcggggatagggtcaaattctggatgactttcaatgaaccaatgtacttggcgtggctagggtacggatccggcgagtttccgcctggggtgaaagaccctggatgggccccctatagaatcgcccacgccgtaattaaagcccacgcccgcgtttatcatacatacgatgagaagtatagacaggaacagaagggggtaattagtctcagtctctccacacattgggccgagcccaagtcccccggggtgccccgagacgtggaagccgccgaccggatgctccagtttagcttggggtggttcgctcacccaatctttcgcaatggcgactatccagataccatgaaatggaaagtgggcaatcgaagtgagctgcagcatctcgccacttctcgtctgcccagctttactgaagaagaaaaaaggtttattagggctacggccgacgttttttgtcttaatacatactatagtcggattgtacaacacaagaccccacgcctgaaccccccctcatacgaggatgatcaggagatggctgaggaagaggacccttcttggcccagcaccgccatgaatcgggctgctccttggggcacccggcggttactgaattggatcaaggaggaatatggagatattcccatttacataacggaaaatggggtcggcctgaccaaccccaacaccgaggatacggaccggattttctatcataaaacctacatcaatgaagctctgaaagcatatagactggatggcatcgatttgcgcgggtacgtggcttggtccctgatggataattttgagtggctaaatgggtacacagtcaagttcggattataccatgtagatttcaataataccaatagacctcggactgccagagcctctgccaggtattacaccgaagttattactaacaatgggatgcccttggctcgcgaggacgaattcctgtacggtaggtttcctgaaggttttatctggtccgccgcgtctgcagcatatcagatcgagggcgcctggcgcgccgacgggaaaggtttgtcaatctgggatacattctcacatacacctctccgagtggagaatgacgctatcggcgatgtagcctgtgatagttaccacaagattgccgaagatctggtgacattgcaaaaccttggggtatcccactatcgcttttccatttcgtggtcacggattctgcccgacgggaccactaggtacatcaacgaggcagggctcaactactacgtgcgcttgatcgacacacttctcgccgctagcattcaaccacaggtcaccatctaccactgggatttaccacagacacttcaggacgtgggcggctgggagaacgagaccattgtccagcgatttaaggaatacgctgacgtgctgtttcagcggcttggtgacaaggtgaaattttggataactttgaacgaaccattcgtgatcgcgtaccaaggttatggctatggaacggccgcccccgtccatggccggctcgtatgcaccagctacttccaggaatggaggctgcaatag

SEQ ID NO: 127357 - DNA, 6279 bp, Artificial Sequence
  derived and/or modified sequence
gttcctagaaaatggagctgtcttggcatgtagtctttattgccctgctaagtttttcatgctgggggtcagactgggagtctgatagaaatttcatttccaccgctggtcctctaaccaatgacttgctgcacaacctgagtggtctcctgggagaccagagttctaactttgtagcaggggacaaagacatgtatgtttgtcaccagccactgcccactttcctgccagaatacttcagcagtctccatgccagtcagatcacccattataaggtatttctgtcatgggcacagctcctcccagcaggaagcacccagaatccagacgagaaaacagtgcagtgctaccggcgactcctcaaggccctcaagactgcacggcttcagcccatggtcatcctgcaccaccagaccctccctgccagcaccctccggagaaccgaagcctttgctgacctcttcgccgactatgccacattcgccttccactccttcggggacctagttgggatctggttcaccttcagtgacttggaggaagtgatcaaggagcttccccaccaggaatcaagagcgtcacaactccagaccctcagtgatgcccacagaaaagcctatgagatttaccacgaaagctatgcttttcagggcggaaaactctctgttgtcctgcgagctgaagatatcccggagctcctgctagaaccacccatatctgcgcttgcccaggacacggtcgatttcctctctcttgatttgtcttatgaatgccaaaatgaggcaagtctgcggcagaagctgagtaaattgcagaccattgagccaaaagtgaaagttttcatcttcaacctaaaactcccagactgcccctccaccatgaagaacccagccagtctgctcttcagcctttttgaagccataaataaagaccaagtgctcaccattgggtttgatattaatgagtttctgagttgttcatcaagttccaagaaaagcatgtcttgttctctgactggcagcctggcccttcagcctgaccagcagcaggaccacgagaccacggactcctctcctgcctctgcctatcagagaatctgggaagcatttgccaatcagtccagggcggaaagggatgccttcctgcaggatactttccctgaaggcttcctctggggtgcctccacaggagcctttaacgtggaaggaggctgggccgagggtgggagaggggtgagcatctgggatccacgcaggcccctgaacaccactgagggccaagcgacgctggaggtggccagcgacagttaccacaaggtagcctctgacgtcgccctgctttgcggcctccgggctcaggtgtacaagttctccatctcctggtcccggatcttccccatggggcacgggagcagccccagcctcccaggcgttgcctactacaacaagctgattgacaggctacaggatgcgggcatcgagcccatggccacgctgttccactgggacctgcctcaggccctgcaggatcatggtggatggcagaatgagagcgtggtggatgccttcctggactatgcggccttctgcttctccacatttggggaccgtgtgaagctgtgggtgaccttccatgagccgtgggtgatgagctacgcaggctatggcaccggccagcaccctcccggcatctctgacccaggagtggcctcttttaaggtggctcacttggtcctcaaggctcatgccagaacttggcaccactacaacagccatcatcgcccacagcagcaggggcacgtgggcattgtgctgaactcagactgggcagaacccctgtctccagagaggcctgaggacctgagagcctctgagcgcttcttgcacttcatgctgggctggtttgcacaccccgtctttgtggatggagactacccagccaccctgaggacccagatccaacagatgaacagacagtgctcccatcctgtggctcaactccccgagttcacagaggcagagaagcagctcctgaaaggctctgctgattttctgggtctgtcgcattacacctcccgcctcatcagcaacgccccacaaaacacctgcatccctagctatgataccattggaggcttctcccaacacgtgaaccatgtgtggccccagacctcatcctcttggattcgtgtggtgccctgggggataaggaggctgttgcagtttgtatccctggaatacacaagaggaaaagttccaatataccttgccgggaatggcatgcccataggggaaagtgaaaatctctttgatgattccttaagagtagactacttcaatcaatatatcaatgaggtgctcaaggctatcaaggaagactctgtggatgttcgttcctacattgctcgttccctcattgatggcttcgaaggcccttctggttacagccagcggtttggcctgcaccacgtcaacttcagcgacagcagcaagtcaaggactcccaggaaatctgcctactttttcactagcatcatagaaaagaacggtttcctcaccaagggggcaaaaagactgctaccacctaatacagtaaacctcccctccaaagtcagagccttcacttttccatctgaggtgccctccaaggctaaagtcgtttgggaaaagttctccagccaacccaagttcgaaagagatttgttctaccacgggacgtttcgggatgactttctgtggggcgtgtcctcttccgcttatcagattgaaggcgcgtgggatgccgatggcaaaggccccagcatctgggataactttacccacacaccagggagcaatgtgaaagacaatgccactggagacatcgcctgtgacagctatcaccagctggatgccgatctgaatatgctccgagctttgaaggtgaaggcctaccgcttctctatctcctggtctcggattttcccaactgggagaaacagctctatcaacagtcatggggttgattattacaacaggctgatcaatggcttggtggcaagcaacatctttcccatggtgacattgttccattgggacctgccccaggccctccaggatatcggaggctgggagaatcctgccttgattgacttgtttgacagctacgcagacttttgtttccagacctttggtgatagagtcaagttttggatgacttttaatgagcccatgtacctggcatggctaggttatggctcaggggaatttcccccaggggtgaaggacccaggctgggcaccatataggatagcccacgccgtcatcaaagcccatgccagagtctatcacacgtacgatgagaaatacaggcaggagcagaagggggtcatctcgctgagcctcagtacacactgggcagagcccaagtcaccaggggtccccagagatgtggaagccgctgaccgaatgctgcagttctccctgggctggtttgctcaccccatttttagaaacggagactatcctgacaccatgaagtggaaagtggggaacaggagtgaactgcagcacttagccacctcccgcctgccaagcttcactgaggaagagaagaggttcatcagggcgacggccgacgtcttctgcctcaacacgtactactccagaatcgtgcagcacaaaacacccaggctaaacccaccctcctacgaagacgaccaggagatggctgaggaggaggacccttcgtggccttccacggcaatgaacagagctgcgccctgggggacgcgaaggctgctgaactggatcaaggaagagtatggtgacatccccatttacatcaccgaaaacggagtggggctgaccaatccgaacacggaggatactgataggatattttaccacaaaacctacatcaatgaggctttgaaagcctacaggctcgatggtatagaccttcgagggtatgtcgcctggtctctgatggacaactttgagtggctaaatggctacacggtcaagtttggactgtaccatgttgatttcaacaacacgaacaggcctcgcacagcaagagcctccgccaggtactacacagaggtcattaccaacaacggcatgccactggccagggaggatgagtttctgtacggacggtttcctgagggcttcatctggagtgcagcttctgctgcatatcagattgaaggtgcgtggagagcagatggcaaaggactcagcatttgggacacgttttctcacacaccactgagggttgagaacgatgccattggagacgtggcctgtgacagttatcacaagattgctgaggatctggtcaccctgcagaacctgggcgtgtcccactaccgtttttccatctcctggtctcgcatcctccctgatggaaccaccaggtacatcaatgaagcgggcctgaactactacgtgaggctcatcgatacactgctggccgccagcatccagccccaggtgaccatttaccactgggacctaccacagacgctccaagatgtaggaggctgggagaatgagaccatcgtgcagcggtttaaggagtatgcagatgtgctcttccagaggctgggagacaaggtgaagttttggatcacgctgaatgagccctttgtcattgcttaccagggctatggctacggaacagcagctccaggagtctccaataggcctggcactgccccctacattgttggccacaatctaataaaggctcatgctgaggcctggcatctgtacaacgatgtgtaccgcgccagtcaaggtggcgtgatttccatcaccatcagcagtgactgggctgaacccagagatccctctaaccaggaggatgtggaggcagccaggagatatgttcagttcatgggaggctggtttgcacatcctattttcaagaatggagattacaatgaggtgatgaagacgcggatccgtgacaggagcttggctgcaggcctcaacaagtctcggctgccagaatttacagagagtgagaagaggaggatcaacggcacctatgacttttttgggttcaatcactacaccactgtcctcgcctacaacctcaactatgccactgccatctcttcttttgatgcagacagaggagttgcttccatcgcagatcgctcgtggccagactctggctccttctggctgaagatgacgccttttggcttcaggaggatcctgaactggttaaaggaggaatacaatgaccctccaatttatgtcacagagaatggagtgtcccagcgggaagaaacagacctcaatgacactgcaaggatctactaccttcggacttacatcaatgaggccctcaaagctgtgcaggacaaggtggaccttcgaggatacacagtttggagtgcgatggacaattttgagtgggccacaggcttttcagagagatttggtctgcattttgtgaactacagtgacccttctctgccaaggatccccaaagcatcagcgaagttctacgcctctgtggtccgatgcaatggcttccctgaccccgctacagggcctcacgcttgtctccaccagccagatgctggacccaccatcagccccgtgagacaggaggaggtgcagttcctggggctaatgctcggcaccacagaagcacagacagctttgtacgttctcttttctcttgtgcttcttggagtctgtggcttggcatttctgtcatacaagtactgcaagcgctctaagcaagggaaaacacaacgaagccaacaggaattgagcccggtgtcttcattctgatgagttaccacctcaagttctatgaagcaggcctagtttcttcatctatgtttaccggccaccaaacaccttagggtcttagactctgctgatactggacttctccataaagtcctgctgcaccgttagagatgactttaatcttgaatgatttcgacttgctgagtaaaatggaaatatctccatcttgctccagtatcagagttcatttgggcatttgagaagcaagtagctcttgcggaaacgtgtagatactggtctagtgggtctgtgaaccacttaattgaacttaacagggctgttttaagtttcagagttgttaagggttgttaagggagcaaaaaccgtaaaaatccttcctataagaagaaatcaactccattgcatagactgcaatatcatctcctgcccttctgcaagctctccctagcttcacatcttgtgttttccagaaaataaaaacagcagactgtcctttctccta

SEQ ID NO: 127358 - DNA, 3012 bp, Artificial Sequence
  derived and/or modified sequence
aaggtggctcacttggtcctcaaggctcatgccagaacttggcaccactacaacagccatcatcgcccacagcagcaggggcacgtgggcattgtgctgaactcagactgggcagaacccctgtctccagagaggcctgaggacctgagagcctctgagcgcttcttgcacttcatgctgggctggtttgcacaccccgtctttgtggatggagactacccagccaccctgaggacccagatccaacagatgaacagacagtgctcccatcctgtggctcaactccccgagttcacagaggcagagaagcagctcctgaaaggctctgctgattttctgggtctgtcgcattacacctcccgcctcatcagcaacgccccacaaaacacctgcatccctagctatgataccattggaggcttctcccaacacgtgaaccatgtgtggccccagacctcatcctcttggattcgtgtggtgccctgggggataaggaggctgttgcagtttgtatccctggaatacacaagaggaaaagttccaatataccttgccgggaatggcatgcccataggggaaagtgaaaatctctttgatgattccttaagagtagactacttcaatcaatatatcaatgaggtgctcaaggctatcaaggaagactctgtggatgttcgttcctacattgctcgttccctcattgatggcttcgaaggcccttctggttacagccagcggtttggcctgcaccacgtcaacttcagcgacagcagcaagtcaaggactcccaggaaatctgcctactttttcactagcatcatagaaaagaacggtttcctcaccaagggggcaaaaagactgctaccacctaatacagtaaacctcccctccaaagtcagagccttcacttttccatctgaggtgccctccaaggctaaagtcgtttgggaaaagttctccagccaacccaagttcgaaagagatttgttctaccacgggacgtttcgggatgactttctgtggggcgtgtcctcttccgcttatcagattgaaggcgcgtgggatgccgatggcaaaggccccagcatctgggataactttacccacacaccagggagcaatgtgaaagacaatgccactggagacatcgcctgtgacagctatcaccagctggatgccgatctgaatatgctccgagctttgaaggtgaaggcctaccgcttctctatctcctggtctcggattttcccaactgggagaaacagctctatcaacagtcatggggttgattattacaacaggctgatcaatggcttggtggcaagcaacatctttcccatggtgacattgttccattgggacctgccccaggccctccaggatatcggaggctgggagaatcctgccttgattgacttgtttgacagctacgcagacttttgtttccagacctttggtgatagagtcaagttttggatgacttttaatgagcccatgtacctggcatggctaggttatggctcaggggaatttcccccaggggtgaaggacccaggctgggcaccatataggatagcccacgccgtcatcaaagcccatgccagagtctatcacacgtacgatgagaaatacaggcaggagcagaagggggtcatctcgctgagcctcagtacacactgggcagagcccaagtcaccaggggtccccagagatgtggaagccgctgaccgaatgctgcagttctccctgggctggtttgctcaccccatttttagaaacggagactatcctgacaccatgaagtggaaagtggggaacaggagtgaactgcagcacttagccacctcccgcctgccaagcttcactgaggaagagaagaggttcatcagggcgacggccgacgtcttctgcctcaacacgtactactccagaatcgtgcagcacaaaacacccaggctaaacccaccctcctacgaagacgaccaggagatggctgaggaggaggacccttcgtggccttccacggcaatgaacagagctgcgccctgggggacgcgaaggctgctgaactggatcaaggaagagtatggtgacatccccatttacatcaccgaaaacggagtggggctgaccaatccgaacacggaggatactgataggatattttaccacaaaacctacatcaatgaggctttgaaagcctacaggctcgatggtatagaccttcgagggtatgtcgcctggtctctgatggacaactttgagtggctaaatggctacacggtcaagtttggactgtaccatgttgatttcaacaacacgaacaggcctcgcacagcaagagcctccgccaggtactacacagaggtcattaccaacaacggcatgccactggccagggaggatgagtttctgtacggacggtttcctgagggcttcatctggagtgcagcttctgctgcatatcagattgaaggtgcgtggagagcagatggcaaaggactcagcatttgggacacgttttctcacacaccactgagggttgagaacgatgccattggagacgtggcctgtgacagttatcacaagattgctgaggatctggtcaccctgcagaacctgggcgtgtcccactaccgtttttccatctcctggtctcgcatcctccctgatggaaccaccaggtacatcaatgaagcgggcctgaactactacgtgaggctcatcgatacactgctggccgccagcatccagccccaggtgaccatttaccactgggacctaccacagacgctccaagatgtaggaggctgggagaatgagaccatcgtgcagcggtttaaggagtatgcagatgtgctcttccagaggctgggagacaaggtgaagttttggatcacgctgaatgagccctttgtcattgcttaccagggctatggctacggaacagcagctccagttcatgggaggctggtttgcacatcctattttcaagaatggagattacaatga

SEQ ID NO: 127359 - DNA, 5784 bp, Artificial Sequence
  derived and/or modified sequence
atggagctgtcctggcacgtggtgttcatcgccctgctgtccttcagctgctggggcagtgactgggagagtgacaggaacttcatcagcacagctggccccctgaccaatgacctgctgcacaacctgagcggcctgctgggggaccagagcagcaactttgtggccggggacaaggacatgtatgtgtgccaccagcccctgcccaccttcctgcctgagtacttcagcagcctgcacgccagccagatcacccactacaaggtgttcctgtcctgggcccagctgctgcctgctggcagcacccagaacccagatgagaagacagtgcagtgctaccgccgcctgctgaaggccctgaagacagcccggctgcagcccatggtgatcctgcaccaccagaccctgcctgccagcaccctgcggaggacagaggcctttgctgacctgtttgctgactatgccacctttgccttccacagctttggagacctggtgggcatctggttcaccttcagtgacctggaggaggtgatcaaggagctgccccaccaggagagccgggccagccagctgcagaccctgagtgatgcccacaggaaggcctatgagatctaccacgagagctatgccttccagggcggcaagctgtctgtggtgctgcgggcagaggacatccctgagctgctgctggagccccccatcagcgccctggcccaggacacagtggacttcctgagcctggacctgtcctatgagtgccagaatgaggccagcctgcggcagaagctgagcaagctgcagaccatcgagcccaaggtgaaggtgttcatcttcaacctgaagctgcctgactgccccagcaccatgaagaacccagccagcctgctcttcagcctgtttgaggccatcaacaaggaccaggtgctgaccatcggctttgacatcaatgagttcctgagctgcagcagcagcagcaagaagtccatgagctgcagcctgaccggcagcctggccctgcagcctgaccagcagcaggaccacgagaccacagacagcagccctgccagcgcctaccagaggatctgggaggcctttgccaaccagagcagagctgagagagatgccttcctgcaggacaccttccctgagggcttcctgtggggcgccagcactggagccttcaacgtggagggcggctgggccgagggcggccggggcgtgtccatctgggacccccggcggcccctgaacaccacagagggccaggccaccctggaggtggccagtgacagctaccacaaggtggccagtgatgtggccctgctgtgtggcctgcgggcccaggtgtacaagttcagcatctcctggagccgcatcttccccatgggccacggcagcagccccagcctgcccggggtggcctactacaacaagctgattgaccggctgcaggatgctggcatcgagcccatggccaccctcttccactgggacctgccccaggccctgcaggaccatggaggctggcagaatgaatctgtggtggatgccttcctggactatgctgccttctgcttcagcaccttcggggacagagtgaagctgtgggtgaccttccacgagccctgggtgatgtcctatgccggctatggaacaggccagcaccccccaggcatcagtgaccccggggtggccagcttcaaggtggcccacctggtgctgaaggcccacgcccggacctggcaccactacaacagccaccaccggccccagcagcagggccacgtgggcatcgtgctgaacagcgactgggccgagcccctgagccctgagaggcctgaggacctgcgggccagcgagcgcttcctgcacttcatgctgggctggtttgcccaccctgtgtttgtggatggagactacccagccaccctgcggacccagatccagcagatgaaccggcagtgcagccaccctgtggcccagctgcctgagttcacagaagctgagaagcagctgctgaagggcagcgctgacttcctgggcctgagccactacaccagccgcctcatcagcaatgccccccagaacacctgcatccccagctatgacaccatcggcggcttcagccagcacgtgaaccacgtgtggccccagaccagcagctcctggatccgggtggtgccctggggcatccggcggctgctgcagtttgtgtccctggagtacacccggggcaaggtgcccatctacctggccggaaatggcatgcccatcggggagagcgagaacctgtttgatgacagcctgcgggtggactacttcaaccagtacatcaatgaggtgctgaaggccatcaaggaggacagcgtggatgtgcgcagctacatcgcccggagcctgattgatggctttgagggccccagcggctacagccagagatttggcctgcaccacgtgaacttcagtgacagcagcaagagcaggacccccaggaagagcgcctacttcttcaccagcatcatcgagaagaatggcttcctgaccaagggggccaagaggctgctgccccccaacacagtgaacctgcccagcaaggtgcgggccttcaccttccccagcgaggtgcccagcaaggccaaggtggtgtgggagaagttcagcagccagcccaagtttgagcgggacctcttctaccacggcaccttcagagatgacttcctgtggggcgtgagcagcagcgcctaccagatcgagggcgcctgggatgctgatggcaagggccccagcatctgggacaacttcacccacaccccaggcagcaatgtgaaggacaatgccaccggggacatcgcctgtgacagctaccaccagctggatgctgacctgaacatgctgcgggccctgaaggtgaaggcctaccgcttcagcatctcctggagccgcatcttccccaccggcaggaacagcagcatcaacagccatggagtggactactacaacagactcatcaatggcctggtggccagcaacatcttccccatggtgaccctcttccactgggacctgccccaggccctgcaggacatcggcggctgggagaacccagccctgattgacctgtttgacagctatgctgacttctgcttccagacctttggagacagagtgaagttctggatgaccttcaatgagcccatgtacctggcctggctgggctacggcagcggggagttccccccaggagtgaaggaccccggctgggccccctacagaattgcccacgccgtcatcaaggcccacgcccgggtgtaccacacctatgatgagaagtaccggcaggagcagaagggcgtcatcagcctgagcctgagcacccactgggccgagcccaagagccctggggtgcccagagatgtggaggccgctgacaggatgctgcagttcagcctgggctggtttgcccaccccatcttcagaaatggagactacccagacaccatgaagtggaaggtgggcaacagaagtgagctgcagcacctggccaccagccggctgcccagcttcacagaggaggagaagcgcttcatccgggccacagcagatgtgttctgcctgaacacctactacagcagaattgtgcagcacaagaccccccggctgaaccccccatcctatgaagatgaccaggagatggccgaggaggaggaccccagctggcccagcacagccatgaacagagctgccccctggggcacccggcggctgctgaactggatcaaggaggagtatggagacatccccatctacatcacagaaaatggagtgggcctgaccaaccccaacacagaggacacagaccgcatcttctaccacaagacctacatcaatgaggccctgaaggcctaccgcctggatggcatcgacctgcggggctacgtggcctggagcctgatggacaactttgagtggctgaatggctacacagtgaagtttggcctgtaccacgtggacttcaacaacaccaaccggcccaggacagcccgggccagcgcccgctactacacagaggtgatcaccaacaacggcatgcccctggccagagaagatgagttcctgtatggccgcttccctgagggcttcatctggagcgctgccagcgctgcctaccagatcgagggcgcctggagggcagatggcaagggcctgagcatctgggacaccttcagccacacccccctgcgggtggagaatgatgccatcggagatgtggcctgtgacagctaccacaagattgctgaggacctggtgaccctgcagaacctgggcgtgagccactaccgcttcagcatctcctggagccgcatcctgcctgatggcaccacccgctacatcaatgaggccggcctgaactactacgtgcggctgattgacaccctgctggccgccagcatccagccccaggtgaccatctaccactgggacctgccccagaccctgcaggatgtgggcggctgggagaatgagaccatcgtgcagcgcttcaaggagtatgcagatgtgctcttccagaggctgggggacaaggtgaagttctggatcaccctgaatgagcccttcgtcatcgcctaccagggctacggctatggaacagctgcccctggggtgagcaaccggcccggcacagccccctacatcgtgggccacaacctgatcaaggcccacgccgaggcctggcacctgtacaatgatgtgtaccgggccagccagggcggcgtcatcagcatcaccatcagcagtgactgggccgagccccgggaccccagcaaccaggaggatgtggaggccgcccggcgctacgtgcagttcatgggcggctggtttgcccaccccatcttcaagaatggagactacaatgaggtgatgaagacccgcatccgggacaggagcctggccgccggcctgaacaagagccggctgcctgagttcacagagagcgagaagaggcgcatcaatggcacctatgacttcttcggcttcaaccactacaccaccgtgctggcctacaacctgaactatgccacagccatcagcagctttgatgctgacagaggagtggccagcattgctgaccgctcctggccagattctggcagcttctggctgaagatgaccccatttggcttccgccgcatcctgaactggctgaaggaggagtacaatgacccccccatctacgtgacagaaaatggagtgtcccagcgggaggagacagacctgaatgacacagcccgcatctactacctgcggacctacatcaatgaggccctgaaggctgtgcaggacaaggtggacctgcggggctacacagtgtggagcgccatggacaactttgagtgggccaccggcttcagcgagcgcttcggcctgcactttgtgaactacagcgaccccagcctgccccgcatccccaaggccagcgccaagttctacgcctctgtggtgcgctgcaatggcttcccagaccctgccaccggcccccacgcctgcctgcaccagccagatgctggccccaccatcagccctgtgcggcaggaggaggtgcagttcctgggcctgatgctgggcaccacagaggcccagacagccctgtatgtgctcttcagcctggtgctgctgggcgtgtgtggcctggccttcctgagctacaagtactgcaagaggagcaagcagggcaagacccagaggagccagcaggagctgagccctgtgagcagcttctag

SEQ ID NO: 127360 - DNA, 3012 bp, Artificial Sequence
  derived and/or modified sequence
aaggtggcccacctggtgctgaaggcccacgcccggacctggcaccactacaacagccaccaccggccccagcagcagggccacgtgggcatcgtgctgaacagcgactgggccgagcccctgagccctgagaggcctgaggacctgcgggccagcgagcgcttcctgcacttcatgctgggctggtttgcccaccctgtgtttgtggatggagactacccagccaccctgcggacccagatccagcagatgaaccggcagtgcagccaccctgtggcccagctgcctgagttcacagaagctgagaagcagctgctgaagggcagcgctgacttcctgggcctgagccactacaccagccgcctcatcagcaatgccccccagaacacctgcatccccagctatgacaccatcggcggcttcagccagcacgtgaaccacgtgtggccccagaccagcagctcctggatccgggtggtgccctggggcatccggcggctgctgcagtttgtgtccctggagtacacccggggcaaggtgcccatctacctggccggaaatggcatgcccatcggggagagcgagaacctgtttgatgacagcctgcgggtggactacttcaaccagtacatcaatgaggtgctgaaggccatcaaggaggacagcgtggatgtgcgcagctacatcgcccggagcctgattgatggctttgagggccccagcggctacagccagagatttggcctgcaccacgtgaacttcagtgacagcagcaagagcaggacccccaggaagagcgcctacttcttcaccagcatcatcgagaagaatggcttcctgaccaagggggccaagaggctgctgccccccaacacagtgaacctgcccagcaaggtgcgggccttcaccttccccagcgaggtgcccagcaaggccaaggtggtgtgggagaagttcagcagccagcccaagtttgagcgggacctcttctaccacggcaccttcagagatgacttcctgtggggcgtgagcagcagcgcctaccagatcgagggcgcctgggatgctgatggcaagggccccagcatctgggacaacttcacccacaccccaggcagcaatgtgaaggacaatgccaccggggacatcgcctgtgacagctaccaccagctggatgctgacctgaacatgctgcgggccctgaaggtgaaggcctaccgcttcagcatctcctggagccgcatcttccccaccggcaggaacagcagcatcaacagccatggagtggactactacaacagactcatcaatggcctggtggccagcaacatcttccccatggtgaccctcttccactgggacctgccccaggccctgcaggacatcggcggctgggagaacccagccctgattgacctgtttgacagctatgctgacttctgcttccagacctttggagacagagtgaagttctggatgaccttcaatgagcccatgtacctggcctggctgggctacggcagcggggagttccccccaggagtgaaggaccccggctgggccccctacagaattgcccacgccgtcatcaaggcccacgcccgggtgtaccacacctatgatgagaagtaccggcaggagcagaagggcgtcatcagcctgagcctgagcacccactgggccgagcccaagagccctggggtgcccagagatgtggaggccgctgacaggatgctgcagttcagcctgggctggtttgcccaccccatcttcagaaatggagactacccagacaccatgaagtggaaggtgggcaacagaagtgagctgcagcacctggccaccagccggctgcccagcttcacagaggaggagaagcgcttcatccgggccacagcagatgtgttctgcctgaacacctactacagcagaattgtgcagcacaagaccccccggctgaaccccccatcctatgaagatgaccaggagatggccgaggaggaggaccccagctggcccagcacagccatgaacagagctgccccctggggcacccggcggctgctgaactggatcaaggaggagtatggagacatccccatctacatcacagaaaatggagtgggcctgaccaaccccaacacagaggacacagaccgcatcttctaccacaagacctacatcaatgaggccctgaaggcctaccgcctggatggcatcgacctgcggggctacgtggcctggagcctgatggacaactttgagtggctgaatggctacacagtgaagtttggcctgtaccacgtggacttcaacaacaccaaccggcccaggacagcccgggccagcgcccgctactacacagaggtgatcaccaacaacggcatgcccctggccagagaagatgagttcctgtatggccgcttccctgagggcttcatctggagcgctgccagcgctgcctaccagatcgagggcgcctggagggcagatggcaagggcctgagcatctgggacaccttcagccacacccccctgcgggtggagaatgatgccatcggagatgtggcctgtgacagctaccacaagattgctgaggacctggtgaccctgcagaacctgggcgtgagccactaccgcttcagcatctcctggagccgcatcctgcctgatggcaccacccgctacatcaatgaggccggcctgaactactacgtgcggctgattgacaccctgctggccgccagcatccagccccaggtgaccatctaccactgggacctgccccagaccctgcaggatgtgggcggctgggagaatgagaccatcgtgcagcgcttcaaggagtatgcagatgtgctcttccagaggctgggggacaaggtgaagttctggatcaccctgaatgagcccttcgtcatcgcctaccagggctacggctatggaacagctgcccctgtgcacggccgcctggtgtgcaccagctacttccaggagtggaggctgcagtag

SEQ ID NO: 127361 - DNA, 5784 bp, Artificial Sequence
  derived and/or modified sequence
atggagctgagctggcacgtggtgttcatcgccctgctgagcttctcctgttggggctccgattgggagtctgatcgtaacttcatcagtaccgcaggccccctgaccaacgacctgcttcacaacttgtccggactcctgggtgaccagtctagcaacttcgtcgcaggcgataaagatatgtacgtgtgccaccagcccctccccaccttcctgcctgagtatttctcatctctccatgctagccagattacccactataaggtgttcctttcctgggcacaactgctcccagcgggtagtacccagaacccagacgaaaaaaccgtgcagtgttatagacgcttattgaaagccttaaagaccgcccgacttcagcccatggtgatcctacaccatcagaccttgcctgcaagcaccctacgtcgcactgaagcttttgccgacctctttgccgactatgccactttcgctttccactctttcggggatttagtcggcatttggttcaccttctcagacctggaagaagttatcaaagagcttccacaccaagagagtcgggcctctcagctgcaaactctgtctgacgcccatcgaaaggcatacgagatttaccacgaaagttacgccttccagggaggaaaactcagtgtggtcctgagagcggaggacattcccgagttgttgctggagccaccgatttcagcattggcccaggataccgtcgattttctgagccttgacctgtcttacgaatgtcagaatgaggccagcctcagacaaaaattgagtaagttgcagaccattgagcctaaggtgaaggtctttatttttaatttgaaactgcctgattgccctagcacaatgaagaatcctgcttcgctcctgttttccctctttgaggcaatcaataaggaccaggtgctcactatcggcttcgacattaatgaattcctgtcgtgctcttcatccagtaagaagtctatgtcttgtagcctgacaggctccttagcactgcaacccgaccagcagcaggaccacgagacaactgacagctcacccgcctcagcataccagagaatctgggaggcctttgccaaccagagtcgtgctgagagagacgcatttttacaggataccttccccgagggcttcctttggggggcatccactggcgcctttaacgtcgaaggaggatgggctgaaggtggtcgaggtgtgtccatctgggatcccagacggcctctgaacactacggaagggcaggccacactggaagtggctagtgactcatatcataaagtagcaagcgatgtagccctgctgtgcgggctccgggcccaggtgtacaaattcagtattagctggagtagaatctttcctatgggacacggctcttctcctagcctgccgggagttgcctactataataaactgatcgataggctgcaggacgcagggatcgagccaatggccacattatttcactgggacctgccccaggccttacaggatcacggaggttggcagaatgagagtgtggtggatgccttcttagattatgccgccttttgtttcagcacatttggagatagggtgaaactgtgggtgactttccatgagccatgggtgatgtcatacgcgggctatggaacaggccagcaccctcctggtatcagcgatccgggagtcgcatccttcaaagttgctcatctcgttctcaaggctcatgcccggacatggcatcattataatagccaccatcgcccccagcaacaaggacacgtcggaatcgtgctcaactctgattgggccgaaccactgagcccagagcgaccagaggacctgcgggccagcgagagatttctgcactttatgcttggatggttcgcccacccagtgtttgtggatggcgactacccggccaccctgcggactcagatccagcagatgaacagacagtgcagccaccccgttgcccagctgccagagttcacagaggcggagaaacaactgctgaaaggtagcgccgattttctgggactgtctcattacacctctcggttgataagcaatgctccccagaacacctgtattccttcgtatgatactatcgggggattcagccagcacgttaaccacgtgtggccacagacctcctctagctggatccgcgtagtgccttggggtataaggcgcctgctacaatttgtgtccctggagtataccaggggtaaggtccctatttatttggccggaaatgggatgccgatcggggaatcagaaaacctgtttgatgattcactgagggttgattactttaaccagtacattaacgaggtattgaaggccatcaaggaggattcggtggatgtacgctcatatattgcccggtctctgattgatggtttcgagggtccatccgggtacagtcagcggttcggcttgcatcatgtgaacttcagcgattcttccaagagtaggaccccgcgcaagagtgcctatttttttacatccattatcgaaaagaacggcttcctgacgaaaggcgcgaagcgactgctccctccgaataccgtcaacttgcctagcaaggtgcgtgcttttaccttccccagcgaggtgcccagcaaggccaaggtggtctgggaaaagttcagctcacaacctaaattcgagcgcgatctgttttaccatggcacttttcgcgatgacttcctgtggggggtttcatcttctgcctatcaaatcgagggagcgtgggacgctgacggaaagggcccgtccatatgggataacttcacccacacccccgggtcaaatgttaaggacaacgcaacgggagacatcgcctgcgactcgtaccaccagcttgacgcagatctgaatatgctccgggcattgaaagttaaggcctatagatttagtatatcttggagccggatcttccctacagggcggaattcatccattaatagccatggagtggattactacaatcgactcatcaacgggttagttgcgtccaatatcttccccatggtcactctcttccattgggatctgccccaggccctgcaggatataggcgggtgggaaaaccccgcgttgattgatctctttgattcatatgccgacttttgcttccagactttcggcgacagagtgaaattctggatgacattcaacgagccaatgtatctggcttggctgggctatgggagtggagagtttcctcccggagtgaaagaccctggttgggctccatatcggattgcgcacgccgtcattaaagcccacgcaagagtataccatacatatgacgagaagtaccgtcaggagcagaagggcgtgatcagtttaagtctgagcacacattgggccgagccaaaatcgcctggggtccctcgtgatgtggaagcagcagaccgcatgttgcagtttagtctgggctggtttgctcatccaatcttccgaaatggcgactaccccgacacgatgaaatggaaggtaggaaaccggagcgagttgcaacatcttgctactagtagactcccgagcttcacggaggaggagaaacggtttatacgtgccactgccgatgtcttttgcctcaatacgtactattctaggatcgtgcagcataaaaccccccgtctgaatccaccgtcctatgaagatgatcaggagatggccgaagaagaggacccatcctggccctcaacagcaatgaaccgggccgcaccttggggtacccgtcgactgctcaactggataaaagaagaatacggcgatattccgatttacataaccgagaatggggttggcttgaccaatcctaataccgaggacaccgatagaatcttttaccacaaaacatacattaacgaggcccttaaggcctaccgcctggacggcattgatctcagaggatacgtggcctggtcacttatggacaacttcgaatggctaaacggctacacagtgaagttcgggctgtaccacgtcgacttcaataacactaatagacccagaaccgccagggcttctgccagatattacaccgaggttattaccaacaacggtatgccgttggcccgagaagatgaattcctttacggaagatttcctgagggctttatctggagcgcagcttctgccgcttaccagatcgagggcgcatggagggccgacggaaagggtttgagtatttgggacactttctcccacacccccttgcgggtcgagaatgatgctattggggacgtggcctgcgatagttatcacaagatcgcagaagacttggttactctgcaaaatttaggtgtaagtcactaccgttttagtatcagctggagcagaatcctccccgatggcacaactcgctacatcaacgaggctggcctaaactactacgtaagactcattgacaccctgttggcagcttcaatccagccccaggtgacaatctatcactgggatttaccccagaccctgcaggacgttggcggctgggagaacgaaaccattgttcagcgatttaaggaatacgccgacgtgttgttccaacggctaggcgataaggtgaagttctggattacactaaatgagcccttcgtgatagcttatcagggttatggctatggaactgccgcacctggcgtatcaaatcggccaggtaccgccccgtacatcgtggggcataatctcatcaaggctcacgcagaggcgtggcatttgtataatgatgtgtatagggcgagccagggtggggttatatcaataactatcagctctgactgggcagagccacgcgatccgagtaatcaggaagatgttgaggccgcccgcagatacgtgcaattcatgggtggctggtttgcacaccccattttcaaaaacggggactacaatgaagttatgaaaacacgcattagagaccgcagtcttgctgcaggccttaacaaaagccgcctgccagagttcacagaatctgaaaagcgacggataaacgggacatacgacttctttggattcaatcactacaccaccgtgctggcatataacttgaattatgccacggctattagctccttcgatgcagacaggggtgtggccagcattgctgaccgatcgtggccagacagcggctctttctggctgaagatgacaccatttgggttccgccgcattctgaactggctgaaagaagagtataatgacccaccaatttacgtaacggaaaatggcgtttcgcagcgcgaggagaccgacctgaatgatacagctagaatatactatcttaggacctatatcaacgaagctctgaaggccgttcaggacaaggtcgacctgcgggggtatacagtctggtctgctatggataactttgaatgggcaaccggcttttctgagagatttggccttcactttgtaaactactctgacccctcgcttccccgcatacccaaagccagcgccaagttctacgcttctgtcgttcgctgtaatgggttccctgaccccgccacaggacctcatgcttgcttacaccagcccgacgctggtcccaccatatctcctgtgcgacaggaggaggtgcagtttctaggccttatgttaggcactaccgaggctcagacagccctctacgttcttttcagcctggtgctcctgggagtgtgcggtctggcctttttaagttataaatattgcaagaggtccaaacagggaaagacccagcgcagccagcaggaactgtctcctgtgtcctccttctag

SEQ ID NO: 127362 - DNA, 3012 bp, Artificial Sequence
  derived and/or modified sequence
aaggtggcccacctggtgctgaaggcccacgcccggacctggcaccactataatagccaccacagacctcagcagcaggggcacgtggggattgtgctgaatagcgattgggccgaaccactgtcaccagaaaggcctgaggatctccgtgctagtgagaggttcttgcactttatgctcggatggttcgcccatcctgtattcgttgacggagattaccccgccaccctcagaacacagattcaacaaatgaaccggcagtgcagccatccagtggcccaactgccagagttcactgaagcagagaagcagctcctcaagggatcagcggactttttgggcctgtcacattacacttcgcgattaatatcaaacgccccacagaatacgtgtattccaagctatgatacgattgggggcttctcccagcacgtcaatcacgtgtggccgcagacatcaagctcttggatccgcgtggttccatggggcattcgacgccttctgcagtttgtcagtctggaatatactagggggaaggtaccaatttacttagccggcaatggtatgcccattggtgagtctgagaatcttttcgacgactcactccgtgtggactacttcaatcaatatattaatgaggtgctcaaggccatcaaggaagacagcgtagatgtgcgctcctatatagcacggagtctgatagatggattcgaagggccgtcagggtattcccagcgttttggactgcaccatgtaaattttagcgactcatcaaaatccagaactcccaggaagtctgcctatttttttacctcaattatcgaaaaaaatggtttcctgacgaaaggcgccaagagattgctgccacccaacactgttaatctgcccagcaaagttcgcgcattcacctttccgagcgaggtcccctccaaagctaaagtcgtctgggaaaaattctcgagtcaacccaagtttgagagagacctgttttatcatggcactttccgtgatgacttcctttggggcgtgtcatcgtccgcataccagatcgagggcgcctgggacgccgacggtaagggaccatctatatgggacaattttactcacactccgggctcaaatgtgaaggataatgccactggcgatattgcttgtgacagctatcaccagcttgacgccgacctcaatatgctgagggccttaaaggtgaaggcatacaggttcagtatatcgtggtcccgcatattcccaactgggagaaactcttctatcaattcccatggagtcgattattataatcgcctgattaatgggttagtggcatcaaatattttcccaatggtaaccctgttccactgggatttgcctcaggctctgcaggatatcggcggatgggagaacccagcccttattgacctattcgacagctacgcagatttctgctttcagacctttggagacagagttaaattctggatgaccttcaatgagcccatgtacttggcttggctaggatacgggagcggcgagttcccgcctggagtcaaggatccaggctgggccccttatcgcatcgcacacgcagtcattaaggcccacgctcgtgtgtaccatacgtatgacgaaaagtataggcaggagcagaaaggggtgatttcacttagcctctcaacccactgggcggaaccaaagtcacccggtgtaccacgggatgtagaagctgccgatcggatgctgcagttctccctcgggtggttcgcccaccctatcttccggaacggcgactatcctgacactatgaaatggaaggtggggaatagaagtgagttgcaacacctggccacatctaggcttccatcattcactgaggaggagaaaaggttcatccgcgccaccgcagacgtcttctgtttgaacacttattactccaggatagtgcagcacaaaacccctaggctcaatcccccgagttacgaggacgaccaggagatggcagaggaagaagatccaagctggccgtcgacagctatgaaccgcgccgccccttggggtaccagaagactgctcaattggattaaagaagaatacggcgatataccaatctatataaccgagaatggggttgggttaacgaatccaaacaccgaggatacagaccgcatattctatcacaaaacctacattaatgaagccttgaaggcctatcgccttgacgggattgacttgcgagggtacgtggcgtggtcccttatggacaatttcgagtggctgaacggttacactgtgaaatttggcctgtaccacgtcgatttcaataacacaaataggcctcgcacagctagagcctccgcaagatactacacagaggttatcaccaataacggtatgccccttgcgcgtgaggacgaattcctctacggtcgctttcctgagggattcatttggtcagccgccagtgctgcataccagatcgaaggagcctggcgggcagatggaaagggattgagcatatgggatacattttctcacactcctcttagagtggaaaacgatgccataggcgatgtagcctgcgattcataccataagatcgcagaagatcttgttactcttcaaaacctgggggtgtcccactatcgcttcagcattagctggtctagaattctccctgatggcaccacccgttatataaatgaggctgggctcaactactacgtgagattaatcgacacacttctcgccgccagtatccaaccgcaagtcaccatctaccactgggacctcccacaaaccttgcaagatgttggggggtgggaaaatgagacaattgtccagcgtttcaaggaatatgcagacgtgctgtttcaacggcttggggacaaggtcaaattctggatcaccctcaatgagccatttgtcatcgcctatcaaggatacgggtacggaacagccgcccccgtgcacggaagattggtctgtacatcatattttcaggagtggcgtctgcaatag

SEQ ID NO: 127363 - DNA, 5784 bp, Artificial Sequence
  derived and/or modified sequence
atggagctctcttggcatgtggtgtttatcgctcttttgtcattcagctgctggggatcagactgggagagtgataggaatttcatatctactgctggaccactgacaaatgatttattgcataaccttagtggcttactgggagatcagtcctccaactttgttgcaggggacaaggacatgtacgtgtgccatcagcctctgccaacgtttcttcctgagtacttttcatctcttcacgcatctcagatcacccactacaaagtattcttgtcctgggcacagctgctgcccgctggaagcactcagaatcctgatgagaaaaccgtgcaatgctacagaagactgctgaaggccttaaaaacggcaaggctgcaacccatggtgatcctgcaccaccagacactccccgcatctaccctgagaaggacagaggcttttgctgacctcttcgctgattacgcaaccttcgcttttcattcatttggcgacctggtgggaatctggtttacattcagtgacttggaggaggtgattaaggagctgcctcatcaggaatcacgtgcctctcaattacagactcttagcgacgcacatagaaaagcctacgagatatatcacgaatcctacgctttccagggcggaaaactcagtgttgtgctgagagcagaggacatccctgaactgctgctggaaccacccattagcgctctggcccaagatactgtagatttcctgtccctggacctgagctatgagtgtcagaacgaggcttctctgcggcaaaagctgtcgaagttacagacaatcgagcctaaagttaaggttttcatctttaatctgaagctgccagactgcccaagtactatgaagaaccccgctagcctgttatttagcctgttcgaggccatcaacaaggaccaagtgttaactattggtttcgatataaatgagttcctctcttgcagttcatcatcgaagaagagcatgagctgctccctgacagggtctctggcactccagcccgatcaacagcaagatcacgaaacaactgacagtagccccgcatccgcctatcagcgcatctgggaagcgttcgccaaccagagccgcgcagagagagacgcattcctgcaggataccttccccgagggattcttatggggggctagcaccggagccttcaatgtggagggcggatgggccgaaggaggcagaggggtgagtatctgggacccccgtcggcctttgaatacgaccgaaggccaagctacgcttgaagtggcttcggattcctatcacaaagtggccagcgacgtggcactcctctgcggactgcgcgctcaggtgtataagttctccatctcatggtcacgcatttttcccatggggcatggctcttctcccagcttacctggcgtagcctactacaataagctgatcgacagattgcaggacgcaggaatcgagccaatggccactctgtttcactgggacctcccccaggccctccaggaccacgggggatggcagaatgaatctgtagtcgacgccttcctcgactacgctgcgttttgctttagcaccttcggcgaccgggtgaaactctgggtgacattccacgagccctgggtgatgagttatgccggatatggcaccggtcagcacccacccggaatatccgatcctggagtggcctcctttaaagttgcacacctcgtgctgaaggcacacgcacgtacttggcatcattataactcccatcaccggcctcagcaacaggggcatgtgggaatcgtactaaattccgattgggcggagccactgtcccccgagaggccagaagacctcagagctagtgagaggtttttgcattttatgctgggctggttcgcccacccagtttttgtggatggcgactaccctgctactcttcggacacagattcaacagatgaaccgccaatgcagtcatccggttgcccagttgcctgagttcacagaggccgaaaagcagctcctgaaaggctcagccgattttctcggactttctcattatacatcgcggctcattagtaatgcccctcaaaatacctgcatcccttcttatgacactatcgggggttttagccagcatgtcaatcacgtgtggccgcaaacgtcctctagttggatccgggtggtaccctggggcatccgtcgcctcctgcagttcgtgtcgttagaatacaccaggggcaaagtgcctatatatctggcaggcaacgggatgccaattggagagtcagagaaccttttcgacgattccttaagagttgattactttaatcagtatataaatgaggttctgaaggccattaaggaagattcggtcgatgtccggtcctatatagcgagatccctcatcgacggcttcgaaggcccatcaggctattcccagcgcttcggtctgcatcacgtgaacttctcggactcttcaaaatctagaacaccgaggaagtctgcatattttttcacatccatcatcgaaaaaaatgggttcctaaccaagggagcgaagaggctgctgcctccaaacacagtaaacctgccctccaaggtgagggcctttacctttccgagtgaggttccaagcaaggccaaagtggtgtgggagaagttcagctcgcagcctaaatttgagagagacctcttctaccacggcacgtttcgggatgacttcctgtggggtgtgagtagctccgcctatcagatcgaaggtgcgtgggacgcggatggaaagggaccgtcaatctgggataattttactcacaccccaggatccaatgtgaaggacaatgcaaccggcgacatcgcatgcgacagctatcatcagctggacgctgatctcaacatgctgcgcgcactcaaggttaaggcatacagattctctatcagctggagccgtatcttcccaactggtcgaaactctagcatcaattcacacggtgtggactattacaatcgcctgatcaacggactagtggctagtaatatcttcccaatggtcaccttgttccattgggatctgccccaggcacttcaggatatcgggggatgggagaacccagcactaattgacctgttcgatagttacgcagacttctgctttcaaaccttcggcgatcgcgtgaagttctggatgaccttcaacgagccgatgtatctcgcctggctgggctatggcagcggtgagttcccgcctggagtgaaggatcccggttgggcaccatacagaattgctcacgcggtcatcaaggctcacgcgagggtgtaccacacatacgacgagaagtacaggcaggagcagaaaggcgtcatctcactctcattgtccacacactgggccgagcccaagtctcccggtgtgcccagagacgtcgaggccgcagacagaatgctgcagttttcgctgggctggtttgcccaccccatcttccgaaatggggactatcctgacactatgaaatggaaggtggggaacagatccgagctgcagcaccttgcaacctcccgcctaccctcctttaccgaggaggaaaagaggtttatcagggctaccgccgatgtcttttgtttgaatacttactactctagaatcgtgcaacacaagacaccccgtctgaatcccccaagttatgaggacgatcaggaaatggctgaggaagaggatccttcctggccatccaccgcaatgaaccgggctgccccatggggcactcgaagattgctgaattggattaaggaagaatacggcgacatacccatctacattacagaaaatggggtagggttaaccaatccaaatacagaggatacggacagaatattttaccacaagacatatatcaatgaagcccttaaagcatatagactcgacgggatcgatctgcgcggatacgtcgcttggtccttgatggacaattttgaatggctgaatggatatacagtgaaatttggattgtatcatgtagattttaacaacacaaacaggcccagaacggccagggcttcagcgcgatactacacagaggttattaccaacaacggaatgccccttgctcgggaagatgagttcctatacggaaggttcccagaaggattcatttggagcgcagcttctgccgcataccagatcgagggcgcatggcgtgccgatgggaaaggcctcagtatctgggatacattttcacacacgccacttagggtagaaaacgacgctatcggtgacgtggcttgtgacagctaccacaaaattgcagaggacttagtgacactgcagaacttgggcgtttcccactataggttttctatcagttggagcagaattctgcctgacggtactacacggtacattaatgaggcaggattaaactactatgtccggctgatcgacaccttgttggccgcaagcattcaaccccaggtgactatctaccactgggacctgccccagaccctacaggatgttggaggctgggagaacgaaaccatcgttcagagattcaaggaatatgcagacgtcctgttccagcgactgggcgataaggtgaagttttggatcactttaaatgaaccatttgtgattgcatatcagggatatggttacggtaccgccgcacccggtgttagcaatcggcctggcactgccccttacatcgttgggcataacttaatcaaggcccacgccgaggcctggcacttgtacaacgacgtctaccgcgcttctcaggggggtgttatctcaatcaccattagcagcgactgggccgagccacgggatccttctaaccaggaggacgtagaagccgcaagacgctatgtgcaatttatgggcggatggttcgctcaccctatattcaagaacggggactacaatgaagtcatgaaaacaagaattcgtgaccggtcactggccgctggccttaacaaaagtcgccttcctgagttcacagagtcagagaagcggagaatcaacggtacatacgatttttttgggtttaatcactacacaaccgtcctggcgtataatctcaattacgctaccgccatcagttcatttgatgcagaccgaggagtggcaagcatagccgaccgctcttggccagactccggctctttttggttaaagatgaccccttttgggtttaggcggatcctcaactggctgaaagaagagtataatgatccaccaatttatgttacagaaaatggagtgagtcagagggaggagacagacttgaatgacactgctcgcatctactatctgcggacatatatcaatgaggccctgaaggccgtgcaggacaaggtcgacctcagggggtataccgtctggtctgccatggataactttgagtgggctactggattctccgagcgtttcggactgcatttcgtgaattattctgatccttctcttcctcgcattccaaaagcatcagcaaaattttatgcaagtgtggtcagatgcaacggttttcccgacccagctactggtcctcacgcctgcctgcaccaacccgatgcaggaccaaccataagccctgttcgtcaagaagaggtgcagttccttggtctgatgctgggcaccaccgaagcacagacggccctatatgtcctgtttagtctggtcctgttaggtgtgtgtggcttggcatttttgagctataaatactgtaagcgttccaaacagggcaagacacaacgcagtcaacaggagctgtcacccgtgtctagtttctag

SEQ ID NO: 127364 - DNA, 3012 bp, Artificial Sequence
  derived and/or modified sequence
aaagtcgcccacctggtgctgaaggcccacgcaagaacttggcaccattacaacagccaccaccggcctcaacagcaagggcacgtggggatcgtgctcaatagcgactgggccgaaccactatctcccgagagaccagaagacctgcgcgcttccgagcggttcctgcactttatgttgggctggttcgcacatcctgtctttgtcgatggggactatcctgctaccctgagaactcagatccagcagatgaaccggcagtgtagccatcccgtcgcccagttaccggaatttactgaggccgagaagcagctgttgaaagggtctgcggatttcctaggcctttctcattacacttcacgtctgatctcaaatgcccctcagaacacctgtattccatcttacgataccatcgggggtttttctcagcacgtgaatcatgtgtggcctcaaacctcgtcatcgtggattagggtggtgccctggggcatccggagacttctgcaattcgttagcctcgaatacactcgcggtaaagtgcccatttatttagcagggaacgggatgcctattggagaatccgagaacctgtttgacgattctctccgcgtggactattttaatcagtacatcaacgaagtcctgaaagctatcaaagaagattccgtagatgtacgctcttatatcgctaggtctctgatcgacggctttgaggggccaagcgggtacagccagaggtttggactccaccacgtgaatttttccgattcctccaagtctcggaccccgagaaagtccgcatacttcttcacctctatcattgagaagaacggatttctgacaaagggcgctaaacgcttattacctcctaatacagtcaatctgccgagtaaggtgagggcctttacatttccctccgaagtgccgtcaaaggccaaagttgtgtgggaaaaattttccagtcagccaaagttcgagagagatctcttctaccacggaaccttcagagatgactttttatggggagtcagctcctcggcctaccaaatcgagggcgcatgggacgccgatggcaaagggccaagcatatgggacaattttacacatactcctggtagcaatgtgaaggacaacgccactggcgatattgcttgcgattcctaccaccagctggatgcagacttgaacatgctacgggctctcaaggtgaaagcctaccggttttcaataagctggtcccggatcttcccaaccggtagaaactcttcaattaacagtcacggcgtggattactacaatcgtctaatcaatgggttagtggcatcaaatatctttcctatggtgaccctatttcactgggatctcccgcaggccttgcaggacataggcggatgggaaaaccctgcgctaattgacctctttgatagttatgcagacttttgctttcagacattcggcgaccgagtgaagttctggatgaccttcaatgaacccatgtaccttgcttggctcgggtacgggagtggagagttccctccgggagtgaaagatccgggttgggcgccatatcgaatcgcccacgctgtgataaaggcccacgcaagagtataccatacttacgacgaaaagtaccgtcaggaacagaagggggtcatctctctcagcctgagtactcactgggcggagccaaaatcgccaggtgtgcctcgcgatgtagaggcggctgacagaatgctgcagttctccttaggatggtttgcccatcccatatttcgcaatggggattatccagacactatgaaatggaaggtgggaaataggagcgaactccaacacctggcaacaagcaggctgccatccttcaccgaggaagagaagcggtttatccgggctacagcggacgttttttgtctcaatacatattatagcagaattgtgcagcataagacacccaggcttaatccaccatcctatgaggacgatcaagaaatggccgaagaagaggacccctcttggccctctaccgctatgaacagagccgcaccttggggcactcggaggctactaaactggatcaaagaagagtacggagacatacccatatacattactgagaacggtgtgggccttaccaaccccaacacggaggatacagaccggatcttctatcataaaacgtatattaacgaagcactgaaggcataccgcttagatggcatcgatttgcgcggttacgttgcatggtccctcatggacaactttgagtggctgaatggctacaccgtcaagttcggcctctaccatgttgacttcaacaatacgaatcggcctaggacagcaagggcctcggccagatattatacagaggttattactaataatggcatgccactggctcgcgaggacgagttcctgtacgggagatttccagaagggttcatctggtccgccgcatccgccgcataccaaattgagggagcatggcgggctgatggcaagggcttatctatctgggacacgttcagccataccccactccgcgttgagaacgacgccataggcgacgtcgcttgtgacagctaccataaaatcgctgaggatttggtaacattgcagaaccttggagtgagccactacaggttcagcatcagttggtccaggatactaccggatggaactaccagatatatcaatgaggctggacttaactattatgttcgcctgattgatacgctcttggccgcaagtattcaacctcaggtgactatctaccactgggatttgccgcagactctccaggacgtcggaggctgggagaacgagacaatagtgcaaagattcaaagaatacgccgacgtgttatttcaaagactgggagataaggtcaagttctggataacgctgaatgagcctttcgttatcgcttatcaaggatatggctacggcactgctgcgccagtgcacggtagattggtgtgcacatcttatttccaggagtggagacttcagtag

SEQ ID NO: 127365 - DNA, 5784 bp, Artificial Sequence
  derived and/or modified sequence
atggagctgagctggcacgtggtgttcatcgccctgctgagcttcagctgctggggcagcgactgggagagcgacagaaacttcatcagcaccgccggccccctgaccaacgacctgctgcacaacctgagcggcctgctgggcgaccagagcagcaacttcgtggccggcgacaaggacatgtacgtgtgccaccagcccctgcccaccttcctgcccgagtacttcagcagcctgcacgccagccagatcacccactacaaggtgttcctgagctgggcccagctgctgcccgccggcagcacccagaaccccgacgagaagaccgtgcagtgctacagaagactgctgaaggccctgaagaccgccagactgcagcccatggtgatcctgcaccaccagaccctgcccgccagcaccctgagaagaaccgaggccttcgccgacctgttcgccgactacgccaccttcgccttccacagcttcggcgacctggtgggcatctggttcaccttcagcgacctggaggaggtgatcaaggagctgccccaccaggagagcagagccagccagctgcagaccctgagcgacgcccacagaaaggcctacgagatctaccacgagagctacgccttccagggcggcaagctgagcgtggtgctgagagccgaggacatccccgagctgctgctggagccccccatcagcgccctggcccaggacaccgtggacttcctgagcctggacctgagctacgagtgccagaacgaggccagcctgagacagaagctgagcaagctgcagaccatcgagcccaaggtgaaggtgttcatcttcaacctgaagctgcccgactgccccagcaccatgaagaaccccgccagcctgctgttcagcctgttcgaggccatcaacaaggaccaggtgctgaccatcggcttcgacatcaacgagttcctgagctgcagcagcagcagcaagaagagcatgagctgcagcctgaccggcagcctggccctgcagcccgaccagcagcaggaccacgagaccaccgacagcagccccgccagcgcctaccagagaatctgggaggccttcgccaaccagagcagagccgagagagacgccttcctgcaggacaccttccccgagggcttcctgtggggcgccagcaccggcgccttcaacgtggagggcggctgggccgagggcggcagaggcgtgagcatctgggaccccagaagacccctgaacaccaccgagggccaggccaccctggaggtggccagcgacagctaccacaaggtggccagcgacgtggccctgctgtgcggcctgagagcccaggtgtacaagttcagcatcagctggagcagaatcttccccatgggccacggcagcagccccagcctgcccggcgtggcctactacaacaagctgatcgacagactgcaggacgccggcatcgagcccatggccaccctgttccactgggacctgccccaggccctgcaggaccacggcggctggcagaacgagagcgtggtggacgccttcctggactacgccgccttctgcttcagcaccttcggcgacagagtgaagctgtgggtgaccttccacgagccctgggtgatgagctacgccggctacggcaccggccagcacccccccggcatcagcgaccccggcgtggccagcttcaaggtggcccacctggtgctgaaggcccacgccagaacctggcaccactacaacagccaccacagaccccagcagcagggccacgtgggcatcgtgctgaacagcgactgggccgagcccctgagccccgagagacccgaggacctgagagccagcgagagattcctgcacttcatgctgggctggttcgcccaccccgtgttcgtggacggcgactaccccgccaccctgagaacccagatccagcagatgaacagacagtgcagccaccccgtggcccagctgcccgagttcaccgaggccgagaagcagctgctgaagggcagcgccgacttcctgggcctgagccactacaccagcagactgatcagcaacgccccccagaacacctgcatccccagctacgacaccatcggcggcttcagccagcacgtgaaccacgtgtggccccagaccagcagcagctggatcagagtggtgccctggggcatcagaagactgctgcagttcgtgagcctggagtacaccagaggcaaggtgcccatctacctggccggcaacggcatgcccatcggcgagagcgagaacctgttcgacgacagcctgagagtggactacttcaaccagtacatcaacgaggtgctgaaggccatcaaggaggacagcgtggacgtgagaagctacatcgccagaagcctgatcgacggcttcgagggccccagcggctacagccagagattcggcctgcaccacgtgaacttcagcgacagcagcaagagcagaacccccagaaagagcgcctacttcttcaccagcatcatcgagaagaacggcttcctgaccaagggcgccaagagactgctgccccccaacaccgtgaacctgcccagcaaggtgagagccttcaccttccccagcgaggtgcccagcaaggccaaggtggtgtgggagaagttcagcagccagcccaagttcgagagagacctgttctaccacggcaccttcagagacgacttcctgtggggcgtgagcagcagcgcctaccagatcgagggcgcctgggacgccgacggcaagggccccagcatctgggacaacttcacccacacccccggcagcaacgtgaaggacaacgccaccggcgacatcgcctgcgacagctaccaccagctggacgccgacctgaacatgctgagagccctgaaggtgaaggcctacagattcagcatcagctggagcagaatcttccccaccggcagaaacagcagcatcaacagccacggcgtggactactacaacagactgatcaacggcctggtggccagcaacatcttccccatggtgaccctgttccactgggacctgccccaggccctgcaggacatcggcggctgggagaaccccgccctgatcgacctgttcgacagctacgccgacttctgcttccagaccttcggcgacagagtgaagttctggatgaccttcaacgagcccatgtacctggcctggctgggctacggcagcggcgagttcccccccggcgtgaaggaccccggctgggccccctacagaatcgcccacgccgtgatcaaggcccacgccagagtgtaccacacctacgacgagaagtacagacaggagcagaagggcgtgatcagcctgagcctgagcacccactgggccgagcccaagagccccggcgtgcccagagacgtggaggccgccgacagaatgctgcagttcagcctgggctggttcgcccaccccatcttcagaaacggcgactaccccgacaccatgaagtggaaggtgggcaacagaagcgagctgcagcacctggccaccagcagactgcccagcttcaccgaggaggagaagagattcatcagagccaccgccgacgtgttctgcctgaacacctactacagcagaatcgtgcagcacaagacccccagactgaacccccccagctacgaggacgaccaggagatggccgaggaggaggaccccagctggcccagcaccgccatgaacagagccgccccctggggcaccagaagactgctgaactggatcaaggaggagtacggcgacatccccatctacatcaccgagaacggcgtgggcctgaccaaccccaacaccgaggacaccgacagaatcttctaccacaagacctacatcaacgaggccctgaaggcctacagactggacggcatcgacctgagaggctacgtggcctggagcctgatggacaacttcgagtggctgaacggctacaccgtgaagttcggcctgtaccacgtggacttcaacaacaccaacagacccagaaccgccagagccagcgccagatactacaccgaggtgatcaccaacaacggcatgcccctggccagagaggacgagttcctgtacggcagattccccgagggcttcatctggagcgccgccagcgccgcctaccagatcgagggcgcctggagagccgacggcaagggcctgagcatctgggacaccttcagccacacccccctgagagtggagaacgacgccatcggcgacgtggcctgcgacagctaccacaagatcgccgaggacctggtgaccctgcagaacctgggcgtgagccactacagattcagcatcagctggagcagaatcctgcccgacggcaccaccagatacatcaacgaggccggcctgaactactacgtgagactgatcgacaccctgctggccgccagcatccagccccaggtgaccatctaccactgggacctgccccagaccctgcaggacgtgggcggctgggagaacgagaccatcgtgcagagattcaaggagtacgccgacgtgctgttccagagactgggcgacaaggtgaagttctggatcaccctgaacgagcccttcgtgatcgcctaccagggctacggctacggcaccgccgcccccggcgtgagcaacagacccggcaccgccccctacatcgtgggccacaacctgatcaaggcccacgccgaggcctggcacctgtacaacgacgtgtacagagccagccagggcggcgtgatcagcatcaccatcagcagcgactgggccgagcccagagaccccagcaaccaggaggacgtggaggccgccagaagatacgtgcagttcatgggcggctggttcgcccaccccatcttcaagaacggcgactacaacgaggtgatgaagaccagaatcagagacagaagcctggccgccggcctgaacaagagcagactgcccgagttcaccgagagcgagaagagaagaatcaacggcacctacgacttcttcggcttcaaccactacaccaccgtgctggcctacaacctgaactacgccaccgccatcagcagcttcgacgccgacagaggcgtggccagcatcgccgacagaagctggcccgacagcggcagcttctggctgaagatgacccccttcggcttcagaagaatcctgaactggctgaaggaggagtacaacgacccccccatctacgtgaccgagaacggcgtgagccagagagaggagaccgacctgaacgacaccgccagaatctactacctgagaacctacatcaacgaggccctgaaggccgtgcaggacaaggtggacctgagaggctacaccgtgtggagcgccatggacaacttcgagtgggccaccggcttcagcgagagattcggcctgcacttcgtgaactacagcgaccccagcctgcccagaatccccaaggccagcgccaagttctacgccagcgtggtgagatgcaacggcttccccgaccccgccaccggcccccacgcctgcctgcaccagcccgacgccggccccaccatcagccccgtgagacaggaggaggtgcagttcctgggcctgatgctgggcaccaccgaggcccagaccgccctgtacgtgctgttcagcctggtgctgctgggcgtgtgcggcctggccttcctgagctacaagtactgcaagagaagcaagcagggcaagacccagagaagccagcaggagctgagccccgtgagcagcttctag

SEQ ID NO: 127366 - DNA, 3012 bp, Artificial Sequence
  derived and/or modified sequence
aaggtggcccacctggtgctgaaggcccacgccagaacctggcaccactacaacagccaccacagaccccagcagcagggccacgtgggcatcgtgctgaacagcgactgggccgagcccctgagccccgagagacccgaggacctgagagccagcgagagattcctgcacttcatgctgggctggttcgcccaccccgtgttcgtggacggcgactaccccgccaccctgagaacccagatccagcagatgaacagacagtgcagccaccccgtggcccagctgcccgagttcaccgaggccgagaagcagctgctgaagggcagcgccgacttcctgggcctgagccactacaccagcagactgatcagcaacgccccccagaacacctgcatccccagctacgacaccatcggcggcttcagccagcacgtgaaccacgtgtggccccagaccagcagcagctggatcagagtggtgccctggggcatcagaagactgctgcagttcgtgagcctggagtacaccagaggcaaggtgcccatctacctggccggcaacggcatgcccatcggcgagagcgagaacctgttcgacgacagcctgagagtggactacttcaaccagtacatcaacgaggtgctgaaggccatcaaggaggacagcgtggacgtgagaagctacatcgccagaagcctgatcgacggcttcgagggccccagcggctacagccagagattcggcctgcaccacgtgaacttcagcgacagcagcaagagcagaacccccagaaagagcgcctacttcttcaccagcatcatcgagaagaacggcttcctgaccaagggcgccaagagactgctgccccccaacaccgtgaacctgcccagcaaggtgagagccttcaccttccccagcgaggtgcccagcaaggccaaggtggtgtgggagaagttcagcagccagcccaagttcgagagagacctgttctaccacggcaccttcagagacgacttcctgtggggcgtgagcagcagcgcctaccagatcgagggcgcctgggacgccgacggcaagggccccagcatctgggacaacttcacccacacccccggcagcaacgtgaaggacaacgccaccggcgacatcgcctgcgacagctaccaccagctggacgccgacctgaacatgctgagagccctgaaggtgaaggcctacagattcagcatcagctggagcagaatcttccccaccggcagaaacagcagcatcaacagccacggcgtggactactacaacagactgatcaacggcctggtggccagcaacatcttccccatggtgaccctgttccactgggacctgccccaggccctgcaggacatcggcggctgggagaaccccgccctgatcgacctgttcgacagctacgccgacttctgcttccagaccttcggcgacagagtgaagttctggatgaccttcaacgagcccatgtacctggcctggctgggctacggcagcggcgagttcccccccggcgtgaaggaccccggctgggccccctacagaatcgcccacgccgtgatcaaggcccacgccagagtgtaccacacctacgacgagaagtacagacaggagcagaagggcgtgatcagcctgagcctgagcacccactgggccgagcccaagagccccggcgtgcccagagacgtggaggccgccgacagaatgctgcagttcagcctgggctggttcgcccaccccatcttcagaaacggcgactaccccgacaccatgaagtggaaggtgggcaacagaagcgagctgcagcacctggccaccagcagactgcccagcttcaccgaggaggagaagagattcatcagagccaccgccgacgtgttctgcctgaacacctactacagcagaatcgtgcagcacaagacccccagactgaacccccccagctacgaggacgaccaggagatggccgaggaggaggaccccagctggcccagcaccgccatgaacagagccgccccctggggcaccagaagactgctgaactggatcaaggaggagtacggcgacatccccatctacatcaccgagaacggcgtgggcctgaccaaccccaacaccgaggacaccgacagaatcttctaccacaagacctacatcaacgaggccctgaaggcctacagactggacggcatcgacctgagaggctacgtggcctggagcctgatggacaacttcgagtggctgaacggctacaccgtgaagttcggcctgtaccacgtggacttcaacaacaccaacagacccagaaccgccagagccagcgccagatactacaccgaggtgatcaccaacaacggcatgcccctggccagagaggacgagttcctgtacggcagattccccgagggcttcatctggagcgccgccagcgccgcctaccagatcgagggcgcctggagagccgacggcaagggcctgagcatctgggacaccttcagccacacccccctgagagtggagaacgacgccatcggcgacgtggcctgcgacagctaccacaagatcgccgaggacctggtgaccctgcagaacctgggcgtgagccactacagattcagcatcagctggagcagaatcctgcccgacggcaccaccagatacatcaacgaggccggcctgaactactacgtgagactgatcgacaccctgctggccgccagcatccagccccaggtgaccatctaccactgggacctgccccagaccctgcaggacgtgggcggctgggagaacgagaccatcgtgcagagattcaaggagtacgccgacgtgctgttccagagactgggcgacaaggtgaagttctggatcaccctgaacgagcccttcgtgatcgcctaccagggctacggctacggcaccgccgcccccgtgcacggcagactggtgtgcaccagctacttccaggagtggagactgcagtag

SEQ ID NO: 127367 - DNA, 1005 bp, Artificial Sequence
  derived and/or modified sequence
atggcaactctgaaggagaaacttattgcgcctgtcgcagaggaggaagcaacagtgccgaacaacaaaataaccgtggtgggggttgggcaggtagggatggcctgcgccatctcaatactggggaagagcctggcagatgagcttgccctggtcgacgtgcttgaggacaaactcaagggggagatgatggacctacagcacggaagcctgtttcttcagacacctaaaattgtagctgacaaggattattctgtaaccgctaactccaagattgtggttgtgactgcgggcgtgagacagcaggagggggagtcaaggctgaatcttgtgcaacgcaacgtgaacgtttttaagtttattatcccacagatcgtaaagtattctcctgattgtataatcatagtcgtgagcaaccctgtggacatccttacctacgtcacatggaagctttctggacttcctaagcatagggtaattggtagtggttgtaacttagattccgcacggtttaggtacctcatggcagagaagctcgggattcatccttcgagctgccacgggtggatactcggggaacacggcgattcttctgttgcagtctggagcggggttaatgttgccggggtaagtcttcaggaactgaatcccgagatggggacagataacgatagtgaaaattggaaggaggtccacaagatggtggtggaaagcgcgtatgaagtgattaaactaaaggggtatactaattgggctattgggctgtccgtcgctgatctcatcgaatccatgcttaagaacctttccaggatccacccagtctcgactatggtgaaggggatgtacggtattgaaaacgaagtcttcttgagtctgccatgtattctaaacgcaaggggccttactagcgtgatcaaccaaaagttgaaggatgatgaggtagcccagctgaagaagtcagccgacacactgtgggacattcagaaagaccttaaggacctgtag

SEQ ID NO: 127368 - DNA, 699 bp, Artificial Sequence
  derived and/or modified sequence
atggcaactttgaaggaaaagctgatcgcccccgtggcagaggaagaggccacggtcccaaataacaagatcacagtggtgggagttggccaggtgggaatggcctgtgcaattagcatcctcggaaaatctttggcggatgaactcgcgctggtggatgtgctcgaagacaagctgaaaggagagatgatggacttgcaacatggatcattgtttctacaaactcccaagattgtggcagataaagattattcagtgaccgccaactcaaagatagtggtggtaacagccggggtgcgccaacaggaaggggagtccagactgaacctagtgcaacgtaatgttaacgtgtttaaatttatcatccctcagatagtgaagtacagcccagattgcattattatcgttgtgtccaaccccgtcgatattctgacctacgttacctggaagctgagcggactccccaagcatagagtgattggaagcggatgcaatttggattccgctcggttcaggtatctgatggctgagaaactgggcatccacccctcttcatgtcatggttggatcctgggtgaacacggggactcctccgtcgccgtgtggagcggggttaacgtcgcaggtgtgtccctacaggagcttaatccagagatgggcacagacaacgattccgaaaattggaaggaagtccattag

SEQ ID NO: 127369 - DNA, 1005 bp, Artificial Sequence
  derived and/or modified sequence
atggccaccctgaaggagaagctcatcgcccccgtcgcggaagaagaggcgaccgtacctaataacaaaatcacagttgttggggtgggtcaggtaggtatggcctgtgcaattagcatcctgggaaagagcttagcagacgaactagcacttgtcgacgtgctcgaagacaagttgaaaggggagatgatggacctacagcacggtagtctatttctgcagaccccgaagattgtcgccgacaaagactatagtgtcaccgccaattctaagattgtggtggtcactgctggggtgaggcagcaagaaggcgagtccagactcaacctggtccagaggaacgttaacgtttttaagttcattattcctcagatcgtgaagtactcccctgactgcattattatcgtcgtttctaatcctgtggatatactcacatatgttacatggaagctcagcggcctgccgaagcatagggtgatcgggagtggatgcaacctcgactcagcgagatttagatatcttatggcagagaaattaggaatacacccttcctcttgccatggctggatcctgggcgaacatggggactcctctgtcgccgtgtggagcggagtgaacgtcgcaggcgtgtccttacaggaactcaatccggagatgggcactgacaatgattccgagaattggaaggaagtgcacaagatggtggtcgaatcagcatatgaggtgataaagttgaaaggatatacaaattgggctattggcttgagcgttgcggatttaatagagagcatgctcaaaaacctctctagaatacatccggtttccacgatggtcaagggcatgtatggcattgaaaatgaggtgttcctatccctgccttgcatactgaatgcacgaggccttacaagtgtcatcaaccagaagctaaaagacgatgaggttgcccagctcaaaaaatctgctgatactctttgggatatacaaaaagatctaaaggacctctag

SEQ ID NO: 127370 - DNA, 414 bp, Artificial Sequence
  derived and/or modified sequence
atggccactctcaaagaaaaattgattgctcccgttgccgaagaggaagctaccgtgccaaacaacaagattacagtcgttggggtgggacaagtgggcatggcctgtgcaatatcaattctgggaaaatctctggcagacgagctcgccctcgttgatgtgctggaagacaagttgaagggagagatgatggacctccaacacggatctttattcctccagacaccaaagatcgtggcagataaggattacagtgtgaccgcaaattctaaaattgttgtggtgaccgccggagtacgtcagcaggaaggtgaaagtaggctcaacctggtgcagagaaatgtcaatgtctttaaattcataatccctcagatagtaaagtactcaccggattgtatcataatcgtggtctag

SEQ ID NO: 127371 - DNA, 309 bp, Artificial Sequence
  derived and/or modified sequence
atggcgactttgaaggaaaaactcatagccccggtcgcggaagaggaggccacagtgccaaacaataagatcaccgtcgttggtgtaggacaggtgggaatggcctgtgccatctccattctgggaaaatctctggccgacgagctcgccctggttgacgttctggaggacaagcttaagggggagatgatggatcttcagcacggctctttgtttctccagacacccaaaattgtagccgataaggactacagcgtgaccgccaacagcaagatagtggtggttacagctggggtcaggcaacagtag

SEQ ID NO: 127372 - DNA, 744 bp, Artificial Sequence
  derived and/or modified sequence
tggacgatctttacctcgaatatttgaatatattgccacgtgcaaaatggcaactcttaaggaaaaactcattgcaccagttgcggaagaagaggcaacagttccaaacaataagatcactgtagtgggtgttggacaagttggtatggcgtgtgctatcagcattctgggaaagtctctggctgatgaacttgctcttgtggatgttttggaagataagcttaaaggagaaatgatggatctgcagcatgggagcttatttcttcagacacctaaaattgtggcagataaagattattctgtgactgccaattctaagattgtagtggtaactgcaggagtccgtcagcaagaaggggagagtcggctcaatctggtgcagagaaatgttaatgtcttcaaattcattattcctcagatcgtcaagtacagtcctgattgcatcataattgtggtttccaacccagtggacattcttacgtatgttacctggaaactaagtggattacccaaacaccgcgtgattggaagtggatgtaatctggattctgctagatttcgctaccttatggctgaaaaacttggcattcatcccagcagctgccatggatggattttgggggaacatggcgactcaagtgtggctgtgtggagtggtgtgaatgtggcaggtgtttctctccaggaattgaatccagaaatgggaactgacaatgatagtgaaaattggaaggaagtgcataa

SEQ ID NO: 127373 - DNA, 732 bp, Artificial Sequence
  derived and/or modified sequence
gcagagccggcgccggaggagacgcacgcagctgactttgtcttctccgcacgactgttacagaggtctccagagccttctctctcctggagccatgcgccagttctttcctgcagggcctcttttctggatgcttaggggcttcgtttactttaccagccttgggtgctccgagtaaggaagtcctagacttgtccccacagaccttactcggggagatctctagcttctgcatgccctcgtgatctgctgttctttgctgccggtgccctgaggaaaagatggtttgtgcgcaccgcgagcagtacaagctgcatgcaaaatggcaactcttaaggaaaaactcattgcaccagttgcggaagaagaggcaacagttccaaacaataagatcactgtagtgggtgttggacaagttggtatggcgtgtgctatcagcattctgggaaagtctctggctgatgaacttgctcttgtggatgttttggaagataagcttaaaggagaaatgatggatctgcagcatgggagcttatttcttcagacacctaaaattgtggcagataaagattattctgtgactgccaattctaagattgtagtggtaactgcaggagtccgtcagcaagaaggggagagtcggctcaatctggtgcagagaaatgttaatgtcttcaaattcattattcctcagatcgtcaagtacagtcctgattgcatcataattgtggt

SEQ ID NO: 127374 - DNA, 487 bp, Artificial Sequence
  derived and/or modified sequence
agaagccagagcagacagcaatttcgggacattgcagagctgtagtagatctgtactggtctgcagacagacaataatttgcactaagaccaggaagacgttctgtgaggaagacataggtggaaatacggaaagcagaaaagacaacttcggggtggccgggagataacagaagtgcaaaatggcaactcttaaggaaaaactcattgcaccagttgcggaagaagaggcaacagttccaaacaataagatcactgtagtgggtgttggacaagttggtatggcgtgtgctatcagcattctgggaaagtctctggctgatgaacttgctcttgtggatgttttggaagataagcttaaaggagaaatgatggatctgcagcatgggagcttatttcttcagacacctaaaattgtggcagataaagattattctgtgactgccaattctaagattgtagtggtaactgcaggagtccgtcagcaa

SEQ ID NO: 127375 - DNA, 1005 bp, Artificial Sequence
  derived and/or modified sequence
atggccaccctgaaggagaagctgattgcccctgtggccgaggaggaggccaccgtgcccaacaacaagatcaccgtggtgggcgtgggccaggtgggcatggcctgtgccatcagcatcctgggcaagagcctggctgatgagctggccctggtggatgtgctggaggacaagctgaagggggagatgatggacctgcagcacggcagcctcttcctgcagacccccaagatcgtggccgacaaggactacagcgtgacagccaacagcaagatcgtggtggtgacagctggggtgcggcagcaggagggggagagccggctgaacctggtgcagagaaatgtgaatgtgttcaagttcatcatcccccagatcgtgaagtacagcccagactgcatcatcatcgtggtgagcaaccctgtggacatcctgacctacgtgacctggaagctgagcggcctgcccaagcacagggtcatcggcagcggctgcaacctggacagcgcccgcttccgctacctgatggccgagaagctgggcatccaccccagcagctgccacggctggatcctgggggagcacggggacagctctgtggccgtgtggagcggcgtgaatgtggccggcgtgtccctgcaggagctgaaccctgagatgggcacagacaatgattctgagaactggaaggaggtgcacaagatggtggtggagagcgcctatgaggtgatcaagctgaagggctacaccaactgggccatcggcctgtctgtggccgacctgattgaatccatgctgaagaacctgagccgcatccaccctgtgtccaccatggtgaagggcatgtatggaattgaaaatgaggtgttcctgagcctgccctgcatcctgaatgcccggggcctgaccagcgtcatcaaccagaagctgaaggatgatgaggtggcccagctgaagaagtctgctgacaccctgtgggacatccagaaggacctgaaggacctgtag

SEQ ID NO: 127376 - DNA, 699 bp, Artificial Sequence
  derived and/or modified sequence
atggccaccctgaaggagaagctgattgcccctgtggccgaggaggaggccaccgtgcccaacaacaagatcaccgtggtgggcgtgggccaggtgggcatggcctgtgccatcagcatcctgggcaagagcctggctgatgagctggccctggtggatgtgctggaggacaagctgaagggggagatgatggacctgcagcacggcagcctcttcctgcagacccccaagatcgtggccgacaaggactacagcgtgacagccaacagcaagatcgtggtggtgacagctggggtgcggcagcaggagggggagagccggctgaacctggtgcagagaaatgtgaatgtgttcaagttcatcatcccccagatcgtgaagtacagcccagactgcatcatcatcgtggtgagcaaccctgtggacatcctgacctacgtgacctggaagctgagcggcctgcccaagcacagggtcatcggcagcggctgcaacctggacagcgcccgcttccgctacctgatggccgagaagctgggcatccaccccagcagctgccacggctggatcctgggggagcacggggacagctctgtggccgtgtggagcggcgtgaatgtggccggcgtgtccctgcaggagctgaaccctgagatgggcacagacaatgattctgagaactggaaggaggtgcactag

SEQ ID NO: 127377 - DNA, 414 bp, Artificial Sequence
  derived and/or modified sequence
atggccaccctgaaggagaagctgattgcccctgtggccgaggaggaggccaccgtgcccaacaacaagatcaccgtggtgggcgtgggccaggtgggcatggcctgtgccatcagcatcctgggcaagagcctggctgatgagctggccctggtggatgtgctggaggacaagctgaagggggagatgatggacctgcagcacggcagcctcttcctgcagacccccaagatcgtggccgacaaggactacagcgtgacagccaacagcaagatcgtggtggtgacagctggggtgcggcagcaggagggggagagccggctgaacctggtgcagagaaatgtgaatgtgttcaagttcatcatcccccagatcgtgaagtacagcccagactgcatcatcatcgtggtgtag

SEQ ID NO: 127378 - DNA, 309 bp, Artificial Sequence
  derived and/or modified sequence
atggccaccctgaaggagaagctgattgcccctgtggccgaggaggaggccaccgtgcccaacaacaagatcaccgtggtgggcgtgggccaggtgggcatggcctgtgccatcagcatcctgggcaagagcctggctgatgagctggccctggtggatgtgctggaggacaagctgaagggggagatgatggacctgcagcacggcagcctcttcctgcagacccccaagatcgtggccgacaaggactacagcgtgacagccaacagcaagatcgtggtggtgacagctggggtgcggcagcagtag

SEQ ID NO: 127379 - DNA, 1005 bp, Artificial Sequence
  derived and/or modified sequence
atggccaccctgaaggagaagctgatcgcccccgtggccgaggaggaggctacggttcccaataacaaaatcacggtcgttggcgtagggcaggtcggcatggcatgcgctatctcaatcctcggaaagtctctggccgacgagctggctctggtcgacgttctcgaggacaagctcaagggcgagatgatggatctgcagcacggcagcctgtttctgcagactccaaagatagtggctgacaaggattacagtgtgactgccaatagcaaaatagtggtcgttaccgcaggggtgaggcagcaggagggtgagagccgcctcaatctcgtccaacgaaacgtcaacgtgttcaagtttattatccctcagatcgtgaaatatagcccggactgtatcatcattgtggtgtcgaatcctgttgatatcctcacctatgtaacctggaaattgagcggcttgcctaagcaccgggtgataggaagcgggtgtaacctggattccgcacggttcagatacctgatggccgagaagttagggatacacccatcttcctgtcatggatggatattgggcgaacacggcgacagtagcgtcgcagtttggagtggggtaaacgtggcaggcgtaagcctgcaggaactaaatccagagatggggactgataacgactctgagaattggaaagaggtgcataagatggtagttgagtctgcatatgaagtgatcaaactgaaaggttacacgaactgggccatcggattgagcgtcgctgatttgatcgagtcgatgctgaaaaacctttcccgaattcaccccgtgagcacgatggtgaaagggatgtacggcatcgagaacgaggtgtttctctccctgccatgtatccttaacgctcgcgggctaacctctgtgatcaaccagaagctgaaggacgacgaagtagcccagcttaagaagtcagctgacacactatgggatatccaaaaagatctgaaggacttgtag

SEQ ID NO: 127380 - DNA, 699 bp, Artificial Sequence
  derived and/or modified sequence
atggccaccctgaaggagaagctgatcgcccccgtggccgaggaggaggctacggtgccaaataataagatcaccgtagtcggtgtaggacaagtcggaatggcgtgtgctataagcatccttggaaagtccctggccgatgagctagccctcgtcgatgtgctggaagacaagttaaaaggtgagatgatggatctccagcacggtagcctgtttcttcagacccccaagattgtggcagataaggattacagtgtgacagctaacagtaaaatcgtggtggtgactgccggggtgaggcagcaggagggcgaaagcagactcaacctagtccaacgcaacgtcaatgtgttcaagtttattatcccacagatcgtgaagtattctcccgactgcataataatagttgtatcaaacccagttgacattctcacatatgtgacatggaagctctccggattaccaaagcacagggtcataggctctggctgcaaccttgattcagccaggttccgttatctaatggccgaaaaactcggaatccatcctagctcctgtcatggttggatcctgggagagcatggcgattctagtgtagccgtgtggtctggggtaaacgttgccggagtgtctctgcaggagcttaatcccgagatgggtaccgacaatgactccgaaaactggaaagaggtacactag

SEQ ID NO: 127381 - DNA, 1005 bp, Artificial Sequence
  derived and/or modified sequence
atggccaccctgaaggagaagctgatcgcccccgtggccgaggaggaggccaccgttccaaataataagatcacagtcgtgggagtgggccaggtgggcatggcctgtgcaatcagtattttagggaagtcgctggcagacgaactggctcttgtggatgtcttggaggacaagctcaagggcgaaatgatggatctgcagcatgggtctctgttcttgcaaaccccaaaaatagttgctgacaaggactattccgtcacagcgaattcgaagatcgtggtagttaccgccggtgttcgccaacaggaaggggaaagccggctgaacctggtgcagcgaaatgtgaatgtgttcaagttcattatcccacagatcgtgaagtacagcccggactgcataataatcgtagtgtccaatccagtggatatcctcacttatgtcacttggaagctaagcggtctgcccaagcacagggtgatcgggagcggatgtaacctggacagcgctcgcttccgatacctaatggctgagaaactaggaatccacccatcttcctgtcatgggtggatattaggagagcacggtgactcaagcgtagccgtgtggagcggggtaaatgtggctggggttagcctgcaggagctaaatccagaaatggggacagacaatgacagtgagaactggaaagaggtgcacaaaatggtggtcgagtctgcctacgaggtgatcaagctgaaagggtatacgaactgggcaataggtctgtccgttgcagacctgatagaatcgatgttgaagaatctgtcacgcattcaccccgtgtcaacaatggttaaaggaatgtatggaattgagaacgaggtgtttctgtctcttccctgtatcctgaacgcccgaggacttacatctgtgatcaaccaaaagcttaaggatgacgaggtagcacagttgaagaaatcagcagacacgctgtgggacatccagaaagacctgaaagatctttag

SEQ ID NO: 127382 - DNA, 414 bp, Artificial Sequence
  derived and/or modified sequence
atggccaccctgaaggagaagctgatcgcccccgtggccgaggaggaagccactgtgcccaacaacaaaattacggtggtaggcgtcggacaggtgggaatggcctgtgctatcagtatccttggcaaatcactagccgatgaactcgcgcttgtcgacgtcctggaggataaattaaagggagaaatgatggatctgcagcacggtagtctgtttctgcaaactccgaagatcgtggcggataaggattatagcgtaacagctaactcgaaaatcgtggtagtcacagcaggagtgaggcagcaggagggagaatcaagactgaacctcgtgcagcgcaatgttaacgtctttaagttcatcatcccccagatcgtcaagtacagtcctgattgcatcatcatcgtggtgtag

SEQ ID NO: 127383 - DNA, 309 bp, Artificial Sequence
  derived and/or modified sequence
atggccaccctgaaggagaagctgatcgcccccgtggccgaggaggaagccactgttcctaacaacaagataacagttgtaggcgtgggccaagtgggcatggcgtgcgctatctccatactgggaaaaagcctcgcggatgagcttgcactggtggatgtgctggaggacaagctcaaaggagaaatgatggacctgcaacacggctctctgttcctgcagacacctaaaatcgtggccgacaaggactactcagtcacagcaaacagtaagattgtcgttgtgacagcaggtgtccgtcagcagtag

SEQ ID NO: 127384 - DNA, 1005 bp, Artificial Sequence
  derived and/or modified sequence
atggccactctgaaggaaaagcttattgcacccgtggcagaagaagaagcaaccgtgcccaacaacaagatcaccgtcgtaggagtgggacaggtcggcatggcttgtgctatctccatcctgggaaaatctctagcagatgagctagctttagtggatgtcctggaggacaagctaaaaggcgaaatgatggacctgcaacatgggagcttgtttcttcagactccgaaaatagtggctgataaagactattctgttaccgccaacagcaagatcgtggtggtcacagctggggtgagacagcaggagggagagtcccggctgaatctcgtacagcggaatgtcaatgtgttcaagttcattatcccacagatagtgaagtactcacctgactgcatcattatcgtggtatccaatccagtggacatcctcacctatgttacctggaagctttccggtcttcccaaacacagggttatcggatcagggtgcaatttggacagtgctcgtttccgctatcttatggcggagaagttgggcattcacccctctagctgccatggctggatcttaggagagcatggggactcctccgtggctgtgtggtctggcgttaatgtcgctggcgtatctctccaggagttgaaccccgagatggggacagataatgactctgaaaattggaaagaggtgcacaagatggttgtggagtccgcctatgaagtgatcaagctgaagggttatactaactgggccattggtcttagcgtggccgacctgatagagagcatgctgaaaaatctcagccgaatccacccagtgagcactatggtgaaggggatgtatggcattgagaacgaggtgttcttatctctcccctgcatcttgaacgccaggggcctgacttcggtcatcaatcagaagttgaaggacgacgaggtggctcagcttaagaagtccgctgatacactgtgggatatccagaaagacctcaaggacctgtag

SEQ ID NO: 127385 - DNA, 699 bp, Artificial Sequence
  derived and/or modified sequence
atggccacattaaaggagaaactgatcgctcccgtcgcagaagaagaagcgacggttcccaataataagataaccgtggttggcgtgggacaggtcggaatggcttgtgccatttccatccttgggaaatcactcgctgatgagctcgctctggtggacgttctggaggacaagcttaagggtgaaatgatggatttacagcacgggtccttgttcctccagacacctaaaatagtggctgacaaagattatagcgtgaccgccaatagtaaaattgtggtggtgactgctggggttcgtcagcaggagggcgagagccgcctgaatctggtgcagagaaatgtgaacgtatttaagtttatcattccacagatcgtaaaatatagtccagattgcattattatcgtcgtaagtaaccccgtggatatcctgacttatgttacgtggaagctgtccggcctacctaagcacagagtgattgggagcggatgtaatctagattcagcacggttcagatatttaatggcagaaaagctgggcatccatccctctagctgccacggctggatcctcggcgaacatggggactcatcagtagcagtgtggtcaggtgtgaatgtggctggagtgtctcttcaggagttgaaccctgagatgggcacagacaatgattctgaaaattggaaggaggtgcactag

SEQ ID NO: 127386 - DNA, 1005 bp, Artificial Sequence
  derived and/or modified sequence
atggccaccttaaaggaaaagctgattgcgccagtcgccgaagaagaagctactgttcctaacaacaagattactgtcgtgggtgttggacaggtgggtatggcgtgcgccatttccatcctgggcaagtcgctcgccgacgagcttgctttagtagatgtgctggaagacaaactgaaaggcgagatgatggacttacagcacggcagcttgtttctccagactcccaagattgtcgccgataaagactatagcgtgaccgcaaatagcaaaattgtggttgtcacggcgggagtgcgccagcaggaaggcgaaagccggttaaacctggtgcagcgcaacgtgaatgttttcaaatttatcattccccagatcgtgaaatactctcctgactgcatcatcattgttgtgtccaaccccgttgacattctgacatatgttacttggaagctcagcggccttcccaaacatagggtgatagggagcgggtgcaatctggactccgctcggtttcgttatctgatggctgaaaaacttggaatccacccctctagttgtcacggatggatccttggggagcacggggatagttccgtggccgtgtggagcggcgtgaatgtggcgggagtctctctacaggagctgaaccctgagatgggtacggataatgactccgagaactggaaagaggtccataagatggttgtagaatctgcatacgaggttatcaagttgaagggatacaccaactgggctatcggtttgagtgtggccgacttaattgagtctatgctgaagaacctgagtaggatacaccctgtttccacaatggtaaagggaatgtacggcattgaaaatgaagtgtttttgtcccttccgtgtatcctgaatgctcgcggtctaacaagcgtgattaatcagaaattaaaggacgacgaagttgcacaactgaaaaaaagcgctgatactctgtgggatattcagaaggacttaaaggacctgtag

SEQ ID NO: 127387 - DNA, 414 bp, Artificial Sequence
  derived and/or modified sequence
atggcgacactcaaggaaaaactgattgcacctgtggctgaagaggaagcgaccgtgcctaacaataaaatcaccgttgtcggggtcgggcaggtcggcatggcctgcgccatctcaattcttgggaaatctctggcggatgaactcgctctggtggacgtgctggaagacaagctgaaaggggaaatgatggatctgcaacatggatctctcttcctccagacgccaaaaatagtggccgacaaagattatagtgttactgctaactcaaaaatcgtcgtcgtcacggcaggtgtgcgccagcaggaaggggaatctaggctgaatctcgtacagcgcaatgtcaacgtgtttaaattcatcatcccccaaatcgtcaagtattcgccagactgtatcataatcgtagtgtag

SEQ ID NO: 127388 - DNA, 309 bp, Artificial Sequence
  derived and/or modified sequence
atggcaacgctgaaggagaagctcatcgcccctgtggcagaggaggaagccacggtcccgaacaacaaaataaccgttgtgggtgtgggccaggtggggatggcctgcgccatttcaatcctcggcaagtccttggcagatgagctagctttggtggatgtgttggaagataaactgaagggggagatgatggacctgcagcacggatcgctgttcctgcagacacctaaaattgtcgctgacaaggactattctgtgaccgcaaacagcaagatagtggtcgtcacagccggagtgcggcagcagtag

SEQ ID NO: 127389 - DNA, 1005 bp, Artificial Sequence
  derived and/or modified sequence
atggccaccctgaaggagaagctgatcgcccccgtggccgaggaggaggccaccgtgcccaacaacaagatcaccgtggtgggcgtgggccaggtgggcatggcctgcgccatcagcatcctgggcaagagcctggccgacgagctggccctggtggacgtgctggaggacaagctgaagggcgagatgatggacctgcagcacggcagcctgttcctgcagacccccaagatcgtggccgacaaggactacagcgtgaccgccaacagcaagatcgtggtggtgaccgccggcgtgagacagcaggagggcgagagcagactgaacctggtgcagagaaacgtgaacgtgttcaagttcatcatcccccagatcgtgaagtacagccccgactgcatcatcatcgtggtgagcaaccccgtggacatcctgacctacgtgacctggaagctgagcggcctgcccaagcacagagtgatcggcagcggctgcaacctggacagcgccagattcagatacctgatggccgagaagctgggcatccaccccagcagctgccacggctggatcctgggcgagcacggcgacagcagcgtggccgtgtggagcggcgtgaacgtggccggcgtgagcctgcaggagctgaaccccgagatgggcaccgacaacgacagcgagaactggaaggaggtgcacaagatggtggtggagagcgcctacgaggtgatcaagctgaagggctacaccaactgggccatcggcctgagcgtggccgacctgatcgagagcatgctgaagaacctgagcagaatccaccccgtgagcaccatggtgaagggcatgtacggcatcgagaacgaggtgttcctgagcctgccctgcatcctgaacgccagaggcctgaccagcgtgatcaaccagaagctgaaggacgacgaggtggcccagctgaagaagagcgccgacaccctgtgggacatccagaaggacctgaaggacctgtag

SEQ ID NO: 127390 - DNA, 699 bp, Artificial Sequence
  derived and/or modified sequence
atggccaccctgaaggagaagctgatcgcccccgtggccgaggaggaggccaccgtgcccaacaacaagatcaccgtggtgggcgtgggccaggtgggcatggcctgcgccatcagcatcctgggcaagagcctggccgacgagctggccctggtggacgtgctggaggacaagctgaagggcgagatgatggacctgcagcacggcagcctgttcctgcagacccccaagatcgtggccgacaaggactacagcgtgaccgccaacagcaagatcgtggtggtgaccgccggcgtgagacagcaggagggcgagagcagactgaacctggtgcagagaaacgtgaacgtgttcaagttcatcatcccccagatcgtgaagtacagccccgactgcatcatcatcgtggtgagcaaccccgtggacatcctgacctacgtgacctggaagctgagcggcctgcccaagcacagagtgatcggcagcggctgcaacctggacagcgccagattcagatacctgatggccgagaagctgggcatccaccccagcagctgccacggctggatcctgggcgagcacggcgacagcagcgtggccgtgtggagcggcgtgaacgtggccggcgtgagcctgcaggagctgaaccccgagatgggcaccgacaacgacagcgagaactggaaggaggtgcactag

SEQ ID NO: 127391 - DNA, 414 bp, Artificial Sequence
  derived and/or modified sequence
atggccaccctgaaggagaagctgatcgcccccgtggccgaggaggaggccaccgtgcccaacaacaagatcaccgtggtgggcgtgggccaggtgggcatggcctgcgccatcagcatcctgggcaagagcctggccgacgagctggccctggtggacgtgctggaggacaagctgaagggcgagatgatggacctgcagcacggcagcctgttcctgcagacccccaagatcgtggccgacaaggactacagcgtgaccgccaacagcaagatcgtggtggtgaccgccggcgtgagacagcaggagggcgagagcagactgaacctggtgcagagaaacgtgaacgtgttcaagttcatcatcccccagatcgtgaagtacagccccgactgcatcatcatcgtggtgtag

SEQ ID NO: 127392 - DNA, 309 bp, Artificial Sequence
  derived and/or modified sequence
atggccaccctgaaggagaagctgatcgcccccgtggccgaggaggaggccaccgtgcccaacaacaagatcaccgtggtgggcgtgggccaggtgggcatggcctgcgccatcagcatcctgggcaagagcctggccgacgagctggccctggtggacgtgctggaggacaagctgaagggcgagatgatggacctgcagcacggcagcctgttcctgcagacccccaagatcgtggccgacaaggactacagcgtgaccgccaacagcaagatcgtggtggtgaccgccggcgtgagacagcagtag

SEQ ID NO: 127393 - protein, 151 aa, Artificial Sequence
  derived and/or modified sequence
MFSTKALLLAGLISTALAGPWANICAGKSSNEIRTCDRHGCGQYSAQRSQRPHQGVDILCSAGSTVYAPFTGMIVGQEKPYQNKNAINNGVRISGRGFCVKMFYIKPIKYKGPIKKGEKLGTLLPLQKVYPGIQSHVHIENCDSSDPTAYL

SEQ ID NO: 127394 - DNA, 456 bp, Artificial Sequence
  derived and/or modified sequence
atgttttcgacgaaagcgctactgctggccggattgatctcaacagctctggctggtccttgggccaacatttgcgccggtaaatcttcaaatgagattcgaacatgtgacaggcacggatgtggacagtactccgcccagcgtagccagaggcctcatcagggagtggatatcctttgttctgcaggaagcacagtatatgccccttttaccggtatgatcgtgggccaggagaagccttatcagaacaaaaacgctatcaacaacggtgttagaatcagtgggcgtgggttctgtgttaaaatgttctatatcaaacccatcaagtataaaggaccgataaaaaagggagagaagcttggtacactgctccctcttcagaaagtttacccagggatccagagccatgtgcatattgagaactgcgactcctctgaccctacagcttacttgtag

SEQ ID NO: 127395 - DNA, 456 bp, Artificial Sequence
  derived and/or modified sequence
atgttcagcaccaaggccctgctgctggccggcctcatcagcacagccctggccggcccctgggccaacatctgtgccggcaagagcagcaatgagatccgcacctgtgacagacatggctgcggccagtacagcgcccagaggagccagaggccccaccagggcgtggacatcctgtgcagcgctggcagcacagtgtatgcccccttcaccggcatgattgtgggccaggagaagccctaccagaacaagaatgccatcaacaatggagtgcgcatcagcggccggggcttctgtgtgaagatgttctacatcaagcccatcaagtacaagggccccatcaagaagggggagaagctgggcaccctgctgcccctgcagaaggtgtacccaggcatccagagccacgtgcacatcgagaactgtgacagcagtgaccccacagcctacctgtag

SEQ ID NO: 127396 - DNA, 1077 bp, Artificial Sequence
  derived and/or modified sequence
aaatcaaatagctatccatggaatattagaacttgacttgctccatcctcttaaactttttgtgtctcacactaaagaaatgagagatgcagaattctaaggctaaatagctaggaagtattcattcaaacttgaatattcttcaaagagagtgtgggggcaactctaatcagaggaagaaactaaaggaagtaaaaccagatgttttccaccaaagccctccttttggctggtctgatttctaccgcactggcagggccatgggctaatatatgtgctggcaagtcttccaatgagatccggacgtgtgaccgccatggctgtggacagtactctgctcaaagaagtcagaggcctcaccagggtgtggacatcttgtgctctgctggatctactgtgtacgcaccattcactggaatgattgtgggccaggagaaaccttatcaaaacaagaatgctatcaataatggtgttcgaatatctggaagaggtttttgtgtcaaaatgttctacattaagccaattaagtataaaggtcctattaagaagggagaaaaacttggaactctattgcccttgcagaaagtttatcctggcatacaatcgcatgtgcacattgaaaactgtgactcgagtgaccctactgcatacctgtaaatcgaaggccaatggtcagatcttcaaaataaaaagtcatcttaaaaacctggatgcatacccttctcttcaagaaatttgtgttcacaaaggaaaaatgcatgaagggatggataccccattttccatgacatgattattacacattgcatgcctgtatcaaaacatctcacgtacctcataaacaaatacacctatgtacccacaaaaattttttaattaaaaaaaggaaatttgagtttaaatagaaacatgataaatgcaagaaagaaaacattttgattttaactcattgtcactctgatgttcatgtgaactggttgcttcgggctctttgatctgtcacctatggaatctgagtggttttattttttagatttctcagtcccgaagatctaagataaataaacaagagaactt

SEQ ID NO: 127397 - DNA, 456 bp, Artificial Sequence
  derived and/or modified sequence
atgttcagcaccaaggccctgctgctggccggcctgatcagcaccgcactggccggaccttgggctaatatctgcgcaggtaagagctctaatgaaatccgaacttgtgacagacacggttgtggccagtactcggcccagaggagtcaacgcccccaccaaggcgtagacattctctgctccgctggatctactgtctacgctcctttcacgggcatgatcgtcggacaggagaaaccataccagaataagaatgccattaataacggagtcagaatttctggacggggtttctgcgtcaagatgttctacattaaaccgattaaatacaagggcccgatcaaaaagggtgagaagctgggtactcttctccctctccagaaagtctacccaggaatccagtcccatgtgcacatcgagaattgcgacagctccgaccctacagcttatctgtag

SEQ ID NO: 127398 - DNA, 456 bp, Artificial Sequence
  derived and/or modified sequence
atgttttccaccaaagctcttcttctagccggactaatctccactgctctggcgggaccttgggccaatatttgtgctggtaagagctcaaatgaaatcagaacttgcgatagacacgggtgtggacagtactcagcccagaggagtcagcgtccgcatcagggcgttgatatcctgtgttccgcgggatctacggtctacgccccattcacaggtatgatagtaggtcaagagaaaccttatcagaacaagaatgcaattaataacggagttcgcatttcaggacggggattttgcgtgaagatgttttacattaagcctatcaagtataaggggcctataaagaagggtgagaagctcgggactctgctcccactgcagaaagtatacccgggtatccagagccacgtgcatattgagaactgcgatagttcagaccctaccgcgtacctttag

SEQ ID NO: 127399 - DNA, 456 bp, Artificial Sequence
  derived and/or modified sequence
atgttcagcaccaaggccctgctgctggccggcctgatcagcaccgccctggccggcccctgggccaacatctgcgccggcaagagcagcaacgagatcagaacctgcgacagacacggctgcggccagtacagcgcccagagaagccagagaccccaccagggcgtggacatcctgtgcagcgccggcagcaccgtgtacgcccccttcaccggcatgatcgtgggccaggagaagccctaccagaacaagaacgccatcaacaacggcgtgagaatcagcggcagaggcttctgcgtgaagatgttctacatcaagcccatcaagtacaagggccccatcaagaagggcgagaagctgggcaccctgctgcccctgcagaaggtgtaccccggcatccagagccacgtgcacatcgagaactgcgacagcagcgaccccaccgcctacctgtag

SEQ ID NO: 127400 - protein, 250 aa, Artificial Sequence
  derived and/or modified sequence
MTPGRCCLAADIQVETFIFTDGEDEALARHTGNVVITNCSAAHSRQALSCKMAVEYDRFIESGRKWFCHVDDDNYVNLRALLRLLASYPHTRDVYVGKPSLDRPIQAMERVSENKVRPVHFWFATGGAGFCISRGLALKMSPWASGGHFMNTAERIRLPDDCTIGYIVEALLGVPLIRSGLFHSHLENLQQVPTSELHEQVTLSYGMFENKRNAVHVKGPFSVEADPSRFRSIHCHLYPDTPWCPRTAIF

SEQ ID NO: 127401 - DNA, 753 bp, Artificial Sequence
  derived and/or modified sequence
atgacacccggtcgatgttgcctcgcagccgacatccaggttgaaactttcatcttcactgatggggaggacgaggcacttgcccgccacactggaaatgtggttatcaccaactgctcggcggcccattcccgccaggccctcagctgtaaaatggctgtggaatatgacaggtttatcgagtcagggagaaagtggttctgtcacgtggacgacgataactatgttaatcttagagccttgttacgactgctggcatcttatccacacacgagggatgtctatgtagggaaaccctccctggatagacccattcaggccatggagagagtttccgagaacaaagtgagacctgttcacttctggtttgcaactgggggggccggcttctgcatttcacgaggtctggccctgaagatgagtccttgggctagcggcggacacttcatgaatacagctgaacgtattagactgccagatgactgtacaatcggctacatcgtggaggcattgctgggcgtgcccctgatacgaagcgggctctttcatagtcacctggaaaatcttcagcaggtgcccacaagtgagctgcatgaacaagtaactctgagttacggaatgttcgaaaacaaaagaaatgccgtgcatgtcaaagggccattcagtgtggaggccgacccttcgagatttcggagcatacactgtcacttgtatccagacaccccatggtgcccaaggaccgctattttctag

SEQ ID NO: 127402 - DNA, 753 bp, Artificial Sequence
  derived and/or modified sequence
atgaccccaggacgatgttgcctggccgccgacatccaagtggagacattcattttcaccgacggcgaagacgaagccctggcccgacacaccggaaatgtagtgattacaaactgttctgctgctcactccagacaggccttgtcatgcaagatggctgtggagtatgacaggttcatcgaatcgggacggaagtggttctgtcacgtcgacgacgacaactacgttaacctgcgagcactgctgcggctattggcgtcgtacccccatactagagacgtctatgtgggcaaaccctcattggaccgtcctatccaggccatggagcgcgtatccgaaaacaaagtgcgccccgtgcacttttggttcgctacgggaggcgccggcttctgcattagccggggcctggctctgaaaatgtcaccctgggcgtctggaggacatttcatgaacactgctgagaggatccgtcttccagatgattgcaccatcggctacatagtggaagcgctcctaggagtgcccctgatccgatccggactgtttcactcgcaccttgaaaatctacagcaggtccccacctccgagctccatgaacaggtgacacttagttacggcatgttcgaaaataagcgtaatgctgtacatgtcaagggaccgttctccgtggaagcagacccgtctaggttccgttctatccactgtcatctgtatccggacactccgtggtgcccaaggaccgcaattttttag

SEQ ID NO: 127403 - DNA, 753 bp, Artificial Sequence
  derived and/or modified sequence
atgaccccaggccgctgctgcctggccgctgacatccaggtggagaccttcatcttcacagatggagaagatgaggccctggcccggcacactggaaatgtggtgatcaccaactgcagcgctgcccacagccggcaggccctgagctgcaagatggctgtggagtatgaccgcttcatcgagagcggcaggaagtggttctgccacgtggatgatgacaactacgtgaacctgcgggccctgctgcggctgctggccagctacccccacaccagagatgtgtatgtgggcaagcccagcctggaccggcccatccaggccatggagcgggtgtctgagaacaaggtgcggcctgtgcacttctggtttgccactggaggagctggcttctgcatcagccggggcctggccctgaagatgagcccctgggccagcggcggccacttcatgaacacagctgagcgcatccggctgcctgatgactgcaccatcggctacatcgtggaggccctgctgggcgtgcccctcatccgcagcggcctcttccacagccacctggagaacctgcagcaggtgcccaccagcgagctgcacgagcaggtgaccctgtcctatggcatgtttgagaacaagagaaatgctgtgcacgtgaagggccccttctctgtggaggccgaccccagccgcttccgcagcatccactgccacctgtacccagacaccccctggtgccccaggacagccatcttctag

SEQ ID NO: 127404 - DNA, 1968 bp, Artificial Sequence
  derived and/or modified sequence
atgacaccaggtcgctgctgtcttgcggctgacattcaggtagagacgttcatcttcactgacggggaagatgaggccctggccaggcacacgggcaacgtggtcatcacaaactgctcggccgcccacagccgccaggcgctgtcctgcaagatggccgtggagtatgaccgcttcatcgagtccggcaggaagtggttctgccacgtggacgatgacaactacgtcaacctgcgggccctgctgcggctgctggccagctacccgcacacgcgggacgtctacgtcggcaagcccagcctggacaggcccatccaggccatggagcgggtcagcgagaacaaggtgcgtcctgtccacttctggtttgccacgggcggcgctggcttctgcatcagccgtgggctggctctgaagatgagcccgtgggccagcgggggtcacttcatgaatacggctgagcggatccggctgcctgatgactgcaccatcggctacatcgtggaggccctgctgggtgtgcccctcatccgcagcggcctcttccactcccacctggagaacctgcagcaggtgcccacctcggagctccacgagcaggtgacgctgagctacggtatgtttgaaaacaagcggaacgccgtccacgtgaaggggcccttctcggtggaggccgacccatccaggttccgctccatccactgccacctgtacccggacacaccctggtgtccccgcactgccatcttctagtggccatggctgagacccaatccctgggcgcccctggtatccaaagggcccagggaccctgttgcgctgccctggcctcggcattcgaggctcccctagggccgtgcctgtgcgtgtgcgtgtgcgtgtgtgtgtgtgtgtactgcatgcccacccgggtagcaggctgctgggcagttctgctctgtggaggggcgggcaccagcgccacttatgtgcctctgctccgagggccagtgggctgcagggcctgcttggaggaaggatttgtgtgtcggaggccactccgagggcaattctgttaggatttttggatctttctacagctacggggctccgggctactttgcagggatgcgatgcgtaggtgcctttctcttcctgctgaccacaagctctgtgctgggggtacctgtgccctgaagtcctggcccctgtgtcatagccccaagtacgactcactgagccatgctcattgcaggggaggctgggtctgggggtgcgtgacccaatccccttcctcctggcctggacgctgtggcttaagagtaacagcagccaccgcccagttccagtggccccacgaagcccccagtggctggctgtccagctgggcaaacagtggcacccctcccagctcttctgagtggggagtcttccaggcctcctcagaggtcttccctttgcctccccaggacagggtgagtcagagctcagcatttaatctcctctccaaagtagagagcaagtcgcccacagtgggcgtgtctgtaaatattgtgacagtatttttttactgtgctgttttttttgaaaggggatgggtaaaaagtagggtgttcttgttttttgcttgggagggtgggggtgggggagggtcttattttatcttatcttttctgtggatcagaaaaaacagaagccaaactcggggtcatctttgtttttaaagctgaagtgggactgtctggcactctgtgtatttatgcgttccagcatctggaacctcccatccctgccctcctcctgtgtagctgccacctccccgctgggcccagcatggctcacctgtcccgtgggctgtgtttcttgttgtttttctctttgcaaagacatagctaggaaagcgaatgataagggaaaagttctcagggaattgaagtgttgttgctatggtgacgtccttttgctgtgaataaaggtgctctttgcagc

SEQ ID NO: 127405 - DNA, 2058 bp, Artificial Sequence
  derived and/or modified sequence
ggagggttttgctctttgtgtgggtgtgtgagtggctatgatcctagttgtccagctgctgcgtggagaataagtaaagcaggtctgaatgacaccaggtcgctgctgtcttgcggctgacattcaggtagagacgttcatcttcactgacggggaagatgaggccctggccaggcacacgggcaacgtggtcatcacaaactgctcggccgcccacagccgccaggcgctgtcctgcaagatggccgtggagtatgaccgcttcatcgagtccggcaggaagtggttctgccacgtggacgatgacaactacgtcaacctgcgggccctgctgcggctgctggccagctacccgcacacgcgggacgtctacgtcggcaagcccagcctggacaggcccatccaggccatggagcgggtcagcgagaacaaggtgcgtcctgtccacttctggtttgccacgggcggcgctggcttctgcatcagccgtgggctggctctgaagatgagcccgtgggccagcgggggtcacttcatgaatacggctgagcggatccggctgcctgatgactgcaccatcggctacatcgtggaggccctgctgggtgtgcccctcatccgcagcggcctcttccactcccacctggagaacctgcagcaggtgcccacctcggagctccacgagcaggtgacgctgagctacggtatgtttgaaaacaagcggaacgccgtccacgtgaaggggcccttctcggtggaggccgacccatccaggttccgctccatccactgccacctgtacccggacacaccctggtgtccccgcactgccatcttctagtggccatggctgagacccaatccctgggcgcccctggtatccaaagggcccagggaccctgttgcgctgccctggcctcggcattcgaggctcccctagggccgtgcctgtgcgtgtgcgtgtgcgtgtgtgtgtgtgtgtactgcatgcccacccgggtagcaggctgctgggcagttctgctctgtggaggggcgggcaccagcgccacttatgtgcctctgctccgagggccagtgggctgcagggcctgcttggaggaaggatttgtgtgtcggaggccactccgagggcaattctgttaggatttttggatctttctacagctacggggctccgggctactttgcagggatgcgatgcgtaggtgcctttctcttcctgctgaccacaagctctgtgctgggggtacctgtgccctgaagtcctggcccctgtgtcatagccccaagtacgactcactgagccatgctcattgcaggggaggctgggtctgggggtgcgtgacccaatccccttcctcctggcctggacgctgtggcttaagagtaacagcagccaccgcccagttccagtggccccacgaagcccccagtggctggctgtccagctgggcaaacagtggcacccctcccagctcttctgagtggggagtcttccaggcctcctcagaggtcttccctttgcctccccaggacagggtgagtcagagctcagcatttaatctcctctccaaagtagagagcaagtcgcccacagtgggcgtgtctgtaaatattgtgacagtatttttttactgtgctgttttttttgaaaggggatgggtaaaaagtagggtgttcttgttttttgcttgggagggtgggggtgggggagggtcttattttatcttatcttttctgtggatcagaaaaaacagaagccaaactcggggtcatctttgtttttaaagctgaagtgggactgtctggcactctgtgtatttatgcgttccagcatctggaacctcccatccctgccctcctcctgtgtagctgccacctccccgctgggcccagcatggctcacctgtcccgtgggctgtgtttcttgttgtttttctctttgcaaagacatagctaggaaagcgaatgataagggaaaagttctcagggaattgaagtgttgttgctatggtgacgtccttttgctgtgaataaaggtgctctttgcagcaa

SEQ ID NO: 127406 - DNA, 753 bp, Artificial Sequence
  derived and/or modified sequence
atgacccccggccggtgctgcctggccgccgacatccaggtggagacctttatcttcactgacggtgaagacgaagctttagcgcgtcacacagggaacgtagtcatcacaaattgcagcgcggcgcacagccggcaagcgctcagctgtaagatggccgtcgagtacgacagatttattgaatcagggaggaagtggttttgtcacgtagatgatgacaattatgtgaacttaagggctttactgcgcctcctcgcctcgtaccctcacacaagggatgtgtatgtaggtaagccttctcttgacagaccgatccaggccatggaacgggtgagcgagaataaggtgcgccccgtacatttctggtttgccaccggtggtgctggattctgtatcagtcgcggcctggcgttgaaaatgtccccttgggcaagtgggggacacttcatgaacacagcggagcgcatcagactgccagatgactgcacaattggctatattgtagaggcgcttctcggcgttcccctaatcaggagcggtctgttccacagtcatttagaaaacctgcagcaggtacctaccagcgagttgcacgaacaagttacactgtcctacgggatgttcgaaaataagcgaaacgcagtgcatgttaagggcccattttctgtggaagcagatccttctcggttccgctctattcactgccacctgtacccggataccccctggtgtccacgaactgctattttctag

SEQ ID NO: 127407 - DNA, 753 bp, Artificial Sequence
  derived and/or modified sequence
atgacccccggccggtgctgcctggccgccgacatccaggtggagacatttatattcaccgacggggaagatgaagccctcgcccgacacaccggcaacgttgttattacaaattgtagtgcagctcatagccgacaagccctgtcatgtaagatggctgtagaatacgaccgtttcattgaaagtggaaggaagtggttctgtcacgtggacgatgataactacgttaacttacgtgcactcctgagactcttggccagctaccctcataccagggacgtgtatgttggcaagccttcccttgatcgaccgatacaagcaatggagcgggttagcgagaataaggtcaggcctgtccatttctggtttgcgacaggcggtgccgggttttgcatctcccgcggcttggcactcaaaatgtcgccctgggcttccgggggccacttcatgaacactgctgagcgcattcgtttgcctgatgattgtacgataggatacatcgtcgaggctctgttaggcgttccactgatccgcagtggcctattccattcacatctcgaaaacttgcagcaagttccaactagcgagctccacgagcaggtaacacttagctacggtatgttcgagaacaagcgaaacgcagtccacgttaaggggcccttctcagttgaggctgacccaagccgatttaggtccattcattgtcacctttacccagatactccttggtgcccgaggacggctattttttag

SEQ ID NO: 127408 - DNA, 753 bp, Artificial Sequence
  derived and/or modified sequence
atgacacctggtaggtgctgcctggccgctgacatacaggtggaaactttcatttttacagatggagaggatgaggccctggcccgacacaccggcaatgttgtcatcactaactgctctgctgctcactccaggcaggcactatcctgtaaaatggccgtcgagtatgaccgctttattgagtcaggcaggaaatggttctgccacgtggatgacgacaactatgttaacttaagggctctgttgcgccttttggcttcgtatccccacacaagagacgtgtacgttggcaagccaagtcttgacaggcccatccaagccatggagcgtgtctctgagaacaaagtcagacccgtccatttttggttcgctactggaggcgcaggattttgtataagtaggggcttggcactgaagatgtctccctgggcatctgggggtcatttcatgaacacagcggaacggatcaggcttccggacgattgcaccattgggtacattgtcgaggccctgctcggcgtgccactgatccgaagtggcctgttccactctcacttggagaacctgcaacaagtgcctacaagtgagctgcatgaacaagtgaccctgtcatacggaatgttcgagaacaagaggaacgcagttcacgttaaggggccattttccgtggaggcggacccatcgcgattcagatccattcactgccatttataccccgatactccatggtgtcctaggaccgcgatcttttag

SEQ ID NO: 127409 - DNA, 753 bp, Artificial Sequence
  derived and/or modified sequence
atgactcctgggagatgctgtctggcggcagacatacaggtggagaccttcatctttacggacggcgaagacgaggccctggcgcgtcacaccggcaatgtggtgattactaattgctccgctgcacacagtcgccaggctctctcttgcaaaatggcagtggaatatgatagattcatcgagagtgggcgaaaatggttctgtcatgtcgatgatgacaattacgttaacctgagggctctcttgcgattgcttgcgtcatatccccatactcgggatgtgtacgttggcaaaccctcactcgacagaccgatccaagcgatggaaagagtgagtgaaaataaggttcgccctgtgcatttttggttcgccaccggtggtgctgggttttgcatcagtaggggcctcgctctcaagatgtcgccctgggccagtggaggccatttcatgaacactgctgagcgtattcggctgccggatgactgcactatcggatatatcgtcgaagctctgcttggagtccccctgattaggtctggcctcttccactctcatctggaaaatctgcaacaagttcctacatccgaattacacgaacaggttaccctgtcatatggaatgttcgagaacaaaagaaatgcagtgcacgtcaagggccctttcagtgtggaggccgatcccagccggtttagaagtatacactgccacctttatcctgatacgccctggtgtccgcgtacagccatcttctag

SEQ ID NO: 127410 - DNA, 753 bp, Artificial Sequence
  derived and/or modified sequence
atgacccccggcagatgctgcctggccgccgacatccaggtggagaccttcatcttcaccgacggcgaggacgaggccctggccagacacaccggcaacgtggtgatcaccaactgcagcgccgcccacagcagacaggccctgagctgcaagatggccgtggagtacgacagattcatcgagagcggcagaaagtggttctgccacgtggacgacgacaactacgtgaacctgagagccctgctgagactgctggccagctacccccacaccagagacgtgtacgtgggcaagcccagcctggacagacccatccaggccatggagagagtgagcgagaacaaggtgagacccgtgcacttctggttcgccaccggcggcgccggcttctgcatcagcagaggcctggccctgaagatgagcccctgggccagcggcggccacttcatgaacaccgccgagagaatcagactgcccgacgactgcaccatcggctacatcgtggaggccctgctgggcgtgcccctgatcagaagcggcctgttccacagccacctggagaacctgcagcaggtgcccaccagcgagctgcacgagcaggtgaccctgagctacggcatgttcgagaacaagagaaacgccgtgcacgtgaagggccccttcagcgtggaggccgaccccagcagattcagaagcatccactgccacctgtaccccgacaccccctggtgccccagaaccgccatcttctag

SEQ ID NO: 127411 - protein, 135 aa, Artificial Sequence
  derived and/or modified sequence
MACGLVASNLNLKPGECLRVRGEVAPDAKSFVLNLGKDSNNLCLHFNPRFNAHGDANTIVCNSKDGGAWGTEQREAVFPFQPGSVAEVCITFDQANLTVKLPDGYEFKFPNRLNLEAINYMAADGDFKIKCVAFD

SEQ ID NO: 127412 - DNA, 408 bp, Artificial Sequence
  derived and/or modified sequence
atggcctgcggcctggtggccagcaacctgaacctgaagcccggcgagtgcctgagagtgagaggcgaggtggcccccgacgccaagagcttcgtgctgaacctgggcaaggacagcaacaacctgtgcctgcacttcaaccccagattcaacgcccacggcgacgccaacaccatcgtgtgcaacagcaaggacggcggcgcctggggcaccgagcagagagaggccgtgttccccttccagcccggcagcgtggccgaggtgtgcatcaccttcgaccaggccaacctgaccgtgaagctgcccgacggctacgagttcaagttccccaacagactgaacctggaggccatcaactacatggccgccgacggcgacttcaagatcaagtgcgtggccttcgactag

SEQ ID NO: 127413 - DNA, 408 bp, Artificial Sequence
  derived and/or modified sequence
atggcctgcggcctagtggcctcaaacttaaacttgaagccaggtgagtgtctgcgggtccgcggggaggtagcccccgatgccaaaagcttcgtactcaatctgggaaaagacagtaataacctttgcctgcattttaatcctcgtttcaacgctcacggggacgcaaatactatcgtatgtaattccaaagatgggggcgcctgggggactgagcagcgggaggcagtgttccctttccaacctggcagcgtcgcagaagtgtgcattacatttgaccaagccaatctgacggtgaaactccctgacggatatgagttcaagttccccaataggctgaacctggaagcaattaattatatggctgcagacggtgatttcaagatcaagtgcgtggcttttgattag

SEQ ID NO: 127414 - DNA, 408 bp, Artificial Sequence
  derived and/or modified sequence
atggcctgtggcctggtggccagcaacctgaacctgaagccaggagagtgcctgcgggtgcggggggaggtggccccagatgccaagagctttgtgctgaacctgggcaaggacagcaacaacctgtgcctgcacttcaacccccgcttcaatgcccatggagatgccaacaccatcgtgtgcaacagcaaggatggaggagcctggggcacagagcagcgggaggccgtgttccccttccagcccggctctgtggccgaggtgtgcatcacctttgaccaggccaacctgactgtgaagctgcctgatggctatgagttcaagttccccaaccggctgaacctggaggccatcaactacatggctgctgatggagacttcaagatcaagtgtgtggcctttgattag

SEQ ID NO: 127415 - DNA, 408 bp, Artificial Sequence
  derived and/or modified sequence
atggcctgcggcctggtggccagcaacctgaacctgaagcccggcgaatgccttcgcgtccgcggcgaagtagctccagacgcaaaatcttttgtgctcaatcttgggaaagacagcaataatctctgcttgcactttaatccccggttcaatgcgcacggggacgctaacaccatcgtgtgcaatagcaaggacgggggggcttggggcacagagcagagggaggcggtgtttcctttccaacccggatccgtggctgaagtctgcattaccttcgaccaggcaaatctcacagttaagcttcccgacgggtatgagttcaaattcccaaaccgcctgaacctggaggccatcaattacatggcggcagatggggattttaagatcaagtgcgtggcattcgattag

SEQ ID NO: 127416 - DNA, 408 bp, Artificial Sequence
  derived and/or modified sequence
atggcctgcggattagtggccagcaatctaaacctgaaacctggcgagtgcttgcgggtgcgcggagaggtcgcgcctgatgcaaaatcgtttgtactgaatttggggaaggacagcaacaatctgtgcctccactttaaccctcgatttaacgcacacggagatgccaacaccatcgtctgcaatagcaaggacggtggtgcatggggtaccgaacaaagagaagcggtattccccttccagccaggttccgtggctgaggtttgcattacctttgatcaggcaaatctgacagtgaagttgcccgacggatacgaattcaagtttcctaataggctgaacctggaagcaatcaattatatggccgctgatggggacttcaaaatcaagtgtgtggctttcgactag

SEQ ID NO: 127417 - DNA, 560 bp, Artificial Sequence
  derived and/or modified sequence
ttaaaagggtgggagcgtccgggggcccatctctctcgggtggagtcttctgacagctggtgcgcctgcccgggaacatcctcctggactcaatcatggcttgtggtctggtcgccagcaacctgaatctcaaacctggagagtgccttcgagtgcgaggcgaggtggctcctgacgctaagagcttcgtgctgaacctgggcaaagacagcaacaacctgtgcctgcacttcaaccctcgcttcaacgcccacggcgacgccaacaccatcgtgtgcaacagcaaggacggcggggcctgggggaccgagcagcgggaggctgtctttcccttccagcctggaagtgttgcagaggtgtgcatcaccttcgaccaggccaacctgaccgtcaagctgccagatggatacgaattcaagttccccaaccgcctcaacctggaggccatcaactacatggcagctgacggtgacttcaagatcaaatgtgtggcctttgactgaaatcagccagcccatggcccccaataaaggcagctgcctctgctccctctgaaccag

SEQ ID NO: 127418 - protein, 323 aa, Artificial Sequence
  derived and/or modified sequence
MAFSGSQAPYLSPAVPFSGTIQGGLQDGLQITVNGTVLSSSGTRFAVNFQTGFSGNDIAFHFNPRFEDGGYVVCNTRQNGSWGPEERKTHMPFQKGMPFDLCFLVQSSDFKVMVNGILFVQYFHRVPFHRVDTISVNGSVQLSYISFQPPGVWPANPAPITQTVIHTVQSAPGQMFSTPAIPPMMYPHPAYPMPFITTILGGLYPSKSILLSGTVLPSAQRFHINLCSGNHIAFHLNPRFDENAVVRNTQIDNSWGSEERSLPRKMPFVRGQSFSVWILCEAHCLKVAVDGQHLFEYYHRLRNLPTINRLEVGGDIQLTHVQT

SEQ ID NO: 127419 - DNA, 972 bp, Artificial Sequence
  derived and/or modified sequence
atggcattctcaggatcacaagcaccatacctgtcccctgctgttcccttctctggaactatccagggcggcttacaagatggactgcagattaccgttaacggcacagtgctctcctcttctggtacccggttcgctgtcaacttccagacagggttctctggcaatgacatagcctttcacttcaaccccagatttgaagacggcggctatgtagtgtgcaacactcgccagaatggaagttggggccccgaggagcgtaaaacacatatgccgttccagaagggaatgccatttgacttgtgttttctggtccagagcagcgatttcaaggtgatggtgaacgggatcctgttcgttcagtatttccaccgggtgccgtttcatcgcgtagacacaatcagcgtaaacggctcggtgcagctatcctatatttccttccaaccacccggcgtttggcccgctaacccggctccaattacccagacagtcatccacaccgtccaatcggcacccggccaaatgttctctacgccagctatccctccaatgatgtacccacatcctgcctatcccatgccgtttataactactattctgggaggcttatatccttccaaatctatcttactctccggaacagtgctgccctctgctcagcggtttcatatcaacttatgctctggcaatcatatcgccttccacttaaacccccgatttgacgaaaatgccgtcgtaaggaatacccaaatcgacaacagctggggttccgaggagcgttcactgcccaggaagatgccgttcgtgcgggggcagagcttcagtgtgtggattctgtgcgaagcccactgtctgaaagtggccgtcgatggccagcacctctttgagtactatcacagactcaggaacttgcctaccattaacaggctagaggtggggggagacattcagctgacccacgtacagacctag

SEQ ID NO: 127420 - DNA, 972 bp, Artificial Sequence
  derived and/or modified sequence
atggccttcagcggcagccaggccccctacctgagccctgctgtgcccttcagcggcaccatccagggcggcctgcaggacggcctgcagatcaccgtgaatggcaccgtgctgagcagcagcggcaccaggtttgctgtgaacttccagacaggcttctctggaaatgacatcgccttccacttcaaccccaggtttgaagatggcggctacgtggtgtgcaacacccggcagaatggctcctggggccctgaggagaggaagacccacatgcccttccagaagggcatgccctttgacctgtgcttcctggtgcagagcagtgacttcaaggtgatggtgaatggcatcctgtttgtgcagtacttccaccgggtgcccttccaccgggtggacaccatctctgtgaatggatctgtgcagctgagctacatctccttccagcccccaggagtgtggccagccaacccagcccccatcacccagaccgtcatccacacagtgcagagcgcccctggccagatgttcagcaccccagccatcccccccatgatgtacccccacccagcctaccccatgcccttcatcaccaccatcctgggcggcctgtaccccagcaagagcatcctgctgagcggcaccgtgctgcccagcgcccagcgcttccacatcaacctgtgcagcggcaaccacatcgccttccacctgaaccccaggtttgatgaaaatgctgtggtgaggaacacccagattgacaacagctggggcagcgaggagaggagcctgcccaggaagatgccctttgtgcggggccagagcttctctgtgtggatcctgtgtgaggcccactgcctgaaggtggccgtggatggccagcacctgtttgagtactaccaccggctgaggaacctgcccaccatcaaccggctggaggtgggcggggacatccagctgacccacgtgcagacctag

SEQ ID NO: 127421 - DNA, 3018 bp, Artificial Sequence
  derived and/or modified sequence
tgtttgttaaattatatgtagggacagggtcttccaacctttcccgagctggtctcaagctcctgggctgaagtgatcctcctgcctcagcctctcaaagtgctggtattataggcataagccaccacgccctgcccatttttctaagttggattattttacactccagtctgctgtgaatgagagttccagttgttgcgtatcgcaatcaatttgtgattgcctacaaatgatgtgccgtgatgaaattgtccctggtgtccgagaggatcgcaaagaatttcccttcctttctctcctttctgctccccttgtactgtctactccttaaactggtacttgatccaggaacataatggggatggacagtgcagatggcacacatggcctcagtctattggagcatctcaaaggaattagtctgcaaattctagtgcatctaggtggagcacaggaaggaagagaggtgcagactcacgtatggccctggggcacctgccatcctctcgcacccgtacagcccttacctgccagcacttaccctacccagcttgagttctgggccttctcaccagcacatcgctgggacctggtcgacttcaggtaagtttatttcatggctccctcccccacgacctgcacatgccatatgttccttcccagccccatgtcacttgaaatgttctatcatgtccaagacttctctcctcatcctaaagtgcagaaaataaggatggagaagagaaggagaagagaatcaagagagattcattgagagggaggatcagaagctcctgggcaccccatactgtagaataaaaatattcattatggtgtttttcttgcaaaatattcccctctacataattatgtttttacatgaataatataaatttaaacaggagaaatactttttgaagagtctgagaatcttcataaagttcaggcggccacgaattagctgtgtgacctggggcatgccccttagactctgagcctcagcttctctgtatgtaaaatgggttgaagccgcccttccccacaagcaccctgtgcacaggcaatgcccagccccattattttctggactccgtggccaagcatgcttaggacacacagccacatacttctgggcagtgtcatctggcaacttgctgtcatgtcagtgtggtcaagcattgtagacctctatgaaccaaatatgcttcaggcttgggttgagcacaggagagggaggagggaaaggtcactggggctgggagtgcctacttccctctgtgagtgtcaccccagtccacccagtaccatacctttctctctctggacccacttccttttgctgccggctcctccccattgaataacagccaagttgctttggtttctatttctttgttaagtcgttccctctacaaaggacttcctagtgggtgtgaaaggcagcggtggccacagaggcggcggagagatggccttcagcggttcccaggctccctacctgagtccagctgtccccttttctgggactattcaaggaggtctccaggacggacttcagatcactgtcaatgggaccgttctcagctccagtggaaccaggtttgctgtgaactttcagactggcttcagtggaaatgacattgccttccacttcaaccctcggtttgaagatggagggtacgtggtgtgcaacacgaggcagaacggaagctgggggcccgaggagaggaagacacacatgcctttccagaaggggatgccctttgacctctgcttcctggtgcagagctcagatttcaaggtgatggtgaacgggatcctcttcgtgcagtacttccaccgcgtgcccttccaccgtgtggacaccatctccgtcaatggctctgtgcagctgtcctacatcagcttccagcctcccggcgtgtggcctgccaacccggctcccattacccagacagtcatccacacagtgcagagcgcccctggacagatgttctctactcccgccatcccacctatgatgtacccccaccccgcctatccgatgcctttcatcaccaccattctgggagggctgtacccatccaagtccatcctcctgtcaggcactgtcctgcccagtgctcagaggttccacatcaacctgtgctctgggaaccacatcgccttccacctgaacccccgttttgatgagaatgctgtggtccgcaacacccagatcgacaactcctgggggtctgaggagcgaagtctgccccgaaaaatgcccttcgtccgtggccagagcttctcagtgtggatcttgtgtgaagctcactgcctcaaggtggccgtggatggtcagcacctgtttgaatactaccatcgcctgaggaacctgcccaccatcaacagactggaagtggggggcgacatccagctgacccatgtgcagacataggcggcttcctggccctggggccgggggctggggtgtggggcagtctgggtcctctcatcatccccacttcccaggcccagcctttccaaccctgcctgggatctgggctttaatgcagaggccatgtccttgtctggtcctgcttctggctacagccaccctggaacggagaaggcagctgacggggattgccttcctcagccgcagcagcacctggggctccagctgctggaatcctaccatcccaggaggcaggcacagccagggagaggggaggagtgggcagtgaagatgaagccccatgctcagtcccctcccatcccccacgcagctccaccccagtcccaagccaccagctgtctgctcctggtgggaggtggcctcctcagcccctcctctctgacctttaacctcactctcaccttgcaccgtgcaccaacccttcacccctcctggaaagcaggcctgatggcttcccactggcctccaccacctgaccagagtgttctcttcagaggactggctcctttcccagtgtccttaaaataaagaaatgaaaatgcttgttggcacattca

SEQ ID NO: 127422 - DNA, 972 bp, Artificial Sequence
  derived and/or modified sequence
atggccttcagcggcagccaggccccctacctgagccccgccgtgccattttcaggtacaatccagggaggtctccaggacggtctccaaattaccgtaaacggaacagtgctgtcatctagcggcaccaggttcgccgtgaactttcagactggtttttcaggcaatgatatagccttccatttcaatcctcggttcgaagacggaggctacgtggtctgtaacactcgccagaacggaagctggggacccgaagaacgcaaaacacacatgcctttccagaaggggatgccattcgacctttgttttctcgtccagagcagcgatttcaaagtgatggtgaacgggatcctgttcgtgcagtactttcacagggtgccgtttcatagagttgacacaatatctgtgaatgggtcggtgcagctgtcctatatcagctttcagcccccaggagtgtggcccgccaatccagctcctattacacagacagtgattcacaccgtccagagcgctcccggccagatgtttagcacgccggccataccaccaatgatgtaccctcatcctgcctaccctatgccatttatcacaaccattttggggggactatacccatcaaagagtattttattgtccggaaccgtgctcccgtcagcacaaagattccacataaatctttgcagtggtaaccatatcgcgttccatttgaacccaagatttgacgagaacgccgtggtccgtaacacccaaattgacaactcctggggtagcgaagagcgctcactgccgcgtaaaatgccttttgtcaggggccagtcattttccgtgtggattctatgcgaggcccactgtctgaaagtggccgtcgacggtcagcacctgttcgagtactaccaccgcttacggaatcttccaaccatcaatcgtttggaggttggtggggacattcagttaacacacgtccagacatag

SEQ ID NO: 127423 - DNA, 972 bp, Artificial Sequence
  derived and/or modified sequence
atggctttctcaggctctcaggccccttatctctcccctgctgtgccattttcagggactatacagggcggactccaagatggactacagatcacagttaatgggacagttctctcgagtagcgggacccgctttgcagtgaacttccagacaggattcagcggtaacgacattgccttccactttaaccctaggtttgaagacggcggatatgtggtttgcaacactcgacagaacggtagctggggccctgaggagcggaaaacacatatgccctttcagaagggcatgccttttgacttgtgcttcctggtgcaatcatctgatttcaaagtgatggtgaacggaattctgtttgtgcaatacttccatcgggtgccttttcaccgggtggatacaatctccgttaatggcagtgtccagctgagctatatctcattccagccaccaggggtttggcccgctaatcctgcaccaattacacaaacagtgatccatactgtgcaatccgcccctggccagatgttctctacgcctgccattcctcccatgatgtatccgcaccctgcgtacccaatgccattcataactaccatcctcggtggtttgtatccaagcaagtccatacttctttcaggtaccgtactgcccagcgcgcagcgttttcacataaacctctgctctggcaaccacatcgcatttcatctgaatcctcgatttgatgaaaacgcagtcgttagaaatacgcagatcgataacagttggggttctgaggagcggagtctgccacgcaagatgcccttcgtccgcggacagagcttttccgtctggatactctgcgaggcccactgtctgaaggttgctgtggacgggcagcacctgtttgagtattatcatcggttgcggaacctgccaaccataaaccgcctggaggtgggcggtgacatccaactcacacacgtgcagacctag

SEQ ID NO: 127424 - DNA, 972 bp, Artificial Sequence
  derived and/or modified sequence
atggccttcagcggcagccaggccccctacctgagccccgccgtgcccttcagcggcaccatccagggcggcctgcaggacggcctgcagatcaccgtgaacggcaccgtgctgagcagcagcggcaccagattcgccgtgaacttccagaccggcttcagcggcaacgacatcgccttccacttcaaccccagattcgaggacggcggctacgtggtgtgcaacaccagacagaacggcagctggggccccgaggagagaaagacccacatgcccttccagaagggcatgcccttcgacctgtgcttcctggtgcagagcagcgacttcaaggtgatggtgaacggcatcctgttcgtgcagtacttccacagagtgcccttccacagagtggacaccatcagcgtgaacggcagcgtgcagctgagctacatcagcttccagccccccggcgtgtggcccgccaaccccgcccccatcacccagaccgtgatccacaccgtgcagagcgcccccggccagatgttcagcacccccgccatcccccccatgatgtacccccaccccgcctaccccatgcccttcatcaccaccatcctgggcggcctgtaccccagcaagagcatcctgctgagcggcaccgtgctgcccagcgcccagagattccacatcaacctgtgcagcggcaaccacatcgccttccacctgaaccccagattcgacgagaacgccgtggtgagaaacacccagatcgacaacagctggggcagcgaggagagaagcctgcccagaaagatgcccttcgtgagaggccagagcttcagcgtgtggatcctgtgcgaggcccactgcctgaaggtggccgtggacggccagcacctgttcgagtactaccacagactgagaaacctgcccaccatcaacagactggaggtgggcggcgacatccagctgacccacgtgcagacctag

SEQ ID NO: 127425 - protein, 778 aa, Artificial Sequence
  derived and/or modified sequence
MPAFLGLKCLGKLCSSEKSKVTSSERTSARGSNRKRLIVEDRRVSGTSFTAHRRATITHLLYLCPKDYCPRGRVCNSVDPFVAHPQDPHHPSEKPVIHCHKCGEPCKGEVLRVQTKHFHIKCFTCKVCGCDLAQGGFFIKNGEYLCTLDYQRMYGTRCHGCGEFVEGEVVTALGKTYHPNCFACTICKRPFPPGDRVTFNGRDCLCQLCAQPMSSSPKETTFSSNCAGCGRDIKNGQALLALDKQWHLGCFKCKSCGKVLTGEYISKDGAPYCEKDYQGLFGVKCEACHQFITGKVLEAGDKHYHPSCARCSRCNQMFTEGEEMYLQGSTVWHPDCKQSTKTEEKLRPTRTSSESIYSRPGSSIPGSPGHTIYAKVDNEILDYKDLAAIPKVKAIYDIERPDLITYEPFYTSGYDDKQERQSLGESPRTLSPTPSAEGYQDVRDRMIHRSTSQGSINSPVYSRHSYTPTTSRSPQHFHRPGNEPSSGRNSPLPYRPDSRPLTPTYAQAPKHFHVPDQGINIYRKPPIYKQHAALAAQSKSSEDIIKFSKFPAAQAPDPSETPKIETDHWPGPPSFAVVGPDMKRRSSGREEDDEELLRRRQLQEEQLMKLNSGLGQLILKEEMEKESRERSSLLASRYDSPINSASHIPSSKTASLPGYGRNGLHRPVSTDFAQYNSYGDVSGGVRDYQTLPDGHMPAMRMDRGVSMPNMLEPKIFPYEMLMVTNRGRNKILREVDRTRLERHLAPEVFREIFGMSIQEFDRLPLWRRNDMKKKAKLF

SEQ ID NO: 127426 - protein, 702 aa, Artificial Sequence
  derived and/or modified sequence
MVPDPVAHPQDPHHPSEKPVIHCHKCGEPCKGEVLRVQTKHFHIKCFTCKVCGCDLAQGGFFIKNGEYLCTLDYQRMYGTRCHGCGEFVEGEVVTALGKTYHPNCFACTICKRPFPPGDRVTFNGRDCLCQLCAQPMSSSPKETTFSSNCAGCGRDIKNGQALLALDKQWHLGCFKCKSCGKVLTGEYISKDGAPYCEKDYQGLFGVKCEACHQFITGKVLEAGDKHYHPSCARCSRCNQMFTEGEEMYLQGSTVWHPDCKQSTKTEEKLRPTRTSSESIYSRPGSSIPGSPGHTIYAKVDNEILDYKDLAAIPKVKAIYDIERPDLITYEPFYTSGYDDKQERQSLGESPRTLSPTPSAEGYQDVRDRMIHRSTSQGSINSPVYSRHSYTPTTSRSPQHFHRPGNEPSSGRNSPLPYRPDSRPLTPTYAQAPKHFHVPDQGINIYRKPPIYKQHAALAAQSKSSEDIIKFSKFPAAQAPDPSETPKIETDHWPGPPSFAVVGPDMKRRSSGREEDDEELLRRRQLQEEQLMKLNSGLGQLILKEEMEKESRERSSLLASRYDSPINSASHIPSSKTASLPGYGRNGLHRPVSTDFAQYNSYGDVSGGVREYQTLPDGHMPAMRMDRGVSMPNMLEPKIFPYEMLMVTNRGRNKILREVDRTRLERHLAPEVFREIFGMSIQEFDRLPLWRRNDMKKKAKLF

SEQ ID NO: 127427 - protein, 652 aa, Artificial Sequence
  derived and/or modified sequence
  misc_feature (1)..(1): Xaa can be any naturally occurring amino acid
XSHAFISQWVCRHWRDPVAHPQDPHHPSEKPVIHCHKCGEPCKGEVLRVQTKHFHIKCFTCKVCGCDLAQGGFFIKNGEYLCTLDYHPNCFACTICKRPFPPGDRVTFNGRDCLCQLCAQPMSSSPKETTFSSNCAGCGRDIKNGQALLALDKQWHLGCFKCKSCGKVLTGEYISKDGAPYCEKDYQGLFGVKCEACHQFITGKVLEAGDKHYHPSCARCSRCNQMFTEGEEMYLQGSTVWHPDCKQSTKTEEKLRPTRTSSESIYSRPGSSIPGSPGHTIYAKVDNEILDYKDLAAIPKVKAIYDIERPDLITYEPFYTSGYDDKQERQSLGESPRTLSPTPSAEGYQDVRDRMIHRSTSQGSINSPVYSRHSYTPTTSRSPQHFHRPDQGINIYRKPPIYKQHAALAAQSKSSEDIIKFSKFPAAQAPDPSETPKIETDHWPGPPSFAVVGPDMKRRSSGREEDDEELLRRRQLQEEQLMKLNSGLGQLILKEEMEKESRERSSLLASRYDSPINSASHIPSSKTASLPGYGRNGLHRPVSTDFAQYNSYGDVSGGVRDYQTLPDGHMPAMRMDRGVSMPNMLEPKIFPYEMLMVTNRGRNKILREVDRTRLERHLAPEVFREIFGMSIQEFDRLPLWRRNDMKKKAKLF

SEQ ID NO: 127428 - DNA, 2337 bp, Artificial Sequence
  derived and/or modified sequence
atgcccgccttcctgggcctgaagtgcctgggcaagctgtgcagcagcgagaagagcaaggtgaccagcagcgagagaaccagcgccagaggcagcaacagaaagagactgatcgtggaggacagaagagtgagcggcaccagcttcaccgcccacagaagagccaccatcacccacctgctgtacctgtgccccaaggactactgccccagaggcagagtgtgcaacagcgtggaccccttcgtggcccacccccaggacccccaccaccccagcgagaagcccgtgatccactgccacaagtgcggcgagccctgcaagggcgaggtgctgagagtgcagaccaagcacttccacatcaagtgcttcacctgcaaggtgtgcggctgcgacctggcccagggcggcttcttcatcaagaacggcgagtacctgtgcaccctggactaccagagaatgtacggcaccagatgccacggctgcggcgagttcgtggagggcgaggtggtgaccgccctgggcaagacctaccaccccaactgcttcgcctgcaccatctgcaagagacccttcccccccggcgacagagtgaccttcaacggcagagactgcctgtgccagctgtgcgcccagcccatgagcagcagccccaaggagaccaccttcagcagcaactgcgccggctgcggcagagacatcaagaacggccaggccctgctggccctggacaagcagtggcacctgggctgcttcaagtgcaagagctgcggcaaggtgctgaccggcgagtacatcagcaaggacggcgccccctactgcgagaaggactaccagggcctgttcggcgtgaagtgcgaggcctgccaccagttcatcaccggcaaggtgctggaggccggcgacaagcactaccaccccagctgcgccagatgcagcagatgcaaccagatgttcaccgagggcgaggagatgtacctgcagggcagcaccgtgtggcaccccgactgcaagcagagcaccaagaccgaggagaagctgagacccaccagaaccagcagcgagagcatctacagcagacccggcagcagcatccccggcagccccggccacaccatctacgccaaggtggacaacgagatcctggactacaaggacctggccgccatccccaaggtgaaggccatctacgacatcgagagacccgacctgatcacctacgagcccttctacaccagcggctacgacgacaagcaggagagacagagcctgggcgagagccccagaaccctgagccccacccccagcgccgagggctaccaggacgtgagagacagaatgatccacagaagcaccagccagggcagcatcaacagccccgtgtacagcagacacagctacacccccaccaccagcagaagcccccagcacttccacagacccggcaacgagcccagcagcggcagaaacagccccctgccctacagacccgacagcagacccctgacccccacctacgcccaggcccccaagcacttccacgtgcccgaccagggcatcaacatctacagaaagccccccatctacaagcagcacgccgccctggccgcccagagcaagagcagcgaggacatcatcaagttcagcaagttccccgccgcccaggcccccgaccccagcgagacccccaagatcgagaccgaccactggcccggcccccccagcttcgccgtggtgggccccgacatgaagagaagaagcagcggcagagaggaggacgacgaggagctgctgagaagaagacagctgcaggaggagcagctgatgaagctgaacagcggcctgggccagctgatcctgaaggaggagatggagaaggagagcagagagagaagcagcctgctggccagcagatacgacagccccatcaacagcgccagccacatccccagcagcaagaccgccagcctgcccggctacggcagaaacggcctgcacagacccgtgagcaccgacttcgcccagtacaacagctacggcgacgtgagcggcggcgtgagagactaccagaccctgcccgacggccacatgcccgccatgagaatggacagaggcgtgagcatgcccaacatgctggagcccaagatcttcccctacgagatgctgatggtgaccaacagaggcagaaacaagatcctgagagaggtggacagaaccagactggagagacacctggcccccgaggtgttcagagagatcttcggcatgagcatccaggagttcgacagactgcccctgtggagaagaaacgacatgaagaagaaggccaagctgttctag

SEQ ID NO: 127429 - DNA, 7582 bp, Artificial Sequence
  derived and/or modified sequence
agacagtaaggagccaggggaacagagagaattgtggggcagcaccgctccttgggtccccactccccatttctcattgcttggaaatccatgccaagatgcctgccttccttggtctaaagtgtctggggaaattgtgcagctctgagaaaagcaaagtcacctcatctgagagaaccagtgccaggggctcgaacagaaagagactgattgttgaggaccggagggtctctgggacctccttcaccgctcataggcgtgccactatcactcatttgctgtatctctgtcccaaggactactgcccacgtgggcgtgtatgtaacagcgttgatccttttgtggcccaccctcaggaccctcaccacccatcagagaagcctgtcattcactgccataaatgtggggagccttgcaagggtgaagtgcttcgggtccagaccaaacatttccacatcaagtgtttcacctgcaaagtgtgtggctgtgacctggcacaagggggcttcttcataaagaacggagagtatctctgcaccctggactaccagcggatgtacgggacacgctgccatggctgtggggagttcgtggagggcgaagtggtgactgctctgggcaagacctaccatcccaattgctttgcttgtactatctgcaagcgcccgtttccacccggagaccgagtcacattcaatgggagagactgcctttgtcaactctgtgcacagccgatgtcgtccagtccgaaagaaaccaccttctccagcaattgtgccggctgcggaagagatatcaagaatgggcaggcgctgctggcgctggataagcagtggcacttggggtgctttaaatgcaagtcctgcgggaaggtcctcaccggggagtacatcagcaaggatggtgctccgtactgtgaaaaggactaccagggactctttggggtgaaatgtgaggcgtgtcaccagtttatcacagggaaagtcctggaggcaggtgacaaacattaccaccccagctgtgcacgatgcagcagatgcaaccagatgttcacagaaggagaggaaatgtatcttcaaggctccaccgtttggcatcccgactgtaagcaatctacgaagaccgaggaaaagctgcggcctaccaggacatcctcggaaagtatttattctaggccaggctccagtattcctggctcaccaggtcatactatctatgcaaaagtagacaatgagatcctggattacaaggatttagcagccattccgaaggtcaaggcaatttatgacattgaacgtccagatcttattacctatgagcctttctacacttcgggctatgatgacaaacaggagagacagagccttggagagtctccgaggactttgtctcctactccatcagcagaagggtaccaggatgttcgggatcggatgatccatcggtccacgagccagggctccatcaactcccctgtgtacagccgccacagctacactccaaccacgtcccgctctccccagcatttccacagacctggcaatgagccgtccagcggccggaactcccctctcccttaccggccagacagccgccctctaactccaacttacgctcaggcccctaaacatttccatgttccagatcaaggaatcaacatttaccgaaagccacccatctacaaacagcatgctgccttggcagcccagagcaagtcctcagaagatatcatcaagttttccaagttcccagcagcccaggcaccagaccccagcgagacaccaaagattgagacggaccactggcctggtcccccctcatttgctgtcgtaggacctgacatgaaacgcagatctagtggcagagaggaagatgatgaggaacttctgagacgtcggcagcttcaagaagagcaattaatgaagcttaactcaggcctgggacagttgatcttgaaagaagagatggagaaagagagccgggaaaggtcatctctgttagccagtcgctacgattctcccatcaactcagcttcacatattccatcatctaaaactgcatctctccctggctatggaagaaatgggcttcaccggcctgtttctaccgacttcgctcagtataacagctatggggatgtcagcgggggagtgcgagattaccagacactcccagatggccacatgcctgcaatgagaatggaccgaggagtgtctatgcccaacatgttggaaccaaagatatttccatatgaaatgctcatggtgaccaacagagggcgaaacaaaatcctcagagaggtggacagaaccaggctggagcgccacttagcccctgaagtgtttcgggaaatctttggaatgtccatacaggagtttgacaggttacctctttggagacgcaacgacatgaagaaaaaagcaaaactcttctaagtcccactcgtgaatggcaattagagaaaggactgacagtggcggtgccccataggatgtcatattgaggcccaaacttgattggagaatttgcaaactaccgtcgctcagcaacaccaaaaagagaaagtctggttaaaacaccatgagtcaaatgtcgggccagccaacagtaacacttgccaagaagcatggcgtagaaatttctatgttccgaaacacagagtagtgtccacatgtgagcttttcacattaccttatgtatacaacaggagctgcgttgttttcttctttttcttttcctttatctgttgtccaacaacagtgctgactgtccggataagagctggcaagtgcccttaggatgccgcatgggaaaaatcggttatcataatttcaaagtataaatatatttattaagtagcgctgcggctaagaaggaagagtgaggggtctgtccatggggtggcagtgatttcacacccgcctttcttgaatggcttcgtgttactcagccgtgccctggcaggaatggaactccatcagggaacagggcagctctgtttgaatggggtgaaaaacagcaaaattaattcttagcaagctccttgttctctactgttcaccgggacctggctggcaaatgacttagctattagtatatttaaaaactgttcaaaagcaaaagagaaggaacaggaatgaaaggaaaccttcccttaactctttctgcttcccatagcaggtctggttcctgctccccgcctaggacaggagctgtctggagctccacctttgcaaagaaaggaaaaacacaaattgcccccagattggcccagtggcatgccattaggtgattttgcataggggccatatcattcatggccaaaaaaaaccaaaaagcaaaaaacaaaaacaagtcccatgtcctactgactctagttcttccagtcgttatcctctgctgtctctctggcatcctatgaatcagatcaagcccatgctgttgttggtttttaaggtttctttcaataataggctaaggaaagacatgtttttctcttttaaatctctgcaactccaaagtagactccttcgaacgtatttaatttggccttttcagctttcttcttgcccagctctgtcgaattcatgggtgtgtgtgcacatgttggtttcactcacccagagtaattttgtgagcatgcatgtgctttttaatttctgcttgaatgtttgtcctgctgtgttgcagcttctaaagacattgtcaccgagtgtgtgtgactcaaagatcaagagtgaggctaaactgcgaccccaacatcacttccttcatggaaaggtgttggcgctgatgtagctcatggaaggatcagactgggaaccacagaggaaggatgaggtgggatgtggaggtcagagcatctcacgagagtccctcaggctctgcaacactagattcgaatatgagcctagggtttccccaacacgtgcgtgcatatgaaaccacatcatgattcccgacgtgagttagatgagggagagtttgtgtaactccacacccaggagggtaagccactttattatcatgctttggggctgtgcttaagaatttaagctctgttttaaagccgaagaagaaaacatttgaatttaccttcatatgccactaagaacaaaagctctgaagttcttcctgctggcaccaaatattaggattacaagctgtctctctgacaccagtggtaaaaaagcaagtagaatagtttctgagtctgtgttgcagcctctgacacgtggctcaccgctgtcatttgggggatggaatgaacagtcactgttctatagcatcctcctgtgctcttacctaaggaatctaaattgtcctagccttccattgctatgcactgaatgaggactactctcgtgtgtgtgtgtgtgtgtgtgtgtgtgtgtgtgtgtgtgtgtgtgtgtgttggatctactaacatgtttagcaaatggctctgacagggtggccatgagcagatgagaccagctcttgcttggttggaagccacactgcagtttgcagtttagcctttggtgtctcagtggcttcttgcttattccatgctttttctatcccatcctctctctgtgccctcctgcaatggcagccttggcacaatgcctgggtgtcctcatccttgctttactctggaaagtgtggggatggagaggatggtgcatttccagtgcttccttacctgtcaataacaatggtggccacctgggtcccagcacttggctggtggagagatttttttcattatggagctaataaagggtccctacgttttacattgattaatgaattatcacccagacatgtgcagatgaaatgtcaatataagaaaaatcaaggtatttgggaaacatgggcataatcaggtagttttgctaaaattcctcttccttggtctacataaagaagacatgggtctgtcatagaatggggacattagactgaaaactgggacaacccccttccttattttatagagactaggagttaaggggcctgcctaagattgcagtgataaagaactgaaccctaaatcagctcccactaatgaaaccctgctttccttgtatcttttaaactcagttctgcatccaacttgagaagaaaaaaagcttctttccatatcaagtaccatatgagttcatttaaactgcaccttgcagaaatgcattgccagaaagcaccagtagcctcctatctgcaagcagagtagtgctctgctctggggaggggtcattggaaaccataatgcagagtgggccccctactccatttcccagcaaaaggctccagctggagggatgggttgtggggcaacctggttcctgctaactgccagattgaatgtgtgggctagaatgcctgcacatttagttaaactgggctcagcatgcttgtcctcaaaatgtccatcctggtcacagcacacaagatggctattggtctgcttttaccctaccctgtactatacatgaaaattccagttattaacacactcaaactggtggagcttgttcaccctaggaaggggattgtatatatggcaggcttccctggtgccgatgtaaagggctacatttgggaacatttgacttccttgggactcttaagtgcataatgatggcatgaagtaaaaggggcctcaatgatgataggaaaatcagttcttttaaaatttcttcaagaaaatccaggctatcacatagtctttctgtgtgacttattaggagataggaagagcattgggaaacttgcacagctagctatgcatctacattttggtttggggttagttatgaaatgttcttaatatgacgtgttcaataacttcacataaacttcctgttctccaaaacctcaaagagatagagttaatgagttgttgtttttttttaaatgggggtagttttctatctgtcatgggctctagcatctactccgctacccaattctgtcatctccaagctgagtttcctcttctgaggcagaggctggagcagttctttttcagttctcatcctctccatcccaatccagtatatcaatcaactctaactcggagacgtctagctggcaatgtttctaaaactttcactggatttctttagacattgaagcaaacatttttttctaagaattgcttctcagatgatgatatcaaatgtatatgcttttgcaagtttgaaaagttcaaattaaccacttttgactaggtaagtctttctaaaaaccatttaaagctaactgggtcttagcatcctcctgtgtatggaagagacaggtgaccgctccaggttgggtgctcacagaacccttttcctgactctcatggaagatggtggaaggaaaatagactgtctcatcaaccctcctgtgtcctctgaagcaatctcagtttttattaaccacctcttctgtgtttctggtagctatttaacctgtatttaatctgtacttcctatgccagcctcaattttatttgatttttacaattattctcttctaaccaatgaagtgtttgtcagtatgccccaaagcttgctcttttgtgctcccttttgaataactttctatccagaaaaagagattatttgggacttgagatttgcagtgataccaacttatagcaatgatgtactttaagggaactacccaactatgttgtgatagaagaaagagaaaccttcactttggcatttttttttaatcactgtttatttttctgtttgcggcccaggaagcagtgggaggtggtggcagatatgctttgcatatggattgttatgtttttatttgggcaagtttaatcatggaaaactcaaaaagaaggggggaaatggtcagtttaagccaaaagaaactttctaaacaatgtataggtacacagcaaaattaaacaaatccaacaatttctgaagcttagtgtaattgagtggtggttgttattcaataaaattattcccaaaagtgtttctcctaagagtgcagttcccatgagtcacttcctgaacccattgaccaaaggtggacagagacaatcctgtagaccttgacattcagaaagatgtgagctgcttactgatcatatatgcatacgtttctttacagcagaggaaaccattgtccacaaaactgatgttcttttggggttttatgtacagacttgtccaatcatgtgtgtggttcctgcgagttgctgatgactccgcattgaagctctctgagttctttgattttaagttgggtttatggaattttttcaaatgttggaaggtgtgtggttcttcctgccctccctccccttttggaaatatgaaagcaaatgtttagaagaattccttttgaaaagctgtgtcgtgttccctgtgaaactgagcaggtgtgtgttggcgcgctaagtgccacatgcttgtgtgtagaggaggaggtggccctgccggctccgcgctgctgtgcctgtgatccctacctgctccccgctcctgttgccagcagcactcactgcactcctttgtcatatactctgcatcactgtcatactcacaacttcgtgaataaagttgtgtgctttattcgt

SEQ ID NO: 127430 - DNA, 1959 bp, Artificial Sequence
  derived and/or modified sequence
tgaagccacgccttcatcagccagtgggtgtgcagacactggagagaccccgtggcccacccccaggacccccaccaccccagcgagaagcccgtgatccactgccacaagtgcggcgagccctgcaagggcgaggtgctgagagtgcagaccaagcacttccacatcaagtgcttcacctgcaaggtgtgcggctgcgacctggcccagggcggcttcttcatcaagaacggcgagtacctgtgcaccctggactaccaccccaactgcttcgcctgcaccatctgcaagagacccttcccccccggcgacagagtgaccttcaacggcagagactgcctgtgccagctgtgcgcccagcccatgagcagcagccccaaggagaccaccttcagcagcaactgcgccggctgcggcagagacatcaagaacggccaggccctgctggccctggacaagcagtggcacctgggctgcttcaagtgcaagagctgcggcaaggtgctgaccggcgagtacatcagcaaggacggcgccccctactgcgagaaggactaccagggcctgttcggcgtgaagtgcgaggcctgccaccagttcatcaccggcaaggtgctggaggccggcgacaagcactaccaccccagctgcgccagatgcagcagatgcaaccagatgttcaccgagggcgaggagatgtacctgcagggcagcaccgtgtggcaccccgactgcaagcagagcaccaagaccgaggagaagctgagacccaccagaaccagcagcgagagcatctacagcagacccggcagcagcatccccggcagccccggccacaccatctacgccaaggtggacaacgagatcctggactacaaggacctggccgccatccccaaggtgaaggccatctacgacatcgagagacccgacctgatcacctacgagcccttctacaccagcggctacgacgacaagcaggagagacagagcctgggcgagagccccagaaccctgagccccacccccagcgccgagggctaccaggacgtgagagacagaatgatccacagaagcaccagccagggcagcatcaacagccccgtgtacagcagacacagctacacccccaccaccagcagaagcccccagcacttccacagacccgaccagggcatcaacatctacagaaagccccccatctacaagcagcacgccgccctggccgcccagagcaagagcagcgaggacatcatcaagttcagcaagttccccgccgcccaggcccccgaccccagcgagacccccaagatcgagaccgaccactggcccggcccccccagcttcgccgtggtgggccccgacatgaagagaagaagcagcggcagagaggaggacgacgaggagctgctgagaagaagacagctgcaggaggagcagctgatgaagctgaacagcggcctgggccagctgatcctgaaggaggagatggagaaggagagcagagagagaagcagcctgctggccagcagatacgacagccccatcaacagcgccagccacatccccagcagcaagaccgccagcctgcccggctacggcagaaacggcctgcacagacccgtgagcaccgacttcgcccagtacaacagctacggcgacgtgagcggcggcgtgagagactaccagaccctgcccgacggccacatgcccgccatgagaatggacagaggcgtgagcatgcccaacatgctggagcccaagatcttcccctacgagatgctgatggtgaccaacagaggcagaaacaagatcctgagagaggtggacagaaccagactggagagacacctggcccccgaggtgttcagagagatcttcggcatgagcatccaggagttcgacagactgcccctgtggagaagaaacgacatgaagaagaaggccaagctgttctag

SEQ ID NO: 127431 - DNA, 2337 bp, Artificial Sequence
  derived and/or modified sequence
atgcctgcctttctggggctgaaatgcctcggaaagctatgtagctcagaaaaatcaaaggtgacgtcgagcgagagaacgagcgccaggggcagcaatcggaaacgcttgatcgtcgaggaccgccgggtttccggtacatcattcaccgctcacagaagagcgactatcacacacctgctctacctctgtccaaaagattactgccctcgggggcgggtgtgcaacagcgtggacccatttgttgcacatccccaggacccccatcatccatctgaaaaaccagtgatacattgtcacaaatgcggggagccatgtaagggggaggtccttcgcgtgcagaccaagcactttcacattaaatgtttcacgtgcaaagtctgcggctgtgacctagcccaaggcggattttttataaagaatggcgaatatctgtgtacattggactatcagagaatgtatggaacacgctgccatggctgtggagagtttgttgaaggcgaggttgtgacagccctgggaaaaacctatcatcctaactgttttgcttgtaccatatgcaagaggcctttccctccgggggacagagtaacattcaacggccgcgattgtctgtgtcaactctgcgctcaacctatgtcttctagtccgaaggagaccactttctctagtaactgcgctggttgcggtcgtgatattaagaatgggcaggcacttctcgccctagataaacagtggcatttaggctgttttaaatgcaagtcttgtggcaaagtactcactggagaatatatttctaaggacggcgcaccgtattgcgaaaaggactaccaaggcttgttcggggtaaagtgcgaagcttgtcatcaattcataactgggaaggtgttagaggccggcgataaacactatcacccttcttgtgccagatgttctagatgcaatcagatgtttaccgagggcgaagagatgtaccttcagggatcaacagtatggcacccagattgcaagcagtcaaccaagactgaagaaaaattgcgccctactaggacaagctcagagtctatctacagtaggccgggcagctcgatccccggttcccctggccatactatatatgctaaggtggataacgaaattttggactacaaggacctcgctgccatcccaaaagtgaaggctatttacgatattgaaagaccagacctaatcacctacgagcccttttacacttcaggatacgacgataagcaggagcggcagtcgttgggggagtcaccccgcactttatcacccacaccctcagcagaaggctatcaagacgtgagagatcgcatgatccatagatctacatcgcaaggctccatcaacagtcccgtgtattcacgacacagctatactccaacaacatccagaagtccgcaacacttccatcgccctggcaacgagccatcttcagggcggaactcccccctgccttaccggccagactcgcgaccgctaacgccaacctacgcccaggcacccaaacatttccacgtgcccgaccaggggattaatatctaccggaagcctccgatctacaagcagcatgccgcactcgcagcacagtcaaagtcctccgaagatattatcaaattcagcaaatttcctgccgcccaggcccccgacccctcggagacaccaaaaatcgagacggaccattggcctgggccaccaagttttgccgtggtcggcccagacatgaaacgtaggtcaagcgggcgcgaggaagatgacgaggaactgcttcgtagaagacaactgcaggaagagcagctgatgaagctgaatagcggattggggcagctcattctcaaggaagaaatggagaaagaatctagggagagatccagccttctcgcctcacgctacgactctccaattaattcggcgtctcatatcccatcatccaaaacagcgagccttcccggttatggccgcaatggtcttcacagacccgtctccaccgacttcgctcagtacaatagttatggggacgtctctggaggcgtgcgagactaccagactctgccggacgggcacatgcctgcgatgcgcatggatagaggggtaagcatgccaaatatgttagaaccaaagatatttccctatgaaatgctcatggttactaatcgcgggaggaacaagattctccgcgaggtcgataggactcgactcgagcggcacctggcgccagaggtcttcagggagatttttggaatgtctatccaggaattcgataggcttccactctggcgacgcaatgacatgaagaaaaaagcaaaactcttttag

SEQ ID NO: 127432 - DNA, 1959 bp, Artificial Sequence
  derived and/or modified sequence
tagagccatgcgttcatcagccagtgggtctgccgccactggagagacccggtcgcacatccgcaggacccgcatcacccgtcagaaaagcccgtgatccattgtcacaaatgcggtgaaccttgcaagggtgaggtgcttcgagtgcagacaaagcacttccacatcaaatgcttcacctgcaaggtctgcgggtgtgacttagcgcagggcggcttcttcattaagaacggcgagtatctgtgtacattggactatcaccctaattgcttcgcttgcaccatctgcaagagaccgtttcctcccggggatagagtgacctttaacggccgcgactgcctctgccaactgtgtgcgcagcccatgtcttcctctccgaaggagactacattcagcagtaactgcgccggatgcggtcgggatataaagaatggacaggctcttttggctctggataagcagtggcaccttggttgtttcaaatgtaaatcttgcggtaaggtgcttacaggtgaatacatcagcaaagatggggctccatactgtgagaaagactaccagggtctgttcggagtgaagtgtgaggcctgtcatcagtttattactggaaaagtccttgaggcgggcgacaagcattatcacccgtcctgtgcgaggtgttctcgctgtaatcaaatgtttaccgagggcgaggagatgtacctccagggcagcacggtgtggcaccctgactgtaaacagtccaccaagacggaggagaaactcagaccgacgagaaccagcagcgaatcaatctactcacggcccggctcttcaatcccaggtagtcctgggcacactatttacgcgaaggtcgacaacgagatattagactataaggacctggccgccattcctaaggtgaaggcaatctatgacatcgaaagaccagatcttataacctacgagcctttctacacatcagggtacgacgataaacaggaacgacaaagtctgggcgagtctcctcgaaccctgtccccaaccccaagcgctgaagggtatcaagatgtgcgggatcggatgatacaccggtctacttctcaaggaagtatcaattcgcccgtgtactccaggcacagctacactcctacaacgtcacgctcccctcaacacttccacagacccgaccaggggattaacatctatcggaagcctcccatctataagcagcatgctgctctggctgcccagtccaagtcttccgaggacatcatcaagttctcaaaattcccagccgcacaagctccagatccttctgaaacccctaagatcgagactgatcactggcctggtccaccctcctttgccgtcgtggggcccgatatgaaaaggcggagctctggacgagaggaagacgatgaagagctactgcggcgcaggcagctccaagaggaacagctcatgaagctcaattcaggcttaggccagctgattctcaaagaagagatggagaaagaatctcgcgaacgctccagcctgttggcctccaggtatgatagccctatcaactctgcaagccacataccaagctccaagaccgccagcctgcctgggtatgggcggaacggcttacaccgaccggtgtccaccgacttcgctcaatataactcatacggcgacgtttccggtggggtccgcgactatcaaaccctgcccgatggccatatgcccgccatgcggatggacaggggagtcagcatgccaaacatgttggaaccaaaaatattcccctatgagatgcttatggtcaccaataggggaaggaacaagatactaagggaagtcgaccgaacccggttggaacgccacttggcccccgaggtctttagagagatttttggcatgtcgattcaggagtttgatagactgccgctgtggaggagaaatgatatgaaaaagaaagctaaactgttctag

SEQ ID NO: 127433 - DNA, 3983 bp, Artificial Sequence
  derived and/or modified sequence
gcttccactcccagagtttattcctcgttccttcttcagtcctgctcgtcggaggacccggttgccatggtgaaggaaaaagtggcccaccctcaggaccctcaccacccatcagagaagcctgtcattcactgccataaatgtggggagccttgcaagggtgaagtgcttcgggtccagaccaaacatttccacatcaagtgtttcacctgcaaagtgtgtggctgtgacctggcacaagggggcttcttcataaagaacggagagtatctctgcaccctggactaccagcggatgtacgggacacgctgccatggctgtggggagttcgtggagggcgaagtggtgactgctctgggcaagacctaccatcccaattgctttgcttgtactatctgcaagcgcccgtttccacccggagaccgagtcacattcaatgggagagactgcctttgtcaactctgtgcacagccgatgtcgtccagtccgaaagaaaccaccttctccagcaattgtgccggctgcggaagagatatcaagaatgggcaggcgctgctggcgctggataagcagtggcacttggggtgctttaaatgcaagtcctgcgggaaggtcctcaccggggagtacatcagcaaggatggtgctccgtactgtgaaaaggactaccagggactctttggggtgaaatgtgaggcgtgtcaccagtttatcacagggaaagtcctggaggcaggtgacaaacattaccaccccagctgtgcacgatgcagcagatgcaaccagatgttcacagaaggagaggaaatgtatcttcaaggctccaccgtttggcatcccgactgtaagcaatctacgaagaccgaggaaaagctgcggcctaccaggacatcctcggaaagtatttattctaggccaggctccagtattcctggctcaccaggtcatactatctatgcaaaagtagacaatgagatcctggattacaaggatttagcagccattccgaaggtcaaggcaatttatgacattgaacgtccagatcttattacctatgagcctttctacacttcgggctatgatgacaaacaggagagacagagccttggagagtctccgaggactttgtctcctactccatcagcagaagggtaccaggatgttcgggatcggatgatccatcggtccacgagccagggctccatcaactcccctgtgtacagccgccacagctacactccaaccacgtcccgctctccccagcatttccacagacctggcaatgagccgtccagcggccggaactcccctctcccttaccggccagacagccgccctctaactccaacttacgctcaggcccctaaacatttccatgttccagatcaaggaatcaacatttaccgaaagccacccatctacaaacagcatgctgccttggcagcccagagcaagtcctcagaagatatcatcaagttttccaagttcccagcagcccaggcaccagaccccagcgagacaccaaagattgagacggaccactggcctggtcccccctcatttgctgtcgtaggacctgacatgaaacgcagatctagtggcagagaggaagatgatgaggaacttctgagacgtcggcagcttcaagaagagcaattaatgaagcttaactcaggcctgggacagttgatcttgaaagaagagatggagaaagagagccgggaaaggtcatctctgttagccagtcgctacgattctcccatcaactcagcttcacatattccatcatctaaaactgcatctctccctggctatggaagaaatgggcttcaccggcctgtttctaccgacttcgctcagtataacagctatggggatgtcagcgggggagtgcgagattaccagacactcccagatggccacatgcctgcaatgagaatggaccgaggagtgtctatgcccaacatgttggaaccaaagatatttccatatgaaatgctcatggtgaccaacagagggcgaaacaaaatcctcagagaggtggacagaaccaggctggagcgccacttagcccctgaagtgtttcgggaaatctttggaatgtccatacaggagtttgacaggttacctctttggagacgcaacgacatgaagaaaaaagcaaaactcttctaagtcccactcgtgaatggcaattagagaaaggactgacagtggcggtgccccataggatgtcatattgaggcccaaacttgattggagaatttgcaaactaccgtcgctcagcaacaccaaaaagagaaagtctggttaaaacaccatgagtcaaatgtcgggccagccaacagtaacacttgccaagaagcatggcgtagaaatttctatgttccgaaacacagagtagtgtccacatgtgagcttttcacattaccttatgtatacaacaggagctgcgttgttttcttctttttcttttcctttatctgttgtccaacaacagtgctgactgtccggataagagctggcaagtgcccttaggatgccgcatgggaaaaatcggttatcataatttcaaagtataaatatatttattaagtagcgctgcggctaagaaggaagagtgaggggtctgtccatggggtggcagtgatttcacacccgcctttcttgaatggcttcgtgttactcagccgtgccctggcaggaatggaactccatcagggaacagggcagctctgtttgaatggggtgaaaaacagcaaaattaattcttagcaagctccttgttctctactgttcaccgggacctggctggcaaatgacttagctattagtatatttaaaaactgttcaaaagcaaaagagaaggaacaggaatgaaaggaaaccttcccttaactctttctgcttcccatagcaggtctggttcctgctccccgcctaggacaggagctgtctggagctccacctttgcaaagaaaggaaaaacacaaattgcccccagattggcccagtggcatgccattaggtgattttgcataggggccatatcattcatggccaaaaaaaaccaaaaagcaaaaaacaaaaacaagtcccatgtcctactgactctagttcttccagtcgttatcctctgctgtctctctggcatcctatgaatcagatcaagcccatgctgttgttggtttttaaggtttctttcaataataggctaaggaaagacatgtttttctcttttaaatctctgcaactccaaagtagactccttcgaacgtatttaatttggccttttcagctttcttcttgcccagctctgtcgaattcatgggtgtgtgtgcacatgttggtttcactcacccagagtaattttgtgagcatgcatgtgctttttaatttctgcttgaatgtttgtcctgctgtgttgcagcttctaaagacattgtcaccgagtgtgtgtgactcaaagatcaagagtgaggctaaactgcgaccccaacatcacttccttcatggaaaggtgttggcgctgatgtagctcatggaaggatcagactgggaaccacagaggaaggatgaggtgggatgtggaggtcagagcatctcacgagagtccctcaggctctgcaacactagattcgaatatgagcctagggtttccccaacacgtgcgtgcatatgaaaccacatcatgattcccgacgtgagttagatgagggagagtttgtgtaactccacacccaggagggtaagccactttattatcatgctttggggctgtgcttaagaatttaagctctgttttaaagccgaagaagaaaacatttgaatttaccttcatatgccactaagaacaaaagctctgaagttcttcctgctggcaccaaatattaggattacaagctgtctctctgacaccagtggtaaaaaagcaagtagaatagtttctgagtctgtgttgcagcctctgacacgtggctcac

SEQ ID NO: 127434 - DNA, 2337 bp, Artificial Sequence
  derived and/or modified sequence
atgcctgccttcctgggcctgaagtgcctgggcaagctgtgcagcagcgagaagagcaaggtgaccagcagcgagaggaccagcgcccggggcagcaacaggaagaggctcatcgtggaggaccggcgggtgtctggcaccagcttcaccgcccacagaagagccaccatcacccacctgctgtacctgtgccccaaggactactgcccccggggccgggtgtgcaacagcgtggacccctttgtggcccacccccaggacccccaccaccccagcgagaagcctgtgatccactgccacaagtgtggggagccctgcaagggggaggtgctgcgggtgcagaccaagcacttccacatcaagtgcttcacctgcaaggtgtgtggctgtgacctggcccagggcggcttcttcatcaagaatggagagtacctgtgcaccctggactaccagaggatgtatggcacccgctgccacggctgtggggagtttgtggagggggaggtggtgacagccctgggcaagacctaccaccccaactgctttgcctgcaccatctgcaagaggcccttccccccaggggacagagtgaccttcaacggccgggactgcctgtgccagctgtgtgcccagcccatgagcagcagccccaaggagaccaccttcagcagcaactgtgccggctgcggccgggacatcaagaatggccaggccctgctggccctggacaagcagtggcacctgggctgcttcaagtgcaagagctgtgggaaggtgctgactggagagtacatcagcaaggatggagccccctactgtgagaaggactaccagggcctgtttggagtgaagtgtgaggcctgccaccagttcatcaccgggaaggtgctggaggccggggacaagcactaccaccccagctgtgcccgctgcagccgctgcaaccagatgttcacagaaggagaggagatgtacctgcagggcagcacagtgtggcacccagactgcaagcagagcaccaagacagaggagaagctgcggcccaccaggaccagcagcgagagcatctacagccggcccggcagcagcatccctggcagccctggccacaccatctatgccaaggtggacaatgagatcctggactacaaggacctggccgccatccccaaggtgaaggccatctatgacatcgagaggccagacctgatcacctatgagcccttctacaccagcggctatgatgacaagcaggagcggcagagcctgggggagagccccaggaccctgagccccaccccatctgctgagggctaccaggatgtgcgggacaggatgatccacaggagcaccagccagggcagcatcaacagccctgtgtacagccgccacagctacacccccaccaccagccgcagcccccagcacttccacaggcctggaaatgagcccagcagcggcaggaacagccccctgccctacagaccagacagccggcccctgacccccacctacgcccaggcccccaagcacttccacgtgcctgaccagggcatcaacatctacaggaagccacccatctacaagcagcacgccgccctggccgcccagagcaagagcagcgaggacatcatcaagttcagcaagtttcctgctgcccaggccccagaccccagcgagacccccaagattgaaacagaccactggccaggcccccccagctttgctgtggtgggccctgacatgaagaggaggagcagcggccgggaggaggatgatgaggagctgctgcggcggcggcagctgcaggaggagcagctgatgaagctgaacagcggcctgggccagctgatcctgaaggaggagatggagaaggagagccgggagaggagcagcctgctggccagccgctatgacagccccatcaacagcgccagccacatccccagcagcaagacagccagcctgcccggctatggaagaaatggcctgcacaggcctgtgtccacagactttgcccagtacaacagctatggagatgtgtctgggggcgtgcgggactaccagaccctgcctgatggccacatgcctgccatgaggatggaccggggcgtgtccatgcccaacatgctggagcccaagatcttcccctatgagatgctgatggtgaccaacagaggaagaaacaagatcctgcgggaggtggacaggacccggctggagcggcacctggcccctgaggtgttccgggagatcttcggcatgagcatccaggagtttgaccggctgcccctgtggaggagaaatgacatgaagaagaaggccaagctgttctag

SEQ ID NO: 127435 - DNA, 1959 bp, Artificial Sequence
  derived and/or modified sequence
tgaagccacgccttcatcagccagtgggtgtgccgccactggagggaccctgtggcccacccccaggacccccaccaccccagcgagaagcctgtgatccactgccacaagtgtggggagccctgcaagggggaggtgctgcgggtgcagaccaagcacttccacatcaagtgcttcacctgcaaggtgtgtggctgtgacctggcccagggcggcttcttcatcaagaatggagagtacctgtgcaccctggactaccaccccaactgctttgcctgcaccatctgcaagaggcccttccccccaggggacagagtgaccttcaacggccgggactgcctgtgccagctgtgtgcccagcccatgagcagcagccccaaggagaccaccttcagcagcaactgtgccggctgcggccgggacatcaagaatggccaggccctgctggccctggacaagcagtggcacctgggctgcttcaagtgcaagagctgtgggaaggtgctgaccggggagtacatcagcaaggatggagccccctactgtgagaaggactaccagggcctgtttggagtgaagtgtgaggcctgccaccagttcatcaccgggaaggtgctggaggccggggacaagcactaccaccccagctgtgcccgctgcagccgctgcaaccagatgttcacagaaggagaggagatgtacctgcagggcagcacagtgtggcacccagactgcaagcagagcaccaagacagaggagaagctgcggcccaccaggaccagcagcgagagcatctacagcaggcctggcagcagcatccctggcagccctggccacaccatctatgccaaggtggacaatgagatcctggactacaaggacctggccgccatccccaaggtgaaggccatctatgacatcgagaggccagacctgatcacctatgagcccttctacaccagcggctatgatgacaagcaggagcggcagagcctgggggagagccccaggaccctgagccccacccccagcgctgagggctaccaggatgtgcgggacaggatgatccacaggagcaccagccagggcagcatcaacagccctgtgtacagccgccacagctacacccccaccaccagccgcagcccccagcacttccacaggccagaccagggcatcaacatctacaggaagccacccatctacaagcagcacgccgccctggccgcccagagcaagagcagcgaggacatcatcaagttcagcaagtttcctgctgcccaggccccagaccccagcgagacccccaagattgaaacagaccactggccaggcccccccagctttgctgtggtgggccctgacatgaagaggaggagcagcggccgggaggaggatgatgaggagctgctgcggcggcggcagctgcaggaggagcagctgatgaagctgaacagcggcctgggccagctgatcctgaaggaggagatggagaaggagagccgggagaggagcagcctgctggccagccgctatgacagccccatcaacagcgccagccacatccccagcagcaagacagccagcctgcccggctatggaagaaatggcctgcacaggcctgtgtccacagactttgcccagtacaacagctatggagatgtgtctgggggcgtgcgggactaccagaccctgcctgatggccacatgcctgccatgaggatggaccggggcgtgtccatgcccaacatgctggagcccaagatcttcccctatgagatgctgatggtgaccaacagaggaagaaacaagatcctgcgggaggtggacaggacccggctggagcggcacctggcccctgaggtgttccgggagatcttcggcatgagcatccaggagtttgaccggctgcccctgtggaggagaaatgacatgaagaagaaggccaagctgttctag

SEQ ID NO: 127436 - DNA, 7105 bp, Artificial Sequence
  derived and/or modified sequence
ggtctcatgctttcatctcccagtgggtgtgcagacactggagagacccagtggcccaccctcaggaccctcaccacccatcagagaagcctgtcattcactgccataaatgtggggagccttgcaagggtgaagtgcttcgggtccagaccaaacatttccacatcaagtgtttcacctgcaaagtgtgtggctgtgacctggcacaagggggcttcttcataaagaacggagagtatctctgcaccctggactaccatcccaattgctttgcttgtactatctgcaagcgcccgtttccacccggagaccgagtcacattcaatgggagagactgcctttgtcaactctgtgcacagccgatgtcgtccagtccgaaagaaaccaccttctccagcaattgtgccggctgcggaagagatatcaagaatgggcaggcgctgctggcgctggataagcagtggcacttggggtgctttaaatgcaagtcctgcgggaaggtcctcaccggggagtacatcagcaaggatggtgctccgtactgtgaaaaggactaccagggactctttggggtgaaatgtgaggcgtgtcaccagtttatcacagggaaagtcctggaggcaggtgacaaacattaccaccccagctgtgcacgatgcagcagatgcaaccagatgttcacagaaggagaggaaatgtatcttcaaggctccaccgtttggcatcccgactgtaagcaatctacgaagaccgaggaaaagctgcggcctaccaggacatcctcggaaagtatttattctaggccaggctccagtattcctggctcaccaggtcatactatctatgcaaaagtagacaatgagatcctggattacaaggatttagcagccattccgaaggtcaaggcaatttatgacattgaacgtccagatcttattacctatgagcctttctacacttcgggctatgatgacaaacaggagagacagagccttggagagtctccgaggactttgtctcctactccatcagcagaagggtaccaggatgttcgggatcggatgatccatcggtccacgagccagggctccatcaactcccctgtgtacagccgccacagctacactccaaccacgtcccgctctccccagcatttccacagacctgatcaaggaatcaacatttaccgaaagccacccatctacaaacagcatgctgccttggcagcccagagcaagtcctcagaagatatcatcaagttttccaagttcccagcagcccaggcaccagaccccagcgagacaccaaagattgagacggaccactggcctggtcccccctcatttgctgtcgtaggacctgacatgaaacgcagatctagtggcagagaggaagatgatgaggaacttctgagacgtcggcagcttcaagaagagcaattaatgaagcttaactcaggcctgggacagttgatcttgaaagaagagatggagaaagagagccgggaaaggtcatctctgttagccagtcgctacgattctcccatcaactcagcttcacatattccatcatctaaaactgcatctctccctggctatggaagaaatgggcttcaccggcctgtttctaccgacttcgctcagtataacagctatggggatgtcagcgggggagtgcgagattaccagacactcccagatggccacatgcctgcaatgagaatggaccgaggagtgtctatgcccaacatgttggaaccaaagatatttccatatgaaatgctcatggtgaccaacagagggcgaaacaaaatcctcagagaggtggacagaaccaggctggagcgccacttagcccctgaagtgtttcgggaaatctttggaatgtccatacaggagtttgacaggttacctctttggagacgcaacgacatgaagaaaaaagcaaaactcttctaagtcccactcgtgaatggcaattagagaaaggactgacagtggcggtgccccataggatgtcatattgaggcccaaacttgattggagaatttgcaaactaccgtcgctcagcaacaccaaaaagagaaagtctggttaaaacaccatgagtcaaatgtcgggccagccaacagtaacacttgccaagaagcatggcgtagaaatttctatgttccgaaacacagagtagtgtccacatgtgagcttttcacattaccttatgtatacaacaggagctgcgttgttttcttctttttcttttcctttatctgttgtccaacaacagtgctgactgtccggataagagctggcaagtgcccttaggatgccgcatgggaaaaatcggttatcataatttcaaagtataaatatatttattaagtagcgctgcggctaagaaggaagagtgaggggtctgtccatggggtggcagtgatttcacacccgcctttcttgaatggcttcgtgttactcagccgtgccctggcaggaatggaactccatcagggaacagggcagctctgtttgaatggggtgaaaaacagcaaaattaattcttagcaagctccttgttctctactgttcaccgggacctggctggcaaatgacttagctattagtatatttaaaaactgttcaaaagcaaaagagaaggaacaggaatgaaaggaaaccttcccttaactctttctgcttcccatagcaggtctggttcctgctccccgcctaggacaggagctgtctggagctccacctttgcaaagaaaggaaaaacacaaattgcccccagattggcccagtggcatgccattaggtgattttgcataggggccatatcattcatggccaaaaaaaaccaaaaagcaaaaaacaaaaacaagtcccatgtcctactgactctagttcttccagtcgttatcctctgctgtctctctggcatcctatgaatcagatcaagcccatgctgttgttggtttttaaggtttctttcaataataggctaaggaaagacatgtttttctcttttaaatctctgcaactccaaagtagactccttcgaacgtatttaatttggccttttcagctttcttcttgcccagctctgtcgaattcatgggtgtgtgtgcacatgttggtttcactcacccagagtaattttgtgagcatgcatgtgctttttaatttctgcttgaatgtttgtcctgctgtgttgcagcttctaaagacattgtcaccgagtgtgtgtgactcaaagatcaagagtgaggctaaactgcgaccccaacatcacttccttcatggaaaggtgttggcgctgatgtagctcatggaaggatcagactgggaaccacagaggaaggatgaggtgggatgtggaggtcagagcatctcacgagagtccctcaggctctgcaacactagattcgaatatgagcctagggtttccccaacacgtgcgtgcatatgaaaccacatcatgattcccgacgtgagttagatgagggagagtttgtgtaactccacacccaggagggtaagccactttattatcatgctttggggctgtgcttaagaatttaagctctgttttaaagccgaagaagaaaacatttgaatttaccttcatatgccactaagaacaaaagctctgaagttcttcctgctggcaccaaatattaggattacaagctgtctctctgacaccagtggtaaaaaagcaagtagaatagtttctgagtctgtgttgcagcctctgacacgtggctcaccgctgtcatttgggggatggaatgaacagtcactgttctatagcatcctcctgtgctcttacctaaggaatctaaattgtcctagccttccattgctatgcactgaatgaggactactctcgtgtgtgtgtgtgtgtgtgtgtgtgtgtgtgtgtgtgtgtgtgtgtgtgttggatctactaacatgtttagcaaatggctctgacagggtggccatgagcagatgagaccagctcttgcttggttggaagccacactgcagtttgcagtttagcctttggtgtctcagtggcttcttgcttattccatgctttttctatcccatcctctctctgtgccctcctgcaatggcagccttggcacaatgcctgggtgtcctcatccttgctttactctggaaagtgtggggatggagaggatggtgcatttccagtgcttccttacctgtcaataacaatggtggccacctgggtcccagcacttggctggtggagagatttttttcattatggagctaataaagggtccctacgttttacattgattaatgaattatcacccagacatgtgcagatgaaatgtcaatataagaaaaatcaaggtatttgggaaacatgggcataatcaggtagttttgctaaaattcctcttccttggtctacataaagaagacatgggtctgtcatagaatggggacattagactgaaaactgggacaacccccttccttattttatagagactaggagttaaggggcctgcctaagattgcagtgataaagaactgaaccctaaatcagctcccactaatgaaaccctgctttccttgtatcttttaaactcagttctgcatccaacttgagaagaaaaaaagcttctttccatatcaagtaccatatgagttcatttaaactgcaccttgcagaaatgcattgccagaaagcaccagtagcctcctatctgcaagcagagtagtgctctgctctggggaggggtcattggaaaccataatgcagagtgggccccctactccatttcccagcaaaaggctccagctggagggatgggttgtggggcaacctggttcctgctaactgccagattgaatgtgtgggctagaatgcctgcacatttagttaaactgggctcagcatgcttgtcctcaaaatgtccatcctggtcacagcacacaagatggctattggtctgcttttaccctaccctgtactatacatgaaaattccagttattaacacactcaaactggtggagcttgttcaccctaggaaggggattgtatatatggcaggcttccctggtgccgatgtaaagggctacatttgggaacatttgacttccttgggactcttaagtgcataatgatggcatgaagtaaaaggggcctcaatgatgataggaaaatcagttcttttaaaatttcttcaagaaaatccaggctatcacatagtctttctgtgtgacttattaggagataggaagagcattgggaaacttgcacagctagctatgcatctacattttggtttggggttagttatgaaatgttcttaatatgacgtgttcaataacttcacataaacttcctgttctccaaaacctcaaagagatagagttaatgagttgttgtttttttttaaatgggggtagttttctatctgtcatgggctctagcatctactccgctacccaattctgtcatctccaagctgagtttcctcttctgaggcagaggctggagcagttctttttcagttctcatcctctccatcccaatccagtatatcaatcaactctaactcggagacgtctagctggcaatgtttctaaaactttcactggatttctttagacattgaagcaaacatttttttctaagaattgcttctcagatgatgatatcaaatgtatatgcttttgcaagtttgaaaagttcaaattaaccacttttgactaggtaagtctttctaaaaaccatttaaagctaactgggtcttagcatcctcctgtgtatggaagagacaggtgaccgctccaggttgggtgctcacagaacccttttcctgactctcatggaagatggtggaaggaaaatagactgtctcatcaaccctcctgtgtcctctgaagcaatctcagtttttattaaccacctcttctgtgtttctggtagctatttaacctgtatttaatctgtacttcctatgccagcctcaattttatttgatttttacaattattctcttctaaccaatgaagtgtttgtcagtatgccccaaagcttgctcttttgtgctcccttttgaataactttctatccagaaaaagagattatttgggacttgagatttgcagtgataccaacttatagcaatgatgtactttaagggaactacccaactatgttgtgatagaagaaagagaaaccttcactttggcatttttttttaatcactgtttatttttctgtttgcggcccaggaagcagtgggaggtggtggcagatatgctttgcatatggattgttatgtttttatttgggcaagtttaatcatggaaaactcaaaaagaaggggggaaatggtcagtttaagccaaaagaaactttctaaacaatgtataggtacacagcaaaattaaacaaatccaacaatttctgaagcttagtgtaattgagtggtggttgttattcaataaaattattcccaaaagtgtttctcctaagagtgcagttcccatgagtcacttcctgaacccattgaccaaaggtggacagagacaatcctgtagaccttgacattcagaaagatgtgagctgcttactgatcatatatgcatacgtttctttacagcagaggaaaccattgtccacaaaactgatgttcttttggggttttatgtacagacttgtccaatcatgtgtgtggttcctgcgagttgctgatgactccgcattgaagctctctgagttctttgattttaagttgggtttatggaattttttcaaatgttggaaggtgtgtggttcttcctgccctccctccccttttggaaatatgaaagcaaatgtttagaagaattccttttgaaaagctgtgtcgtgttccctgtgaaactgagcaggtgtgtgttggcgcgctaagtgccacatgcttgtgtgtagaggaggaggtggccctgccggctccgcgctgctgtgcctgtgatccctacctgctccccgctcctgttgccagcagcactcactgcactcctttgtcatatactctgcatcactgtcatactcacaacttcgtgaataaagttgtgtgctttattcgt

SEQ ID NO: 127437 - DNA, 2337 bp, Artificial Sequence
  derived and/or modified sequence
atgcccgccttcctgggcctgaagtgcctgggcaagctgtgcagcagtgaaaagtccaaagtgacttcttcagaacgcaccagtgctcgcgggagtaaccggaaacgcctgatcgtcgaagaccggcgcgtgagtggcaccagttttacggcccatagacgtgcgacgattactcacctgttatacctgtgtccgaaagactactgtccaagaggacgggtatgtaatagtgtggatccattcgttgcacacccgcaggacccccaccacccctccgaaaagcccgtcattcactgccataaatgtggcgaaccttgcaaaggcgaggtcctcagggtacaaacaaagcactttcatatcaaatgcttcacgtgtaaggtgtgcggctgcgatctggcccagggtggcttttttatcaagaacggcgagtatctgtgcactctcgattatcagcggatgtatggcacccgatgtcatggttgtggcgaattcgttgagggggaagtggtaaccgcgctaggcaaaacttatcatcctaattgttttgcctgcacaatttgtaagagaccattcccacccggcgacagagtcaccttcaatggcagagattgcctctgtcagctgtgcgcccagcccatgagctctagcccgaaggaaacaacttttagctccaactgcgccgggtgcggccgggatatcaaaaacggacaggcactcctggctctcgataagcagtggcacctgggctgctttaaatgcaagagctgcgggaaggttttgacgggggaatatatctcaaaggacggggccccgtattgcgagaaggactaccaagggctgttcggagtcaagtgtgaggcctgtcaccagttcataacgggaaaggtgctagaagctggcgataagcactatcacccttcttgtgccaggtgcagtcgctgcaatcaaatgtttacagaaggggaggagatgtatctgcaggggagcactgtttggcatccagactgcaagcagtcgaccaagacggaagaaaagctgaggcccacccggacgagcagtgaatctatctattcgcgccccggaagttccatccctggctctccagggcacaccatctatgccaaggtcgataacgaaattcttgactacaaagaccttgcagccattccaaaagtcaaggcgatctacgatatcgaacggccggatttgatcacctacgagcctttttacactagcggctacgacgataagcaggaacgccagtccctcggagagtcgcctagaacactctcacccacgccttctgctgagggatatcaggatgtcagagaccgaatgatccaccgttccacaagtcagggcagtattaactctcctgtctacagtcggcattcctacacgccaacaacatccaggagcccccagcattttcacagacccggcaatgaaccctcgagtggacgcaacagcccactgccctaccggcccgactcacgtcctttgactcctacctacgctcaggcccccaagcatttccatgtgcccgatcagggaatcaacatctatagaaagccccctatctataaacagcacgctgcgctggctgcacagagcaagtctagcgaagatatcattaaattctctaagtttccagctgcccaggccccagatccctcagagactcccaagatcgaaactgaccactggccagggccaccctcctttgccgtggtcggacccgacatgaagcgccggagttcaggaagagaggaggatgatgaggaattgcttcggcggcgtcagctgcaggaagaacagttgatgaagctcaattcagggttgggtcagctaatcctgaaggaagagatggagaaggaaagtagagagcggtcatcacttctggcctcaagatatgactcgcctattaactctgcatctcatatcccaagctcaaaaactgcttccctgcccggttatggaagaaacggcctgcatcgcccagtgagcacagactttgcgcaatataactcgtacggggacgtgtccggcggtgtgcgcgactatcagacactaccggatgggcatatgccagccatgaggatggaccgcggagtatcaatgcctaatatgctggaacctaaaatttttccatatgagatgctaatggtgactaataggggacggaacaaaatcctgcgagaggtcgatagaactaggctggaaagacacctcgcccctgaggtgttccgagaaatctttggaatgagcatccaagaatttgataggctaccactgtggcggagaaatgacatgaaaaaaaaggccaagctgttttag

SEQ ID NO: 127438 - DNA, 1959 bp, Artificial Sequence
  derived and/or modified sequence
tgaagccacgccttcatcagccagtgggtgtgccggcactggcgggatcctgtggcccatccacaggatccccatcacccttcagagaagcccgtgatccattgccacaagtgcggagaaccatgtaaaggcgaggtcctgagggtgcagaccaaacattttcacatcaagtgctttacctgtaaggtttgcggctgcgatctcgcccagggtggatttttcattaaaaatggcgaatacttgtgcactttggattatcatcccaactgtttcgcctgtacaatctgcaagaggccctttccaccaggagatcgagtgactttcaatggacgcgactgtctgtgccagctttgcgcacagcccatgagctctagcccaaaagagacaacctttagtagtaactgcgctggatgcgggagggatattaagaatggacaggctctgctcgctttagacaaacagtggcatctcggctgtttcaagtgcaagagttgtggcaaagtactgacaggcgaatatatcagtaaagatggggccccatattgtgaaaaagactaccagggcctgttcggcgtaaagtgtgaggcctgccatcagttcatcacggggaaggtgctggaggcaggggacaagcactaccacccatcttgcgctcgatgttctagatgtaatcagatgtttacagaaggcgaggaaatgtatctgcaaggctccaccgtgtggcaccccgattgcaagcagtcaaccaagacagaagagaaactgcgccctacccgcacaagcagcgagagcatatatagcaggccgggcagctcgatacctggctccccaggacacaccatctacgctaaagtagacaacgaaatcttagattacaaagacctagcagctattcccaaggtcaaggcgatctacgatatcgagagaccagacctgataacatatgaaccattttacacttctggttacgacgataagcaggagagacaaagcttaggcgagagtccacggactctgtcccctaccccaagtgctgaaggctaccaagatgtgagagaccggatgatccacaggtccaccagtcaggggtcaatcaatagcccagtgtactcccgccatagctatacccccaccacctctcggtcaccccaacattttcaccgaccagatcaaggtattaacatctatcgtaaaccccccatctataaacagcacgccgccctcgcggcacagagtaagtcttccgaggacattatcaaatttagtaaattccccgcggcacaagcccctgaccccagcgaaactcccaaaattgaaactgatcactggcctggccctccttctttcgccgtagtcggcccagacatgaagcgcaggagcagtggccgggaggaggacgacgaggaactgttaaggcggagacaactgcaggaggagcagctgatgaaactgaactctggactgggacagctgatccttaaagaagagatggagaaggaatcaagagagcgctcatctctcttggcgagccggtacgactcccccatcaattccgcttcacacatcccctctagcaagactgcctcactgccgggctatggccggaacggccttcataggcccgtctcaaccgattttgcccagtataattcctatggcgacgtgtcagggggggtgagggactaccagactttaccagacggtcatatgcccgccatgagaatggaccgtggtgttagcatgcctaacatgctggaacctaagattttcccctatgagatgttaatggtcaccaacagagggaggaacaaaattttaagagaagtggaccgcacccgcctggaaagacacttagcccccgaggtgttcagggaaatctttgggatgagcattcaggaattcgataggctgcccctgtggcggcgcaatgacatgaagaagaaggctaaattgttttag

SEQ ID NO: 127439 - DNA, 2337 bp, Artificial Sequence
  derived and/or modified sequence
atgccggctttcctgggactcaagtgtttgggaaagttatgcagtagcgagaaaagtaaggtgacctcgagcgagaggacctccgcgagaggcagcaaccggaaacggctgattgtagaggaccgcagggtttccgggacaagctttaccgcacataggagggccactattacacacctgctgtatctatgtcctaaggattactgcccaaggggcagagtttgcaatagcgtggatcccttcgttgcccatccccaggaccctcaccatccaagcgagaaaccagttattcattgtcataagtgcggagagccctgcaagggggaagtcctaagagtgcagacaaagcactttcacatcaagtgtttcacctgtaaagtgtgcggatgcgacctggcccagggaggcttttttattaaaaacggcgaatatctatgtacattggactaccagcgcatgtacggaactcgatgtcacggctgtggagaattcgtggagggcgaagtagtgacggctctgggaaagacctaccaccccaattgttttgcctgtacgatctgcaaacgcccattccctcctggagaccgcgttacctttaatggtcgcgactgcctttgccagctgtgcgctcagcctatgtcctcttcacccaaagaaaccacattcagctcaaattgtgccggatgcggcagggacattaagaatggccaagccctgctcgctctagacaagcaatggcaccttgggtgctttaagtgtaaatcatgtgggaaagtcctgaccggtgagtatatcagcaaagatggtgcaccctattgcgaaaaagattaccaggggctgttcggagtgaagtgcgaggcttgccaccaattcattaccggaaaagtgctcgaggctggcgacaagcactatcatccttcctgtgctaggtgctccagatgtaatcagatgtttacagagggggaagaaatgtacctgcaagggtccaccgtgtggcacccagactgcaaacagtctaccaaaactgaggagaagctcagacctactagaacaagttccgagtcgatttacagccgcccaggatcatcgatccctggtagtcccggacatactatctacgcaaaagtagataatgagatcctagactacaaggacctggctgcaattcctaaggttaaagccatatacgatattgagagaccagacctcatcacctatgaaccattctacacaagcggatatgacgataagcaggagcgccagtcactgggtgagtcaccaagaacattgtcaccaacgccatccgccgaaggctaccaagacgtacgggacaggatgatccacaggtctacaagccagggttcgattaattccccggtgtatagccgccattcctacactccgacgactagtcgttccccgcagcacttccaccgccctggtaatgaaccctcctccgggaggaacagcccacttccctataggcccgatagtcgccctttgacaccaacttatgcacaagccccaaagcacttccacgtccccgatcaaggcatcaatatttatagaaaaccacctatatataagcagcatgccgctttggccgcacagtctaaaagctccgaggacataatcaagttctccaagtttccagccgctcaggcaccagatccgtcagagactcctaagattgaaaccgaccactggccgggtccaccatcttttgctgtagtgggcccagacatgaagcggcgttcttccgggagggaagaggacgacgaggagctgctcagacggaggcaactgcaagaagagcagctgatgaaactgaactccggtttgggtcagttaattcttaaagaagagatggagaaggagagtcgcgagagatcatcgctgctggcttccagatatgattctccaattaacagcgccagccatataccatcatctaagactgccagtctccctggctatggcagaaatgggctgcatcggccagtcagcactgatttcgcgcagtacaatagttatggcgacgtgagtgggggagttagggactaccagaccctccccgatgggcatatgcctgctatgcgaatggacaggggagttagcatgccgaacatgctagaacctaaaatctttccctacgaaatgttaatggtaaccaatcgcggaaggaataagatcctgagagaggtggatcggacgagactcgaaaggcacttggcacccgaggtcttcagggagattttcggcatgtccatccaggagttcgaccgactccccctgtggcgcagaaatgatatgaagaaaaaggccaaactgttttag

SEQ ID NO: 127440 - DNA, 1959 bp, Artificial Sequence
  derived and/or modified sequence
tagtctcatgccttcattagtcagtgggtgtgcagacattggcgggaccccgtcgcacatccccaggatcctcaccacccgtccgaaaaaccagtgattcactgccataaatgcggggagccctgtaaaggagaggttctccgggtgcaaacaaagcactttcatattaaatgcttcacttgcaaggtctgcggctgcgatctggcccaaggcggtttctttatcaagaacggcgagtacctttgcacgttagattaccaccctaactgcttcgcctgtaccatatgtaaacgaccattccctccgggagatagagtcacctttaacggacgcgattgcctttgtcaattatgcgcacagccaatgagcagttctcccaaagagaccaccttttcgagtaactgcgcgggttgtggacgggatataaaaaatggccaagccttgctagcacttgacaagcagtggcacttggggtgctttaaatgcaagtcttgcggaaaggtcctaacaggggaatatatcagcaaagacggggctccatactgtgagaaagattaccagggacttttcggggtcaagtgcgaggcctgccaccaatttattaccggcaaagtgctggaggccggagacaagcactaccatccaagttgcgcccgttgtagtagatgcaatcagatgttcacagaaggggaggagatgtacctgcagggtagcacggtgtggcacccagattgcaagcaaagtaccaagactgaggagaagcttcgaccgaccaggactagtagtgaatccatctactctagacccggttcgtctatccctggaagcccgggacacacaatttacgctaaggtggataatgaaatcttagactacaaagatctggccgcaatcccaaaagtgaaagcaatatacgacatagagcggcctgacctgatcacatacgaacccttttacacatctggctacgacgataagcaggaaagacagagcctgggagaaagcccccgaacactttcaccaaccccaagtgctgaagggtatcaggatgtcagggacagaatgatccaccggtcaaccagtcagggatccataaatagcccagtctatagccggcacagctatactccaacaaccagcagaagcccccagcacttccaccgtccggatcagggtataaacatctaccggaaaccccctatctataaacaacacgcagccctggccgctcagagtaagagtagcgaggatatcattaagtttagcaagttccccgcagcgcaggccccagaccctagcgaaactcctaagattgagaccgatcactggccgggtcccccttccttcgctgtggtgggtcccgacatgaagagacggtcgagcggacgggaggaggacgatgaggagctcctgcggagacggcagctgcaagaggagcagctcatgaagttgaatagcggtttggggcaactgatcctgaaggaggaaatggaaaaggagagcagggaaaggtccagccttctcgcctcgcgttatgattctcccattaactcggcttcacatatccctagcagtaaaacagctagcctccctggatatggcagaaacggattacaccgaccagtgtctaccgacttcgcgcagtataattcatatggcgacgtgagcggtggggttagagattaccagacactgcccgacgggcatatgcccgctatgagaatggatagaggggtgtctatgccaaatatgcttgagcccaagatttttccatatgaaatgctaatggttactaacagggggagaaacaagatcctgagggaagttgatcgtacccggctggagagacacctggctcccgaggtttttagggagattttcggaatgagcattcaagaattcgacagactgcccctatggagaagaaatgacatgaagaagaaggctaagctcttctag

SEQ ID NO: 127441 - protein, 647 aa, Artificial Sequence
  derived and/or modified sequence
MRLTLLCCTWREERMGEEGSELPVCASCGQRIYDGQYLQALNADWHADCFRCCDCSASLSHQYYEKDGQLFCKKDYWARYGESCHGCSEQITKGLVMVAGELKYHPECFICLTCGTFIGDGDTYTLVEHSKLYCGHCYYQTVVTPVIEQILPDSPGSHLPHTVTLVSIPASSHGKRGLSVSIDPPHGPPGCGTEHSHTVRVQGVDPGCMSPDVKNSIHVGDRILEINGTPIRNVPLDEIDLLIQETSRLLQLTLEHDPHDTLGHGLGPETSPLSSPAYTPSGEAGSSARQKPVLRSCSIDRSPGAGSLGSPASQRKDLGRSESLRVVCRPHRIFRPSDLIHGEVLGKGCFGQAIKVTHRETGEVMVMKELIRFDEETQRTFLKEVKVMRCLEHPNVLKFIGVLYKDKRLNFITEYIKGGTLRGIIKSMDSQYPWSQRVSFAKDIASGMAYLHSMNIIHRDLNSHNCLVRENKNVVVADFGLARLMVDEKTQPEGLRSLKKPDRKKRYTVVGNPYWMAPEMINGRSYDEKVDVFSFGIVLCEIIGRVNADPDYLPRTMDFGLNVRGFLDRYCPPNCPPSFFPITVRCCDLDPEKRPSFVKLEHWLETLRMHLAGHLPLGPQLEQLDRGFWETYRRGESGLPAHPEVPD

SEQ ID NO: 127442 - DNA, 1944 bp, Artificial Sequence
  derived and/or modified sequence
atgagactgaccctgctgtgctgcacctggagagaggagagaatgggcgaggagggcagcgagctgcccgtgtgcgccagctgcggccagagaatctacgacggccagtacctgcaggccctgaacgccgactggcacgccgactgcttcagatgctgcgactgcagcgccagcctgagccaccagtactacgagaaggacggccagctgttctgcaagaaggactactgggccagatacggcgagagctgccacggctgcagcgagcagatcaccaagggcctggtgatggtggccggcgagctgaagtaccaccccgagtgcttcatctgcctgacctgcggcaccttcatcggcgacggcgacacctacaccctggtggagcacagcaagctgtactgcggccactgctactaccagaccgtggtgacccccgtgatcgagcagatcctgcccgacagccccggcagccacctgccccacaccgtgaccctggtgagcatccccgccagcagccacggcaagagaggcctgagcgtgagcatcgaccccccccacggcccccccggctgcggcaccgagcacagccacaccgtgagagtgcagggcgtggaccccggctgcatgagccccgacgtgaagaacagcatccacgtgggcgacagaatcctggagatcaacggcacccccatcagaaacgtgcccctggacgagatcgacctgctgatccaggagaccagcagactgctgcagctgaccctggagcacgacccccacgacaccctgggccacggcctgggccccgagaccagccccctgagcagccccgcctacacccccagcggcgaggccggcagcagcgccagacagaagcccgtgctgagaagctgcagcatcgacagaagccccggcgccggcagcctgggcagccccgccagccagagaaaggacctgggcagaagcgagagcctgagagtggtgtgcagaccccacagaatcttcagacccagcgacctgatccacggcgaggtgctgggcaagggctgcttcggccaggccatcaaggtgacccacagagagaccggcgaggtgatggtgatgaaggagctgatcagattcgacgaggagacccagagaaccttcctgaaggaggtgaaggtgatgagatgcctggagcaccccaacgtgctgaagttcatcggcgtgctgtacaaggacaagagactgaacttcatcaccgagtacatcaagggcggcaccctgagaggcatcatcaagagcatggacagccagtacccctggagccagagagtgagcttcgccaaggacatcgccagcggcatggcctacctgcacagcatgaacatcatccacagagacctgaacagccacaactgcctggtgagagagaacaagaacgtggtggtggccgacttcggcctggccagactgatggtggacgagaagacccagcccgagggcctgagaagcctgaagaagcccgacagaaagaagagatacaccgtggtgggcaacccctactggatggcccccgagatgatcaacggcagaagctacgacgagaaggtggacgtgttcagcttcggcatcgtgctgtgcgagatcatcggcagagtgaacgccgaccccgactacctgcccagaaccatggacttcggcctgaacgtgagaggcttcctggacagatactgcccccccaactgcccccccagcttcttccccatcaccgtgagatgctgcgacctggaccccgagaagagacccagcttcgtgaagctggagcactggctggagaccctgagaatgcacctggccggccacctgcccctgggcccccagctggagcagctggacagaggcttctgggagacctacagaagaggcgagagcggcctgcccgcccaccccgaggtgcccgactag

SEQ ID NO: 127443 - DNA, 1944 bp, Artificial Sequence
  derived and/or modified sequence
atgagactgacattactatgctgcacttggcgcgaagagcgtatgggcgaagagggatccgagctccccgtatgcgcttcctgcggtcagcggatttatgatggccagtacctgcaggcattaaatgcagattggcacgcagattgtttccgctgctgtgactgcagcgcatctctttctcatcaatattatgagaaggatggtcagctgttctgtaaaaaggactattgggcacgatacggcgagtcctgccacgggtgctccgaacagataacaaagggccttgtcatggtcgcaggagaactgaaatatcatcccgagtgcttcatctgtcttacatgcggaaccttcatcggggacggagatacatatacgctcgttgagcattccaagttgtactgtggtcactgctactaccagacagtggtgaccccagtcattgagcagattctgcctgatagtcctggatcacacttgccgcataccgtgaccctggtgtcaatccccgcgtcttctcatgggaagcgcggcctatccgtgtccatcgatcccccccatggccctccaggctgcggaaccgagcatagccatacagtgcgagtccagggggtagacccaggctgtatgtctccggacgttaaaaacagcatacacgtcggtgaccgcattctcgagatcaacgggacccctatccgaaacgtgccacttgatgaaatagacttgcttattcaagagacgtctcgactgttgcagctcacactcgagcacgacccccatgacaccctcggccacggactgggtcctgaaaccagtcctctcagctcacccgcctacacaccctctggtgaggccggcagctccgctcgccagaagcctgtgctccggagctgctcaattgacagatcccccggtgcgggttctctgggatcaccagcctctcagcgcaaagacctgggaaggagcgagtctctgcgcgtggtttgcaggccccaccgaattttccggccaagcgatttgattcatggagaggttctggggaagggttgtttcgggcaggcaattaaggtgacacaccgggagacaggagaggtcatggtcatgaaagagctgatcagattcgatgaagagacacagcggactttcctcaaggaagtgaaagtgatgaggtgccttgagcaccccaatgtgctgaagtttatcggggtcctgtacaaagataagcggcttaactttatcactgagtacattaaggggggaacccttagggggatcataaaatccatggactctcagtatccctggagccagagggtgagttttgcgaaagatatcgcctctggaatggcctacctgcattcaatgaatatcattcatagagatctgaacagccacaattgtctcgtgcgcgaaaacaaaaacgtggtggtcgctgatttcggacttgctcggctaatggttgacgagaagacacagcccgagggcctccgatcactcaaaaagcctgaccgaaaaaagcggtatactgtggttggtaatccgtactggatggcacccgaaatgatcaatggccggtcttacgatgagaaagtggacgttttcagtttcggaatagttctttgcgagatcattgggcgcgtgaatgccgatccagattatctgcctcgtactatggacttcggcctgaacgttagggggtttctggatcgctactgtccacctaactgccccccatccttctttcctatcactgtgcgctgctgcgatcttgacccagaaaagagacccagcttcgtgaaattggagcactggctggagactctgaggatgcaccttgccgggcatctgccactgggtccccagctggagcaactcgaccggggtttttgggaaacctataggaggggcgaaagtggattaccggcgcaccctgaagtacccgactag

SEQ ID NO: 127444 - DNA, 1944 bp, Artificial Sequence
  derived and/or modified sequence
atgcggctcaccttactgtgttgtacctggcgggaggaaagaatgggggaggaggggagtgaactaccggtgtgcgccagttgtggtcagaggatatatgatggtcagtacctccaggccctgaatgccgactggcacgccgactgctttaggtgctgcgattgctctgcctccttgtcacaccagtactatgaaaaggacgggcagctgttctgcaaaaaggattactgggcccggtacggggagagctgccacggatgctccgaacagatcaccaaagggctcgtcatggtcgcgggtgaactgaaataccaccccgaatgcttcatttgcctgacttgcgggacattcattggagacggtgacacatacactcttgtcgagcattctaagctgtactgtgggcactgctattaccagactgtggtgacccctgttatagagcaaatcttgccggattcccccggatcgcacctgccccatacggtcactttggtctcaatcccagcatcgtcccacggtaagcgggggctaagtgtcagcattgatcccccccacggacctccaggatgcgggaccgaacacagccatacagtgagggttcaaggcgtcgatccaggctgcatgtccccagatgtcaagaactctattcatgtgggggatcggatactcgagatcaacggtacacctatcaggaatgttcccctggacgagatcgacctcctgattcaagagacatctagacttctgcaactgacactggagcacgacccacacgatactttagggcacggcctgggccccgaaacaagtcctctgtctagccccgcttatacccccagtggtgaggcagggtcatcggccaggcagaagcccgtgctccggtcatgctcaatcgataggagccctggggccggctccttaggtagccccgcctcgcaaagaaaggacctgggccggtctgagagtctgagagtcgtgtgtcggccacaccggatcttccgcccctcagacttgatccacggagaggtattgggcaaggggtgttttggtcaggctatcaaagtgacgcatcgcgagacaggggaggtgatggttatgaaggaattaattcggttcgatgaggagacccagcggaccttcctgaaggaggtcaaagtgatgaggtgcctggagcatcctaatgtactcaaatttataggggtgctgtacaaagacaaaagactaaacttcatcaccgagtacataaaaggaggaaccctgcgggggattattaagagtatggacagtcaatacccatggagccagagggtatcctttgcaaaagacatcgcctcaggcatggcataccttcactcaatgaatataatccatcgcgatctcaattctcacaattgccttgttagagagaacaaaaacgtcgtggtggccgatttcggcctcgcacgtctcatggtagacgaaaagacacagcccgagggcttgcgcagcctgaaaaagccagatcgcaaaaaaagatacaccgtagttggcaatccttattggatggccccagaaatgattaacgggcgaagttatgatgagaaagtagacgttttcagcttcggcatcgtcttatgtgaaattattggacgtgttaatgccgaccccgactatctgccgcgcacaatggacttcggcttgaacgtgaggggatttctcgacagatactgcccccctaactgtcccccaagcttttttcccattacggtccgctgctgtgatcttgatccggagaaaaggccaagcttcgtgaaactggaacattggctcgaaacattgcggatgcacttggcgggacacctccctctcgggccacagctcgaacaactggacaggggcttttgggaaacttatcggcgcggcgagagcggtctcccagcccacccagaggttcccgactag

SEQ ID NO: 127445 - DNA, 1944 bp, Artificial Sequence
  derived and/or modified sequence
atgaggctgaccctgctgtgctgcacctggagggaggagaggatgggagaggagggcagcgagctgcctgtgtgtgccagctgtggccagaggatctatgatggccagtacctgcaggccctgaatgctgactggcatgctgactgcttccgctgctgtgactgcagcgccagcctgagccaccagtactatgagaaggatggccagctgttctgcaagaaggactactgggcccgctacggggagagctgccacggctgcagcgagcagatcaccaagggcctggtgatggtggccggggagctgaagtaccaccctgagtgcttcatctgcctgacctgtggcaccttcatcggagatggagacacctacaccctggtggagcacagcaagctgtactgcggccactgctactaccagacagtggtgacccctgtgattgagcagatcctgcctgacagccctggcagccacctgccccacacagtgaccctggtgtccatcccagccagcagccacggcaagaggggcctgtctgtgtccattgaccccccccacggccccccaggctgcggcacagagcacagccacacagtgcgggtgcagggcgtggaccccggctgcatgagcccagatgtgaagaacagcatccacgtgggggaccgcatcctggagatcaatggcacccccatcagaaatgtgcccctggatgaaattgacctgctgatccaggagaccagccggctgctgcagctgaccctggagcatgacccccatgacaccctgggccacggcctgggccctgagaccagccccctgagcagccctgcctacaccccatctggagaggccggcagcagcgcccggcagaagcctgtgctgcggagctgcagcattgacaggagccctggagctggcagcctgggcagccctgccagccagaggaaggacctgggccgctctgagagcctgcgggtggtgtgccggccccaccgcatcttccggcccagcgacctgattcatggagaggtgctgggcaagggctgcttcggccaggccatcaaggtgacccaccgggagactggagaggtgatggtgatgaaggagctgatccgctttgatgaggagacccagaggaccttcctgaaggaggtgaaggtgatgcgctgcctggagcaccccaacgtgctgaagttcatcggcgtgctgtacaaggacaagaggctgaacttcatcacagagtacatcaagggcggcaccctgcggggcatcatcaagtccatggacagccagtacccctggagccagagggtgtcctttgccaaggacatcgccagcggcatggcctacctgcacagcatgaacatcatccaccgggacctgaacagccacaactgcctggtgcgggagaacaagaatgtggtggtggccgactttggcctggcccggctgatggtggatgagaagacccagcctgagggcctgcggagcctgaagaagccagacaggaagaagcgctacacagtggtgggcaacccctactggatggcccctgagatgatcaatggccgctcctatgatgagaaggtggatgtgttctcctttggaattgtgctgtgtgagatcatcggccgggtgaatgctgaccctgactacctgcccaggaccatggactttggcctgaatgtgcggggcttcctggaccgctactgcccccccaactgcccccccagcttcttccccatcaccgtgcgctgctgtgacctggaccctgagaagaggcccagctttgtgaagctggagcactggctggagaccctgaggatgcacctggccggccacctgcccctgggcccccagctggagcagctggaccggggcttctgggagacctacagaagaggagagagcggcctgcctgcccaccctgaggtgcctgactag

SEQ ID NO: 127446 - DNA, 3219 bp, Artificial Sequence
  derived and/or modified sequence
cccggccgcccccagccccagccccgccgggccccgccccccgtcgagtgcatgaggttgacgctactttgttgcacctggagggaagaacgtatgggagaggaaggaagcgagttgcccgtgtgtgcaagctgcggccagaggatctatgatggccagtacctccaggccctgaacgcggactggcacgcagactgcttcaggtgttgtgactgcagtgcctccctgtcgcaccagtactatgagaaggatgggcagctcttctgcaagaaggactactgggcccgctatggcgagtcctgccatgggtgctctgagcaaatcaccaagggactggttatggtggctggggagctgaagtaccaccccgagtgtttcatctgcctcacgtgtgggacctttatcggtgacggggacacctacacgctggtggagcactccaagctgtactgcgggcactgctactaccagactgtggtgacccccgtcatcgagcagatcctgcctgactcccctggctcccacctgccccacaccgtcaccctggtgtccatcccagcctcatctcatggcaagcgtggactttcagtctccattgaccccccgcacggcccaccgggctgtggcaccgagcactcacacaccgtccgcgtccagggagtggatccgggctgcatgagcccagatgtgaagaattccatccacgtcggagaccggatcttggaaatcaatggcacgcccatccgaaatgtgcccctggacgagattgacctgctgattcaggaaaccagccgcctgctccagctgaccctcgagcatgaccctcacgatacactgggccacgggctggggcctgagaccagccccctgagctctccggcttatactcccagcggggaggcgggcagctctgcccggcagaaacctgtcttgaggagctgcagcatcgacaggtctccgggcgctggctcactgggctccccggcctcccagcgcaaggacctgggtcgctctgagtccctccgcgtagtctgccggccacaccgcatcttccggccgtcggacctcatccacggggaggtgctgggcaagggctgcttcggccaggctatcaaggtgacacaccgtgagacaggtgaggtgatggtgatgaaggagctgatccggttcgacgaggagacccagaggacgttcctcaaggaggtgaaggtcatgcgatgcctggaacaccccaacgtgctcaagttcatcggggtgctctacaaggacaagaggctcaacttcatcactgagtacatcaagggcggcacgctccggggcatcatcaagagcatggacagccagtacccatggagccagagagtgagctttgccaaggacatcgcatcagggatggcctacctccactccatgaacatcatccaccgagacctcaactcccacaactgcctggtccgcgagaacaagaatgtggtggtggctgacttcgggctggcgcgtctcatggtggacgagaagactcagcctgagggcctgcggagcctcaagaagccagaccgcaagaagcgctacaccgtggtgggcaacccctactggatggcacctgagatgatcaacggccgcagctatgatgagaaggtggatgtgttctcctttgggatcgtcctgtgcgagatcatcgggcgggtgaacgcagaccctgactacctgccccgcaccatggactttggcctcaacgtgcgaggattcctggaccgctactgccccccaaactgccccccgagcttcttccccatcaccgtgcgctgttgcgatctggaccccgagaagaggccatcctttgtgaagctggaacactggctggagaccctccgcatgcacctggccggccacctgccactgggcccacagctggagcagctggacagaggtttctgggagacctaccggcgcggcgagagcggactgcctgcccaccctgaggtccccgactgagccagggccactcagctgcccctgtccccacctctggagaatccacccccaccagattcctccgcgggaggtggccctcagctgggacagtggggacccaggcttctcctcagagccaggccctgacttgccttctcccaccccgtggaccgcttcccctgccttctctctgccgtggcccagagccggcccagctgcacacacacaccatgctctcgccctgctgtaacctctgtcttggcagggctgtcccctcttgcttctccttgcatgagctggagggcctgtgtgagttacgcccctttccacacgccgctgccccagcaaccctgttcacgctccacctgtctggtccatagctccctggaggctgggccaggaggcagcctccgaaccatgccccatataacgcttgggtgcgtgggagggcgcacatcagggcagaggccaagttccaggtgtctgtgttcccaggaaccaaatggggagtctggggcccgttttccccccagggggtgtctaggtagcaacaggtatcgaggactctccaaacccccaaagcagagagagggctgatcccatggggcggaggtccccagtggctgagcaaacagccccttctctcgctttgggtcttttttttgtttctttcttaaagccactttagtgagaagcaggtaccaagcctcagggtgaagggggtcccttgagggagcgtggagctgcggtgccctggccggcgatggggaggagccggctccggcagtgagaggataggcacagtggaccgggcaggtgtccaccagcagctcagcccctgcagtcatctcagagccccttcccgggcctctcccccaaggctccctgcccctcctcatgcccctctgtcctctgcgttttttctgtgtaatctattttttaagaagagtttgtattattttttcatacggctgcagcagcagctgccaggggcttgggattttatttttgtggcgggcgggggtgggagggccattttgtcactttgcctcagttgagcatctaggaagtattaaaactgtgaagctttctcagtgcactttgaacctggaaaacaatcccaacaggcccgtgggaccatgacttagggaggtgggacccacccacccccatccaggaaccgtgacgtccaaggaaccaaacccagacgcagaacaataaaataaattccgtactccccaccca

SEQ ID NO: 127447 - DNA, 2587 bp, Artificial Sequence
  derived and/or modified sequence
acaggccccgcctcggtccgcccctccgctcgctccccaagccgccgcggcgccgagccggtttccccgccggtgtccgagaggcgcccccggccgcccccagccccagccccgccgggccccgccccccgtcgagtgcatgaggttgacgctactttgttgcacctggagggaagaacgtatgggagaggaaggaagcgagttgcccgtgtgtgcaagctgcggccagaggatctatgatggccagtacctccaggccctgaacgcggactggcacgcagactgcttcaggtgttgtgactgcagtgcctccctgtcgcaccagtactatgagaaggatgggcagctcttctgcaagaaggactactgggcccgctatggcgagtcctgccatgggtgctctgagcaaatcaccaagggactggttatggtggctggggagctgaagtaccaccccgagtgtttcatctgcctcacgtgtgggacctttatcggtgacggggacacctacacgctggtggagcactccaagctgtactgcgggcactgctactaccagactgtggtgacccccgtcatcgagcagatcctgcctgactcccctggctcccacctgccccacaccgtcaccctggtgtccatcccagcctcatctcatggcaagcgtggactttcagtctccattgaccccccgcacggcccaccgggctgtggcaccgagcactcacacaccgtccgcgtccagggagtggatccgggctgcatgagcccagatgtgaagaattccatccacgtcggagaccggatcttggaaatcaatggcacgcccatccgaaatgtgcccctggacgagattgacctgctgattcaggaaaccagccgcctgctccagctgaccctcgagcatgaccctcacgatacactgggccacgggctggggcctgagaccagccccctgagctctccggcttatactcccagcggggaggcgggcagctctgcccggcagaaacctgtcttgaggagctgcagcatcgacaggtctccgggcgctggctcactgggctccccggcctcccagcgcaaggacctgggtcgctctgagtccctccgcgtagtctgccggccacaccgcatcttccggccgtcggacctcatccacggggaggtgctgggcaagggctgcttcggccaggctatcaaggtgacacaccgtgagacaggtgaggtgatggtgatgaaggagctgatccggttcgacgaggagacccagaggacgttcctcaaggaggtgaaggtcatgcgatgcctggaacaccccaacgtgctcaagttcatcggggtgctctacaaggacaagaggctcaacttcatcactgagtacatcaagggcggcacgctccggggcatcatcaagagcatggacagccagtacccatggagccagagagtgagctttgccaaggacatcgcatcagggatggcctacctccactccatgaacatcatccaccgagacctcaactcccacaactgcctggtccgcgagaacaagaatgtggtggtggctgacttcgggctggcgcgtctcatggtggacgagaagactcagcctgagggcctgcggagcctcaagaagccagaccgcaagaagcgctacaccgtggtgggcaacccctactggatggcacctgagatgatcaacggccgcagctatgatgagaaggtggatgtgttctcctttgggatcgtcctgtgcgagatcatcgggcgggtgaacgcagaccctgactacctgccccgcaccatggactttggcctcaacgtgcgaggattcctggaccgctactgccccccaaactgccccccgagcttcttccccatcaccgtgcgctgttgcgatctggaccccgagaagaggccatcctttgtgaagctggaacactggctggagaccctccgcatgcacctggccggccacctgccactgggcccacagctggagcagctggacagaggtttctgggagacctaccggcgcggcgagagcggactgcctgcccaccctgaggtccccgactgagccagggccactcagctgcccctgtccccacctctggagaatccacccccaccagattcctccgcgggaggtggccctcagctgggacagtggggacccaggcttctcctcagagccaggccctgacttgccttctcccaccccgtggaccgcttcccctgccttctctctgccgtggcccagagccggcccagctgcacacacacaccatgctctcgccctgctgtaacctctgtcttggcagggctgtcccctcttgcttctccttgcatgagctggagggcctgtgtgagttacgcccctttccacacgccgctgccccagcaaccctgttcacgctccacctgtctggtccatagctccctggaggctgggccaggaggcagcctccgaaccatgccccatataacgcttgggtgcgtgggagggcgcacatcagggcagaggccaagttccaggtgtctgtgttcccaggaaccaaatggggagtctggggcccgtttt

SEQ ID NO: 127448 - DNA, 1944 bp, Artificial Sequence
  derived and/or modified sequence
atgcggctgaccctgctgtgctgcacctggcgggaggagcggatgggagaagaagggtcagagctgccagtctgcgcgagctgtggacagaggatttatgacggacagtacctacaggccctgaatgcagattggcatgccgactgctttcgttgttgtgattgtagtgcttcactgtctcaccagtactatgagaaagatggtcagctgttctgtaagaaagactactgggctagatatggagagagttgtcatggatgctcagaacagatcacaaaaggtctcgtcatggtggccggtgaactaaagtaccaccctgagtgtttcatttgcctgacctgtgggacttttattggcgacggtgacacctacaccctggtcgagcatagcaagctgtactgtgggcactgttattatcagactgtggtgaccccggttatcgaacagatcctcccagactcaccagggtcgcaccttccacacacggtcactctcgtgagcatacccgcttcgtcacacggaaaacgcggcctatccgtttcgatcgacccccctcatggacccccaggctgtgggacagaacactcccacacagtgagggtgcagggagtggacccaggctgcatgagtccagatgtgaagaattctatccacgtgggggatcgtatactggagatcaatggcacgccaatccggaacgtgcccttggacgaaatcgacctgctcatccaggagactagcagacttctccagctcactctggaacatgacccacacgacacactgggccatggactgggccctgagacttctcccctctcctccccagcttacacccctagcggagaggccggctcttccgcacgccagaagcccgtgctgcgaagctgcagcatcgaccgctccccgggagccggcagcctggggtctcccgccagccagagaaaagaccttggaaggtcagagtcgctgagggtggtgtgtcggccacaccggatttttcgtccatcagatcttattcacggggaggtgttgggtaaggggtgctttggccaggctattaaggtaacgcaccgggaaaccggcgaagtaatggtgatgaaagaactcattcgcttcgatgaggagacacagcgaacttttcttaaagaggtcaaagttatgcgctgtctcgagcaccctaatgtgctgaagttcattggggtgctttacaaggacaagcggctgaactttattaccgaatacattaagggaggaacactgcgaggtattattaaaagcatggatagccagtacccttggagccaacgcgtgtcatttgctaaggatatagcatccggcatggcatatttgcattcaatgaatatcattcaccgcgatctgaactcacataactgcttggtacgtgagaacaaaaacgtggttgtggccgattttgggctggcaaggttgatggtggacgaaaaaacacaaccagaggggctgagatctctgaagaaaccggacaggaaaaaaagatataccgtggttggaaatccatattggatggctcccgagatgatcaatgggagatcatacgatgagaaagttgacgtcttttccttcgggattgtactctgcgagatcatcgggcgggtgaacgcagaccccgattatcttcccagaactatggacttcggtctaaatgtgcgcggcttcctcgataggtattgcccccctaattgcccgccttctttttttcctattaccgtgcggtgttgtgacctggaccctgagaaaagaccaagttttgtgaagttagagcattggctcgaaactctccggatgcatctggccggccacctgccactgggtcctcagctcgaacagctcgatcgtgggttttgggaaacctaccgaaggggagaaagcgggctgcccgcacatcccgaggtaccggattag

SEQ ID NO: 127449 - DNA, 1944 bp, Artificial Sequence
  derived and/or modified sequence
atgcggctgaccctgctgtgctgcacctggcgggaggagcggatgggcgaagaaggatctgaactacctgtctgcgcatcatgcggtcagcggatctacgacggacaatacctgcaggccctgaatgcagactggcatgcagactgctttcggtgctgtgattgttctgctagcctcagccaccaatactatgagaaagacggacaactcttctgtaaaaaggactattgggccaggtacggagaaagctgccacggatgtagcgagcagatcaccaaggggcttgtaatggttgccggggagctgaaataccatcctgagtgcttcatctgcctgacatgcggcacctttataggtgacggcgacacttacacactggttgagcatagtaaactctactgtggccactgttattaccagacggtcgtgacgcccgtgatcgagcaaatcttgcccgattcccctgggtcacacctgccacacaccgttacgttagtgtctataccagccagttcgcatgggaaacgaggactgtccgtgtcaattgacccaccccatggcccccccggttgcggcactgagcactcgcacaccgtgcgggtgcagggagtggaccctggctgcatgagtccagacgtcaagaactctatacacgtgggagatcggatactggaaatcaatggtacgccaatacggaacgtcccacttgatgagattgacctcctgatccaggaaacttctcgcctccttcaattgaccctggaacatgacccgcatgacacactggggcacggattaggccccgagacatccccgctctcttcccccgcctacactccatctggtgaggcgggcagctccgcccgccagaagcccgtcctgaggtcctgctcaatcgataggagccccggcgccgggagtctcggaagcccagcgtcacaaagaaaagacttgggcaggtcggaatctcttcgggtcgtctgtagaccccataggatattcaggccttcagatctgattcacggagaagttttgggcaagggatgtttcggccaggccattaaagtgacacaccgtgaaactggagaggtcatggttatgaaggaactgatcagatttgacgaagaaacacagcggacgtttttaaaagaggtgaaggtaatgcggtgtctcgaacaccccaacgttctgaaattcatcggagtactctataaggacaaacggctgaattttatcacggaatacataaagggcggcacattgaggggcatcattaagtctatggatagtcagtacccctggtctcagagagtttcattcgccaaggatatagctagtgggatggcgtaccttcactctatgaatatcatccacagagatctgaacagccataattgcctggtcagggagaacaaaaacgtggtcgtggccgacttcggattggcgagactcatggtggacgagaagacccagcccgaaggcctgcggagcctcaagaaacccgataggaagaaaaggtacactgtcgtcggaaacccctactggatggctcccgagatgattaacggcaggtcctacgacgagaaagtcgacgtgttcagtttcggcatagtgctctgcgaaattatcgggcgcgttaacgccgaccccgactatctgcccaggactatggactttggcttgaacgttcgagggtttctagacagatattgtcccccaaattgcccaccctctttttttccaatcacagttagatgttgtgatctggatcctgagaagcgcccttcctttgtgaaacttgagcactggctggagacccttcggatgcatttggctggacacctgcccctcgggccccagttggaacagctcgaccgagggttctgggaaacatatcgcaggggggaaagtggcctgccggcccacccggaggtgcccgattag

SEQ ID NO: 127450 - DNA, 1944 bp, Artificial Sequence
  derived and/or modified sequence
atgaggctgacgctgctctgttgcacttggagagaggaacgtatgggggaggaaggttcggagctgcctgtgtgtgcatcctgcggacagcggatctacgacgggcagtacctccaggcactcaatgctgattggcacgcggattgcttcaggtgctgtgattgttctgcttctctctctcaccagtactacgaaaaagatgggcagctgttttgtaagaaagactactgggcgaggtatggggagtcatgtcacggttgcagtgagcagattactaaaggcctggtgatggtggcgggtgagcttaagtaccaccctgaatgtttcatctgcctgacatgcgggaccttcattggggatggggacacttacactctggtggagcactcaaaactttattgcgggcactgttattaccaaacggtggtaactccagtaatcgagcagatcctgcccgacagtccgggaagtcacctgcctcacactgtgacactggtgtccattcccgcttcgagtcacggaaagaggggactgagtgtgagcatagatcccccacatgggccacctggatgcggaaccgagcactcccacacagttagggtacagggagtcgatcccggatgcatgagcccggatgttaagaactcaattcacgtgggtgacagaatccttgagatcaacggtacccccatccgaaacgttccactggacgagatcgatctgctgattcaggaaacttctcgtctcttacagctgactctagaacatgacccacatgacacccttgggcatggcctggggcctgagacatctccgctgagttctcccgcttacacgcccagcggtgaagccggatccagcgcgaggcagaaacctgtactgcgcagctgttccattgaccgctctcctggcgcaggctccctcggatcccctgctagccaacgaaaagacctgggcagatcagaaagtcttcgcgtggtatgcaggccacacaggatttttcgaccaagtgaccttatacatggggaggttctgggtaaggggtgttttggccaggcgattaaggtgacacatcgggaaaccggtgaggtgatggtcatgaaggagcttattcgcttcgatgaggaaacccagcggacgtttttgaaggaggtgaaagtgatgcggtgtctggaacacccaaacgtgctcaagttcattggcgtgctgtataaggacaagcgcttgaattttattacggagtacataaagggcggaactttgcgcggtataatcaaatctatggactcgcaatacccctggtctcaacgggttagcttcgctaaggatattgccagcggcatggcttacctacactctatgaacattattcacagggacctcaactcacacaactgtctggtgagggagaacaagaatgtggtagtggcagactttggcctagcgcgactgatggtggatgagaagacgcagcctgaagggctaaggtcattgaagaagcctgatcgcaagaaaagatacacggtggttggaaacccctattggatggcccctgagatgatcaacggcaggtcttacgacgaaaaagtcgatgtgttctctttcgggattgttctgtgcgaaataattggcagagttaatgccgacccagattatctgccgagaacaatggactttgggctgaacgtgcgcggtttcttggaccgatactgcccacctaactgtcctccgtccttcttccccataaccgtcaggtgctgtgacctggaccccgagaagaggccctcttttgtgaaactggaacactggctggagactttgcgcatgcacctcgccggtcacctcccgctggggcctcagttggagcaactcgacagggggttttgggagacctacagacgcggagaaagcgggcttcccgcacatcctgaagtgcctgactag

SEQ ID NO: 127451 - DNA, 1944 bp, Artificial Sequence
  derived and/or modified sequence
atgcgcctaaccctcctgtgctgcacatggagggaggaaaggatgggagaagagggtagtgaactgcccgtgtgcgccagttgcgggcagcgcatttatgatgggcagtatctgcaggccctgaatgcagactggcacgccgactgttttaggtgttgtgattgctctgctagcctctcccaccagtactatgagaaagatgggcagctcttctgtaaaaaggactactgggccagatacggcgagtcgtgccacggatgttctgagcaaattacaaagggcctggtaatggttgctggcgaactcaaatatcaccctgagtgttttatctgtctgacatgcgggacttttatcggcgacggggacacctataccctggtggagcattctaagctgtattgtggccattgttactaccagacggtggtgaccccggtgattgagcaaatactccctgactctcccggatctcatttgccacataccgtcacactggtttccattccagctagtagtcacggtaagcgaggcctgtccgtgtcaatcgatccaccacacggacctccagggtgcggcaccgagcattctcacaccgtccgagtgcagggggtggaccctggatgtatgtctcccgatgtgaaaaatagcatccatgtcggggaccggattctagaaatcaacggtactcctattaggaacgtccctctcgatgaaatcgatctgctcatacaggaaactagccgccttctgcagctcacattagagcatgatcctcacgacaccctcggacacggactgggcccagagacctctcctctatccagtcccgcatacacaccctcaggtgaggcaggtagcagcgcccgacagaagccggtgcttaggtcttgttcgatcgaccggtctcccggagcgggttcactgggttctcctgcttcccagaggaaggatctcggtcgcagcgaaagtttacgggtggtctgtcggccacaccgtatatttcggcctagcgacctgatccacggcgaagtacttggcaagggttgttttggccaggctattaaagttacacatcgggaaaccggtgaagttatggtcatgaaagagttaatcaggtttgacgaagagacacagcgaacgtttcttaaggaagtcaaggtgatgaggtgcctcgagcatccaaatgtgctcaagttcatcggcgtgctgtacaaagataagagactgaatttcataaccgagtatataaaaggcggtacattgagagggattattaagtcaatggattcccagtacccatggtctcagcgagtcagcttcgctaaggacatcgcctctggaatggcttatctgcattcgatgaacattattcacagggatctcaatagccataactgcctggtaagggagaacaagaacgtggtcgtagccgactttggtctggcgcgactgatggtagacgaaaagacacagcctgaaggactgaggtctctgaagaagccggacagaaagaaaagatatacagtggttggcaatccctactggatggcaccagaaatgatcaatggcaggtcctatgacgaaaaagtggacgtgttctccttcgggattgttctctgtgagatcattggacgcgtgaatgctgatccagattatctgccgaggacaatggacttcggccttaacgtgcgcggattccttgatagatattgtccacccaactgcccaccctccttctttcctattacagtaaggtgttgcgatctggatcctgagaaacgacctagcttcgtcaagctggagcactggctcgaaactcttaggatgcacttggccggtcaccttccgttgggccctcaacttgaacagttggatcggggtttttgggagacttatcggagaggggagtcgggactgccagcccaccccgaggtgccagactag

SEQ ID NO: 127452 - DNA, 1944 bp, Artificial Sequence
  derived and/or modified sequence
atgcgcctgacacttctgtgttgcacttggagggaggagcggatgggagaagagggctccgagctaccagtctgcgcttcctgcggacaacgaatatatgacgggcagtacctgcaagctctgaatgccgactggcacgcggactgctttcgctgctgtgactgttcagcctctctgagccatcagtattatgagaaagacggccagctgttctgcaagaaagactattgggctcgctatggggagagctgccacggctgttcagaacagatcaccaagggcctggtaatggtagcaggcgaacttaagtaccatcctgaatgctttatttgcctgacgtgtggcaccttcattggtgacggcgatacgtatacactagtggagcactcaaagctgtattgtggacactgctactaccagaccgtcgttaccccagttatcgagcagatcttacccgactctcccgggtcacatctacctcacacagtgacccttgtctctatccccgccagcagccacggcaaacggggtctgtcagtatccatagatcccccgcatggaccgcccggatgcggaactgagcattcccatacagtgcgcgtgcagggcgttgatcccggatgtatgagccctgatgtcaagaatagcatccacgtcggggacaggatccttgaaattaacggcacccccataaggaacgttcctctggacgagattgacctactcattcaggaaactagtaggctgctccaactgacactggagcatgatccccatgacacgctggggcatgggttaggccccgaaacgagccccctctcttcccctgcctacaccccctccggtgaagcagggtcaagcgcccggcagaagcccgtgctgagatcttgttccattgaccgatcacctggggccggatccctaggctctcccgctagccaacgaaaggacctgggacgaagcgagtcccttcgcgtggtctgtagacctcaccgcatatttaggccttccgacctcatccacggagaggtactcggcaaaggctgcttcggtcaggctattaaagtgacgcatcgagaaactggtgaggtgatggttatgaaagaattgatcaggttcgacgaggagacgcagaggacattcctcaaggaagtgaaagtgatgcgttgccttgaacaccccaatgtgctgaaatttatcggcgtgctgtataaagataaacggctcaactttattacggaatatatcaaaggtggcactctgcggggaataattaaatccatggactctcagtacccttggtcccagagggtgagcttcgccaaggacattgcttctggaatggcctaccttcactcaatgaatataattcaccgggacctgaacagtcacaattgccttgtaagagaaaacaaaaatgtagtggtggccgacttcgggctagcgcgcctgatggttgacgagaagactcagcctgagggtctgcggtctttaaagaaacccgaccgcaagaaacgttataccgtggtgggaaatccctactggatggccccagagatgatcaatggtaggagctacgacgaaaaagtggacgtattcagctttggcattgtactctgcgagattatcggccgcgtgaatgcagatccagactacttgcctcgcacaatggacttcggcttgaatgtgcggggattcctggatcgctattgccctcccaactgcccaccttcattcttcccaattaccgttagatgctgcgatttggatccagagaaacgaccatctttcgtgaagctggagcattggctggaaacacttcggatgcacctggcaggccacctgcctcttggcccccagttagagcagcttgacagaggcttctgggagacttaccgaaggggcgaatctggccttcctgctcaccctgaagtgcccgactag

SEQ ID NO: 127453 - DNA, 1944 bp, Artificial Sequence
  derived and/or modified sequence
atgcggctgaccctgctgtgctgcacctggcgggaggagcggatgggagaagaaggctcagagttgcctgtgtgcgcctcatgtgggcagcgaatctatgacggccagtatcttcaagccctgaatgccgattggcatgcagactgtttccggtgctgtgattgctcagcaagcttgtcacatcagtactatgagaaggacggacagttattttgcaagaaggactactgggcccggtatggcgaatcttgtcatggatgctcggagcagataaccaaaggtctagtgatggttgccggggaactgaaatatcaccccgaatgttttatatgcctgacttgcggcacttttattggcgacggagacacttatacgctggtggaacatagcaagctatactgcggccattgctactatcaaactgtggttaccccagtaatcgagcaaatcctaccagacagccccgggtcccacttaccccacacagtcaccctcgtctccatacctgcctccagccacgggaagcgaggactcagcgtgtcgattgatccgcctcacggcccccccggctgcggcacagaacatagtcatacagtgcgggtccagggtgtggatccaggctgcatgtcccctgatgtgaagaacagcatccatgtgggcgatagaatccttgagattaatggcacccccattagaaatgttcctttagacgagatcgacctccttatccaggaaacctcacggctactccagttaacactggaacacgacccccacgacacattgggacacgggctgggacctgagacttccccactctcaagccctgcttacacaccgtcgggggaagccggttccagtgcacgacagaaacccgtgcttcggagttgctccattgaccggtctccaggagccggctccctcggtagtccggcttctcagcggaaagatctgggaagaagtgaatctctgcgggtggtgtgcagaccccaccgcatttttcgaccaagcgatctcatccacggggaggtgttgggaaaaggctgcttcggtcaggccatcaaagtcactcaccgggagactggggaagtcatggtaatgaaagaactcatcaggtttgacgaagaaacccagcgtacgtttttgaaagaagtgaaggtaatgcgctgcctggaacacccgaatgtgttgaaattcattggcgtcctttataaagataagcgattaaatttcatcactgagtacataaaaggtgggactttgaggggaattataaagtcgatggacagccagtatccttggtcgcaaagggtgagcttcgcaaaagacattgcgtccggcatggcctacctccattccatgaacatcatccatcgcgacctgaacagccataattgtcttgttcgggagaataagaacgtcgtggtcgctgatttcggcctcgctagactgatggttgatgaaaaaacccagcctgagggcctccggtccttgaagaaaccagacagaaagaaaaggtacactgtggtgggcaacccttactggatggcaccagaaatgataaacggacggtcgtatgacgagaaagtggacgtcttcagcttcgggattgtgctgtgcgagatcattggacgggttaacgcagaccctgattatttgccaaggactatggacttcggcttaaacgtgcggggattcctcgaccgctattgccccccaaactgcccgccaagctttttccccataacagtccggtgctgtgacctagaccccgaaaagcgaccctcattcgtgaaattggagcattggttggaaacactgaggatgcacctggcggggcaccttcctctagggcctcagctggaacagctggatcggggcttttgggagacctatcgcagaggagagagtggactgcccgcgcacccggaggtccccgactag

SEQ ID NO: 127454 - DNA, 1944 bp, Artificial Sequence
  derived and/or modified sequence
atgaggcttactctgctctgttgcacgtggcgggaagagcgcatgggcgaggaagggagtgagctgcctgtctgtgcttcttgtggccagcgaatctacgacggccagtatcttcaggcccttaacgccgattggcatgcagactgcttccggtgctgtgactgttccgctagtttgagccatcaatattacgagaaagacggccagcttttttgtaaaaaggattattgggccagatacggggagtcttgtcatggctgcagcgagcagattaccaaagggctggttatggtggcgggtgagctgaagtaccaccctgaatgtttcatatgcctcacatgtgggacctttatcggcgacggagatacttatacactggttgagcattcgaagttgtattgtgggcactgttattatcagactgtagttacacccgtcattgaacaaatactgccagatagcccaggaagtcatctgccacacaccgtgacacttgtctctattccagcttccagccatggcaagcggggactctcagtgagtattgatccaccccacggaccgcctggatgtgggactgaacacagtcatacagtccgcgtgcaaggggtagaccctggctgtatgagccctgatgtcaagaactccatccacgtgggtgatcgcatcctcgaaattaacgggacgcccatccgaaatgtccccctggacgaaattgacctcctgatacaggaaacctcccgccttctgcaattgaccctggaacatgacccacacgatacactggggcatggcctgggacctgaaacgagccctctctctagccccgcatatacaccctctggcgaggctggctccagtgctaggcaaaagccagtcctgcgtagctgttccattgataggtcacccggagccggatccctgggaagccccgctagtcagcgcaaagatctgggcagatccgaatccctgagggtcgtctgtcgacctcatcggatcttccggccatcagatctcatccacggtgaggtgctgggcaaaggttgtttcggccaagcgataaaggtgacccaccgggagaccggcgaagtcatggtcatgaaggagctcatacgctttgacgaagaaacccaacgtaccttcctgaaagaggtgaaagtgatgcgttgcctggagcatcctaacgtcctcaaattcatcggggttctctataaagataagagactgaactttattaccgagtatataaaaggcggaaccctcagaggaatcattaagtctatggactcccaatacccatggagccagagagtatctttcgccaaagatatagcatctggtatggcctatctacacagtatgaacatcattcatcgagacctgaactctcacaattgcctggtgagagaaaataaaaacgtagttgttgccgacttcggtcttgcccgactgatggtggacgagaaaacacagcccgaaggcctccggagcctaaagaagccagaccgcaagaaaaggtacacagtggtaggcaatccctactggatggctcccgaaatgattaacggtaggagttacgatgaaaaagtagatgtcttcagctttggcatcgttctatgcgagattatcgggagagttaatgctgacccagactatctgccgcgaactatggactttgggctcaatgtcaggggcttcctggatcgttactgtcctcctaattgccctccctctttctttcctattacagtcaggtgctgtgacttagacccagagaagaggccctcctttgtgaaactggaacattggcttgaaactctccgaatgcatttggccggacatctgcccttgggacctcaattggagcagcttgatagggggttctgggaaacgtacagaagaggggagagtggtcttccagcccacccggaagttcctgattag

SEQ ID NO: 127455 - protein, 156 aa, Artificial Sequence
  derived and/or modified sequence
MMVLDKEDGVPMLSVQPKGKQKGCAGCNRKIKDRYLLKALDKYWHEDCLKCACCDCRLGEVGSTLYTKANLILCRRDYLRLFGTTGNCAACSKLIPAFEMVMRARDNVYHLDCFACQLCNQRFCVGDKFFLKNNMILCQMDYEEGQLNGTFESQVQ

SEQ ID NO: 127456 - DNA, 1274 bp, Artificial Sequence
  derived and/or modified sequence
cagcgggagacggccacgagattcccccatctctttgaatataattttagattgagattcagattaaatccgaggggaaaacactttatgaggctgaaagctgtgtcgttgccagagacagggttatgagctatcaaatgcaattacattaagacagattatactgggcaaattgagccatttagaaggtgagaatcaaagaaacggctctgatcctcttttcccccttctctctccctctccctctctctctaaattgcagttcgtagttccttccaattcggaggcacaaaagtaggtgagactgcttttgtatctgcgaagtgcttcactcctgaatgtaattctagctgagtgcaatctaggttaagagccggacaagcgggtaattagagcccgctagctgcccgaggaccggccgccccgccaaagcgcgccccgagtcggcgcccttctcccggccgagcctagctgcggctggacacggagcgcccgagatgatggtgctggacaaggaggacggcgtgccgatgctctccgtccagcccaaagggaagcagaagggctgtgcgggctgtaaccgcaagatcaaggaccgctatctgctgaaggcattggacaagtactggcacgaagactgcctcaagtgtgcgtgctgtgactgccgcctgggcgaggtgggctccaccctctacaccaaggccaacctcatcctgtgccgacgcgactacctgaggctctttggcaccacagggaactgtgctgcttgcagcaagctgatcccagccttcgagatggtgatgcgggcccgggacaacgtgtatcacctcgactgcttcgcctgccagctctgcaaccagagattttgtgtgggagacaaattcttcctgaagaacaacatgatcttgtgtcagatggactatgaggaagggcagctcaatggcacctttgaatcccaagttcagtaacgcccggcgcctggcctccaggcccgtctgtccatctgcccgcctgcccacctgcctggccggccagccagccactctaccagtgcaggctggccagccgctctcctgccacattagaacttctccgtcctcgatgggagggatggcccttcctcctccaccaccgcccgtctgtgtgtgacccctcctggggccaggccgggcctgtacagtctgtcttctgtatataaatgggaacatttattttatgagaaatgtaatgcgattttattactggcgtggattaaacttatgaatgtttccggg

SEQ ID NO: 127457 - DNA, 471 bp, Artificial Sequence
  derived and/or modified sequence
atgatggtgctggacaaggaggacggcgtgcccatgctgagcgtgcagcccaagggcaagcagaagggctgcgccggctgcaacagaaagatcaaggacagatacctgctgaaggccctggacaagtactggcacgaggactgcctgaagtgcgcctgctgcgactgcagactgggcgaggtgggcagcaccctgtacaccaaggccaacctgatcctgtgcagaagagactacctgagactgttcggcaccaccggcaactgcgccgcctgcagcaagctgatccccgccttcgagatggtgatgagagccagagacaacgtgtaccacctggactgcttcgcctgccagctgtgcaaccagagattctgcgtgggcgacaagttcttcctgaagaacaacatgatcctgtgccagatggactacgaggagggccagctgaacggcaccttcgagagccaggtgcagtag

SEQ ID NO: 127458 - DNA, 471 bp, Artificial Sequence
  derived and/or modified sequence
atgatggtattagacaaggaggacggtgtgcctatgctgtcagtgcaacccaaaggcaagcaaaagggttgtgcagggtgcaaccgaaaaattaaggatcggtacctgctgaaggccctggataagtattggcatgaagactgcttgaagtgcgcctgctgcgactgccggctgggagaagtcggatcaacactgtataccaaggctaatctgatattgtgcagaagagattacctgagactgttcggcacgactggcaattgtgccgcttgcagcaaactcattcccgcatttgaaatggtgatgagggcccgcgataatgtataccatttagactgttttgcatgccagttgtgtaaccaaagattttgtgtgggcgacaaattttttctcaagaacaatatgattttgtgccagatggactacgaagagggacaactgaacggaacattcgagagccaagtccaatag

SEQ ID NO: 127459 - DNA, 471 bp, Artificial Sequence
  derived and/or modified sequence
atgatggtgctggacaaggaggatggagtgcccatgctgtctgtgcagcccaagggcaagcagaagggctgtgccggctgcaacaggaagatcaaggaccgctacctgctgaaggccctggacaagtactggcatgaggactgcctgaagtgtgcctgctgtgactgccgcctgggggaggtgggcagcaccctgtacaccaaggccaacctgatcctgtgcagaagagactacctgcggctgtttggcaccactggaaactgtgccgcctgcagcaagctgatcccagcctttgagatggtgatgagggcccgggacaacgtgtaccacctggactgctttgcctgccagctgtgcaaccagcgcttctgtgtgggggacaagttcttcctgaagaacaacatgatcctgtgccagatggactatgaggagggccagctgaatggcacctttgagagccaggtgcagtag

SEQ ID NO: 127460 - DNA, 1279 bp, Artificial Sequence
  derived and/or modified sequence
agcgggagacggccacgagattcccccatctctttgaatataattttagattgagattcagattaaatccgaggggaaaacactttatgaggctgaaagctgtgtcgttgccagagacagggttatgagctatcaaatgcaattacattaagacagattatactgggcaaattgagccatttagaaggtgagaatcaaagaaacggctctgatcctcttttcccccttctctctccctctccctctctctctaaattgcagttcgtagttccttccaattctgaggcacaaaagtaggtgagactgcttttgtatctgcgaagtgcttcactcctgaatgtaattctagctgagtgcaatctaggttaagagccggacaagcgggtaattagagcccgctagctgcccgaagaccggccgcccctccaaagcgcgccccgagtcggcgcccttctcccggccgagcctagctgcggctggacacggagcgcccgagatgatggtgctggacaaggaggacggcgtgccgatgctctccgtccagcccaaagggaagcagaagggctgtgcgggctgtaaccgcaagatcaaggaccgctatctgctgaaggcattggacaagtactggcacgaagactgcctcaagtgtgcctgctgtgactgccgcctgggcgaggtgggctccaccctctacaccaaggccaacctcatcctgtgccgacgcgactacctgaggctctttggcaccacagggaactgtgctgcttgcagcaagctgatcccagccttcgagatggtgatgcgggcccgggacaacgtgtatcacctcgactgcttcgcctgccagctctgcaaccagagattttgtgtgggagacaaattcttcctgaagaacaacatgatcttgtgtcagatggactatgaggaagggcagctcaatggcacctttgaatcccaagttcagtaacgcccggcgcctggcctccaggcccgtctgtccatctgcccgcctgcccacctgcctggccggccagccagccactctaccagtgcaggctggccagccgctctcctgccacattagaacttctccgtcctcgatgggagggatggcccttcctcctccaccaccgcccgtctgtgtgtgacccctcctggggccaggccgggcctgtacagtctgtcttctgtatataaatgggaacatttattttatgagaaatgtaatgcgattttattactggcgtggattaaacttatgaatgtttccgggaggtta
